United States Patent Application Publication US 2024/0263153 A1 - sequence listing, part 2

SEQ ID NO: 2285 - protein, 548 aa, Unknown
  Description of Unknown: Integrase B2286 sequence
  PTHR30461:SF3,SM00857,G3DSA:1.10.10.2600,IPR036162,PF13408, PS51737,G3DSA:3.40.50.1390,IPR025827,IPR006119,IPR038109, PF07508,IPR011109,SSF53041,PF00239,PTHR30461, PS51736,Coil,cd00338
MPRKKKLQEVGGLRLVAYYRYSNGGQQTEQSIEGQRRDCEAYAKAHGYKIVHEYIDRHISGKSDSRPAFQQMISDSDSHLFDAVICWKTDRLARSRYDSIIYKTRLRRNGVKILYAAETVVDGPEGIIIEGLMESLAEYYSAELAQKLRRGQRESALKCIALGGNRSFGYDIGPDKHYCINEKQAPAVRYIFEQYAAGATAADIVRELTARGYRTSRGNPFNKNSICRIITNEMYLGVYKYADIRIEGGVPAMIDRELFNRCQTQLAFNRAHGGGKGAPRADYVLVGKLDCGLCGHAMKGASATGHTGSKHYYYTCTQHVEKKCPKTSIEKNYLEQVIVDGVAKYVLTPEKISQIVDCMMELQAKEQEPKGNPEKDALEAELAECRRKQNNILEAIEEGGSARLAARLRTLEEQEAQLTFALGEINNAPTPPQFSREALTFMFEQFRREEDEVDEEYRRRILDTFVSSILLYEDRAEVKFNITDQKTGDFERVILPISANKKPPEDDDITSNSEGSTALRLVEHQGVEPWHRSPGLSHFELIFEKAIW

SEQ ID NO: 2286 - protein, 548 aa, Unknown
  Description of Unknown: Integrase B2287 sequence
  cd03768,PTHR30461:SF3,SM00857,G3DSA:1.10.10.2600,IPR036162, PF13408,PS51737,G3DSA:3.40.50.1390,IPR025827,IPR006119, IPR038109,PF07508,IPR011109,SSF53041,PTHR30461, PS51736,Coil,PF00239
MKVAIYSRKSVFTGKGESIENQIEMCKEYFSRLNQNNVEYFIYEDEGFSGGNINRPRFQQLLKDIKKNSFDALICYRLDRISRNVADFSTTLELLQEHNVDFISIREQFDTSTPMGRAMVYIASVFAQLERETIAERIRDNMLQLSKTGRWLGGVCPLGFTSEKITYVDSEYNERSMFKLSPLEEEMNVVRFIFSKYLATSSIHMALKELLASNIKGKHGGDFASMSLADILKNPVYVQSDSSIKEYYESLGVNFFGEPNGCGIMLYNKKNSKGKLRDMSEWIAAVGKHKGIISSSDWLKVQYSLDRNSKKNNPRQGTSAKALLSGVLKCSICGAPMRVCYGRLRKDGERNHYYMCTMKAHSCKSRCQNPNAKGLELEQEVINRLINYNEETLLRKLTSYADKLKSSTPNDMIKNIDKSIDEKKAEMDTLMSQLGKTNNPATQNFILKKADSLSNEIMDLENKLNGIHKKKEQNSIEMRNIEIIMSSFSEFTKLCSTIKDVSNIEDENIKIALRNLINRLVSRISYNGFTKEVVIDIMGSQENCSPSG

SEQ ID NO: 2287 - protein, 548 aa, Unknown
  Description of Unknown: Integrase B2288 sequence
  cd03768,PTHR30461:SF3,SM00857,G3DSA:1.10.10.2600,IPR036162, PF13408,IPR025827,G3DSA:3.40.50.1390,PS51737,IPR006119, IPR038109,PF07508,IPR011109,SSF53041,PTHR30461, PS51736,Coil,PF00239
MIAAIYSRKSKFTGIGESIDNQIEMCKEYAKTHLSDKNITDFLVYEDEGFSGGNTNRPEFQRLISDAKANKFNILICYRLDRISRNVADFSGTLETLQKHDIDFVSIKEQFDTTSPMGRAMIYISSVFAQLERETIAERIRDNMTELAKTGRWLGGVAPVGFRAEQIKCLDENMKERKLMKLVPVPEELEIVKTIYNKYLELKSLSAVETWTLQNNMTTKRGCNFNKSNLRTILTNTAYVKANEKVIHYLESLGITVCGKVNNISGLLTYNKQKTVYGDSGEIKRLFRDKTEWIAAVSKHDGIIEPDDWLKVQKIRKENKDKFPNADKSHTALFSGKLKCAKCGSKMQVTYGHVSKETGKRLYYYRCTLRYWSKNVRCDCKNASANEIDGVVKEALKDFSKNKENLLKTLSQNIKKASKDTNFEDKKTSLNNKLKENESKIDKLLDKFALDDSIQDLLLKKIKALKEENEKIKQEIDSLTADELKENEDELNLDLIRMLLNKCSMIDSLTNDEIKEISNALIEDILWNGDTGDLTINFIGSGESKKKQ

SEQ ID NO: 2288 - protein, 548 aa, Unknown
  Description of Unknown: Integrase B2289 sequence
  PTHR30461:SF3,SM00857,G3DSA:1.10.10.2600,IPR036162,PS51737, G3DSA:3.40.50.1390,IPR006119,IPR038109,PF07508,IPR011109, SSF53041,PF00239,PTHR30461,PS51736,Coil, cd00338
MYKEYPTFYYYDTREYGRKSRTDDPLLSTEEVLEKHSKIIEEYAIKYLGGPIPPENKYMEVGSGESLKDRPEITRLLKDIENPAVKAIIVVDVQRLSRGDLEDAGRLIRLLRYTNTYVITPMKIYDLRDEYDRDAFERELKRGNEYLEYFKKIQARGKLLSVKEGNYVGSTAPYGFDRIEKFEANGKKSYYTLVERKDQADVVRMIFNWYCEEDIGVTAICRRLENIGAKTKTGCKTWKPSIIFSILENHHYIGCTRWNWRKTVKIIEDQEIKKLRPKAKVDEFLLFEGKHDGIISEEQFNKAREIRGKRHRTRRDLTLKNPFSGIMFCKKCGHKIGYNTYTRNGVEYAPPKLVCNNQVHCKTGSVNFQEVFDYVCKTLRDCIEDFEVRIENDQDDSFKLHRDLVERLEKQLKDLEKKELDQWDAQYDPDPNKRLPQHIFAKLNEKVLKEKEEVNKALNKAKDSMPKHVDYREELMKTTDALRVLEDHELDAKTKNQYLKTVISKIVYERDPNVRISKNNAEKYGFEISKGLRYYTPPYKITIELKCD

SEQ ID NO: 2289 - protein, 548 aa, Unknown
  Description of Unknown: Integrase B2290 sequence
  PTHR30461:SF3,SM00857,G3DSA:1.10.10.2600,IPR036162,PF13408, PS51737,G3DSA:3.40.50.1390,IPR025827,IPR006119,IPR038109, PF07508,SSF53041,IPR011109,PF00239,PTHR30461, PS51736,Coil,cd00338
MKKFPIDLSCLTEEEISQFQEDPYTLYNGDQDVALYLRYSSTGQSDQSIEGQLRDCRAFCKANHYRIVAIYVDRATTAHKDVEKRVHLMEMVADSAKQNWEYVIVWKLDRFARNRNDSAIMKMRLRKNGVKVLSATEHLTDSPESIILESVLEGMAEFFSAELSQKVTRGMRESALKCHSVGGHIPLGYKVENHKLVVNPDTAHIVQEAFSLYANGESVADICRKFNSAGYKTAKNTEFNRSSFKAMFRNTRYIGTYTYKDIVIENGIPAIIDKELFETVQRRLSKTATAPARGKAKVDYLLSGKLFCGHCGASMNGESGAGRHGKVYHYYSCYTKKRKLGCDKRPLKKDYIEGIVARDALNLLTDQLIDEIADMAIRQSEQDLINDTHIPQLTAQLSEVEKSIMNITAAIEKGIASETLMNRLVQLEHEKKTLNKEIKAEEKFVYRIDRDQIVFWLSQFKYGNIEDEDFRRRLIDLLVNSVTVWDEPDGYKITTAYNLTSCKTKTFRVEKNPAAEEATGFDFGESECTKSPRNRLISRTFAFHKFRF

SEQ ID NO: 2290 - protein, 548 aa, Unknown
  Description of Unknown: Integrase B2291 sequence
  PTHR30461:SF3,SM00857,G3DSA:1.10.10.2600,IPR036162,PF13408, PS51737,G3DSA:3.40.50.1390,IPR025827,IPR006119,IPR038109, PF07508,IPR011109,SSF53041,PTHR30461,Coil, PS51736,cd00338,PF00239
MKKFPIDLSCLTEEEISQFQEDPYTLYNGDQNVAIYLRYSSTGQSDQSIEGQLRDCRAFCKANHYRIVAIYVDRATTARKDVEKRVHLMEMVADSAKQNWEYVIVWKLDRFARNRNDSAIMKMRLRKNGVKVLSATEHLTDSPESIILESVLEGMAEFFSAELSQKVTRGMRESALKCHSVGGHIPLGYKVENHKLVVDPDTAHIVQEAFSLYANGESVADICRKFNSAGYKTAKNTEFNRSSFKAMFRNTRYIGTYTYKDIVIENGIPAIIDKELFETVQRRLSKTATAPARGKAKVDYLLSGKLFCGHCGASMNGESGAGRHGKVYHYYSCYTKKRKLGCDKRPLKKDYIEGIVARDALNLLTDQLIDEIADMAIRQSEQDLINDTHIPQLTAQLTEVEKSITNITAAIEKGIASETLMNRLVQLEHEKKTLNKEIKAEEKFVYRIDRDQIVFWLSQFKYGNIEDEDFRRRLIDLLVNSVTVWDEPDGYKITTAYNLTSCKTKTFRVEKNPAAEEATGFDFGESECTKKPAKFARIWQVFCIFRSN

SEQ ID NO: 2291 - protein, 547 aa, Unknown
  Description of Unknown: Integrase B2292 sequence
  PTHR30461:SF3,SM00857,G3DSA:1.10.10.2600,IPR036162,PF13408, IPR025827,PS51737,G3DSA:3.40.50.1390,IPR006119,IPR038109, PF07508,SSF53041,IPR011109,PTHR30461,Coil, PS51736,cd00338,PF00239
MVKKKLRAVFYARVSTEEEKQLNALEKQIQENRDVIISNGWELVDEYIDEGKSGTTTKRRSDYKRMLEDMAEDKFDIVVCKDQDRLQRNTLDWYLFVDRLITNEIQLYFYLENKYFRSNEDALITGIKAIIAEEYSRNLSKKLNNSNKRRIEKALQTGEVSAMGNGKSLGYKIVDKKWVQVPEEIELCKIIWDKYEEFDSIRKVRDFVNDAGYRNSVGKPFTSESIARIIKNEKAKGVLVMGRFHHDFDKKKIVKRSDDEVFRIEIPELAYVSAERFDRVNAHLKSKTNGKRGKRSGSDPLSGKIFCSKCGSVYWKHQSNGYYNWFCSQKYAKGDVACKGSGTVTTVRIRKIYAELTNNLEVNREAVKGSLLKWLQSLKNSLTDEKANNSTLKEIERQEKRKNKLTEAFMDEIISKEDYKAKYAELERSLEELKLKIQPVEENEDVKDIEKVIANIDEEIDAYIKSTGFEDSKIDFLIEHTQRITVNDKHLIIELDLLAGAIITGKDFLLFVHSNMPQHHGPKHLHPSGPQTAPRCCFRDRFSCDQP

SEQ ID NO: 2292 - protein, 547 aa, Unknown
  Description of Unknown: Integrase B2293 sequence
  PTHR30461:SF3,SM00857,G3DSA:1.10.10.2600,IPR036162,PF13408, PS51737,IPR025827,G3DSA:3.40.50.1390,IPR006119,IPR038109, PF07508,IPR011109,SSF53041,PF00239,PTHR30461, Coil,cd00338
MGKRVCCLYRVSTLKQVEKDDIPMQKQRCHEFAAQMGWDIVREFSEKGVSGFKVSAKQRDAIQEIQREAALNTFDILLVFMFDRLGRRDDETPFIVEWFVNNGIEVWSAEEGQQRFDNHVDKLLNYIRYWQASGESIKTSIRTKTRLGQIVMEGRFRGGYAPYGYQLVKKGRMGKKNRELFDIEVNPMEAAAVRRIFELADQYGYGGRKTSTTLKEEGFINLRTSEPFHYSTIQNILINIAYTGVLRSGESVSEIFPELQIITPEQFQRVQKGREQRSADYLAKCAAAYGTETITLKDGSEAEASRPIRSYPRKNTGSALLSGNVYCGHCGGRIFASTARKTHHPTDGGTGRVAIYKCYNRTQHKGNCDGPTTYRAEKVDAVVSKLIRDILQKAGAVSEYDIVQNQIGATASDLQQQIRQAKLELSKKHIEQGRWEGLMLDSLDGKCPFTPEQVKSRLDSVKEAMTSLTASIESLETRLADSDRLTQELKEQHQQLLSWAEMFDNATPAERKLIASHLIRAVTLTRGYGIQIDFNISEAQYLNGMEL

SEQ ID NO: 2293 - protein, 547 aa, Unknown
  Description of Unknown: Integrase B2294 sequence
  PTHR30461:SF3,SM00857,G3DSA:1.10.10.2600,IPR036162,PF13408, IPR025827,G3DSA:3.40.50.1390,PS51737,IPR006119,IPR038109, PF07508,IPR011109,SSF53041,PTHR30461,PS51736, cd00338,PF00239
MARSKRNEYSSAEQIGVIYARYSSHNQKEESIEQQIAECSDFAAKNGIRIVGIYADKAVSGRSDRRPNFQRMMRDAEKRQFQIVIAYKSNRIARNMLNALQYEARLDLLGIKTLYAKEEFGNTAAGRFALRTMMNVNQFYSENMGEDIKRGMVDNANECKVNGMLPLGYVKSKEGKYAIAPDEAAVVREIFDSVLKDVPVAEIARSLNQRGIRTKLGREWNKNSFHIMLKNDNYIGVYRHSGVVVEGGIPPILEKEVFAAVQEKLANKKKTAGRRSANGEYLLTGKLFCGYCGSYMIGVSGTGENGTVHNYYQCQKRHAEGRCEKKNVRRDFIEKLIARLTQDYILQDDTIEWIADSTMSFQAMARRESGVAQLERDLADNRKVAKNIMAAIEQGIITETTKARLLEVEGTIHDLERSLSIAKAAAQPVERERVVFSLEQMREGNVGSKEHQKKLIDTFVKSVTLWDDRIQIDYYHTPGKHKFSYSLEELTSKAENESNASDVRTDSLELHHKRVIRTQYGDGEIRITAFGFVFLCPLPSSKKEADV

SEQ ID NO: 2294 - protein, 547 aa, Unknown
  Description of Unknown: Integrase B2295 sequence
  PTHR30461:SF3,SM00857,G3DSA:1.10.10.2600,IPR036162,PS51737, G3DSA:3.40.50.1390,IPR006119,IPR038109,PF07508,IPR011109, SSF53041,PTHR30461,PS51736,cd00338,PF00239
MRKIIKIEPTEPVLPRRKRVAAYARVSMECERLMHSMSAQISYYSELIQKNPEWEYARVYADNFISGTETKKRQEFQRMISDCEKGLIDIILCKSISRFARNTVDLLETIRHLKDIGVEVRFEKENINSLSGDGELMLTILASFAQEESRSLSENVKWGIRKRFEKGDPCNRNPILGYEWVDDKLVVVPEEAEIVKRIFRNFLDGKSRLETERELNAEGITTKRGYRWIDSNIKVILTNITYTGNMLLQKEYITDPITKHRKKNNGELPKYYVENTHEAIIDMETFRWVQEEMERRKKLGPLANKSLNTCCFTGKIKCPFCHKSYMHEIRTDRGYAEYWLCGSRKIKGGRCTVGGSINHKHLQETCAKVLGLQEFDESVFLERVDVIYVPKRETLEFHLKDGTVVTEACKNTGHQDCWTEERRAATSLKRRNGKRPNRADMTCFSKVIKCVRCGCNFRKGTRTSANGDKVSHWRCSEHKGCNSASLRDDLLRTMAAQVLSIDAFNEEEFERRIDHIDVEEDRLKFYFRDGHSVTEHWPIPRRKKCQK

SEQ ID NO: 2295 - protein, 547 aa, Unknown
  Description of Unknown: Integrase B2296 sequence
  PTHR30461:SF3,SM00857,G3DSA:1.10.10.2600,IPR036162,PF13408, PS51737,G3DSA:3.40.50.1390,IPR025827,IPR006119,IPR038109, PF07508,IPR011109,SSF53041,PF00239, PTHR30461,PS51736,Coil,cd00338
MEAATTTLERRVREIPPTRKPEELLRNYDGKMRVAAYCRVSTDSEEQLNSYEAQKTYYTQKIQDNPDWEMAGIYADEGISGTSLKKRAEFNKMITACKRGRIDFIITKSLSRFARNTVDCLDTVRLLKANGIGVYFEKENINTLTESSEFLVTLFSGFAQAESESLSKNVAWGKEKSAKAGNVHFQYKKMLGYRKGEDGQPEIMPEEAAIVRRIYRRYLDGCTLGKIKRELDEDGIPTAQGVECWSPAIIHNILTNEKYIGDALLLKTYVTDCISQKVRKNRGERVMYYVENNHPAIVSRETFDLVRKEMTRRSSKRKVLQKSGKTELGKYSGKYALTELLVCGECGSPYKRVTWARDGKKRIVWRCVSRLEFGTKYCHVSPTLDEGKLHHAILDAMNEYAAIRQEVCPDVLAMVEEAKQALTQAGTKLLTLKRRLDEVSHEQADLLDSLLANMADADLNARMKALTDEKASLKEQILEAQQEEVGLEEQVAKRQQMWDSLIECSEGYTEFDDEFIRQIIQKITVEDVDTIRIQFRDSDVVLEQGLQ

SEQ ID NO: 2296 - protein, 547 aa, Unknown
  Description of Unknown: Integrase B2297 sequence
  PTHR30461:SF3,cd00338,SM00857,G3DSA:1.10.10.2600,IPR036162, PF13408,PS51737,IPR025827,G3DSA:3.40.50.1390,IPR006119, IPR038109,PF07508,IPR011109,SSF53041,PTHR30461, PS51736,Coil,PF00239
MKAVIYARYSSDSQREESIEGQLRECTEYAERNGITILRSYIDRALSARTADRPEFQNMIKDSEQKLFDVVLIWKLDRFSRDRYDSAHYKRILKKNGVKVVSVKENISDGPEGIILESMLEGYAEYYSAELSEKIHRGQKENALKGRNNGGGIPLGYLLDKKEQKLVLDPVTAPLVREIFQRYADGEIVRTIVEDFNRRGLKTKSGKPFSPNSFNRILKNRKYIGEYRYQDVIIPSGVPAILSDDVFYQVQARLEKNKRAPATAKADVDYLLTTKLFCGLCERMMIGESGTSHTGDKHYYYKCAGAKRKLGCKKKSVKKDFIERAAVILTVNRVLRDEEISRIADSILALQNSEDTTIPALKKQLADTERGIENMLNAIQKGVLTSSTKERLEALEKQRDNLKIAVLQAELQKPKYTKEQIVSWIGQFKYGDVNSREYQKRIIDTFVNSLYLFDDRLVITYNFKGGTEIITLKDVEAVYGSDLKAMSPPKRKTRSHVGFWSFLLSMRVFGLYDFAKCHRILQFVCIICRKNAHGNAHENRTTCPGEG

SEQ ID NO: 2297 - protein, 547 aa, Unknown
  Description of Unknown: Integrase B2298 sequence
  PTHR30461:SF3,cd00338,SM00857,G3DSA:1.10.10.2600,IPR036162, PF13408,IPR025827,PS51737,G3DSA:3.40.50.1390,IPR006119, IPR038109,PF07508,IPR011109,SSF53041,PTHR30461, PS51736,Coil,PF00239
MAKKKATANTSYSAGTRAVIYARYSPGPNQREESIEGQIRECKEIAAKNGLMVIHEYIDKRLSGTRDDRPDFQRMLRDADRGLFDVLLVWKNDRFSRNRYDSAISKRRLKRAGVKIMYAKEHIPDGPEGIILESLLEGLAEYYSANLAQNIRRGQLENALEGKFIGGTIPLGYKLDTEKRYVIDPETAPLVREIFKRYVDGEAIIHICDDLNARGYQTARKKAFNRSSLHRILANEKYIGVYRFEDIEHKDAVPRLISDELFQAASLRAIKNKKSRRTIQAGQVDYLLTGKLFCGHCGETMGGSWGTSKSGTRHYYYVCNGKKTKKSACHKKAERKEDLEKLVVDVVIKNVLCNQAVVDFIIDRCMQIQEQDTDTSAADGLRRELADAEKRLKNLMTAIESGIITATTKARLVELEERCATLKQGIAEAEIRPPKFSREQLEFIFEKYQNRDMDDLSFIRDVIDTFVHAVYVYDNKLLITFNYSGDNTVEIPLSEIEKSVDSAGSQVFDFYGINSTIPKKLITGIIHCNQLFYFPILIILRPHRASP

SEQ ID NO: 2298 - protein, 547 aa, Unknown
  Description of Unknown: Integrase B2299 sequence
  PTHR30461:SF3,SM00857,G3DSA:1.10.10.2600,IPR036162,PF13408, PS51737,G3DSA:3.40.50.1390,IPR025827,IPR006119,IPR038109, PF07508,SSF53041,IPR011109,PF00239,PTHR30461, PS51736,Coil,cd00338
MRDSMRGRIKYCDASDGDSTLGIVYARYSSHNQKEESIEQQVDECMAFAKANNIEIVHVYADKAVTGKTDNRREFQRMMRDAEKKQFQVVIAYKSNRIARNMLNALQYEARLDMLGIKTLYAKEEFGNTAAGRFALRTMMNVNQFYSENMAEDIRRGMADNAAACKVNGALPLGYVKGSDGRYAINPQEAAIVREIFEKYLSGVTCADIAHDLNMRGVKTKAGNAFNKNSFHRMFKNDAYIGVYRHSGVVKEDGIPPIIKKEVFAAMQEKLVTKKNPIGRHRENGDYLLTGKLYCGYCGSYMVGVSGTGKNGTLHHYYQCQQRRVEKNCQKEHVRRDWLEQIVAEYTQAYILQDEIIEWIADSAVSFQAQARRSSNISAIENELADKRKATKNIMAAIEQGIFTETTKNRLLELEANIKELERSLLLARATEQPVEKERIIFTLESLREGNIESKEYQRKLIDTFVKAVYLWDDKIRIEYYHTTRKHSSTYPIKKEDVSNVETEDSVRTSSPQLHHRRAIRTPCGDGEILIADFGIVLLCPLPRGQK

SEQ ID NO: 2299 - protein, 547 aa, Unknown
  Description of Unknown: Integrase B2300 sequence
  PTHR30461:SF3,SM00857,G3DSA:1.10.10.2600,IPR036162,PF13408, IPR025827,PS51737,G3DSA:3.40.50.1390,IPR006119,IPR038109, PF07508,IPR011109,SSF53041,PTHR30461,Coil, PS51736,cd00338,PF00239
MARKKNIAAGLDAVIYARYSSHNQREVSIEQQIAECTKHAAALGLRIVGTYEDRAISGKTDNRPRFQQMMRDAEKGKFQAVVAWKSNRIGRNMLQAMVNEAKLDDYGVKVFYAEEDFDDTAAGRFALRNMMNVNQFYSENMAEDITRGLYDNASKCMANGRQPLGYKRGEDGRVVLDEANAAVVREIFTRVAAGDLFVDIARDLNAQGIKTSKGANWNKGSFQSICQNERYRGIYIYGDVRVADGIPRIVSDDLWYRVQEAMRMKKNPVGTRHRVGAEDYLLTGKLRCGHCGSYMTGVSGTSRNGELHYYYTCQKRRTEHACDKKNIRRDVIEPAVAQAIKMYCLTDDVIAWIADRTVEYWEKHDNDLQIEALEQQLEENKKATSNMLKAIEMGIITEATRTRMVELETEQSRLSVQLNAAKEDVVKIDREQIISYLELLQQGDIHDRDFQMELFKNFLVAVYVYDDNRMKLVFSCMGDQNCVEIPLETGEDPPDGGLSPDAKMFVLTPDSSTQKALYFVGSAVLFFLHLRTLTMQSVWPYRRSNPR

SEQ ID NO: 2300 - protein, 547 aa, Unknown
  Description of Unknown: Integrase B2301 sequence
  PTHR30461:SF3,IPR036162,PS51737,IPR011109,PTHR30461, PF00239,G3DSA:1.10.10.2600,IPR006119,SSF53041,cd00338, SM00857,IPR025827,IPR038109,PS51736,mobidb-lite, PF13408,G3DSA:3.40.50.1390,PF07508,Coil
MKKFPIDLSCLTEEEISQFQEDPYTLYNGDQNVAIYLRYSSTGQSDQSIEGQLRDCRTFCKANHYRIVAIYVDRATTARKDVEKRVHLMEMISDSAKQNWEYVIVWKLDRFARNRNDSAIMKMRLRKNGVKVLSATEHLTDSPESIILESVLEGMAEFFSAELSQKVTRGMRESALKCHSVGGHIPLGYKVENHKLVVDPDTAHIVQEAFSLYANGESVAAICRKFNSAGYKTAKNTEFNRSSFKAMFRNTRYIGTYTYKDIVIENGIPAIIDKELFETVQRRLSKTATAPARGKAKVDYLLSGKLFCGHCGASMNGESGAGRHGKVYHYYSCYTKKRKLGCDKRPLKKDYIEGIVARDALNLLTDQLIDEIADMAIRQSEQDLINDTHIPQLTAQLSEVEKSITNITAAIEKGIASETLMNRLVQLEHEKKTLNKEIKAEEKFVYRIDRDQIVFWLSQFKYGNIEDENFRRRLIDLLVNSVTVWDEPDGYKITTAYNLTSCKTKTFRVEKNPAAEEATGFDFGESECTKSPRNRQECVDKEVSRKH

SEQ ID NO: 2301 - protein, 547 aa, Unknown
  Description of Unknown: Integrase B2302 sequence
  PTHR30461:SF3,SM00857,G3DSA:1.10.10.2600,IPR036162,PF13408, IPR025827,G3DSA:3.40.50.1390,PS51737,IPR006119,IPR038109, PF07508,SSF53041,IPR011109,PTHR30461,PS51736, cd00338,PF00239
MEKKMWKIEQKVTEISKRRRVAAYARVSVESERMQHSLSAQISYYSSLIQKNPAWEYAGVYADYGITGTKIIKRKEFQRMLADAEARKIDIILTKSIQRFARNTVDLLKTVRHLKEIGVEVWFEKENIRSLSGDGELMLTILASFAQEESRSISDNIKWRFQKKYEKGIPHAKFFIYGYRWKDGELVIQKEEAAIVRRVFKGYLAGKTRRDIQRELANIGAHTMYGNLFQDSTIKQMLQNPVYKGNLVIQKTFVIDPITKHQVINHGEKDKYVVENHHEAIIDTATFNQVQKEMAWRKEAGRQRGGYARNFLNISCFTGIIKCGICGKSYIHNIRKYKGKPSEYWSCLSNKGKAEKRCGAYGAIPQPALERACMSALEMATFDKTKFLQKVEKIVVPAYHSLLFYLKDGKVIKQSWKSTALKDMWTEKRKEQVRQRMVQYRKSGLSSRYSAFSERIFCPTCDVKFVRCLETRKNRRVAYWRSRNKHKCVHTSGIQEDWLKKTAAALLGESTFDEQKFREQVEWIEVQKNRTLLFRFYSRENKEVQLP

SEQ ID NO: 2302 - protein, 547 aa, Unknown
  Description of Unknown: Integrase B2303 sequence
  PTHR30461:SF3,cd00338,SM00857,G3DSA:1.10.10.2600,IPR036162, PF13408,PS51737,IPR025827,G3DSA:3.40.50.1390,IPR006119, IPR038109,PF07508,IPR011109,SSF53041,PTHR30461, PS51736,Coil,PF00239
MARKKNIAAGQNAVIYARYSSHNQREVSIEQQVRECMKHAAELGLHVVGTYEDRAISGKTDKRPNFQRMMRDAEKGKFQAVVAWKSNRIGRNMLQAMVNEAKLEDCGVKVFYAEEDFDDTAAGRFALRNMMNVNQFYSENMAEDITRGLYDNASKCMANGRQPLGYKRGEDGRVVLDDANAAVVREIFTRVAAGDLFVDIARDLNAQGIKTSKGANWNKGSFQSICQNERYRGIYIYGDVRVVDGIPRIVSDDLWYRVQEAMRMKKNPVGTRHRVGAEDYLLTGKLRCGHCGSYMTGVSGTSRNGELHYYYTCQKRRTEHACDKKNIRRDVIEPAVAQAIKMYCLTDDVIEWMADRTVEYWEKHDNDLQIEALEQQLEENKKATSNMLKAIEMGIITEATRTRMVELETEQSRLSVQLNAAKEDVVKIDREQIISYLELLQQGDIHDRDFQMELFKNFLVAVYVYDGNRMKLVFSCMGDQNSVEIPLETGEDPPDGGLSPDAKMFVLTPDSSTKKALYFVGSTVLFFLHLRTLTMQSVWPYRRSKPR

SEQ ID NO: 2303 - protein, 547 aa, Unknown
  Description of Unknown: Integrase B2304 sequence
  PTHR30461:SF3,cd00338,SM00857,G3DSA:1.10.10.2600,IPR036162, PS51737,G3DSA:3.40.50.1390,IPR006119,IPR038109,PF07508, IPR011109,SSF53041,PTHR30461,PS51736,Coil, PF00239
MKLLVTYIRWSTKEQDSGDSLRRQTNLIDAFYSKHKNDYYLLPAHRYVDKGKSGFHQQHKNQGSDFRRMFENVMSGAIPEGSLIVVENFDRFSRADIDTAIDDVRQILRKGVSILTLGDGELYDKSALTDPVKLIKHIIIAERAHQESLVKQKRIAQVWNHKTQLARELKKPMGKQAPGWLELSDDGSHYIVDEDKASLVNIIYDKRLSGMSMFAICKWLNEQGYPTINQRKVRISKTKKPDGNWSALSVKHILTSRSVLGYLPAKISTEDRKTVLREEIEGFYPQIVTDSKFYAVQQLLEETGKGKTSSGEHWLYVNILKGLIRCKCGLVMTPTGIRKPVYQGTYRCNGNKESRCSYGTVSRKLLDTQLCSRLFSKLSQLHDEATDTAKLDELQRRLNTVDSELEKLTETLIQLPNITQIQEALRVKQEEKDELIVQLSREKARVKSVSSLDLSGLDMESVEGRTEAQIIIKRLVKEIVVSGNEKLVDIYLHNGNMIRGFPLDGKDDHTLTLEEATDEMQSLDDMLIFGEPVTRIYPAGDMEEVDA

SEQ ID NO: 2304 - protein, 547 aa, Unknown
  Description of Unknown: Integrase B2305 sequence
  PTHR30461:SF3,SM00857,G3DSA:1.10.10.2600,IPR036162,PF13408, PS51737,IPR025827,G3DSA:3.40.50.1390,IPR006119,IPR038109, PF07508,IPR011109,SSF53041,PTHR30461,Coil, cd00338,PF00239
MGKRVCCLYRVSTLKQVEKDDIPMQKQRCHEFAAQMGWDIVREFSEKGVSGFKVSAKQRDAIQEIQREAALNTFDILLVFMFDRLGRRDDETPFIVEWFVNNGIEVWSAEEGQQRFDNHVDKLLNYIRYWQASGESIKTSIRTKTRLGQIVMEGRFRGGYAPYGYQLVKKGRMGKKNRELFDIEVNPMEAAAVRRIFELADQYGYGGRKTSTTLKEEGFINLRTGEPFHYSTIQNILINIAYTGVLRSGESVSEIFPELQIITPEQFQRVQKGREQRSADYLAKCVAAYGTETVTLKDGSEAEVSRPIRSYPRKNTGSALLSGNVYCGHCGGRIFASTARKTHHPTDGSNGRVAIYKCYNRTQHKENCDGPTTYRAEKVDAVVSKLIRDIFQKAGTVSEYDIVHNQIGATASDLQQQIRQAKLELSKKHIEQGRWEGLMLDSLDGKCPFTPEQVKSRLDSVKEAMTSLPANIKSLEARLADSDRLTQELKEQHQQLLSWAEMFDNATPAERKLIASHLIRAVTLTRGYGIQIDFNISEAQYLNGMEL

SEQ ID NO: 2305 - protein, 547 aa, Unknown
  Description of Unknown: Integrase B2306 sequence
  PTHR30461:SF3,SM00857,G3DSA:1.10.10.2600,IPR036162,PF13408, PS51737,G3DSA:3.40.50.1390,IPR025827,IPR006119,IPR038109, PF07508,IPR011109,SSF53041,PTHR30461,Coil, PS51736,cd00338,PF00239
MLRGVVKPRKENFMNAVIYARYSSHSQTEQSIEGQLRDCYEYAKRYDINVVGEYIDRATSGTTDERPDFQRMIADAPKKQFDRIIVWKLDRFARNRYDSALYKHKLKQYGIRVISAMENVGEGDESILLEALLEASAEYYSLDLKKKIKRGQRESIAKGKYCGGPIPYGYKLSDGKLLVDEKNAPVIRYLFEQYASGVPMKEIIDELTRRGVRGSRGGALTYNTFSRALTNTTYIGQYKYNGEVVPGLAEQMIDKELFDRAQVVVKANAHAPAANKAEVEYLLQGKAFCGNCGAHMVGECGRGNNGSVYYYYSCANRKKRHSCRKKNEKKDFIEWYVVEQTLQYVLTPPRIKQIAKAVVAEYDKEFAGSKIDECEKSIRQLDHELNKLVDALVEAPKVAHKRIYERMESFEAQKAAMESDLVKLRIAHDIRFTEEEVRAWLKKFCTGDLFDPEFRRNIIDVFINSVYLYDDRVIIFYNIKGGKQVSYIDVAAALDAAPNAEVSDFITNAPSQKPVNNDWLLYAFVTDNGLVASLPYCISKKGTALLR

SEQ ID NO: 2306 - protein, 547 aa, Unknown
  Description of Unknown: Integrase B2307 sequence
  PTHR30461:SF3,SM00857,G3DSA:1.10.10.2600,IPR036162,PF13408, IPR025827,G3DSA:3.40.50.1390,PS51737,IPR006119,IPR038109, PF07508,IPR011109,SSF53041,PTHR30461,Coil, PS51736,cd00338,PF00239
MVQEKLRAVFYARVSTEEEKQLNALEKQIQENRDIINKNGWILVREYIDEGKSGTTTKRRSSYKRLLADMTEDKFDIIVCKDQERLQRNTLDWYLFVDNLVKNNLKLFMYLDNKFFTPAEDALITGIKAIIAEEYSRNLSKKLNNANKRRVERALAGEEIAAMGNGKSLAFKIVNGKWVKDEKEAELGKKIFELYLQWNSIRKVRDWVNNNGYTNSVGKPFTSESIARILKNEKAKGIIVMGHHHHDFDKKKIVKMPEEQWVRIKAPELAYVSEETFDEVQRRLKAKTGKKRGVNAYSNPLSSKLYCGKCGGKLWKHNSRGYIGWYCSAKLAKGDVQCTGVSTTSVRIRKIYSEISKGLVVNKSAVKSSMLEWLHQLKSSLQVEDQSKQIQKTIEQLERKKNKLTEAYLDEIISKADYREKYSAIEMQITEQQKLLIPVEENEDIKDIEEVIKNIDKEIDDYIASSQFEESKVDYLIEHTKKITVVDKEHYVIDLDLLAGVILTGKDFLLYVHNTMPFPSCSPVLSGFSEEAGTCRQILCRFSSYIL

SEQ ID NO: 2307 - protein, 547 aa, Unknown
  Description of Unknown: Integrase B2308 sequence
  PTHR30461:SF3,cd00338,SM00857,G3DSA:1.10.10.2600,IPR036162, PF13408,PS51737,G3DSA:3.40.50.1390,IPR025827,IPR006119, IPR038109,PF07508,IPR011109,SSF53041,PTHR30461, PS51736,Coil,PF00239
MAKKKKPAGGNAIIYARYSSHNQRDVSIEQQIEACRKHAAELGLTITDTYEDRAISGRTDNRPAFQRMMRDAEGGKFQYVLAWKSNRMGRNMMQAMVNESRLMDCGVKVFYAEEDFDDSAAGRFALRSMMNVNQFYSDNLAEDVRRGLMDNASKCMANGRQPLGYKRGEDGKVVVDEPAAAIVREIYTRIASGEMFMDIARDLNRRGIKTQSGSEWNKSSFKVLCRNERYRGIYIYGDTRIEGGVPPIVDDVLWYKVQEVLKVKKSKNRHHCPSDEDYLLTGKLRCGKCGGYMIGMSGRSKTGDVHHYYACQNRRVGHTCDKKNIRRDVVEPAVAQAIKQYCLTDDAIEWITDQTIAYWEDEDRKLQIDSIENDLSAVQSSISNVMKAIEMGVITETTRDRLIELERQQTDLKSKLALAKEEIVHVDRKDLISSLLAFRHGNVHDRAYQEKLFNAFLIAVYVYDDDHLKLVFNSFGKDDTVNIALDLGENDDNSGLSDVSKSSPILSNGQPKDIRTVWMSFLFFVHRESKRAIQQTLYRSFYVNGNQ

SEQ ID NO: 2308 - protein, 547 aa, Unknown
  Description of Unknown: Integrase B2309 sequence
  PTHR30461:SF3,cd00338,SM00857,G3DSA:1.10.10.2600,IPR036162, PF13408,PS51737,IPR025827,G3DSA:3.40.50.1390,IPR006119, IPR038109,PF07508,IPR011109,SSF53041,PTHR30461, PS51736,Coil,PF00239
MARKKNIAAGQNAVIYARYSSHNQREVSIEQQVRECMKHAAELGLHVVGTYEDRAISGKTDKRPNFQRMMRDAEKGKFQAVVAWKSNRIGRNMLQAMVNEAKLEDCGVKVFYAEEDFDDTAAGRFALRNMMNVNQFYSENMAEDITRGLYDNASKCMANGRQPLGYKRGEDGRVVLDEANAAVVREIFTRVAAGDLFVDIARDLNAQGIKTSKGANWNKGSFQSICQNERYRGIYIYGDVRVADGIPRIVSDDLWYRVQEAMRMKKNPVGTRHRVGAEDYLLTGKLRCGHCGSYMTGVSGTSRNGELHYYYTCQKRRTEHACDKKNIRRDVIEPAVAQAIKMYCLTDDVIAWIADRTVEYWEKHDNDLQIEALEQQLEENKKATSNMLKAIEMGIITEATRTRMVELETEQSRLSVQLNVAKEDVVKIDREQIISYLELLQQGDIHDRDFQMELFKNFLVAVYVYDDNRMKLVFSCMGDQNSVEIPLETGEDPPDGGLSPDAKMFVLTPDSSTQKALYFVGSTVLFFLHLRTLTMQSVWPYRRSKPR

SEQ ID NO: 2309 - protein, 547 aa, Unknown
  Description of Unknown: Integrase B2310 sequence
  PTHR30461:SF3,cd00338,SM00857,G3DSA:1.10.10.2600,IPR036162, PF13408,PS51737,G3DSA:3.40.50.1390,IPR025827,IPR006119, IPR038109,PF07508,IPR011109,SSF53041,PTHR30461, PS51736,Coil,PF00239
MKSPIDLSCLTEEEISQFQEDPYTLYNGDQNVALYLRYSSTGQSDQSIEGQLRDCRTFCKANHYRIVAIYVDRATTARKDVEKRVHLMEMISDSAKQNWEYVIVWKLDRFARNRNDSAIMKMRLRKNGVKVLSATEHLTDSPESIILESVLEGMAEFFSAELSQKVTRGMRESALKCHSVGGHIPLGYKVENHKLVVDPDTAHIVQEAFSLYANGESVADICRKFNSAGYKTAKNTEFNRSSFKAMFRNTRYIGTYTYKDIVIENGIPAIIDKELFETVQRRLSKTATAPARGKAKVDYLLSGKLFCGHCGASMNGESGAGRHGKVYHYYSCYTKKRKLGCDKRPLKKDYIEGIVARDALNLLTDQLIDEIADMAIRQSEQDLINDTHIPQLTAQLSEVEKSITNITVAIEKGIASETLMNRLVQLEHEKKTLNKEIKAEEKFVYRIDRDQIVFWLSQFKYGNIEDEDFRRRLIDLLVNSVTVWDEPDGYKITTAYNLTSCKTKTFRVEKNPAAEEATGFDFGESECTKSPRNRLISRTFAFHKFRF

SEQ ID NO: 2310 - protein, 547 aa, Unknown
  Description of Unknown: Integrase B2311 sequence
  PTHR30461:SF3,cd00338,SM00857,G3DSA:1.10.10.2600,IPR036162, PF13408,PS51737,G3DSA:3.40.50.1390,IPR025827,IPR006119, IPR038109,PF07508,IPR011109,SSF53041,PTHR30461, PS51736,Coil,PF00239
MEAATTTLERRVREIPPTRKPEELLRNYDGKMRVAAYCRVSTDSEEQLNSYEAQKTYYTQKIQDNPDWEMAGIYADEGISGTSLKKRTEFNKMITACKRGRIDFIITKSLSRFARNTVDCLDTVRLLKANGIGVYFEKENINTLTESSEFLVTLFSGFAQAESESLSKNVAWGKEKSAKAGNVHFQYKKMLGYRKGEDGQPEIVPEEAAIVRRIYRRYLDGCTLGKIKRELDEDGVPTAQGVECWSPAIIHNILTNEKYIGDALLQKTYVTDCLSKKVRKNRGERVMYYVENNHPAIISREAFDLVRKEMTRRSSKRKVLQKSGKTELGKYSGKYALTELLVCGECGSPYKRVTWARDGKKRIVWRCVSRLEFGTKYCHASPTLDEGKLHSAILNAMNEYAAIRQEVCPDVLAMVEEAKQALTQTGTKLLTLKRRLDEVSHEQADMLDMLLSNMADADLNARMKALTDEKASLKEQILETQQEEVGLEKQVAKRQQMWDSLIECSEGYTEFDDEFVRQIIQKITVEDADTIRIQFRDSDIVLEQGLQ

SEQ ID NO: 2311 - protein, 547 aa, Unknown
  Description of Unknown: Integrase B2312 sequence
  PTHR30461:SF3,SM00857,G3DSA:1.10.10.2600,IPR036162,PS51737, G3DSA:3.40.50.1390,IPR006119,IPR038109,PF07508,SSF53041, IPR011109,PF00239,PTHR30461,PS51736,Coil, cd00338
MKLLVTYIRWSTKEQDSGDSLRRQTNLIDAFYSKHKNDYYLLPAHRYVDKGKSGFHQQHKAQGSDFRRMFENVMSGAIPEGSLIVVENFDRFSRADIDTAIDDVRQILRKGVSILTLGDGELYDKSALTDPVKLIKHIIIAERAHQESLVKQKRIAQVWNHKTQLARELKKPMGKQAPGWLELSEDGSHYIVDEDKASLVNIIYDKRLSGMSMFAICKWLNEQGYPTINQRKVRISKTKKPDGNWSALSVKHILTSRSVLGYLPAKISTEDRKTVLREEIEGFYPQIVTDSKFYAVQQLLEETGKGKTSSGEHWLYVNILKGLIRCKCGLVMTPTGIRKPVYQGTYRCNGNKESRCSYGTVSRKLLDTQLCSRLFSKLSQLHDEATDTAKLDELQRRLNTVDSELEKLTETLIQLPNITQIQEALRVKQEEKDELIVQLSREKARVKSVSSLDLSGLDMESVEGRTEAQIIIKRLVKEIVVSGNEKLVDIYLHNGNMIRGFPLDGKDDHTLTLEEATDEMQSLDDMLIFGEPVTRIYPAGDMEEVDA

SEQ ID NO: 2312 - protein, 547 aa, Unknown
  Description of Unknown: Integrase B2313 sequence
  SM00857,G3DSA:1.10.10.2600,IPR036162,PF13408,IPR025827, PS51737,G3DSA:3.40.50.1390,IPR006119,IPR038109,PF07508, IPR011109,SSF53041,PTHR30461,Coil,PS51736, cd00338,PF00239
MAFRSILDYRNVLATEGLRAVFYARVSTAEEEQLNAIELQIEENRNAISRHKWKKVDEYIDRSKSGTMVKGRDDYQRLFEDLLSDKFDIVVIKDQERLMRNTLDWYLFINRLVQTGKLLYMYLDDKFYSPDDALITGIKAIIAEEFSRNLSKKLHNYHDGRIAKAREGKEIDLQGSGNVFGWDKVDGKYVINPEQAKVRRLMCEGIMERKGSTLIAKELNDAGYRNTVGKPWKPMDIPKFVYDCRNVGIMIINKERNDFESKKTIKLPESEWVYVKNAFPPIITEEEWALICKIHEERVIATGSNKRGKKTSGYSFSGKIVCGVCGASYWRKQRSTKEEYWVCSTKQQKGRKTRKRDAVGGKAGEVNPVGCDNDNISYNSLMEIMEVVSERLRADTSTIKEDMVNWLTRLKKQLLEANGGATEAELQRELKRKDKLLDAYLDNILSKEEYQKKAIALDDRIIELRREIEANKSNFEDLAEIDRVLKNIDEEVARYIDENNQLKVEYILEHLSQVEIHPDKVIVIVPILSEGIVVEKTQYVSRQKRQR

SEQ ID NO: 2313 - protein, 547 aa, Unknown
  Description of Unknown: Integrase B2314 sequence
  SM00857,G3DSA:1.10.10.2600,IPR036162,PF13408,PS51737, G3DSA:3.40.50.1390,IPR025827,IPR006119,IPR038109,PF07508, SSF53041,IPR011109,PTHR30461,Coil,cd00338, PF00239
MAYRKITDIRDTIGMRAVFYARVSTAEEEQLNAIELQIEENRGCIKDHGWKLVGEYIDRSKSGTMVKGRDDYQRLYEDLYEDLFDIVVIKDQERLQRNTLDWYLFINRVVQTGKLLFMYMDGKFYSPDDALITGVRAIIAEEFSRNLSKKLHNYHDHRIEKARQGQEIALQGSGNVYGWDKKDGKYYINPEQAKVRRLMCEGIMARKGSTLIAKELNDAGYRNTVGKPWKPMDIPKFVYDCKNVGTMIINKERHDFESKQTIKLPKEEWVYVENALPPIVTQEEWDLICKIHEERVIATGSDRRGKKTSGYSFSGKLVCGICGAPYWRKQRVSKDEYWVCSTKQTKGRKTRKRDSTMGKAGEINPLGCDNENISYNSLMEIMGVVSERLQANTDTIKQDMINWLTKLRKQLLEANGGHTEADLQRELSRKSKLLDAYLDGILNKQEYQKKAEELDERIIQLKTETEKNKANSGDIAEIDKVLANIDEEVARYVDGNEKLKVEYLLEHLEQVQIFPDKVIVIVPILSEGIVVEKTQYDPLLRGLYVLY

SEQ ID NO: 2314 - protein, 547 aa, Unknown
  Description of Unknown: Integrase B2315 sequence
  PTHR30461:SF3,cd00338,SM00857,G3DSA:1.10.10.2600,IPR036162, PS51737,G3DSA:3.40.50.1390,IPR006119,IPR038109,PF07508, SSF53041,IPR011109,PTHR30461,PS51736,Coil, PF00239
MKLLVTYIRWSTKEQDSGDSLRRQTNLIDAFYSKHKEEYYLLPAHRYVDKGKSGFHQQHKNQGSDFRRMFENVMSGVIPEGSLIVVENFDRFSRADIDTAIDDVRQILRKGVSILTLGDGELYDKSALTDPVKLIKHIIIAERAHQESLVKQKRIAQVWNHKTQLARELKKPMGKQAPGWLELSEDGSHYIVDEDKASLVNIIYDKRLSGMSMFAICKWLNEQGYPTINQRKVRISKTKKPDGNWSALSVKHILTSRSVLGYLPAKISTEDRKTVLREEIESFYPQIVTDSKFYAVQQLLEETGKGKTSSGEHWLYVNILKGLIRCKCGLVMTPTGIRKPVYQGTYRCNGNKESRCNYGTVSRKLLDTQLCSRLFSKLSQLHDEATDTAKLDELQRRLNTVDGELEKLTETLIQLPNITQIQEALRVKQGEKDELIVQLSREKARVKSVSSLNLSGLDMESVEGRTEAQIIIKRLVKEIVVSGNEKLVDIYLHNGNMIRGFPLDGKDDHTLTLEEATDEMQSLDDMLIFGEPVTRIYPAGDMEEVDA

SEQ ID NO: 2315 - protein, 546 aa, Unknown
  Description of Unknown: Integrase B2316 sequence
  PTHR30461:SF3,cd00338,SM00857,G3DSA:1.10.10.2600,IPR036162, PF13408,PS51737,G3DSA:3.40.50.1390,IPR025827,IPR006119, IPR038109,PF07508,IPR011109,SSF53041,PTHR30461, PS51736,Coil,PF00239
MEETIKAVGYARFSSSMQREESITAQKRYMMMYAKRNNMEVIDWYCDEAKSAKTVNRPAFQKMINDAKNNPEFKAVLVHKTDRFSRNLSDSIQYKKLLEEYGVQVIFVNERFEDNPESHLLYHIMGSVNQFYNENLAREVMKGLKENAYQCKFTGGRPPLGYDVDKDLKLVINEKEAEAVRLIFEMSAEGYGYGETIDKLNILGYKTKKGLPFVKNSLYEILRNEKYKGTYIFNRSCSANSLNKRNNHRRKPEEEIIRIENGCPAIVSSGLWHRANAVKKATRSSYTNAKNTYLLTGLIHCGECGGKFHGNVRYNKNNTNLVYRCSSKKNKRKCESKEIRCEYLDSFVIDKFVEFFFNDDNIKVITKQLNEQYNKSCISDLEYNEAKSTLKILEKSRNNLVEAIAKTGINDIMSDKIKEYEEQIKKTAEFIQKYEKQKVDRVITEDEIREQINHLKDYFYNPKNIIRTKYVLSQYIDRIDISNENVQVQFKVSMSPSGNTDVDYFCVHTEMIKRKYLFDYVCEKVDFEQWNIEKLNKSESEHRKGA

SEQ ID NO: 2316 - protein, 546 aa, Unknown
  Description of Unknown: Integrase B2317 sequence
  PTHR30461:SF3,cd00338,SM00857,G3DSA:1.10.10.2600,IPR036162, PF13408,PS51737,G3DSA:3.40.50.1390,IPR025827,IPR006119, IPR038109,PF07508,IPR011109,SSF53041,PTHR30461, PS51736,Coil,PF00239
MEETIKAVGYARFSSSMQREESITAQKRYMMMYAKRNNMEVIDWYCDEAKSAKTVNRPAFQKMINDAKNNPEFKAVLVHKTDRFSRNLSDSIQYKKLLEEYGVQVIFVNERFEDNPESHLLYHIMGSVNQFYNENLAREVMKGLKENAYQCKFTGGRPPLGYDVDKDLKLVINEKEAEAVRLIFEMSAEGYGYGETIDKLNILGYKTKKGLPFVKNSLYEILRNEKYKGTYIFNRSCSANSLNKRNNHRRKPEEEIIRIENGCPAIVSSGLWHRANAVKKATRSSYTNAKNTYLLTGLIHCGECGGKFHGNVRYNKNNTNLVYRCSSKKNKRKCESKEIRCEYLDSFVIDKFVEFFFNDDNIKVITKQLNEQYNKSCISDLEYNEAKSTLKILEKSRNNLVEAIAKTGINDIMSDKIKEYEEQIKKTAEFIQKYEKQKVDRVITEDEIREQINHLKDYFYNPKNIIRTKYVLSQYIDRIDISNENVQVQFKVSMSPSGNTDGDYFCVHTEMIKRKYLFDYVCEKVDFEQWNIEKLNKSESEHRKGA

SEQ ID NO: 2317 - protein, 546 aa, Unknown
  Description of Unknown: Integrase B2318 sequence
  cd00338,SM00857,G3DSA:1.10.10.2600,IPR036162,PF13408, PS51737,G3DSA:3.40.50.1390,IPR025827,IPR006119,IPR038109, PF07508,IPR011109,SSF53041,PTHR30461,PS51736, Coil,PF00239
MVQEKLRAVFYARVSTEEERQLNALEKQVAECKDAVLQKGWKLVDQYVDEGKSGTQIKRRDEYRRLFEDLENDKFDIVVIKSQDRLQRNTLDWYIWIDRLTTHGKRLYMYLEDTFYSPDNALISGIKAILAEEYSRELSKKINNSYKRRIEAAKNGEKISIVNNSRSLGYDKVNGELVINEKEAEVVRMIFNMYASGEGLRAISNTLYDMGYRNRSGNEIDPTTISRMLSSEKYKGVYVINQRHYDFDTKKTVLNPKSEWVHIPGAVPAIVEPELWDRVQEIKGSKVQSIKNEKRGRNCGKSIFSGKIYCAKCGAKYWRSLENGYVKFKCSSYSKYGKIPGKGCDNKSFSENALYSILQSLSEQIVEINTAEVRKSLLNWLESLRERLRASQGDDTIKEEIRKQTARKEKLTDAYMDGIISKEDYSKRYKELEKTLEDLKDKLLTLEVNEDLQSIEEVIQNIDKEMEEYLQTQSFNESRVEFLNQHLTKVTVNKDSFLLEFDLIGGAILTGKDFYLFVDNPRGNRKSSKGFVRCTGSLVCDCNLWK

SEQ ID NO: 2318 - protein, 546 aa, Unknown
  Description of Unknown: Integrase B2319 sequence
  SM00857,G3DSA:1.10.10.2600,IPR036162,PF13408,IPR025827, G3DSA:3.40.50.1390,PS51737,IPR006119,IPR038109,PF07508, SSF53041,IPR011109,PTHR30461,Coil,cd00338, PF00239
MNEIVTGLDTNKIYKVVFYARVSTEEEKQLNALEKQIEELSEFIKYQSNWILVDHYVDEGRTGTMTKGRHEYNRLYADMLTDKFDIIVMKNIERMNRNTGNYYQFINRMTTENKKLYLLLDRKFYTPEDAFINGIKAMMAEEYSRDLSKKINSAAHRSIKQGVAYGNSKLYGYDKIPQSYIINEEEAEVVRQIFNWYVEGYGFRIIQKKLTNMGVYSSTGTQFSLSTLKRMIKNEKYKGMLVSGKTRYNFETKRNEIVPLDERVYIPNGVPAIVGEEIWNKANMLIVQKSEVFNKNYNQKIGRFSNRFTPEQSALSGKIHCGKCGKVFWHSPYITKVNRLRRDIWMCSTYKSLGVKYCKNHSIEFTKILNKIRSILLEENHNPESIQLTLNILTQSLDDNRESKIEQLSKQVERYQKRLSNLTDLLLDELISKEEYTSKKEELNAKIANTQKMLETTSTDSHSSLNKKQRLQDIKCFLQTNIANVADITDNDIRKFVKDIEVFDDVIVLKTITGNSYDIDPDEVKLTFTPRNKKYLQDIKQNNISV

SEQ ID NO: 2319 - protein, 546 aa, Unknown
  Description of Unknown: Integrase B2320 sequence
  PTHR30461:SF3,SM00857,G3DSA:1.10.10.2600,IPR036162,PF13408, PS51737,IPR025827,G3DSA:3.40.50.1390,IPR006119,IPR038109, PF07508,IPR011109,SSF53041,PTHR30461,Coil, PS51736,cd00338,PF00239
MYSSKRAVIYCRVSTEEESQKNALEGQIKEAIKSVEEKKWILVDQYVDEGKSGTTTKNRPQYNRLIKDLSQDRFDIIVIKSQDRLMRNTLEWYMFIDLVNKNQKQLFFYLENKFYNTEDSLIVGIKAILAEEYSRELSKKINNAHKNGQKECSRIMLNNKTWGYDKINKQVVINEKEAEIVRLIFDLYIKGYGARTISKTLTEMGVKSRSGGDFAYVTIRKIVRNPLYKGDVVMNRLHNDFDSKKVVHIPKEEWIVHKNAVPAIVSEETWQAANSILDTRYQDTFSAQGLPIRIGKNKGDYPLSSKIYCGECGSTYWRRYRRNTKDDVTVYWSCSEYVTQGRKNDQTKRGKNMVKKQFDLQRGCNSPHLKEEDIISGLKMIAENIFSPSDRDSLISESIQLFESSALDNDKKVNGLNENLEKLKKQQEKLLDGYLNDCISEDLYKKKNAILVEEIRTLEAKKAEIGDTEAEVRQKKEYIESVKTEISKIGQNEGCVHKLINIIERITVFQTYMLVSLGAIGEIKLNVERLSYKRTRVTIADEQHNN

SEQ ID NO: 2320 - protein, 546 aa, Unknown
  Description of Unknown: Integrase B2321 sequence
  PTHR30461:SF3,SM00857,G3DSA:1.10.10.2600,IPR036162,PS51737, G3DSA:3.40.50.1390,IPR006119,IPR038109,PF07508,SSF53041, IPR011109,PF00239,PTHR30461,Coil,cd00338
MYKEYPTFYNYETKEYGRKSRTDDPLLSTDEILEKHSKIIEEYAVKYLGGPIPQENKYMEVGSGESLKERPEITRLLKDIEDPAVKAIIVVDVQRLSRGDLEDAGRLIRLLRYTNTYVITPMKTYDLRDEYDRDAFERELKRGNEYLEYYKKIQARGKLLSVKEGNYVGSTAPYGFDRIEKYDGKKSYHTLIERKDQADIVRMIFNWYCEEDIGVTAICRRLEELGAKTKTGHSTWKPSIIFSILENHHYIGCVRWNWRKTVKIIEDQEIKKLRPKAKVDEFLLFEGKHDGIISEEQFNKAREIRGKRHRTRRDLTLKNPFSGIMFCKKCGHKIGYNTYTRHGVEYASPKLVCNNQVHCKSGSVKYSEVFEYVRKVLKDCISDFEVRIENDQDDSVKLHRDLIERLTKQLSELEKKEMEQWEAQYDPDPAKRLPQHIFVKLNEKVLKEKEEVNKALAKAKDSAPKHINYREELIKTKDALRILEDEKLDAKTKNQYLKTVIDKMIYERDPIVQITKANAEKYNMQAAKGTKYYNPPYKITIELKCD

SEQ ID NO: 2321 - protein, 546 aa, Unknown
  Description of Unknown: Integrase B2322 sequence
  PTHR30461:SF3,SM00857,G3DSA:1.10.10.2600,IPR036162,PF13408, PS51737,G3DSA:3.40.50.1390,IPR025827,IPR006119,IPR038109, PF07508,IPR011109,SSF53041,PF00239, PTHR30461,PS51736,Coil,cd00338
MRVSVNLNAQKPDTTTNAVIYARYSSHGQTEQSIEGQLAKGHEYAAAQGYTVVHEYIDRAMTGRNDNREAFQKMLSDTGKHQFQVVIVWKVDRFGRNREEIAFNKHTCKKNGVRVEYVAESLPNSPEAVILESVLEGMAEYYSIQLSQNIRRGQLESAKKCQCVGGSVPLGYTLDSDKHFVIDPQTAPVVKKIFDLYAEGATISEITGQLNEQGIRTARKQLFTKNSLTKLLKNEKYIGVYTYKDIVRVEGGVPAIVDESTFDRVQELLKINRRAPSHTWTKVEYLLTDKLFCGHCGSPMVGESGFSHTGAKYSYYGCIKRRREKACDKKPVRQDWIEALVLDETVKLLHDDELMEYIIDRTWEYYQVTDKVQEEKAVLEAQLAEVDKAINNLVRAIEAGIFNAATKSRMDELDAQKAALTASLADLELTSGIRITRDHIEYFLLRLRDLDVKDRECQKRLVQTFVNAVFIYDDGRVKITYNYSGQSSTITLNQIASAEKGKGFVCCLPCSTSSPRFPRGVAAFFCFGVLGKIGCKYTTNFSCIVL

SEQ ID NO: 2322 - protein, 546 aa, Unknown
  Description of Unknown: Integrase B2323 sequence
  PTHR30461:SF3,SM00857,G3DSA:1.10.10.2600,IPR036162,PF13408, IPR025827,PS51737,G3DSA:3.40.50.1390,IPR006119,IPR038109, PF07508,IPR011109,SSF53041,PTHR30461,Coil, PS51736,cd00338,PF00239
MPHKKKLQEVGGRRLVAYYRYSGGSHQTEQSIEGQRRDCETYARIHGMVILHEYIDRHISGKTDDRPEFQQMIADAGKGMFDYVICWKTDRIARSRYDSIIYKKKLRDNGVELLYAAEANVEGSGGIIVEGLMEALAEYYSAELAEKVRRGMRESALKGKAIGSSRPLGLTVDKDKKYIIDPAGAAAVRYIFEQYAAGAASSAIVAHLNEQGLCTSRGNPFNKSSVVRIIQNEVYRGVYVSPKFDVRIEGAVPAIIDDDLWERAQKMFIRNRQSRSPRNDRADYILSGKLFCGECGTAMKGVSGHSSNGEVYFYYNCPCKDCHRRNIPKDELEGLVIRTVCNDVLQPDVMDHIADSVIEAQTAELNQPNPEKEALQHELADVQRKAKNLLSALENGTAGAMLTNRLAELEQQADTLSYQLSSLESEPKFPVFSKEEVLYLLEQFLIAPSEKTKAYRRRLIDTFVSKIEVSNTELTIYFNIAEEDCGKIKKAPQSNQPEGCSTEKQMVRLLLPQSNFSIFILPTYFYIAIPIFQARKTISVESVTSL

SEQ ID NO: 2323 - protein, 546 aa, Unknown
  Description of Unknown: Integrase B2324 sequence
  PTHR30461:SF3,IPR036162,PS51737,IPR011109,PTHR30461, PF00239,G3DSA:1.10.10.2600,IPR006119,SSF53041,cd00338, SM00857,IPR025827,IPR038109,mobidb-lite,PS51736, PF13408,G3DSA:3.40.50.1390,PF07508,Coil
MGKKQKTNGGDAVIYARYSSHNQRDVSIEQQVEACRKHAAELGLTVTATYEDRAISGKTDKRPSFQRMMRDAEQHKFAYVLAWKSNRIGRNMMQALVNESRLVDCGVKVFYAEEDFDDNAAGRFALRSMMNVNQFYIENMAEDVKRGLYDNAKKGLVNGSLPLGYKRGADGKPEIDEPKAAIVREIYTRVAAGELFASIAADLNARGIRTARGREWNKGSFHVLCHNDRYRGIYMYGDIRIPGGMPRIISDELFYDAQEAYGMKKDNRYGRARHGAENYLLTGKLYCGHCGSYMVGISGTSKTGEMHYYYACQKHRLEHTCEKKAIRRDVIENAVARVIMMYCLDDETIDFIVDSTIAYFKQKDHELHIEAMENELAAVQQAISNLMKAIEAGIITPTTRTRLLDLEEQQAKLSGKINTAKAERVEIDRDDLIAGLQLFRTGDIKNKKFLAKLFNTFLLAVYLYDDNRLKIVFSFTGNHNNIEIPLELDNDCPDSESGSYETEVRMSHLECRKNSGTPPSSGGAEKGDGCSGGRFVRTAPLPPHKK

SEQ ID NO: 2324 - protein, 546 aa, Unknown
  Description of Unknown: Integrase B2325 sequence
  cd03768,SM00857,G3DSA:1.10.10.2600,IPR036162,PS51737, G3DSA:3.40.50.1390,SSF109709,IPR006119,IPR038109,PF07508, IPR011109,SSF53041,PTHR30461,PS51736,PF00239
MVRINCAIYVRKSTEKGLELEFNSLHNQEDACRSYIMAQAFNNWEYFKTYTDGGISGGTMERPALKQMLEDIRRGLIQTVVVYKVDRLSRSIMDFHNMMKEFDKYGCSFVSITQAFDTSTSMGKLTLNMLLSFAQFEREVSSERVRDKIRASKAKGLWTGGVPKLGYDIKDKKLVINPVEAEQVRSIFEGYLQCGSLAELEKFAEIKGFKHKDWITNKGEQRGGKPFKISALHRLLHEKLYLGMIENKRTGQAFKGQHEAIISKDLWDKVQTKLKDNDNCANHTRNRNNNLLTGKLFDSNRTIFTNQANSKNKATKRHYYSIKGLFLPTEQIDKLTKDAIIEILNSNLNGLNKDSAMALKLINFTDMNYFMQRNFIRNFINKIIYQKDRLTFFFNTAPITLSAYTGDSLNPNDNPLEFIADNINNQIIYEKQVVINRGLSSNVYNAGKVGLMSVNDNNRLIIRAFAYAWKFKKLYERGIRMEDIIKQEKMTKRTIYKYLNLAYLSPKIVNQLLNGTLTVNLQTLFEIASKNLSFEEQENLIYNRLI

SEQ ID NO: 2325 - protein, 546 aa, Unknown
  Description of Unknown: Integrase B2326 sequence
  PTHR30461:SF3,SM00857,G3DSA:1.10.10.2600,IPR036162,PF13408, IPR025827,G3DSA:3.40.50.1390,PS51737,IPR006119,IPR038109, PF07508,IPR011109,SSF53041,PTHR30461, Coil,PS51736,cd00338,PF00239
MAKPEVSELAVVYARYSSHSQGEQSIEGQLSNARDYAAAHGYTIVHEYVDRAKSGRTDNRAEFQQMLKDTAKRQFSVIILWKVDRFGRNREEIAINKMKCRKNGVRVEYVAETIPDSPEGVILESVLEGFAEYYSLQLSQNIRRGRAESAEKCQSLGGNRPLGYKTGADKKFVIDENTAPTVKMIFTMYADGKTVTEIVDKLNELGLRTLRGGPFTKNSLHSILKNKKYIGIYEYQGREIKDGVPRIIEDDVFNKVQEMLKINKRAPAKTWSRADYILTDKLFCGKCGALMFGESGTSKTGVKHNYYICSNKKRFRSCDKKAVRQADIEDAVLNATHELLQDDELLDYIVDRTWEYYLAQDNSQEELRNLQRQLAQTDTAISNLIRAIEAGILTEETKKRMDELTQQKADLKASIADREIARGFHLQKSHIAFYLRSLRDADWSDKEAQKRLIQTFVNAVFVYDDHITLTYNFSGDKSTITLHDMQRFEDGEEFGCRASRSTIMWRQKRCLLRKARIYRAFLLPKRRFFSVPKHRCKIAVFPNEVR

SEQ ID NO: 2326 - protein, 546 aa, Unknown
  Description of Unknown: Integrase B2327 sequence
  PTHR30461:SF3,SM00857,G3DSA:1.10.10.2600,IPR036162,PF13408, PS51737,G3DSA:3.40.50.1390,IPR025827,IPR006119,IPR038109, PF07508,IPR011109,SSF53041,PF00239,PTHR30461, PS51736,Coil,cd00338
MEETIKAVGYARFSSSMQREESITAQKRYMMMYAKRNNMEVIDWYCDEAKSAKTVNRPAFQKMINDAKNNPEFKAVLVHKTDRFSRNLSDSIQYKKLLEEYGVQVIFVNERFENNPESHLLYHIMGSVNQFYNENLAREVMKGLKENAYQCKFTGGRPPLGYDVDKDLKLVINEKEAEAVRLIFEMSAEGYGYGETIDKLNILGYKTKKGLPFVKNSLYEILKNEKYKGTYIFNRSCSANSLNKRNNHRRKPEEEIIRIENGCPAIVSSGLWHRANAVKKATRSSFTNAKNTYLLTGLIHCGECGGKFHGNIRYNKNNTNLVYRCSSKKNKRKCESKEIRCEYLDSFVIDKFVEFFFNDDNIKVITKQLNEQYNKSCISDLEYNEAKSTLKILEKSRNNLVQAIAKTGINDIMSDKIKEYEEQIKKTAEFIQKYEKQKIDRVITEDEIREQINHLKDYFYNPKNLIRTKYVLSQYIDRIDISNENVKVQFKVSMSPSDNTDGDCFCVHTEMIKRKYLFDYVCENVDFEQWNIEKLNKSESEHRKGA

SEQ ID NO: 2327 - protein, 546 aa, Unknown
  Description of Unknown: Integrase B2328 sequence
  PTHR30461:SF3,SM00857,G3DSA:1.10.10.2600,IPR036162,PS51737, G3DSA:3.40.50.1390,IPR006119,IPR038109,PF07508,SSF53041, IPR011109,PF00239,PTHR30461,Coil,cd00338
MYKEYPMFYNYETKEYGRKSRTDDPLLSTDEILEKHSKIIEEYAVKYLGGPIPQENKYMEVGSGESLKERPEITRLLKDIEDPAVKAIIVVDVQRLSRGDLEDAGRLIRLLRYTNTYVITPMKTYDLRDEYDRDAFERELKRGNEYLEYYKKIQARGKLLSVKEGNYVGSTAPYGFDRIEKFDGKKSYHTLIERKDQADIVRMIFNWYCEEDIGVTAICRRLEELGAKTKTGHSTWKPSIIFSILENHHYIGCVRWNWRKTVKIIEDQEIKKLRPKAKVDEFLLFEGKHDGIISEEQFNKAREIRGKRHRTRRDLTLKNPFSGIMFCKKCGHKIGYNTYTRHGVEYASPKLVCNNQVHCKSGSVKYSEVFEYVRKVLKDCISDFEVRIENDQDDSVKLHRDLIGRLTKQLANLEKKEMEQWEAQYDPDPAKRLPQHIFVKLNEKVLKEKEEVNKALEKAKGSAPKHINYREELVKTRDALRILEDAELDAKTKNQYLKTVINKMIYERDPIVQITKENAEKYSMQSAKGMQYYNPPYKITIELKCD

SEQ ID NO: 2328 - protein, 546 aa, Unknown
  Description of Unknown: Integrase B2329 sequence
  cd00338,SM00857,G3DSA:1.10.10.2600,IPR036162, PF13408,IPR025827,PS51737,G3DSA:3.40.50.1390, IPR006119,IPR038109,PF07508,IPR011109, SSF53041,PTHR30461,PS51736,Coil,PF00239
MAYRRAQDTKGLRAVFYARVSTAEEEQLNAIELQIEENRNTITKHGWKKVDEYIDRSKSGTMVKGRDEYQRLYEDLLGDAFDVVVIKDQERLMRNTLDWYLFINRLVQTGKILYMYLEDKFYSPDDALITGIKAIIAEEFSRNLSKKLHNYHDGRIEKARKGLEIDLQGSGNVFGWDKVDGKYVINPEQAKVRRLMCEGIMARKGSTQIAKELNDAGYRNTVGKPWKPMDIPKFVYDCKNVGTMIINRERHDFESKQTVKLPESEWVYVKGALPPIVTEEEWALIEKIHEERVVATGCNRRGKKTSGYSFSGKLVCGVCGAPYWRKTKTSNEEYWVCSTKQQKGRKTRARDAVGGKAGEINPEGCDNENISYNALMEIMAIVSERLQADTGFIREFMLGRLDTYEKRITEANRGATEADLQREISRKDKLLDAYLDNLLTKEEYQRKALALDEHILELRREVEANKANLADLAEIQRVRENIDAEVAQYLDENEQLKVEFVLEHLSQVIIYPDKVLVIFDVFGEGVMVEKSQYVSREKRRWKNNAV

SEQ ID NO: 2329 - protein, 546 aa, Unknown
  Description of Unknown: Integrase B2330 sequence
  cd00338,SM00857,G3DSA:1.10.10.2600,IPR036162,PF13408, PS51737,G3DSA:3.40.50.1390,IPR025827,IPR006119,IPR038109, PF07508,IPR011109,SSF53041,PTHR30461,PS51736, Coil,PF00239
MVQEKLRAVFYARVSTEEERQLNALEKQVAECKDAVLQKGWKLVDQYVDEGKSGTQIKRRDEYKRLFEDLENDKFDIVVIKSQDRLQRNTLDWYIWIDRLTTHGKRLYMYLEDTFYSPDNALISGIKAILAEEYSRELSKKINNSYKRRIEAAKNGEKISIVNNSRSLGYDKVNGELVINEKEAEVVRMIFNMYASGEGLRAISNTLYDMGYRNRSGNEIDPTTISRMLSSEKYKGVYVINQRHYDFDTKKTVLNPKSEWVHIPGAVPAIVEPELWDRVQEIKGSKVQSIKNEKRGRNCGKSIFSGKIYCAKCGAKYWRSLENGYVKFKCSSYSKYGKIPGKGCDNKSFSENALYSILQSLSEQIVEINTAEVRKSLLNWLKSLRERLRASQGDDTIKEEIRKQTARKEKLTDAYMDGIISKEDYSKRYKELEKTLEDLKDKLLTLEVNEDLQSIEEVIQNIDKEMEEYLQTQSFNERRVEFLNQHLTKVTVNKDSFLLEFDLIGGAILTGKDFYLFVDNPRGNCKSSKGFVRCTGSLVCDCNLWK

SEQ ID NO: 2330 - protein, 546 aa, Unknown
  Description of Unknown: Integrase B2331 sequence
  SM00857,G3DSA:1.10.10.2600,IPR036162,PF13408,IPR025827, PS51737,G3DSA:3.40.50.1390,IPR006119,IPR038109,PF07508, SSF53041,IPR011109,PTHR30461,Coil,cd00338, PF00239
MNEIVTGLDTNKIYKVVFYARVSTEEEKQLNALEKQIEELSEFIKYQSNWILIDHYVDEGRTGTMTKGRHEYNRLYADMLTDKFDIIVMKNIERMNRNTGNYYQFINRMTTENKKLYLLLDRKFYTPEDAFINGIKAMMAEEYSRDLSKKINSAAHRSIKQGVAYGNSKLYGYDKIPQSYIINEEEAEVVRQIFNWYVEGYGFRIIQKKLTNMGVYSSTGTQFSLSTLKRMIKNEKYKGMLVSGKTRYNFETKRNEIVPLDERVYIPNGIPAIVGEEIWNKANMLIVQKSEVFNKNYNQKIGRFSNRFTPEQSALSGKIHCGKCGKVFWHSPYITKVNRLRRDIWMCSTYKSLGVKYCKNHSIEFTKILNKIRSILLEENHNPESIQLTLNILTQSLDDNRESKIEQLSKQVERYQKRLSNLTDLLLDELISKEEYTSKKEELNAKIANTQKMLETTSTDSHSSLNKKQRLQDIKCFLQTNIANVADITDNDIRKFVKDIEVFDDVIVLKTITGNSYDIDPDEVKLTFTPRNKKYLQDIKQNNVSV

SEQ ID NO: 2331 - protein, 546 aa, Unknown
  Description of Unknown: Integrase B2332 sequence
  cd00338,SM00857,G3DSA:1.10.10.2600,IPR036162,PF13408, PS51737,IPR025827,G3DSA:3.40.50.1390,IPR006119,IPR038109, PF07508,IPR011109,SSF53041,PTHR30461,PS51736, Coil,PF00239
MVQEKLRAVFYARVSTEEERQLNALEKQVAECKDAVLQKGWKLVDQYVDEGKSGTQIKRRDEYKRLFEDLENDKFDIVVIKSQDRLQRNTLDWYIWIDRLTTHGKRLYMYLEDTFYSPDNALISGIKAILAEEYSRELSKKINNSYKRRIEAAKNGEKISIVNNSRSLGYDKVNGELVINEKEAEVVRMIFNMYASGEGLRAISNTLYDMGYRNRSGNEIDPTTISRMLSSEKYKGVYVINQRHYDFDTKKTVLNPKSEWVHIPGAVPAIVEPELWDRVQEIKGSKVQSIKNEKRGRNCGKSIFSGKIYCAKCGAKYWRSLENGYVKFKCSSYSKYGKIPGKGCDNKSFSENALYSILQSLSEQIVEINTAEVRKSLLNWLKSLRERLRASQGDDTIKEEIRKQTARKEKLTDAYMDGIISKEDYSKRYKELEKTLEDLKDKLLTLEVNEDLQSIEEVIQNIDKEMEEYLQTQSFNENRVEFLNHHLTKVTVNKDSFLLEFDLIGGAILTGKDFYLFVDNPRRHCKSSESSSRCAGSLVCDRNMRE

SEQ ID NO: 2332 - protein, 546 aa, Unknown
  Description of Unknown: Integrase B2333 sequence
  PTHR30461:SF3,cd00338,SM00857,G3DSA:1.10.10.2600,IPR036162, PF13408,IPR025827,G3DSA:3.40.50.1390,PS51737,IPR006119, IPR038109,PF07508,IPR011109,SSF53041,PTHR30461, PS51736,Coil,PF00239
MKRTAIYARYSSDNQRAESIDEQIRACRYYAQQTGLYDIVAVYKDEALSGYKNSHKRDGFAQLMADAEAGKFEAVMVYELSRFSRNGSDTIVNTEKLARLGIEFVSVREKLDQTPEGRMMMFVITGMNEYYSANLAIETMRGLKENAYQAKHTGGIPPLGYDLDSNGHYIINPEEAAAVRLIFDMYLEGNGYTAICDELNRRGYRTKRGTLFVRNSMYDLLRNEKYTGSFIYNHMAKAKNGKRNRHAYKSDSEVIRVENAFPAIISKEEYRKVLKLMEQNKRKGARNAAVHDYLLSGKVYCGHCGKSMYGETRYRKEYSYSYYSCNGHKSKICGKHSIRCDKLEAEVIRQLNELFFSDEILDRVSEKIYDDSQNHFMDERAAILRKRSADIKKKIDNGTKAILDGVDSDELRSAVKELSAQKKQIDQQIVQIEAAADNNGRTFEEVREMAKNFSDISKLPRDQQKRIVQKFIWRIYVYDSENPDDGDIVKIVLAPTEAARDELNSMAEDYVAITDMLTSTNGTSQGVPMKNPTCFSEKAGFYFLIS

SEQ ID NO: 2333 - protein, 546 aa, Unknown
  Description of Unknown: Integrase B2334 sequence
  PTHR30461:SF3,SM00857,G3DSA:1.10.10.2600,IPR036162,PF13408, PS51737,IPR025827,G3DSA:3.40.50.1390,IPR006119,IPR038109, PF07508,IPR011109,SSF53041,PTHR30461,Coil, PS51736,cd00338,PF00239
MPEALNAVIYARYSSDRQTEQSIEGQLRECYAFAKANDIAVIDTYIDRAISGKTDNRPAFQKMIEDSAKRQFQAVIVYRLDRFTRNRYDSAIYKARLKKNGVKVLSAMENLNGSPESIIMESLLEGMAEYYSVELSQKITRGMRENALKGKALGGQRVLGYKVNSDCYFEIDETTAPVVVDIFKLYSSGKTVKEICDILNARGVKTARGGAFNKNSLHTILTNKKYIGIYKTKYGEIVGGIPAIIDKELFEMVALRMEQNKKAPARAKAEINYLLSTKLFCGKCRSAMVGESGTSKTGKKYYYYACVKKKREKACDKSNVKKDWIEDLVIQRTVTDILKDDVIEKIADRLVELQKAEAAESGTMLYLQNSLAEIQVSIKNIMTAIEKGIITESTKTRLTELEDEKRNVEIEIAKESIARRIISREQIIYWISSFKDGNITSEKYRQQLIDTFVHAVFVYDDKIVITYNYSGENNTATISDLDLSSPPKEEASNSSFTRMSLRLCIGWGTPDGVPFPFSLPRNAVFCVLRRFKPVGVLVYPSGFFVP

SEQ ID NO: 2334 - protein, 546 aa, Unknown
  Description of Unknown: Integrase B2335 sequence
  PTHR30461:SF3,IPR036162,PS51737,IPR011109,PTHR30461, PF00239,G3DSA:1.10.10.2600,IPR006119,SSF53041,cd00338, SM00857,IPR025827,IPR038109,PS51736,mobidb-lite, PF13408,G3DSA:3.40.50.1390,PF07508,Coil
MGKKQKTNGGDAVIYARYSSHNQRDVSIEQQVEACRKHAAELGLTVTATYEDRAISGKTDKRPSFQRMMRDAEQHKFAYVLAWKSNRIGRNMMQALVNESRLVDCGVKVFYAEEDFDDNAAGRFALRSMMNVNQFYIENMAEDVKRGLYDNAKKGLVNGSLPLGYKRGADGKPEIDEPKAAIVREIYTRVAAGELFASIADDLNARGIKTARGREWNKGSFHVLCHNDRYRGIYMYGDIRIPGGMPRIISDELFYDAQEAYSMKKDNRYGRARHGAENYLLTGKLYCGHCGGYMVGISGTSKTGEMHYYYACQKHRLEHTCEKKATRRDVIENAVARAIMMYCLDDETIDFIVDSTIAYFKQKDHELHIEAMENELAAVQQAISNLMKAIEAGIITPTTRTRLLDLEEQQAKLSAKINTAKAERVEIDRDDLIAGLQLFRTGDIKNKKFLAKLFNTFLIAVYLYDDNRLKIVFSFTGNHNSVEIPLELDNDCPDSEIVSDETEVRMSHLECRKNLGSPPSSGEAEKGDDCSDGRFVRTAPLPPHKK

SEQ ID NO: 2335 - protein, 546 aa, Unknown
  Description of Unknown: Integrase B2336 sequence
  PTHR30461:SF3,SM00857,G3DSA:1.10.10.2600,IPR036162,PF13408, PS51737,G3DSA:3.40.50.1390,IPR025827,IPR006119,IPR038109, PF07508,SSF53041,IPR011109,PF00239,PTHR30461, PS51736,Coil,cd00338
MEETIKAVGYARFSSSMQREESITAQKRYMMMYAKRNNMEVIDWYCDEAKSAKTVNRPAFQKMINDAKNNPEFKAVLVHKTDRFSRNLSDSIQYKKLLEEYGVQVIFVNERFENNPESHLLYHIMGSVNQFYNENLAREVMKGLKENAYQCKFTGGRPPLGYDVDKDLKLVINEKEAEAVRLIFEMSAEGYGYGETIDKLNILGYKTKKGLPFVKNSLYEILRNEKYKGTYIFNRSCSANSLNKRNNHRRKPEEEIIRIENGCPAIVSSGLWHRANAVKKATRSSYTNAKNTYLLTGLIHCGECGGKFHGNVRYNKNNTNLVYRCSSKKNKRKCESKEIRCEYLDSFVIDKFVEFFFNDDNIKVITKQLNEQYNKSCISDLEYNEAKSTLKILEKSRNNLVEAIAKTGINDIMSDKIKEYEEQIKKTAEFIQKYEKQKIDRVITEDEIREQINHLKDYFYNPKNLIRTKYVLSQYIDKIDISNENVQVQFKVSMSPSDNTDGDCFCVHTEMIKRKYLFDYVCEKVDFEQWNIEKLNKSESEHRKGA

SEQ ID NO: 2336 - protein, 546 aa, Unknown
  Description of Unknown: Integrase B2337 sequence
  PTHR30461:SF3,SM00857,G3DSA:1.10.10.2600,IPR036162,PF13408, PS51737,G3DSA:3.40.50.1390,IPR025827,IPR006119,IPR038109, PF07508,IPR011109,SSF53041,PTHR30461,Coil, PS51736,cd00338,PF00239
MSRASPKVITIPANPNLVKDKEIKRQLQVAAYCRVSTDEDEQLTSYEAQKTHYTDKIMTNPDWTMAGIFADEGITGTSAEKRPEFLKMIRKCRQKKIDVVLVKSISRFARNTVDCLKYIRALKELGIAVIFEKENINTLEADSEMLITMMGAFAQAESESISANVRWGKRQAMREGRAIIQYKYLYAYEKGDDGLPRIIPEQAEIYRWICNSFLSGQSLRMIRDTLEREGHPAPNGGSNWSIATIRNMLKSEKYCGDVLMQKSYIQDCISGKVVRNTGQLPMYLIQDHHDAIISRETFNAVQAEFSRRNAGRAPSKKLAPTGRSCYSAKYALTERLVCGDCGTLYRRCVWSKKGVKRAVWRCSSRIDYGTKYCKSSPTIYEKPLQRAILAAINSVMSQKVVLIDQIADAMRMELLPLPGEALSMTEIEKRLSELEQEFQAVFQLSRTEDGGYMKYASTFKRINDELAELKEKKKYLLKQQQDDSASNKRIKDAMDILNAGSAEVTEWDESLIRQLVDMVKVISEDRIIVRLKGGLEIKKALDGERD

SEQ ID NO: 2337 - protein, 546 aa, Unknown
  Description of Unknown: Integrase B2338 sequence
  PTHR30461:SF3,SM00857,G3DSA:1.10.10.2600,IPR036162,PF13408, IPR025827,G3DSA:3.40.50.1390,PS51737,IPR006119,IPR038109, PF07508,IPR011109,SSF53041,PF00239,PTHR30461, PS51736,Coil,cd00338
MRVSVNLNAQKPDTTTNAVIYARYSSHGQTEQSIEGQLAKGHEYAAAQGYTVVHEYIDRAMTGRNDNREAFQKMLSDTGKHQFQVVIVWKVDRFGRNREEIAFNKHTCKKNGVRVEYVAESLPNSPEAVILESVLEGMAEYYSIQLSQNIRRGQLESAKKCQCVGGSVPLGYTLDSDKHFVIDPQTAPVVKKIFDLYAEGATISEITGQLNEQGIRTARKQLFTKNSLTKLLKNEKYIGVYTYKDIVRVEGGVPAIVDKSTFDRVQELLKINRRAPSHTWTKVEYLLTDKLFCGHCGSPMVGESGFSHTGAKYSYYGCIKRRREKACDKKPVRQDWIEALVLDETVKLLHDDELMEYIIDRTWEYYQVTDKVQEEKAVLEAQLAEVDKAINNLVRAIEAGIFNAATKSRMDELDAQKAALTASLADLELTSGIRITRDHIEYFLLRLRDLDVKDRECQKRLVQTFVNAVFIYDDGRVKITYNYSGQSSTITLNQIASAEKGKGFVCCLPCSTSSPRFPRGVAAFFCFGVLGKIGCKYTTNFSCIVL

SEQ ID NO: 2338 - protein, 546 aa, Unknown
  Description of Unknown: Integrase B2339 sequence
  PTHR30461:SF3,cd00338,SM00857,G3DSA:1.10.10.2600,IPR036162, PF13408,IPR025827,G3DSA:3.40.50.1390,PS51737,IPR006119, IPR038109,PF07508,SSF53041,IPR011109,PTHR30461, PS51736,Coil,PF00239
MEETIKAVGYARFSSSMQREESITAQKRYMMMYAKRNNMEVIDWYCDEAKSAKTVNRPAFQKMINDAKNNPEFKAVLVHKTDRFSRNLSDSIQYKKLLEEYGVQVIFVNERFENNPESHLLYHIMGSVNQFYNENLAREVMKGLKENAYQCKFTGGRPPLGYDVDKDLKLVINEKEAEAVRLIFEMSAEGYGYGETIDKLNILGYKTKKGLPFVKNSLYEILRNEKYKGTYIFNRSCSANSLNKRNNHRRKPEEEIIRIENGCPAIVSSGLWHRANAVKKATRSSYTNAKNTYLLTGLIHCGECGGKFHGNVRYNKNNTNLVYRCSYKKNKRKCESKEIRCEYLDSFVIDKFVEFFFNDDNIKVITKQLNEQYNKSCISDLEYNEAKSTLKILEKSRNNLVEAIAKTGINDIMSDKIKEYEEQIKKTAEFIQKYEKQKIDRVITEDEIREQINHLKDYFYNPKNLIRTKYVLSQYIDKIDISNENVQVQFKVSMSPSDNTDGDCFCVHTEMIKRKYLFDYVCEKVDFEQWNIEKLNKSESEHRKGA

SEQ ID NO: 2339 - protein, 546 aa, Unknown
  Description of Unknown: Integrase B2340 sequence
  PTHR30461:SF3,cd00338,SM00857,G3DSA:1.10.10.2600,IPR036162, PF13408,IPR025827,G3DSA:3.40.50.1390,PS51737,IPR006119, IPR038109,PF07508,IPR011109,SSF53041,PTHR30461, PS51736,Coil,PF00239
MNETIKVVGYARFSSSMQREESITAQKRYMMMYAKRNNMEVIDWYCDEAKSAKTVNRPEFQRMINDAKNNPEFKAVLVHKTDRFSRNLSDSIQYKKILEEYGVQVIFVNERFEDNPESHLLYHIMGSVNQFYNENLAREVMKGLKENAYQCKFTGGRPPLGYDVDKDLKLVINEKEAEAVRLIFEMSAEGYGYGETIDKLNILGYKTKKGLPFVKNSLYEILKNEKYKGTYIFNRSCSANSLNKRNNHRRKPEEEIIRIENGCPAIVSSGLWHRANAVKKATRSSFTNAKNTYLLTGLIHCGECGGKFHGNIRYNKNNTNLVYRCSAKKNKRKCESKEIRCEYLDSFVIDKFVEFFFNDDNIKVITKQLNEQYSKSCISDLEYNEAKSTLKILEKSRNNLVEAIAKTGINDIMSDKIKEYEEQIKKTSEFIHKYEKQKIDRIITEDEVREQINHLKDYFYNPKNIIRTKFVLSQYIDRIDITNENVQVKFKVSMSPSGNTDGDYFCVHTETIKRKYLFDYVCEKVDFEQWDIEKLNKSESEHRKGA

SEQ ID NO: 2340 - protein, 546 aa, Unknown
  Description of Unknown: Integrase B2341 sequence
  PTHR30461:SF3,cd00338,SM00857,G3DSA:1.10.10.2600,IPR036162, PF13408,IPR025827,G3DSA:3.40.50.1390,PS51737,IPR006119, IPR038109,PF07508,IPR011109,SSF53041,PTHR30461, PS51736,Coil,PF00239
MNETIKVVGYARFSSSMQREESITAQKRYMMMYAKRNNMEVIDWYCDEAKSAKTVNRPEFQRMINDAKNNPEFKAVLVHKTDRFSRNLSDGIQYKKILEEYGVQVIFVNERFEDNPESHLLYHIMGSVNQFYNENLAREVMKGLKENAYQCKFTGGRPPLGYDVDKDLKLVINEKEAEAVRLIFEMSAEGYGYGETIDKLNILGYKTKKGLPFVKNSLYEILRNEKYKGTYIFNRSCSANSLNKRNNHRRKPEEEIIRIENGCPAIVSSGLWHRANAVKKATRSSYTNAKNTYLLTGLIHCGECGGKFHGNIRYNKNNTNLVYRCSSKKNKRKCESKEIRCEYLDSFVIDKFVEFFFNDDNIKVITKQLNEQYNKSCISDLEYNEAKSTLKILEKSRNNLVEAIAKTGINDIMSDKIKEYEEQIKKTAEFIQKYEKQKIDRVITEDEIREQINHLKDYFYNPKNLIRTKYVLSQYIDKIDISNENVQVQFKVSMSPSDNTDGDCFCVHTEMIKRKYLFDYVCEKVDFEQWNIEKLNKSESEHRKGA

SEQ ID NO: 2341 - protein, 546 aa, Unknown
  Description of Unknown: Integrase B2342 sequence
  PTHR30461:SF3,SM00857,G3DSA:1.10.10.2600,IPR036162,PF13408, PS51737,G3DSA:3.40.50.1390,IPR025827,IPR006119,IPR038109, PF07508,IPR011109,SSF53041,PTHR30461,Coil, PS51736,cd00338,PF00239
MKKFPIDLSCLTEEEISQFQEDPYTLYNGDQDVALYLRYSSTGQSDQSIEGQLRDCRAFCKANHYRIVAIYVDRATTARKDVEKRVHLMEMVADSAKQNWEYVIVWKLDRFARNRNDSAIMKMRLRKNGVKVLSATEHLTDSPESIILESVLEGMAEFFSAELSQKVTRGMRESALKCHSVGGHIPLGYKVENHKLVVDPDTAHIVQEAFSLYANGESVADICRKFNSAGYKTAKNTEFNRSSFKAMFRNTRYIGTYTYKDIIIENGIPAIIDKELFETVQRRLSKTATAPARGKAKVDYLLSGKLFCGHCGASMNGESGAGRHGKVYHYYSCYTKKRKLGCDKRPLKKDYIEGIVARDALNLLTDQLIDEIADMAIRQSEQDLINDTHIPQLTAQLSEVEKSITNITAAIEKGIASETLMNRLVQLEHEKKTLNKEIKAEEKFVYRIDRDQIIFWLSQFKYGNIEDEDFRRRLIDLLVNSVTVWDEPDGYKITTAYNLTSCKTKTFRVEKNPAAEEATGFDFGESECAKKTRNLTVSGLFVCISC

SEQ ID NO: 2342 - protein, 546 aa, Unknown
  Description of Unknown: Integrase B2343 sequence
  PTHR30461:SF3,SM00857,G3DSA:1.10.10.2600,IPR036162,PS51737, G3DSA:3.40.50.1390,IPR006119,IPR038109,PF07508,IPR011109, SSF53041,PF00239,PTHR30461,Coil,cd00338
MYKEYPTFYNYEVKEYGRKSRTDDPLLSTDEILEKHSKIIEEYAVKYLGGPIPQENKYMEVGSGESLKERPEITRLLKDIEDPAVKAIIVVDVQRLSRGDLEDAGRLIRLLRYTNTYVITPMKTYDLRDEYDRDAFERELKRGNEYLEYYKKIQARGKLLSVKEGNYVGSTAPYGFDRIEKFDGKKSYHTLIERKDQADIVRMIFNWYCEEDIGVTAICRRLEELGAKTKTGHSTWKPSIIFSILENHHYIGCVRWNWRKTVKIIEDQEIKKLRPKAKVDEFLLFEGKHDGIISEEQFNKAREIRGKRHRTRRDLTLKNPFSGIMFCKKCGHKIGYNTYTRHGVEYASPKLVCNNQVHCKSGSVKYSEVFEYVRKVLKDCISDFEVRIENDQDDSVKLHRDLIGRLTKQLANLEKKEMEQWEAQYDPDPAKRLPQHIFVKLNEKVLKEKEEVNKALAKAKDSAPKHINYREELIKTKDALRILEDEKLDAKTKNQYLKTVINKMIYERDPIVQITKENAEKYSMQSAKGMQYYNPPYKITIELKCN

SEQ ID NO: 2343 - protein, 546 aa, Unknown
  Description of Unknown: Integrase B2344 sequence
  PTHR30461:SF3,cd00338,SM00857,G3DSA:1.10.10.2600,IPR036162, PS51737,G3DSA:3.40.50.1390,IPR006119,IPR038109,PF07508, SSF53041,IPR011109,PTHR30461,Coil, PF00239
MYKEYPTFYNYETKEYGRKSRTDDPLLSTDEILEKHSKIIEEYAVKYLGGPIPQENKYMEVGSGESLKERPEITRLLKDIEDPAVKAIIVVDVQRLSRGDLEDAGRLIRLLRYTNTYVITPMKTYDLRDEYDRDAFERELKRGNEYLEYYKKIQARGKLLSVKEGNYVGSTAPYGFDRIEKFDGKKSYHTLIERKDQADIVRMIFNWYCEEDIGVTAICRRLEELGVKTKTGHSTWKPSIIFSILENHHYIGCVRWNWRKTVKIIEDQEIKKLRPKAKVDEFLLFEGKHDGIISEEQFNKAREIRGKRHRTRRDLTLKNPFSGIMFCKKCGHKIGYNTYTRHGVEYAPPKLVCNNQVHCKSGSVKYSEVFEYVRKVLKDCISDFEVRIENDQDDSVKLHRDLIGRLTKQLADLEKKEIEQWEAQYDPDPAKRLPQHIFVKLNEKVLKEKEEVNKALAKAKDSAPKHINYREELIKTKDALRILEDEKLDAKTKNQYLKTVINKMIYERDPIVQITKENAEKYSMQSAKGMQYYNPPYKITIELKCD

SEQ ID NO: 2344 - protein, 546 aa, Unknown
  Description of Unknown: Integrase B2345 sequence
  PTHR30461:SF3,SM00857,G3DSA:1.10.10.2600,IPR036162,PF13408, PS51737,G3DSA:3.40.50.1390,IPR025827,IPR006119,IPR038109, PF07508,SSF53041,IPR011109,PF00239,PTHR30461, PS51736,Coil,cd00338
MKKFPIDLSCLTEEEISQFQEDPYTLYNGDQNVAIYLRYSSTGQSDQSIEGQLRDCRTFCKANHYRIVAIYVDRATTARKDVEKRVHLMEMISDSAKQNWEYVIVWKLDRFARNRNDSAIMKMRLRKNGVKVLSATEHLTDSPESIILESVLEGMAEFFSAELSQKVTRGMRESALKCHSVGGHIPLGYKVENHKLVVDPDTAHIVQEAFSLYANGESVAAICRKFNSAGYKTAKNTEFNRSSFKAMFRNTRYIGTYTYKDIVIENGIPAIIDKELFETIQRRLSKTATAPARGKAKVDYLLSGKLFCGHCGASMNGESGAGRHGKVYHYYSCYTKKRKLGCDKRPLKKDYIEGIVARDALNLLTDQLIDEIADMAIRQSEQDLINDTHIPQLTAQLSEVEKSITNITAAIEKGIASETLMNRLVQLEHEKKTLNKEIKAEEKFVYRIDRDQIVFWLSQFKYGNIEDEDFRRRLIDLLVNSVTVWDEPDGYKITTAYNLTSCKTKTFRVEKNPAAEEATGFDFGESECAKKTRNLTVSGLFVCISY

SEQ ID NO: 2345 - protein, 546 aa, Unknown
  Description of Unknown: Integrase B2346 sequence
  PTHR30461:SF3,IPR036162,PS51737,IPR011109,PTHR30461, PF00239,G3DSA:1.10.10.2600,IPR006119,SSF53041,cd00338, SM00857,IPR025827,IPR038109,mobidb-lite,PS51736, PF13408,G3DSA:3.40.50.1390,PF07508,Coil
MGKKQKATGGDAVIYARYSSHNQRDVSIEQQVEACRKHAAELGLTVTATYEDRAISGKTDKRPSFQRMMRDAEQHKFAYVLAWKSNRIGRNMMQALVNESRLVDCGVKVFYAEEDFDDNAAGRFALRSMMNVNQFYIENMAEDVKRGLYDNAKKGLVNGSLPLGYKRGADGKPEIDEPKAAIVREIYTRVAAGELFVSIAADLNARGIRTARGREWNKGSFHVLCHNDRYRGIYMYGDIRIPGGMPRIISDELFYDAQEAYGMKKDNRYGRARHGAENYLLTGKLYCGHCGSYMVGISGTSKTGEMHYYYACQKHRLEHACEKKAIRRDVIENAVARAIMMYCLDDETIDFIVDSTIAYFKQKDHELHIEAMENELAAVQQAISNLMKAIEAGIITPTTRTRLLDLEEQQAKLSAKINTAKAERVEIDRDDLIAGLQLFRTGDIKNKKFLAKLFNTFLLAVYLYDDNRLKIVFSFTGNHNNIEIPLELDNDCPDSESGPYETEVRMSHLECRKNSGTPPSSGGAEKGDGCSSGRFVRTAPLPPHKK

SEQ ID NO: 2346 - protein, 546 aa, Unknown
  Description of Unknown: Integrase B2347 sequence
  PTHR30461:SF3,IPR036162,PS51737,IPR011109,PTHR30461, PF00239,G3DSA:1.10.10.2600,IPR006119,SSF53041,cd00338, SM00857,IPR025827,IPR038109,mobidb-lite,PS51736, PF13408,G3DSA:3.40.50.1390,PF07508,Coil
MPRTSRKAKTSPSAAMRLVAYYRYSGGSRQTEQSIEGQRHDCEAYARAHGMTIAKEYIDRHISGKTDDRPAFQQMISDSDRHLFDAVICWKTDRLARNRYDSAIYKNRLRKNGVKILYAAETIVDGPEGIILEGLMESLAEYYSAELSQKLRRGQRESAMKCIALGGNRSFGYDIGADKHYCINEQQAPAVRYIFEQYAAGHTAAEIVAHLNASGIRTSRGHEFNKNSILRIITNEMYLGVYKYSDIRIEGGVPAMIDRDLFDRCQKQLAYNRARGGCASRDQRADYLLSGKLFCGLCSRPMKGVSGTSHTGDKHYYYACPGRTDKKGCTKSYVEKDALESAIVRATAQYVLAPEILNRIIDQIQTLQAQREKPKPNSEKQALKAQLADVRAKQEHLLDALESGGSVRLVARLQQLDQQEAELNARIEAIQDPVAPRTFTRDELEFMLSQFRRADDEQTTAYRRRLLETFVSSVVLAEDGATVCFNLSASDAADADRISVPFSASSKNKNPAESDENSSNSAGSTALRLVEAMGVEPSFMISRAIR

SEQ ID NO: 2347 - protein, 546 aa, Unknown
  Description of Unknown: Integrase B2348 sequence
  PTHR30461:SF3,IPR036162,PS51737,IPR011109,PTHR30461, PF00239,G3DSA:1.10.10.2600,IPR006119,SSF53041,cd00338, SM00857,IPR025827,IPR038109,mobidb-lite,PS51736, PF13408,G3DSA:3.40.50.1390,PF07508,Coil
MGKKQKATGGDAVIYARYSSHNQRDVSIEQQVEACRKHAAELGLTVTATYEDRAISGKTDKRPSFQRMMRDAEQHKFAYVLAWKSNRMGRNMMQALVNESRLVDCGVKVFYAEEDFDDNAAGRFALRSMMNVNQFYIENMAEDVKRGLYDNAKKGLVNGSLPLGYKRGADGKPEIDEPKAAIVREIYTRVAAGELFASIAADLNARGIRTARGREWNKGSFHVLCHNDRYRGIYMYGDIRIPGGMPRIISDELFYDAQEAYGMKKDNRYGRARHGAENYLLTGKLYCGHCGGYMVGISGTSKSGEMHHYYACQKHRLEHTCEKKAIRRDVIENAVAQAIMMYCLDDETIDFIVDSTIAYFKQKDHELHIEVMENELATVQQAISNLMKAIEAGIITPTTRTRLLDLEEQQAKLSAKINTAKAERVEIDRDDLIAGLQLFRTGDIKNKKFLAKLFNTFLLAVYLYDDNRLKIVFSFTGNHNNIEIPLELDNDCPDSESGPYETEVRMSHLECRKNSGTPPSSGGAEKGDGCSSGRFVRTVPLPPHKK

SEQ ID NO: 2348 - protein, 546 aa, Unknown
  Description of Unknown: Integrase B2349 sequence
  PTHR30461:SF3,SM00857,G3DSA:1.10.10.2600,IPR036162,PF13408, PS51737,G3DSA:3.40.50.1390,IPR025827,IPR006119,IPR038109, PF07508,IPR011109,SSF53041,PF00239,PTHR30461, PS51736,Coil,cd00338
MQRAVIYARYSPGPNQTEQSIEGQVRECTKYAELHDLRIVGTYVDRKISGKTDNRREFQRMIDDSEKHIFDVIILYHTDRFARNRYDSAIYKHKLKENGVELRYATTDIPKGPEGIILESIMEGWAEYYSAELSRKIKRGMRESALKCHSTGAGRCLGYRTAEDKSLVIEPEGAKAVQTVFDMYIKGKSHADICRYLNDCGFRTAQGKLFNKNSVTHIIRNKRYIGVYTYDDITIEDGIPAIISKDTFHLAQLEAARRKTAKRPKEPKAEYLLSGKAFCGHCQKPLVGVSGTGKSGNKWYYYYCQESRAKRGCTKKPVKRDWLEREVVERTVAEVLQPEVIQHIAKKCYDLQMEYRQDNSDVLFYELKLKDVRKAIKNTMHAIESGVKTKTLPARLQELENEEEALEAELAIAKASDFVITTDQIEFLLTQFAEPWECESEEEYHRRIIKCFVHKVFLFDDKLLIYYNVSRDGKTREQSEAELLEEALGEGFDKRSSGSTKRNGHDEKSCPFLLAVELFRTSPILAKERSRVSYPGPLLFKADFTR

SEQ ID NO: 2349 - protein, 546 aa, Unknown
  Description of Unknown: Integrase B2350 sequence
  PTHR30461:SF3,SM00857,G3DSA:1.10.10.2600,IPR036162,PF13408, IPR025827,G3DSA:3.40.50.1390,PS51737,IPR006119,IPR038109, PF07508,SSF53041,IPR011109,PF00239,PTHR30461, PS51736,Coil,cd00338
MKKFPIDLSCLTEEEISQFQEDPYTLYNGDQEVALYLRYSSTGQSDQSIEGQLRDCRAFCKANHYRIVAIYVDRATTARKDVEKRVHLMEMVADSAKQNWEYVIVWKLDRFARNRNDSAIMKMRLRKNGVKVLSATEHLTDSPESIILESVLEGMAEFFSAELSQKVTRGMRESALKCHSVGGHIPLGYKVENHKLVVDPDTAHIVQEAFSLYANGESVADICRKFNSAGYKTAKNTEFNRSSFKAMFRNTRYIGTYTYKDIVIENGIPAIIDKELFETVQRRLSKTATAPARGKAKVDYLLSGKLFCGHCGASMNGESGAGRHGKVYHYYSCYTKKRKLGCDKRPLKKDYIEGIVARDALNLLTDQLIDEIADMAIRQSEQDLINDTHIPQLTAQLSEVEKSITNITAAIEKGIASETLMNRLVQLEHEKKTLNKEIKAEEKFVYRIDRDQIIFWLSQFKYGNIEDEDFRRRLIDLLVNSVTVWDEPDGYKITTAYNLTSCKTKTFRVEKNPAAEEATGFDFGESECAKKTRNRKASGLFVCISC

SEQ ID NO: 2350 - protein, 546 aa, Unknown
  Description of Unknown: Integrase B2351 sequence
  PTHR30461:SF3,SM00857,G3DSA:1.10.10.2600,IPR036162,PF13408, PS51737,G3DSA:3.40.50.1390,IPR025827,IPR006119,IPR038109, PF07508,SSF53041,IPR011109,PF00239,PTHR30461, PS51736,Coil,cd00338
MKKFPIDLSCLTEEEISQFQEDPYTLYNGDQNVAIYLRYSSTGQSDQSIEGQLRDCRTFCKANHYRIVAIYVDRATTARKDVEKRVHLMEMISDSAKQNWEYVIVWKLDRFARNRNDSAIMKMRLRKNGVKVLSATEHLTDSPESIILESVLEGMAEFFSAELSQKVTRGMRESALKCHSVGGHIPLGYKVENHKLVVDPDTAHIVQEAFSLYANGESVADICRKFNSAGYKTAKNTEFNRSSFKAMFRNTRYIGTYTYKDIVIENGIPAIIDKELFETVQRRLSKTATAPARGKAKVDYLLSGKLFCGHCGASMNGESGAGRHGKVYHYYSCYTKKRKLGCDKRPLKKDYIEGIVSRDALNLLTDQLIDEIADMAIRQSEQDLINDTHIPQLTAQLSEVEKSITNITAAIEKGIASETLMNRLVQLEHEKKTLNKEIKAEEKFVYRIDRDQIVFWLSQFKYGNIEDEDFRRRLIDLLVNSVTVWDEPDGYKITTAYNLTSCKTKTFRVEKNPAAEEATGFDFGESECAKKTRNRKVSGLFVCISC

SEQ ID NO: 2351 - protein, 546 aa, Unknown
  Description of Unknown: Integrase B2352 sequence
  PTHR30461:SF3,cd00338,SM00857,G3DSA:1.10.10.2600,IPR036162, PF13408,IPR025827,G3DSA:3.40.50.1390,PS51737,IPR006119, IPR038109,PF07508,SSF53041,IPR011109,PTHR30461, PS51736,Coil,PF00239
MEETIKAVGYARFSSSMQREESITAQKRYMMMYAKRNNMEVIDWYCDEAKSAKTVNRPAFQKMINDAKNNPEFKAVLVHKTDRFSRNLSDSIQYKKLLEEYGVQVIFVNERFENNPESHLLYHIMGSVNQFYNENLAREVMKGLKENAYQCKFTGGRPPLGYDVDKDLKLVINEKEAEAVRLIFEMSAEGYGYGETIDKLNILGYKTKKGLPFVKNSLYEILRNEKYKGTYIFNRSCSANSLNKRNNHRRKPEEEIIRIENGCPAIVSSGLWHRANAVKKATRSSYTNAKNTYLLTGLIHCGECGGKFHGNIRYNKNNTNLVYRCSAKKNKRKCESKEIRCEYLDSFVIDKFVEFFFNDDNIKVITKQLNEQYSKSCISDLEYNEAKSTLKILEKSRNNLVEAIAKTGINDIMSDKIKEYEEQIKKTSEFIHKYEKQKIDRVITEDEVREQINHLKDYFYNPKNIIRTKFVLSQYIDRIDISNDNVQVHFKVSISPSGNTDGDCICVHTEMIKRKYLFDYVCEKVDFEQWNIEKLNKSETEHRKGA

SEQ ID NO: 2352 - protein, 546 aa, Unknown
  Description of Unknown: Integrase B2353 sequence
  cd00338,SM00857,G3DSA:1.10.10.2600,IPR036162,PF13408, IPR025827,G3DSA:3.40.50.1390,PS51737,IPR006119,IPR038109, PF07508,IPR011109,SSF53041,PTHR30461,PS51736, Coil,PF00239
MKKRMIPMAVSSADFDPSMNMVDPMEASAFGVIYARYSSHSQRDVSIEQQVKDCMAYAARNNIYIVACYADRHMTGRTDRRPEFHRMLRDAEAGSWSFVLTWKNDRFARNRYDAAIYKAKLKKCGVRCLFSQEYIPAGPEGILLEAMLEGDAEFRSAQMAVDIKRGLAYNAEHCMVTGAIPFGYRRTKDYTLELDPDRAPLVKEIYDRFLAGWKIIDIANDLNRRGITTASGKPWGRNSFHSMLSNERYTGVYIYGDIRTPGGLPAIIDRDTWLAVQRRLHTKKNPVGRSRSYGDYLLTGKLFCGHCQRPMVGVSGKTRPGKPLYYYYVCQGRRLSHDCQKQNVRRDWLEEKVCAMVAGLVMQDNVVEWMADCVVDYQRRHKEDGTLQALASQLKQTRAAIGNVMAAIEAGIITATTKDRLLELEAQEQKLAQALETEKALRPTYTRERVIFWLEQFRAGDLTDLAFRLRLVTTFVNAIYLYDDHLKVVLNYTGRNSSVDFPLVEDALDSGAVDGGPYSVETGPPKIRPSAFGRWPYFWASLARLA

SEQ ID NO: 2353 - protein, 546 aa, Unknown
  Description of Unknown: Integrase B2354 sequence
  PTHR30461:SF3,cd00338,SM00857,G3DSA:1.10.10.2600,IPR036162, PF13408,PS51737,G3DSA:3.40.50.1390,IPR025827,IPR006119, IPR038109,PF07508,IPR011109,SSF53041,PTHR30461, PS51736,Coil,PF00239
MEETIKAVGYARFSSSMQREESITAQKRYMMMYAKRNNMEVIDWYCDEAKSAKTVNRPAFQKMINDAKNNPEFKAVLVHKTDRFSRNLSDSIQYKKLLEEYGVQVIFVNERFEDNPESHLLYHIMGSVNQFYNENLAREVMKGLKENAYQCKFTGGRPPLGYDVDKDLKLVINEKEAEAVRLIFEMSAEGYGYGETIDKLNILGYKTKKGLPFVKNSLYEILRNEKYKGTYIFKRSCSANSLNKRNNHRRKPEEEIIRIENGCPAIVSSGLWHRANAVKKATRSSYTNAKNTYLLTGLIHCGECGGKFHGNVRYNKNNTNLVYRCSSKKNKRKCESKEIRCEYLDSFVIDKFVEFFFNDDNIKVITKQLNEQYNKSCISDLEYNEAKSTLKILEKSRNNLVEAIAKTGINDIMSDKIKEYEEQIKKTAEFIQKYEKQKVDRVITEDEIREQINHLKDYFYNPKNIIRTKYVLSQYIDRIDISNENVQVQFKVSMSPSGNTDGDYFCVHTEMIKRKYLFDYVCEKVDFEQWNIEKLNKSESEHRKGA

SEQ ID NO: 2354 - protein, 546 aa, Unknown
  Description of Unknown: Integrase B2355 sequence
  PTHR30461:SF3,IPR036162,PS51737,IPR011109,PTHR30461, PF00239,G3DSA:1.10.10.2600,IPR006119,SSF53041,cd00338, SM00857,IPR025827,IPR038109,mobidb-lite,PS51736, PF13408,G3DSA:3.40.50.1390,PF07508,Coil
MPRTSRKAKTSPSAAMRLVAYYRYSGGSRQTEQSIEGQRHDCEAYARAHGMTIAKEYIDRHISGKTDDRPAFQQMISDSDRHLFDAVICWKTDRLARNRYDSAIYKNRLRKNGVKILYAAETIVDGPEGIILEGLMESLAEYYSAELSQKLRRGQRESAMKCIALGGNRSFGYDIGADKHYCINEQQAPAVRYIFEQYAAGHTAAEIVAHLNASGIRTSRGHEFNKNSILRIITNEMYLGVYKYSDIRIEGGVPAMIDRDLFDRCQKQLAYNRARGGCASRDQRADYLLSGKLFCGLCSRPMKGVSGTSHTGDKHYYYVCPGRTDKKGCTKSYVEKDALESAIVRATAQYVLAPEILNRIIDQIQTLQAQREKPKPNSEKQALKAQLADVRAKQEHLLDALESGGSVRLVARLQQLDQQEAELNARIEAIQDPVAPRTFTRDELEFMLSQFRRADDEQTTAYRRRLLETFVSSVVLAEDGATVCFNLSASDAADADRISVPFSASSKNKNPAESGENSSNSAGSTALRLVEAMGVEPSFMISRAIR

SEQ ID NO: 2355 - protein, 546 aa, Unknown
  Description of Unknown: Integrase B2356 sequence
  PTHR30461:SF3,SM00857,G3DSA:1.10.10.2600,IPR036162,PF13408, PS51737,G3DSA:3.40.50.1390,IPR025827,IPR006119,IPR038109, PF07508,IPR011109,SSF53041,PTHR30461,Coil, PS51736,cd00338,PF00239
MPEALNAVIYARYSSDRQTEQSIEGQLRECYAFAKANDIAVIDTYIDRAISGKTDNRPAFQKMIEDSAKRQFQAVIVYRLDRFTRNRYDSAIYKARLKKNGVKVLSAMENLNGSPESIIMESLLEGMAEYYSVELSQKITRGMRENALKGKALGGQRVLGYKVNSDCYFEIDETTAPVVVDIFKLYSSGKTVKEICDILNARGVKTARGGAFNKNSLHTILTNKKYIGIYKTKYGEIVGGIPAIIDKELFEMVALRMEQNKKAPARAKAEINYLLSTKLFCGKCRSAMVGESGTSKTGKKYYYYACVKKKREKACDKSNVKKDWIEDLVIQRTVTDILKDDVIDKIADRLVELQKAEAAESGTMLYLENSLAEIQVSIKNIMTAIEKGIITESTKTRLTELEDEKRNVEIEIAKESIARRIISREQIIYWISSFKDGNITSEKYRQQLIDTFVHAVFVYDDKIVITYNYSGENNTATISDLDLSSPPKEEASNSSFTRMSLRLCIGWGTPDGVPFPFSLPRNAVFCVLRRFKPVGVLVYPSGFFVP

SEQ ID NO: 2356 - protein, 546 aa, Unknown
  Description of Unknown: Integrase B2357 sequence
  cd03768,PTHR30461:SF3,SM00857,G3DSA:1.10.10.2600,IPR036162, PF13408,PS51737,IPR025827,G3DSA:3.40.50.1390,IPR006119, IPR038109,PF07508,IPR011109,SSF53041,PTHR30461, PS51736,Coil,PF00239
MKAAIYSRKSKFTGKGDSIENQIQLCMDYSKSIGIKEFLVYEDEGFSGGNIDRPQFKKMMQDAKDKKFDCLVCYRLDRISRNVSDFSTLIEKLNKLEISFISIKEQFDTSTPMGRAMMFISSVFAQLERETIAERIKDNMYELARSGRWLGGKTPHGFTSKKISFLDENLKERSMYQLEVNDEQMEIVKLIFNKYLELRSLSQLYKYVYHNGIKGPRGGKFDPSSLSGILRNPAYVKANEDILDYLRSLGMEVVGVPDGQCGILTYAKNTSNSIAAIAKHHGVIEPDVWLEVQSILNENKDKIPRISTGKTALLSGLLKCGKCGSNMRIMYKGKRNDEDLKYYYVCGTKRSLGVEGCNCKNLNGPLVENLVIDKIKNCNIESVINAFNSNKAKVDTVFSDVRSEINLLKNSISEKEKLISNLVMELAKNTGSVASEYIISQIESLNGEIDALKSKVSELESSSVDINSASLNLDIIVSNLKKFNYEVDDASLDDKRLLLSTIVDSIVWDDASGNLSIVYMGAKMDDLVSLSDGSHFCSDCRSYIYE

SEQ ID NO: 2357 - protein, 546 aa, Unknown
  Description of Unknown: Integrase B2358 sequence
  PTHR30461:SF3,SM00857,G3DSA:1.10.10.2600,IPR036162,PS51737, G3DSA:3.40.50.1390,IPR006119,IPR038109,PF07508,IPR011109, SSF53041,PTHR30461,Coil,cd00338,PF00239
MYKEYPKFYNYEVKEYGRKSRMDDPLLSTDEILEKHSKIVEEYAVKHLGGPIPDDNKYMEVASGESLKDRPEITRLLKDIENPAVKAIIVVEVQRLSRGDLEDAGKLIKLLRYTNTFVITPMKIYDLRDEYDRDAFERELKRGNEYLEYFKKIQARGKLLSVKEGKYVGSTAPYGFDRVKKTDVKKPYYTLIERKDQADVVRMIFNWYCEEDIGVTAICRRLEDIGAKTKTGQSTWKPSIIFSILENHHYIGCTRWNWRKTVKIIEDQEVKKLRPKAKVDEFLVFEGKHDGIISEEQFNKAREIRGKRHKTRKGLTLKNPFSGIMFCKKCGSKIGYNTYTRNGVEYAAPKLVCNNQVHCKTGSVKYSEVFEYVCKVLRDCIDDFEVRIEDKQDDSLKLHTDLMTRLTKQLANLEKKEIDQWEAQYDPDESKRLPQHIFAKLNEKVLKEKEEVNKALDKAKDSAPKHINYKDELMKTKDALRILEDVELDAKTKNRYLKTVIDKMIYERDQIVQITKDNAEKYNTQSSKGTKYCNPPYKITIELKCD

SEQ ID NO: 2358 - protein, 546 aa, Unknown
  Description of Unknown: Integrase B2359 sequence
  PTHR30461:SF3,SM00857,IPR006118,G3DSA:1.10.10.2600,IPR036162, PS51737,G3DSA:3.40.50.1390,IPR006119,IPR038109,PF07508, IPR011109,SSF53041,PF00239,PTHR30461, PS00397,PS51736,Coil,cd00338
MFETEDLTGQYVNIYIRVSTDEQAKKGYSIDMQEDQCRKYIERLNGAVNKVYIDDGYSGKNLNRPQIKQLMEDLKSKKNRVTAVVTWRCDRMIRSTDYYYQVLKPLFGKQGVILLSATEPNEGQNNPYGKWMRNSQINNAELESGLISIRTVMNLQEKARQGHYPGARVPVGYKRNKNREIIPDEEKRHYIEKIFRLYSTGAYSFETLAAKMRKEGFTHNNKPCSKKTIENILSVYQVFYIGKFNYSFKQNDGTYIVKLCDGKHEPIISLALYEAAMRVKDRASGPKENKHSFLYKGLIRCSISNRLLTPEKQRGANKSGEYEYYRCHRPCPECPKDCKRIIKREVIDKAVIEALETLNITKEQLKNLKEDVKNILHYQANYDEKRKIQIEGDIKKLKNRINQLYDDKLDGIISESTYLDKKLTWENKLENLTLEYTALTKTNIELIRRFEKMFELSENLTQKYLQKSVDKKREILKILCSNFFYEGSELRIELESAFTALIKLALNDKWAHDGLIFELLKSQKFDFLRSKNTLILFEKLETYLIA

SEQ ID NO: 2359 - protein, 546 aa, Unknown
  Description of Unknown: Integrase B2360 sequence
  PTHR30461:SF3,SM00857,G3DSA:1.10.10.2600,IPR036162,PF13408, PS51737,G3DSA:3.40.50.1390,IPR025827,IPR006119,IPR038109, PF07508,IPR011109,SSF53041,PF00239,PTHR30461, PS51736,Coil,cd00338
MNETIKVVGYARFSSSMQREESITAQKRYMMMYAKRNNMEVIDWYCDEAKSAKTVNRPEFQRMINDAKNNPEFKAVLVHKTDRFSRNLSDSIQYKKILEEYGVQVIFVNERFEDNPESHLLYHIMGSVNQFYNENLAREVMKGLKENAYQCKFTGGRPPLGYDVDKDLKLVINEKEAEAVRLIFEMSAEGYGYGETIDKLNILGYKTKKGLPFVKNSLYEILKNEKYKGTYIFNRSCSANSLNKRNNHRRKPEEEIIRIENGCPAIVSSGLWHRANAVKKATRSSYTNAKNTYLLTGLIHCGECGGKFHGNVRYNKNNTNLVYRCSSKKNKRKCESKEIRCEYLDSFVIDKFVEFFFNDDNIKVITKQLNEQYSKSCISDLEYNEAKSTLKILEKSRNNLVEAIAKTGINDIISDKIKEYEEQIKKTAEFIQKYEKQKIDRVITEDEIREQINHLKDYFYNPKNLIRTKYVLSQYIDRIDISNENVQVQFKVSMSPSDNTDGDCFCVHTEMIKRKYLFDYVCEKVDFEQWNIEKLNKSESEHRKGA

SEQ ID NO: 2360 - protein, 546 aa, Unknown
  Description of Unknown: Integrase B2361 sequence
  cd03768,PTHR30461:SF3,SM00857,IPR036162,PF13408, IPR025827,G3DSA:3.40.50.1390,PS51737,IPR006119,PF07508, IPR011109,SSF53041,PTHR30461,PS51736,Coil, PF00239
MFEIKAAIYTRKSKYTEEGESIENQIHMCIDYAEKNLGIKDYVIYQDEGFTGGNTDRPQFQKMMKDLKDKEYTHLICYRLDRISRSVADFSATLEMLNKIKVSFISIKEQFDTSSAMGRAMLNISATFAQLERETIAERIKDNLRELGKTGRWLGGPPPLGYKSVEVENNDAGGKSRKKHILAINENEVDTIKALFKLFMEHKKYNKTATLLNELGYKPRHGKVFNLTIVKQAINNPVYIIADKTIFKYFKSKGSDTYLMDKCDNKKGLMPYHRRDSENKMLDMNEWIISVGDHDGIITSDEWLQCQKIKDEIKSRPSSRHGSSKLFLLSGLIVCSKCGSSMSGRHKVLNGSTYRYYTCNLRNRASSECCNDSLNAYDAEEYVVKNLKSITRETIIDNYKQSEKRQRSKVDNDKLITKYNKEIETNKTMISNLVKRIALIEDDIVETFMEEIKKLKENNIELQSLIDTLEKENSKILEDKISVDDILRNIEHFQNFYDFTEGFEKKQDLIRSIVKFITWDSENRKIRIVLIGSDEKRPTINPLFHL

SEQ ID NO: 2361 - protein, 546 aa, Unknown
  Description of Unknown: Integrase B2362 sequence
  PTHR30461:SF3,IPR036162,PS51737,IPR011109,PTHR30461, PS00397,PF00239,G3DSA:1.10.10.2600,IPR006119,SSF53041, cd00338,SM00857,IPR025827,IPR038109,PS51736, IPR006118,PF13408,G3DSA:3.40.50.1390,PF07508,Coil
MSFFGNKLPERNEIAVVYCRVSTDGQAERGTIESQITYAKDYAKFKGFEIKDFYCDDGVTGMMPLAERPEGKRLTEDAKAGKFNVVYVYKIDRLGRSARETLNAIYSLKESGVILRSLTETFDLETPMGQFFMQLLANIADLDRNNFLERSRLGTERLVKAGKWVGGIVPYGYEINDAKELVLNTRPFPDSDLCEAEVVRMIFDMVGKHNKSSVEVARLLNALGVPTSYSRSTGKRRKKTIGIWRSNTVLRIIRNTTYKGIHYYGKRSGYYSTPIAREVTPIVDEKIWEQANAEIDKNRKSSFRVPASEYMLAGLIKCGVCGANYSGTRNNRDGAYYRCSSRMRKHKIEKNKCNSRYVNSDLLESIVWNELIDLLGNKKTLRAAVKNSLTEMEKKQRNIEPDIEKAEKALQDKELEKARLIQLYTKGTLSEEDVIAPLDALKNELEGLTEHLSALMKEKENIDKAQIIEKEDIDLYVDKIREFLSECDDPKTKKRLIQTLVKKITVISPTDRKKPIEFDIEFRLKVPAHKVYSDGAKKRTDTDSSH

SEQ ID NO: 2362 - protein, 546 aa, Unknown
  Description of Unknown: Integrase B2363 sequence
  PTHR30461:SF3,SM00857,G3DSA:1.10.10.2600,IPR036162,PF13408, IPR025827,G3DSA:3.40.50.1390,PS51737,IPR006119,IPR038109, PF07508,SSF53041,IPR011109,PTHR30461,Coil, PS51736,cd00338,PF00239
MPQTAVKKKVSMIPAKPQYDRSIKLSEKKLRVAAYCRVSTELEEQESSYEAQVEYYTRKIQETDNWKMAGIYADDGKSATNTKKRDDFNAMIKDALDGKIDMILTKSVSRFARNTVDSLLTIRKLKEKNVAVVFEKEGVNTLDGTGEILITILSSLAQEESRNISENTRWGVVRRFENGKMIVNHNKFMGYTKNENGDLVIVPEEAEIVRLIFRLYLEGYSAKKISQYLEENGIKTATGQDRWYDSVIFKMLRNEKYMGDALLQKTYTVDFMTKKKVINKGIVPQYYVEDDHEPIIPKELFYRVQEELARRASMNKAAVTRKKNQKSKFSSEYALTGLLLCGDCGQEYRRVTWSRNGKKKIVWRCSNRLTNGTKNCKKSETLEEGALNRAVMEAINRITRGDGDFVGAFRQNVIRVIGSYGGEQEPDEYDEKIKEKEEEMVALIAENARVGSYTDEFDERYRRIAEEITTLKEEQIEARRKTKLADSYEQRLKDMDSFLEKQTCQIPEFDNDLVRRLIASIKVVSAEKLIIQFQSGIVMEQEIRYE

SEQ ID NO: 2363 - protein, 546 aa, Unknown
  Description of Unknown: Integrase B2364 sequence
  PTHR30461:SF3,SM00857,G3DSA:1.10.10.2600,IPR036162,PF13408, PS51737,G3DSA:3.40.50.1390,IPR025827,IPR006119,IPR038109, PF07508,IPR011109,SSF53041,PF00239,PTHR30461, PS51736,Coil,cd00338
MRVSVNLNAQKPDTTTNAVIYARYSSHGQTEQSIEGQLAKGHEYAAAQGYTVVHEYIDRAMTGRNDNREAFQKMLSDTGKHQFQVVIVWKVDRFGRNREEIAFNKHTCKKNGVRVEYVAESLPNSPEAVILESVLEGMAEYYSIQLSQNIRRGQLESAKKCQCVGGSVPLGYTLDSDKHFVIDPQTAPVVKKIFDLYAEGATISEITGQLNEQGIRTARKQLFTKNSLTKLLKNEKYIGVYTYKDIVRVEGGVPAIVDESTFDRVQELLKINRRAPSHTWTKIEYLLTDKLFCGHCGSPMVGESGFSHTGAKYSYYGCIKRRREKACDKKPVRQDWIEALVLDETVKLLHDDELMEYIIDRTWEYYQVTDKVQEEKAVLEAQLAEVDKAINNLVRAIEAGIFNAATKSRMDELDAQKAALTASLADLELTSGIRITRDHIEYFLLRLRDLDVKDRECQKRLVQTFVNAVFIYDDGRVKITYNYSGQSSTITLNQIASAEKGKGFVCCLPCSTSSPRFPRGVAAFFCFGVLGKIGCKYTTNFSCIVL

SEQ ID NO: 2364 - protein, 546 aa, Unknown
  Description of Unknown: Integrase B2365 sequence
  PTHR30461:SF3,SM00857,G3DSA:1.10.10.2600,IPR036162,PS51737, G3DSA:3.40.50.1390,IPR006119,IPR038109,PF07508,SSF53041, IPR011109,PF00239,PTHR30461,Coil,cd00338
MYKEYPTFYNYETKEYGRKSRTDDPLLSTDEILEKHSKIIEEYAVKYLGGPIPQENKYMEVGSGESLKERPEITRLLKDIEDPAVKAIIVVDVQRLSRGDLEDAGRLIRLLRYTNTYVITPMKTYDLRDEYDRDAFERELKRGNEYLEYYKKIQARGKLLSVKEGNYVGSTAPYGFDRIEKFDGKKSYHTLIERKDQADIVRMIFNWYCEEDIGVTAICRRLEELGAKTKTGHSTWKPSIIFSILENHHYIGCVRWNWRKTVKIIEDQEIKKLRPKAKVDEFLLFEGKHDAIISEEQFNKAREIRGKRHRTRRDLTLKNPFSGIMFCKKCGHKIGYNTYTRHGVEYASPKLVCNNQVHCKSGSVKYSEVFEYVRKVLKDCISDFEVRIENDRDDSVKLHRDLIGRLTKQLANLEKKEMEQWEAQYDPDPAKRLPQHIFVKLNEKVLKEKEEVNKALAKAKDSAPKHINYQEELIKTKDALRILEDEKLDAKTKNQYLKTVVNKMIYERDPIVQITKENAEKYSMQSAKGMQYYNPPYKITIELKCN

SEQ ID NO: 2365 - protein, 546 aa, Unknown
  Description of Unknown: Integrase B2366 sequence
  PTHR30461:SF3,IPR036162,PS51737,IPR011109,PTHR30461, PF00239,G3DSA:1.10.10.2600,IPR006119,PF14287,SSF53041, IPR025378,SM00857,IPR025827,cd03770, IPR038109,PS51736,PF13408,G3DSA:3.40.50.1390,PF07508,Coil
MSRKKQVYEKITALYCRISLDDGGDNESMSISNQKIMLRDFAEKHGMFQYEYYVDDGYTGRNFNRPAFQRMIADIEAGKIGCVITKDLSRLGRNYIEAGSYIEIFFPKHNVRYIAITDGVDSLTRQEMDITPFKNILNDMYSRDISKKVLAGITTRSRQGKFCGGTPPFGLMRDPEDKGHLIIDPETAPIIRKIYDYALDGLGCMRISKRLMEEKIPITHVKANTEFDANYYFWGGARISHILRNPFYKGAHLVFRTHQKGIRSNTYDIIPRDQWEVIEGCHEAIVTPEEWEQVQELIDRRPTIQGNSCPFYNLFHGLVYCATCGKSMQVRYEKVGRTGKNRFTGEMREPIDKAYYICQTYNRMGCKVCSSHKIEARDLYNLVLKDIQELAAQAMKDADAFYQRLSRRMEHRYLVDASQTEKERLRLEARNQEIDGMFLSLYTDKAKGILTEQRFVKLTAALEQEQESNQKRLHDLAMMQGRADAQESEVRTFIKEIRRYAAIEELDEAVLNRLISRILIGEIKKIDGQRTQEVKIIYNFVGEMSR

SEQ ID NO: 2366 - protein, 546 aa, Unknown
  Description of Unknown: Integrase B2367 sequence
  PTHR30461:SF3,SM00857,G3DSA:1.10.10.2600,IPR036162,PS51737, G3DSA:3.40.50.1390,IPR006119,IPR038109,PF07508,SSF53041, IPR011109,PTHR30461,Coil,cd00338,PF00239
MYKEYPTFHYYETKEYGRKSRTDDPLLSTDEILEKHSKIVEEYAIKYLGGPIPEENKYMEVASGESLKDRPEITRLLKDIEDPSVKAIIVVEVQRLSRGDLEDAGRLIRLLRYTNTYVITPMKIYDLRDEYDRDAFERELKRGNEYLEYFKKIQARGRLASVKDGNYIGSTAPYGFDRIEKFDGKKSYHTLVERKDQADVVRMIFNWYCEEDIGVTAICRRLEDLGAKTKTGRTRWEPSIVFSILENHHYIGCTRWNWRKTVKIIEDQEIKKLRPKAKVDEFLLFEGKHDGIISEEQFNKAREIRGKRHRTRRDLTLKNPFSGIMFCKKCGSKIGYNTYTRNGVEYAPPKLVCNNQVHCKTGSVNFHEVFEYVRKVLRDCIDDFEVRIENDHDDSSKLHRDLVERLEKQLKGLEKKEIEQWDAQYDPDPAKRLPQHVFSKLNEKVLKEKEEVNKALDKAKDSVPKHIDYREELMKTTDALRILEDVGLDAKTKNKYLKTVISKMVYERDPIIQISKENAEKYGIEASKGLRYYTPPYKIAIELKCD

SEQ ID NO: 2367 - protein, 545 aa, Unknown
  Description of Unknown: Integrase B2368 sequence
  PTHR30461:SF3,SM00857,G3DSA:1.10.10.2600,IPR036162,PF13408, PS51737,G3DSA:3.40.50.1390,IPR025827,IPR006119,IPR038109, PF07508,IPR011109,SSF53041,PTHR30461, Coil,PS51736,cd00338,PF00239
MLQVAAYCRVSTDKEDQANSFEAQQRYFREYIQRQPDWELQGIYADEGFSGTSTNKRVEFNKMLHAAELGQIDLIVTKEVSRFTRNTVDALQITRELRRRGVGVLFLNDSLDTRTNDGELRLTIMSSFAQDESRRTSERSKWGQMRSMEKGVVFGGSLLGYDVIGGKMTVNPEGAEVVRLIFHKYLQERKGCSTIARELREAGILSSKGNCLWSSATVTKILKNEKYCGDLIQKKTYTPDYLTHEKKYNHGKEPLVELKDHHEPIIDRETWQAVQRELSRRNRATGCGGHGNRYPLSGKIRCGECGKSFSHRTKKRQDGSSYYRWCCFTATNEGLRRTDGAENVIGCSVGRQIRDDIAMDLLRRSVNDVTLDKRAIISSLARIVERVLTSDEDSGEQELRRLELELEKLQARNDTIHDRFFDESITKADYQRAKARCESEMNRVQEKIAAIKQRQTLNTDTQTLKPDIRTAITGIVSGRTADDDFYGHLLQQMTVYRDGRVEVALNLLPAKWVYVLDGLEKYRAKIGGHDASSVPISVSRPLSSG

SEQ ID NO: 2368 - protein, 545 aa, Unknown
  Description of Unknown: Integrase B2369 sequence
  PTHR30461:SF3,cd00338,SM00857,G3DSA:1.10.10.2600,IPR036162, PF13408,PS51737,IPR025827,G3DSA:3.40.50.1390,IPR006119, IPR038109,PF07508,IPR011109,SSF53041,PTHR30461, PS51736,Coil,PF00239
MARKKNIAAGQNAVIYARYSSHNQREVSIEQQVRECMKHAAELGLHVVGTYEDRAISGKTDKRPNFQRMMRDAEKGKFQAVVAWKSNRIGRNMLQAMVNEAKLEDCGVKVFYAEEDFDDTAAGRFALRNMMNVNQFYSENMAEDITRGLYDNASKCMANGRQPLGYKRGEDGRVVLDEANAAVVREIFTRVAAGDLFVDIARDLNAQGIKTSKGANWNKGSFQSICQNERYRGIYIYGDVRVADGIPRIVSDDLWYRVQEAMRMKKNPVGTRHRVGAEDYLLTGKLRCGHCGSYMTGVSGTSRNGELHYYYTCQKRRTEHACDKKNIRRDVIEPAVAQAIKMYCLTDDVIEWMADRTVEYWKKHDNDLQIEALEQQLEENKKATSNMLKAIEMGIITEATRTRMVELETEQSRLSVQLNAAKEDVVKIDREQIISYLELLQQGDIHDRDFQMELFKNFLVAVYVYDDNRMKLVFSCMGDQNSVEIPLETGEDPPDGGLSPDAKMFVLTPDSSTRSERHHTLCGAFFVLHCSRKTQKNFCPLPQPA

SEQ ID NO: 2369 - protein, 545 aa, Unknown
  Description of Unknown: Integrase B2370 sequence
  PTHR30461:SF3,SM00857,G3DSA:1.10.10.2600,IPR036162,PS51737, G3DSA:3.40.50.1390,IPR006119,IPR038109,PF07508,IPR011109, SSF53041,PTHR30461,Coil,cd00338,PF00239
MYKDYPVFYNYEVKEYGRKSRTDDPLLTTDEILAKHSKIIEEYAIKNLGGPIPEENKYMEVGSGESLKERPEITRLLKDIESPAVKAIIVVEVQRLSRGDLEDAGKLIRLLRYTNTYVITPMKIYDLRDEYDRDAFERELKRGNEYLEYYKKIQARGKLSSVKAGNYVGSVAPYGFDRIEKTDGKETYHTLIERKDQADVVRMIFDWYCNDDIGVTAICRRLEDLGVKTKTGGKIWKPSIIFSMLENHHYIGCTRWNWRKTVKVIENQEIKKLRPKAKVDEFLIFEGKHDGIISEEIFNKAREVRGKRHRTKRDLTLKNPFSGIMFCKCGAKMGYNTYTRRGEEYAPPKLVCNNQVHCKSGSVHFDEVMDYVCKVLKDCIADFEVRIENNRDDSIKLHKDLIVRLQDQLKVLEKKEVDQWEAQYDPDPVKRMPQHIFQKLNEKVLAEKEEINKALKKAKDSAPKHIDYRDELIKTTDALNALLDPNMDAKTKNQHLRMIIDKMVYERGPIVRITKENAAKYGIDTSKGLRYYTPPYKIDIDLKCE

SEQ ID NO: 2370 - protein, 545 aa, Unknown
  Description of Unknown: Integrase B2371 sequence
  PTHR30461:SF3,SM00857,G3DSA:1.10.10.2600,IPR036162,PF13408, PS51737,G3DSA:3.40.50.1390,IPR025827,IPR006119,IPR038109, PF07508,IPR011109,SSF53041,PF00239, PTHR30461,PS51736,Coil,cd00338
MLQVAAYCRVSTDKEDQANSFEAQQRYFREYIQRQPDWELQGIYADEGFSGTSTNKRVEFNKMLHAAELGQIDLIVTKEVSRFTRNTVDALQITRELRRRGVGVLFLNDSLDTRTNDGELRLTIMSSFAQDESRRTSERSKWGQMRSMEKGVVFGGSLLGYDVIGGKMTVNPEGAEVVRLIFHKYLQERKGCSTIARELREAGILSSKGNCLWSSATVTKILKNEKYCGDLIQKKTYTPDYLTHEKKYNHGKEPLVELKDHHESIIDWETWQAVQRELSRRNRATGCGGHGNRYPLSGKIRCGECGKSFSHRTKKRQDGSSYYRWCCFTATNEGLRRTDGAGNVIGCSVGRQIRDDIAMDLLRRSVSAVTLDKKSIISSLTRVVESVLASGEDSGEQELRRLELEFEKLQARNDTIHDRFFDESITKADYQRAKARCESEMNRVQEKIAAIKQRQTLNTDTQTLKPDIRAAITGIVSGRTADDDFYGHLLQQMIVYRDGRVEVALNLLPAKWVYVLDGLEKYRAKIGGHDASSVPMSVSRPLSSG

SEQ ID NO: 2371 - protein, 545 aa, Unknown
  Description of Unknown: Integrase B2372 sequence
  cd03768,PTHR30461:SF3,SM00857,G3DSA:1.10.10.2600,IPR036162, PF13408,IPR025827,PS51737,G3DSA:3.40.50.1390,IPR006119, IPR038109,PF07508,SSF53041,IPR011109,PTHR30461, PS51736,Coil,PF00239
MKIAIYSRKSKYTGKGDSIGNQIQMCKDYIETHYRNNDPEYIIYEDEGFSGGNINRPKFQKLLSDIKKEKFDILICYRLDRISRNVSDFSTTLEELQSYGVDFISIKEQFDTTTPMGRAMIYIASVFAQLERETIAERVRDNMVELAKSGKWSGGRTPLGFDSESSSYIDEEGNERKLVKLVKNDEELQLVNLIYDTYLREGSLHKTEVYFASHNIKSNRNILLEKTSLKVILNNPVYAISSPELKRWLEDDGWNVYGEPDGKHSYLSYNKTKQVTRNGRSTKISNDKENWIAAISNCPGIIDADKWIAVQEQFKGNRGSFPKKARTHNAKLVGKIYCAHCNNYMQVVHGNIKKDIGKRQFYYSCSLKKKSKSELCKNKNLKVEDVENLLLLELEKLGKNKKSYIQSLKKKNDAVKKNKDVKLKQNAIQKDIEAKQKILNNLVDKLAVADDIDDIIIQRIRATKNEMQELQQELDKISKEIQDSNYKKLDLDFIESLLEKCADIRQLDSNEQRLLIGVLVDKILWDGNTQNVTVYFIGSGDVKKK

SEQ ID NO: 2372 - protein, 545 aa, Unknown
  Description of Unknown: Integrase B2373 sequence
  PTHR30461:SF3,SM00857,G3DSA:1.10.10.2600,IPR036162,PF13408, PS51737,IPR025827,G3DSA:3.40.50.1390,IPR006119,IPR038109, PF07508,IPR011109,SSF53041,PTHR30461,Coil, PS51736,cd00338,PF00239
MLQVAAYCRVSTDKEDQANSFEAQQRYFREYIQRQPDWELQGIYADEGFSGTSTNKRVEFNKMLHAAELGQIDLIVTKEVSRFTRNTVDALQITRELRRRGVGVLFLNDSLDTRTNDGELRLTIMSSFAQDESRRTSERSKWGQMRSMEKGVVFGGSLLGYDVIGGKMTVNPEGAEVVRLIFHKYLQERKGCSTIARELREAGILSSKGNCLWSSATVTKILKNEKYCGDLIQKKTYTPDYLTHEKKYNHGKEPLVELKDHHESIIDRETWQAVQRELSRRNRATGCGGHGNRYPLSGKIRCGECGKSFSHRTKKRQDGSSYYRWCCFTATNEGLRRTDGAGNVIGCSVGRQIRDDIAMDLLRRSVSAVTLDKKSIISSLTRVVESVLASGEDSGEQELRRLELEFEKLQARSDAILDRFLDESISKEDYQRVKARCENEMNWVQEKIAAIKQRQTLNTDTQTLKPDIRTAITGIVSGRTADDDFYGHLLQQMTVYRDGRVEVALNLLPAKWVYVLDGLEKYRAKIGVHDASSVPMSVSRPLSSG

SEQ ID NO: 2373 - protein, 545 aa, Unknown
  Description of Unknown: Integrase B2374 sequence
  PTHR30461:SF3,SM00857,G3DSA:1.10.10.2600,IPR036162,PF13408, IPR025827,PS51737,G3DSA:3.40.50.1390,IPR006119,IPR038109, PF07508,SSF53041,IPR011109,PTHR30461,Coil, PS51736,cd00338,PF00239
MHGAYILARYSTDRQNEDSIEVQVSACRKWCDERSLPVLDVFADEATSGMKDTRPQYARMMWQLEHGGADTVVIYDQSRMFRKLTAWFDFRDQLARLGVDVVSVTQPMIGGDLRDPATFLTEGSMALFNQMWVLQTRQKVVAKMRYMAEQGLHTGGSPPLGYKVVDGRLVIDAAEAETVRLIFGLYASGMTYREIIRRLNAEERRTKSGGNFGVNSLHDLLKNPKYVGDLVYGKVSKRPDGSRNSHAAAEDAIVVKDVLPAIVDRETWEKVQLKMQENKRSAAGRPASAREYPLKGKVFCRECKSAMLVTGTNRGQRRHYYYICGAKQRKGLCDNSPIPVGGLEALVADAVRQRLGQPESVDGLIRILREERSKLSGSAVQRLRELQKRDCEIAKQLDAAVNAVLGGLHSPTLAAKVNALEAERVKIAHDMQQLRAQVSGAEIDEPHLRELLALAMQDDAAVLSIVVRVEVGKDEIAVWTLLDADPNGDFDFAEDGVPITPSEVSQSYNNSGCPVTGTTNYYNIVTPAGLLLFYIARPRQRDRRS

SEQ ID NO: 2374 - protein, 545 aa, Unknown
  Description of Unknown: Integrase B2375 sequence
  PTHR30461:SF3,SM00857,G3DSA:1.10.10.2600,IPR036162,PF13408, IPR025827,PS51737,G3DSA:3.40.50.1390,IPR006119,IPR038109, PF07508,IPR011109,SSF53041,PF00239,PTHR30461, PS51736,Coil,cd00338
MLQVAAYCRVSTDKEDQANSFEAQQRYFREYIQRQPDWELQGIYADEGFSGTSTNKRVEFNKMLHAAELGQIDLIVTKEVSRFTRNTVDALQITRELRRRGVGVLFLNDSLDTRTNDGELRLTIMSSFAQDESRRTSERSKWGQMRSMEKGVVFGGSLLGYDVIGGKMTVNPEGAEVVRLIFHKYLQERKGCSTIARELREAGILSSKGNCLWSSATVTKILKNEKYCGDLIQKKTYTPDYLTHEKKYNHGKEPLVALKDHHEAIIDRETWQAVQRELSRRNRATGCGGHGNRYPLSGKIRCGECGKSFSHRTKKRQDGSSYYRWCCFTATNEGLRRTDGAGNVIGCSVGRQIRDDIAMDLLRRSVSAVTLDKKSIISSLTRVVESVLASGEDSGEQELRRLELEFEKLQARSDAILDRFLDESISKEDYQRVKARCENEMNRVQEKIAAIKQRQTLNTDTQTLKPDIRTAITGIVSGRTADDDFYGHLLQQMTVYRDGRVEVALNLLPAKWVYVLDGLEKYRDKIGVHDASSVPMSVSRPLSSG

SEQ ID NO: 2375 - protein, 545 aa, Unknown
  Description of Unknown: Integrase B2376 sequence
  cd03768,PTHR30461:SF3,SM00857,IPR036162,PF13408, IPR025827,G3DSA:3.40.50.1390,PS51737,IPR006119,PF07508, IPR011109,SSF53041,PTHR30461,PS51736,Coil, PF00239
MNIAIYPRKSKFSPTSESIANQVAMCREYCDRCFDDPHYLVYDEDEGFSGKSTNRPAYTQMIEDMRAGKFQVLCCYRLDRISRNVRDFAELLDDLQRHNIAFVSVRNNFDTSTPFGRAMVYISSALAQMERETLAERVKDNLYEMARSGRWLGGVTPLGFVAKAQEVHRDDKKRKLLMLSPVEEELAQVRDLFDHFLRLGSVTKLLQYCLEHRIVSRNGNDYSRTTLRLLLTNPVYCTADAEAWAYFSSGDYQLCAQREDFDGVRGIQPFARTRKDDGGTVSRPTSDWIIAPGLHRGILPGAIWVRAQQILQDNRDLGSAYRAPRTENALLSGIIRCAGCGAYMRPKAYGKPLPDGKRRFSYVCLTKIDSCGARCAMPNAPGRDVDALVIKELTSLTSDGGAISTLRSEARLAQGEARRTHAEAVATHEKAIASMQKKVDKLVDALAAGAPEGARQRILCEIDRYEQEIEQHRDALSELNASVLLDTDPSALLDAAFSALESFRTSFSSLTHDEQRRAIRALVDRVTWDGKNVSIEVFGEKTLPK

SEQ ID NO: 2376 - protein, 545 aa, Unknown
  Description of Unknown: Integrase B2377 sequence
  PTHR30461:SF3,SM00857,G3DSA:1.10.10.2600,IPR036162,PF13408, IPR025827,G3DSA:3.40.50.1390,PS51737,IPR006119,IPR038109, PF07508,IPR011109,SSF53041,PTHR30461,cd00338, PF00239
MPTSKNTARKYAAGGSSDNSCGVEPLRAVIYARYSSSGQREESIEGQLRDCYEFAKKHGIIVIGEYIDKAMTGRVDRRPDFQRMMKDSEKGRFNCVLLWKMDRFARNRYDSAMYKYKLKKNGIRIFYAKETIPDGPEGIILESVMEGYAEYYSENLAQNVKRGNYDSALELKTLGKTCLGLKTGPDGRYMIDQAEAAIVRRIFEEYAEGERAKDIYERLNSEGYRTSRGGKFNKNSLRRILSNKKYIGVYEYEDIYVENGIPAIITDRDLFERVQKMLKINHDAPARGKAQNFLLTTKLFCGLCGSPMIGDGGTSHTGKAYAYYSCTKRKRGRSCKKESVPKDWIEDLVVGELVKIVHNDELIEQIADRVMEYQKREKDQSGLHALEIRQKENEKAISNMLAAIEAGIITPSTKTRLMELEADRADIEKGIAHELLAEPEFERDQIIYFLERFRSGDINDEAYRIMLVDTFLNSVYLYDDDHLVLVMNYSGENCKVDLKLVEGAVSGDGCKGSAFAPSSALNGAKPNPVYFFKKVFAVVVNFTRR

SEQ ID NO: 2377 - protein, 545 aa, Unknown
  Description of Unknown: Integrase B2378 sequence
  cd00338,SM00857,G3DSA:1.10.10.2600,IPR036162,PF13408, IPR025827,PS51737,G3DSA:3.40.50.1390,IPR006119,IPR038109, PF07508,IPR011109,SSF53041,PTHR30461,PS51736, Coil,PF00239
MVQEKLRAVFYARVSTEEERQLNALEKQVAECKDAVLQKGWKLVDQYVDEGKSGTQIKRRDEYRRLFEDLENDKFDIVVIKSQDRLQRNTLDWYIWIDRLTTHGKRLYMYLEDTFYSPDNALISGIKAILAEEYSRELSKKINNSYKRRIEAAKNGEKISIVNNSRSLGYDKVNGELVINEKEAEVVRMIFNMYASGEGLRAISNTLYDMGYRNRSGNEIDPTTISRMLSSEKYKGVYVINQRHYDFDTKKTVLNPKSEWVHIPGAVPAIVEPELWDRVQEIKGSKVQSIKNEKRGRNCGKSIFSGKIYCAKCGAKYWRSLENGYVKFKCSSYSKYGKILGKGCDNKSFSENALYSILQSLSEQIVEVNTAEVRKSLLNWLESLRERLRASQGDDTIKEEIRKQTARKEKLTDAYMDGIISKEDYSKRYKELEKTLEDLKDKLLTLEVNEDLQSIEEVIQNIDKEMEEYLQTQSFNESRVEFLNQHLTKVTVNKDSFLLEFDLIGGAILTGKDFYLFVDNPRGHCESGEGSSGCAGSMVCDRNLR

SEQ ID NO: 2378 - protein, 545 aa, Unknown
  Description of Unknown: Integrase B2379 sequence
  PTHR30461:SF3,SM00857,G3DSA:1.10.10.2600,IPR036162,PF13408, IPR025827,G3DSA:3.40.50.1390,PS51737,IPR006119,IPR038109, PF07508,IPR011109,SSF53041,PTHR30461,cd00338, PF00239
MPTSKNTARKYAAGGSSDNSCGVEPLRAVIYARYSSSGQREESIEGQLRDCYEFAKKHGIIVIGEYIDKAMTGRVDRRPDFQRMMKDSEKGRFNCVLLWKMDRFARNRYDSAMYKYKLKKNGIRIFYAKETIPDGPEGIILESVMEGYAEYYSENLAQNVKRGNYDSALELKTLGKTCLGLKTGPDGHYMIDQAEAAIVRRIFEEYAEGERAKDIYERLNSEGYRTSRGGKFNKNSLRRILSNKKYIGVYEYEDIYVENGIPAIITDRDLFERVQKMLKINHDAPARGKAQNFLLTTKLFCGLCGSPMIGDGGTSHTGKAYAYYSCTKRKRGRSCKKESVPKDWIEDLVVGELVKIVHNDELIEQIADRVMEYQKREKDQSGLHALEIRQKENEKAISNMLAAIEAGIITPSTKTRLMELEADRADIEKGIAHELLAEPEFERDQIIYFLERFRSGDINDEAYRIMLVDTFLNSVYLYDDDHLVLVMNYSGENCKVDLKLVEGAVSGDGCKSSAFAPSSALNGAKPNPVYFFKKVFAVVVNFTRK

SEQ ID NO: 2379 - protein, 545 aa, Unknown
  Description of Unknown: Integrase B2380 sequence
  PTHR30461:SF3,IPR036162,PS51737,IPR011109,PTHR30461, PF00239,G3DSA:1.10.10.2600,IPR006119,PF14287,SSF53041, IPR025378,SM00857,IPR025827,cd03770,IPR038109, PS51736,PF13408,G3DSA:3.40.50.1390,PF07508,Coil
MSQSNQMKITALYCRLSQDDGLDGESNSIQNQKRILEQYAIDHRFPNIQFYVDDGYSGASFNRPDFQRMMSDMEDGKIGIIITKDLSRLGRNQLHTGLYIEERFPQFGVRYIAINDNVDTENAESNDLMPFKNLFNEWFVRDTSRKIRAVQRAKAQRGERLGTRAPYGYKKDENAKGKLVVDEEAAAVVRRIFALCAAGRGPSQIAKQLRAENVLCPAVYTYRKFGSGHTCLDLSQPYNWSDSTIANILENETYLGNTVNMKFTTKSYKDKRYMQHPREECLVFEGTHPALITREVWDIVQRVRQNRKRPTKMEELNKYSGLVICADCGSTMVLHRAHTMKPTQNNFTCRTYKKAGSEVCTAHYIRECVLDEIVLEDIRRVTAMAREHTQEFAAYICDRQSAELRREIRRQELELSGMKKREAELGAIFKRLYEDSVLGHITTEQFQSLSASYVAEQEQLKTAIPQKEREVTKLKATVSGADNFIARAKRYTDIQELTPELLRLFIEKIVVHEKDVKWSKHASQTVEIHYTDIGVVGNMNITKSA

SEQ ID NO: 2380 - protein, 545 aa, Unknown
  Description of Unknown: Integrase B2381 sequence
  PTHR30461:SF3,cd00338,SM00857,G3DSA:1.10.10.2600,IPR036162, PF13408,PS51737,IPR025827,G3DSA:3.40.50.1390,IPR006119, IPR038109,PF07508,IPR011109,SSF53041,PTHR30461, PS51736,Coil,PF00239
MARKKNIAAGQNAVIYARYSSHNQREVSIEQQVRECMKHAAELGLHVVGTYEDRAISGKTDKRPNFQRMMRDAEKGKFQAVVAWKSNRIGRNMLQAMVNEAKLEDCGVKVFYAEEDFDDTAAGRFALRNMMNVNQFYSENMAEDITRGLYDNASKCMANGRQPLGYKRGEDGRVVLDEANAAVVREIFTRVAAGDLFVDIARDLNAQGIKTSKGANWNKGSFQSICQNERYRGIYIYGDVRVADGIPRIVSDDLWYRVQEAMRMKKNPVGTRHRVGAEDYLLTGKLRCGHCGSYMTGVSGTSRNGELHYYYTCQKRRTEHACDKKNIRRDVIEPAVAQAIKMYCLTDDVIAWIADRTVEYWEKHDNDLQIEALEQQLEENKKATSNMLKAIEMGIITEATRTRMVELETEQSRLSVQLNAAKEDVVKIDREQIISYLELLQQGDIHDRDFQMELFKNFLVAVYVYDDNRMKLVFSCMGDQNSVEIPLETGEDPPDGGLSPDAKMFVLTPDSSTRSERHHTLCGAFFVLHCSRKTHKNFCPLPQPA

SEQ ID NO: 2381 - protein, 545 aa, Unknown
  Description of Unknown: Integrase B2382 sequence
  PTHR30461:SF3,SM00857,G3DSA:1.10.10.2600,IPR036162,PF13408, PS51737,G3DSA:3.40.50.1390,IPR025827,IPR006119,IPR038109, PF07508,SSF53041,IPR011109,PF00239,PTHR30461, PS51736,Coil,cd00338
MTRKKNIAAGLDAVIYARYSSHNQREVSIEQQIAECTKHAAALGLRIVGTYEDRAISGKTDNRPRFQQMMRDAEKGKFQAVVAWKSNRIGRNMLQAMVNEAKLDDYGVKVFYAEEDFDDTAAGRFALRNMMNVNQFYSENMAEDITRGLYDNANKCMANGRQPLGYKRGADGKVMLDEPAAAVVREIFTRVAAGDLFVDIARDLNAKGIKTSKGAAWNKGSFQSICQNERYKGIYIYGNVRIVDGIPRIVSDELWYKVQEAMRVKKNPVGTRHRVGAEDYLLTGKLRCGHCGSYMTGVSGTSRNGELHYYYTCQKRRTEHACNKKNVRRDVIEPAIAQAIKMYCLTDDVIEWMADQTVQYWEKHDNDLQIEALEQQLAENKKATSNMLKAIEMGIITEATRSRMVELETENSKLTAQLSAAKRDVVKINREDLIDELHVLRSKDIHDREVQAELFKDFLVAAYIYDDNRLKLVFSFMGKDNSVEIPLETGEDPPDGEDSPDAKMFVLTPDCSTKKALYFVGSTVLFFFYSGKKIRGAPLAMQAGQ

SEQ ID NO: 2382 - protein, 545 aa, Unknown
  Description of Unknown: Integrase B2383 sequence
  PTHR30461:SF3,cd00338,SM00857,G3DSA:1.10.10.2600,IPR036162, PF13408,IPR025827,PS51737,G3DSA:3.40.50.1390,IPR006119, IPR038109,PF07508,IPR011109,SSF53041,PTHR30461, mobidb-lite,Coil,PF00239
MPRKPAKHPAKPKRGKKLEIEEPGVLYGRYSSHNQKDISVEQQFEKGYELAAEYGIRIIDTYADRAVSGRTDKRRDFQRMMTDAAKGKFRYVIAWKSNRMGRNMLEALINEARLQDLGVRVLYVEEDFDDTAAGRFAARSMMNVNQFYSENMAEDIKRGLYDNAANCMVANGHLPYGYKADETLHYAIDEPKAAVIREIFTRVSCGEAFVDIMASLNARGIKTSYGRPWGRSSFQKILSNERYRGIYIYGDVRKEGGIPRIVSDELYFKVQEVITTKKNPQGRHRVNGDYLLTGKLFCGHCKSPMTGISGTSRSGNLHYYYVCQKRRTEKTCEKKNLRRDDIELQVAKAIKRRTLDDDTINWIADSVVEYSQHQESASGIGLLEDQLKDTQRSIKNLMAAIEQGIITPTTKARLMELEKEQSDIDRKITMAKADVIPVNRDQLVGWLKKLQAGDVHDKKYQAELFDTFLIAVYVYDNPDGQDYMKVAFNYAGSKNTVEIPLDPSVIDNVENIETGAVRLSSAQVHQKRVIRTRKPPSTWLVACSY

SEQ ID NO: 2383 - protein, 545 aa, Unknown
  Description of Unknown: Integrase B2384 sequence
  PTHR30461:SF3,SM00857,G3DSA:1.10.10.2600,IPR036162,PF13408, PS51737,G3DSA:3.40.50.1390,IPR025827,IPR006119,IPR038109, PF07508,IPR011109,SSF53041,PTHR30461,Coil, PS51736,cd00338,PF00239
MHGAYILARYSTDRQNEDSIEVQVSACRKWCDERSLPVLDVFADEATSGMKDTRPEYARMMWQLEHGGADTVVIYDQSRMFRKLTAWFDFRDQLARLGVDVVSVTQPMIGGDLRDPANFLTEGSMALFNQMWVLQTRQKVVAKMRYMAEQGLHTGGTPPLGYKVVDGRLVIDAAEAETVRLIFGLYASGMTYREIIRRLNAEGRHTKRGGNFGVNSLHDLLKNPKYVGDMVYGKVAKRPDGSRNSHAAAVDAIVVKDALPAIVDREIWEKVQLKMQDNKRSTAGRPASAREYPLKGKVFCRECKSAMLVTASNRGAKRYYYYACAAKHRKGLCDNTPIPAGTLETLVADAVRQRLGQPGNVEGLIRILREERSKLSGSAVQRLRELQKRDCEIAKQLDAAVNAVLGGLHSPTLAAKVNALEAERAKISHDMQQLRAQVSGAEIDEPRLRELLALAMQDDAAVLSIVVRVEVGKDEIAIWTLLDADPNGNFDFSEDGVQIASPDATLNYNNSGCRSTGTTNYYNIVTPAGLLLFYIARPRQRDRRS

SEQ ID NO: 2384 - protein, 545 aa, Unknown
  Description of Unknown: Integrase B2385 sequence
  cd03768,PTHR30461:SF3,SM00857,G3DSA:1.10.10.2600,IPR036162, PF13408,PS51737,G3DSA:3.40.50.1390,IPR025827,IPR006119, IPR038109,PF07508,SSF53041,IPR011109,PTHR30461, PS51736,Coil,PF00239
MKIAIYSRKSKYTGVGDSIENQVQMCKDYANAKYMGQDLEFATYEDEGFSGRNLIRPEFQKLINNINSYDILMCYKLDRISRNVADFSSTLEVLQDAKCDFVSIKENFDTSTPMGRAMIHIASVFAQLERETIAERVKDNMLELAKNGRWSGGRTPLGYKSEPVQYIDEEGNERKAVKLVQDQEELELVKLIYDTYLKQGSLHKTEVWFTQHKIKSNSAVLLEKTSLKIILQNPVYVRSAPEVINYLKDNNWNVYGEADGVHGLLTYNKTESVAGSNGKVTKRVQNKENWIAAVSNVKGIIDADTWIRVQEQFKKNKNTFPNLGKTHTAILTGKLRCSKCKNYMLVQHGRTSVKTGDKIYYYICSMKRKSKGELCNCKNIKANEIEPAVLNLIEELATNKEEFKNKLREKNTASKLDNDIKLKKSALEKQIADKEKQITGLVDKLSLDDSIADILINRIKNYKAEIETLKADLLNISAEIEQNNNYKLAESFLDGFFEQCKDISSQPKEKQRQLINSYVNYINFDSDTEEAELKLYEPGEIKKIN

SEQ ID NO: 2385 - protein, 545 aa, Unknown
  Description of Unknown: Integrase B2386 sequence
  cd00338,SM00857,G3DSA:1.10.10.2600,IPR036162,PF13408, IPR025827,G3DSA:3.40.50.1390,PS51737,IPR006119,IPR038109, PF07508,IPR011109,SSF53041,PTHR30461,PS51736, Coil,PF00239
MQAATQATPPKVVHTIPAKIDLQEEVKNARKQLRVAAYCRVSTKQEDQLNSYDVQRRAYTDKINGEHGWTMVGIYADKGITGTSVKKRDEFNRLMRHCKQGKVDMIITKSVARFARNTLDCLKHTRMLKEHNVDVYFEEQGIHSIQPGAEFYITIYGSIAQSESENISANVRWGKAQSAKEGNVPFQYKRFLGYRRGSDGKPEIDPEQAVVVKRIYERFLAGDSLATIANDLNADGIPTPSGNGQWQRGTIASILTNEKYKGDAILNKTYIRDCLSKKVMINNGERPKYYVENNHPAIIDSATFGRVQEEMARRNGKRKVKQVGTKTEQGHYSSKYALTELLICGECGTPYRRCTWAANGKKKIVWRCISRLDYGKKYCHNSPSIEESVLQEAIMKAVLQTAKQNAEVLKTLKLHIGMGLSADATEDNSLDLQIKIAEIEAEFQKMLKAIAADNVEAFDEEKAKVLMDEKAKLQIQLDRIADTKQKRENAKSRLDEIFAILEALANHPISYDDQIVRQILESVIVESKEKIKVVFIGGLEVTQKL

SEQ ID NO: 2386 - protein, 545 aa, Unknown
  Description of Unknown: Integrase B2387 sequence
  PTHR30461:SF3,SM00857,G3DSA:1.10.10.2600,IPR036162,PF13408, PS51737,G3DSA:3.40.50.1390,IPR025827,IPR006119,IPR038109, PF07508,IPR011109,SSF53041,PF00239,PTHR30461, PS51736,Coil,cd00338
MTVKKFPIDLSCLTEEEISQFQEDPYTLYNGDQEVALYLRYSSTGQSDQSIEGQLRDCRAFCKANHYRIVAIYVDRATTARKDVEKRVHLMEMVADSAKQNWEYVIVWKLDRFARNRNDSAIMKMRLRKNGVKVLSATEHLTDSPESIILESVLEGMAEFFSAELSQKVTRGMRESALKCHSVGGHIPLGYKVENHKLVVDPDTAHIVQEAFSLYANGESVADICRKFNSAGYKTAKNTEFNRSSFKAMFRNTRYIGTYTYKDIVIENGIPAIIDKELFETVQRRLSKTATAPARGKAKVDYLLSGKLFCGHCGASMNGESGAGRHGKVYHYYSCYTKKRKLGCDKRPLKKDYIEGIVARDALNLLTDQLIDEIADMAIRQSEQDLINDTHIPQLTAQLSEVEKSITNITAAIEKGIASETLMNRLVQLEHEKKTLNKEIKAEEKFVCRIDRDQIVFWLSQFKHGNIEDEDFRRRLIDLLVNSVTVWDEPDGYKITTAYNLTSCKTKTFRVEKNPAAEEATGFDFGESECTKSEQALYRLLRLIL

SEQ ID NO: 2387 - protein, 545 aa, Unknown
  Description of Unknown: Integrase B2388 sequence
  PTHR30461:SF3,SM00857,G3DSA:1.10.10.2600,IPR036162,PF13408, PS51737,IPR025827,G3DSA:3.40.50.1390,IPR006119,IPR038109, PF07508,IPR011109,SSF53041,PTHR30461,cd00338, PF00239
MPTSKNTARKYAAGGSSDNSCGVEPLRAVIYARYSSSGQREESIEGQLRDCYEFAKKHGIIVIGEYIDKAMTGRVDRRPDFQRMMKDSEKGRFNCVLLWKMDRFARNRYDSAMYKYKLKKNGIRIFYAKETIPDGPEGIILESVMEGYAEYYSENLAQNVKRGNYDSALELKTLGKTCLGLKTGPDGRYMIDQAEATIVRRIFEEYAEGERAKDIYERLNSEGYRTSRGGKFNKNSLRRILSNKKYIGVYEYEDIYVENGIPAIITDRDLFERVQKMLKINHDAPARGKAQNFLLTTKLFCGLCGSPMIGDGGTSHTGKAYAYYSCTKRKRGRSCKKESVPKDWIEDLVVGELVKIVHNDELIEQIADRVMEYQKREKDQSGLHALEIRQKENEKAISNMLAAIEAGIITPSTKTRLMELEADRADIEKGIAHELLAEPEFERDQIIYFLERFRSGDINDEAYRIMLVDTFLNSVYLYDDDHLVLVMNYSGENCKVDLKLVEGAVSGDGCKGSAFAPSSALNGAKPNPVYFFKKVFAVVVNFTRK

SEQ ID NO: 2388 - protein, 545 aa, Unknown
  Description of Unknown: Integrase B2389 sequence
  PTHR30461:SF3,cd00338,SM00857,G3DSA:1.10.10.2600,IPR036162, PF13408,IPR025827,G3DSA:3.40.50.1390,PS51737,IPR006119, IPR038109,PF07508,IPR011109,SSF53041,PTHR30461, PS51736,Coil,PF00239
MASQKYKKKSDNLIITGVIYARYSSHSQKEESIEQQIEECTAFAVTNGISVVGIYADKAISGRTDRRNEFQRLMRDAEKRKFDVVIAYKSNRISRNMLNALQYESRLDSFGIKTLYAKEEFGNTAAGRFALRTMMNVNQFYSENMAEDIRRGLKDNAAECKVNGSLPYGYKKGEDGKYAIDEPRAAIVREIFSRVVDDVPYADIIRSLNDRGILTKTRKPFNKNSFNRMLRNERYIGIYEHSGVRVVGGVPAIISEEVFYAVQRKLQEGLNSDGAKRKSNSDYLLTGKLYCGECGSPMVGYAGTSRNGTLHYYYTCKSRGNDGCTKHNVRRDFIEQFVVDLTRACLSRADVTDWLVSGYIELKKQAQETSDVPVMEEELSSRKKALDNIMKAIEAGIFNETTSARMQELETEIHDLERSIALGKAMFEEPVDGERMRFYLEKLRNGTPDNQAYRKELLRTMVKAIRLWDDRIEIEYNFTGTDGDGNNYRVVTEFLKGDSGSASGVHTEPPQPHHHGQPILMTLRQTQCHQGFPGFFSSEIFLFFH

SEQ ID NO: 2389 - protein, 545 aa, Unknown
  Description of Unknown: Integrase B2390 sequence
  PTHR30461:SF3,cd00338,SM00857,G3DSA:1.10.10.2600,IPR036162, PF13408,PS51737,G3DSA:3.40.50.1390,IPR025827,IPR006119, IPR038109,PF07508,SSF53041,IPR011109,PTHR30461, PS51736,Coil,PF00239
MQAATQVMPPKVVHTIPATINLQEEVKNAHKQLRVAAYCRVSTKQEDQLNSYDVQRRAYTDKINGESGWTMVGIYADKGITGTSVKKRDDFNRLMRHCKQGKVDMIITKSVARFARNTLDCLKHTRMLKEHNVDVYFEEQGIHSIQPGAEFYITIYGSIAQSESENISANVRWGKSQSAKEGNVPFHYKRFLGYRRGSDGKPEIDPEQAAVVKRIYERFLAGDSLATIANDLNADGIPTPSGIGQWQRGTIESILTNEKYKGDAILNKTYIRDCLSKKVMINNGERPKYYVENNHPAIIDSCTFGRVQEEMARRSGKRKVKQVGTKTEQGRYSSKYALTELLICGECGTPYRRCTWAANGKKKVVWRCINRLDYGKKYCHDSPSIEESVLQEAIMKAVLQTAKQNADVLKTLKLHIGMGLSAETTEDNSLDLQIRIAEVEAEFQKMLKAIAADNVEAFDEEKAKALMDEKAKLQIQLDRIADTKQKRENAKSRLDEIFTIIEALANHPISYDDQIVRQVLESVIVESKEKIKVVFVGGLEVTQLM

SEQ ID NO: 2390 - protein, 545 aa, Unknown
  Description of Unknown: Integrase B2391 sequence
  PTHR30461:SF3,SM00857,G3DSA:1.10.10.2600,IPR036162,PF13408, IPR025827,G3DSA:3.40.50.1390,PS51737,IPR006119,IPR038109, PF07508,IPR011109,SSF53041,PTHR30461,cd00338, PF00239
MPTSKNTARKYAAGGSSDNSCGVEPLRAVIYARYSSSGQREESIEGQLRDCYEFAKKHGIIVIGEYIDKAMTGRVDRRPDFQRMMKDSEKGRFNCVLLWKMDRFARNRYDSAMYKYKLKKNGIRIFYAKETIPDGPEGIILESVMEGYAEYYSENLAQNVKRGNYDSALELKTLGKTCLGLKTGPDGRYMIDQAEAAIVRRIFEEYAEGERAKDIYERLNSEGYRTSRGGKFNKNSLRRILSNKKYIGVYEYEDIYVENGIPAIITDRDLFERVQKMLKINHDAPARGKAQNFLLTTKLFCGLCGSPMIGDGGTSHTGKAYAYYSCTKRKRGRSCKKESVPKDWIEDLVVGELVKIVHNDELIEQIADRVMEYQKREKDQSGLHALEIRQKENEKAISNMLAAIEAGIITPSTKTRLMELEADRADIEKGIAHELLAEPEFERDQIIYFLERFRSGDINDEAYRIMLVDTFLNSVYLYDDDHLVLVMNYSGENCKVDLKLVEGAVSGDGCKGSAFAPSSALNGAKPNPVYFFKKVFAVVVNFARR

SEQ ID NO: 2391 - protein, 545 aa, Unknown
  Description of Unknown: Integrase B2392 sequence
  PTHR30461:SF3,SM00857,G3DSA:1.10.10.2600,IPR036162,PF13408, IPR025827,PS51737,G3DSA:3.40.50.1390,IPR006119,IPR038109, PF07508,IPR011109,SSF53041,PTHR30461,Coil, PS51736,cd00338,PF00239
MQKFGILTESERQILDGASTVVTSGDTPVVVYLRYSSEGQTDQSIEGQLRDCIHYCLRKKYRIVEAYCDRAATASKRIDKRTDFQRMLSDSYRKQWEAVIVWKLDRFARNRQDSMTSRVILKRNGVRVESATEAISSSPEGILMESMLEGLAEYFSADLSQKVLRGRRETALKGHSLGGNIPLGYKIEHKQFVIDSPAAEIVREIFARYAGGEAPHLIVEDLNARGLRNARGNPWRVQNIATLISNERYVGVYQYKDIVMSDAIPPIIEKEVYDAVQLRKKENARNPGAATAKTEYLLSGKLYCGHCGSRMSGESGTSKRGTTYYYYSCSGRKRGKGCDKRLVRKDWIEDVVTKECLAMLDDQLIEEVADAALLAAQLEIDGDTTYQGLLSKKADIEKGIANLTKVLEMGSTSANVVKRLDELETELRDVLIEIDAHKTPVHRLNRKLITYWLSSFQGADYRDPSVRRNLIRLLINSVTVWDTPDGYKLTLAFNLSSRPPKQITPSDLEGEESSIDAVAVPNRASSNTFVEHGSILLRTKYYPFP

SEQ ID NO: 2392 - protein, 545 aa, Unknown
  Description of Unknown: Integrase B2393 sequence
  cd03768,PTHR30461:SF3,SM00857,IPR036162,PF13408, PS51737,G3DSA:3.40.50.1390,IPR025827,IPR006119,PF07508, IPR011109,SSF53041,PTHR30461,PS51736,Coil, PF00239
MNIAIYPRKSKFSPTSESIANQVAMCREYCDRCFDDPHYLVYDEDEGFSGKSTNRPAYTQMIEDMRAGKFQVLCCYRLDRISRNVRDFAELLDDLQRHNIAFVSVRNNFDTSTPFGRAMVYISSALAQMERETLAERVKDNLYEMARSGRWLGGVTPLGFVAKAQEVHRDDKKRKLLMLSPVEEELAQVRDLFDHFLRLGSVTKLLQYCLEHRIVSRNGNDYSRTTLRLLLTNPVYCTADAEAWAYFSSGDYQLCAQREDFDGVRGIQPFARTRKDDGGTVSRPTSDWIIAPGLHRGVLPGAIWVRAQQILQDNRDLGSTYKAPRTENALLSGVIRCAGCGAYMRPKAYGKPLPDGKRRFSYVCLTKIDSCGARCAMPNAPGRDVDALVIKELTSLTSDGGAISTLRSEARLAQGEARRTHAEAVATHEKAIASMQKKVDKLVDALASGAPEGARQRILCEIDRYEQEIEQHRDALSELNASVLLDADPSALLDAAFSALESFRTSFASLTHDEQRRAIRALVDRVTWDGKNVSIEVFGEKTLPK

SEQ ID NO: 2393 - protein, 545 aa, Unknown
  Description of Unknown: Integrase B2394 sequence
  PTHR30461:SF3,SM00857,G3DSA:1.10.10.2600,IPR036162,PF13408, IPR025827,G3DSA:3.40.50.1390,PS51737,IPR006119,IPR038109, PF07508,IPR011109,SSF53041,PTHR30461,cd00338, PF00239
MPTSKTVARKYAAGGGSDNSCGVEPLRAVIYARYSSSGQREESIEGQLRDCYEFAKKHGIIVIGEYIDKAMTGRVDRRPDFQRMMKDSEKGRFNCVLLWKMDRFARNRYDSAMYKYKLKKNGIRIFYAKETIPDGPEGIILESVMEGYAEYYSENLAQNVKRGNYDSALELKTLGKTCLGLKTGPDGRYMIDQAEAVIVRRIFEEYAEGERAKDIYGRLNSEGYRTSRGGKFNKNSLRRILSNKKYIGVYEYEDIYVENGIPAIITDRDLFERVQKMLKINHDAPARGKAQNFLLTTKLFCGLCGSPMIGDGGTSHTGKAYAYYSCTKRKRGRSCKKESVPKDWIEDLIVGELVKIVHNDELIEQIADRVMEYQKREKDQSGLHALEIRQRENEKAISNMLAAIEAGIITPSTKTRLMELEADRADIEKGIAHELLAEPEFERDQIIYFLERFRSGDINDEAYRIMLVDTFLNSVYLYDDDHLVLVMNYSGENCKVDLKLVEGAVSGDGCKGSAFAPSSALNGAKPNPVYFFKKVFAVVVNFTRK

SEQ ID NO: 2394 - protein, 545 aa, Unknown
  Description of Unknown: Integrase B2395 sequence
  cd00338,SM00857,G3DSA:1.10.10.2600,IPR036162,PF13408, IPR025827,G3DSA:3.40.50.1390,PS51737,IPR006119,IPR038109, PF07508,SSF53041,IPR011109,PTHR30461,PS51736, Coil,PF00239
MQTAIQATPPKVVHTIPATINLQEEVKNAHKQLRVAAYCRVSTKQEDQLNSYDVQRRAYTDKINGEPGWTMVGIYADKGITGTSVKKRDDFNRLMRHCKQGKVDMIITKSVARFARNTLDCLKHTRMLKEHNVDVYFEEQGIHSIQPGAEFYITIYGSIAQSESENISANVRWGKAQSAKEGNVPFHYKRFLGYRRGSDGKPEIDPEQAVVVKRIYERFLAGDSLATIANDLNTDGIPTPSGVGKWQRGTIESILTNEKYKGDAILNKTYIRDCLSKKVMINNGERPKYYVENNHPAIIDSATFGRVQEEMARRCGKRKVKQVGTKTEQGRYSSKYALTELLICGECGTPYRRCTWAANGKKKVVWRCINRLDYGKKYCHYSPSIEESVLQEAIMKAVMQTAKQNAEVLKTLKLHIGMGLSAGTTEDNSLDLQIRIAEIEAEFQKMLKAIAADNVEAFDEEKAKALMDEKAKLQIQLDRIADTKQKRENAKSRLDEIFTIIEALANHPISYDDQIVRQILESVIVESKEKIKVVFVGGLEVTQTI

SEQ ID NO: 2395 - protein, 545 aa, Unknown
  Description of Unknown: Integrase B2396 sequence
  cd03768,PTHR30461:SF3,SM00857,IPR036162,PF13408, PS51737,IPR025827,G3DSA:3.40.50.1390,IPR006119,PF07508, IPR011109,SSF53041,PTHR30461,PS51736,Coil, PF00239
MNIAIYPRKSKFSPTSESIANQVAMCREYCDRCFDDPHYLVYDEDEGFSGKSTNRPAYTQMIEDMRAGKFQVLCCYRLDRISRNVRDFAELLDDLQRHNIAFVSVRNNFDTSTPFGRAMVYISSALAQMERETLAERVKDNLYEMARSGRWLGGVTPLGFVAKAQEVHRDDKKRKLLMLSPVEEELAQVRDLFDHFLQLGSVTKLLQYCLEHRIVSRNGNDYSRTTLRLLLTNPVYCTADAEAWAYFSSGDYQLCAQREDFDGVRGIQPFARTRKDDGGTVSRPTSDWIIAPGLHRGILPGAIWVRAQQILQDNRDLGSAYKAPRTENALLSGIIRCAGCGAYMRPKAYGKPLPDGKRRFSYVCLTKIDSCGARCAMPNAPGRDVDALVIKELTSLTSDGGAISTLRSEARLAQGEARRTHAEAVATHEKAIASMQKKVDKLVDALAAGAPEGARQRILCEIDRYEQEIEQHRDALSELNASVLLDADPSALLDAAFSALESFRTSFASLTHDEQRRAIRALVDRVTWDGKNVSIEVFGEKTLPK

SEQ ID NO: 2396 - protein, 545 aa, Unknown
  Description of Unknown: Integrase B2397 sequence
  PTHR30461:SF3,SM00857,G3DSA:1.10.10.2600,IPR036162,PF13408, PS51737,IPR025827,G3DSA:3.40.50.1390,IPR006119,IPR038109, PF07508,IPR011109,SSF53041,PF00239,PTHR30461, PS51736,Coil,cd00338
MCAKKKPAMLEPDMQDAVIYTRYSSHNQRDCSIEQQVADCEIFARQNNLRVVKVYADRHLSGTTDNRPQFQQMLKDASHGHWAYVICWKIDRFARNRYDSATYKFRLKKAGVRVLYAKESIPDGPEGILLESVLEGSAEYYSAALAQNIRRGMKYNAEQCKVNSGSIPFGYCKGPDGRFAIHEANAEVVREIFRKAAAGMPFVDIANDLNSRGLKTSRGGRWNKGSFRLLMNEAYIGVYHFSDTRIEGGMPALIDQGTFWAANERLKANSSVRGRHQDGGDYLLTGKLKCAHCGSYMIGFSGTGKSGELHYYYGCQKRRRERACKKANVPREWIERVVVKAALDYVLRPDVMEWIADAVMEYQEREAASAQLASLTAELEENQKATDNVMKAIEAGIITSTTKQRLLDLEAKAQDLKRAIELEKLSHVRLERDQVLFWLDRFRGGSLQSQEFRRKVIDAFVSVVYLSDDHLRIAFNYSGGSNAEADFDLVMDAEAAAGELSKKFAQGPIASTIQFVLEPDSLRERVRVRFLFIGGFAERVHRAVK

SEQ ID NO: 2397 - protein, 545 aa, Unknown
  Description of Unknown: Integrase B2398 sequence
  PTHR30461:SF3,SM00857,G3DSA:1.10.10.2600,IPR036162,PF13408, IPR025827,G3DSA:3.40.50.1390,PS51737,IPR006119,IPR038109, PF07508,SSF53041,IPR011109,PTHR30461,Coil, PS51736,cd00338,PF00239
MLQVAAYCRVSTDKEDQANSFEAQQRYFRDYIERQPDWVLQGIYADEGISGTSTRKRVEFNKMLHAAELGQIDLIVTKEVSRFTRNTVDALQITRDLRRRGVGVLFLNDSLDTRTNDGELRLTIMSSVAQDESRKTSERSKWGQMRSMEKGVVFGGSLLGYDVIGGKMTVNPEGAEVVRLIFHKYLQERKGCSTIARELREAGILSSKGNCLWSSATVTKILKNEKYCGDLIQKKTYTPDYLTHEKKYNHGKEPLVALKDHHEPIIDRETWQAVQRELSRRNRATGCGGHGNRYPLSGKIRCGECGKSFSHRTKKRQDGSSYYRWCCFTATNEGLRRTDGAGNVIGCSVGRQIRNDIAMDLLRRSVNAVTLDKKAIISNLARVVESILASGGDSGEQELRRLELELEKLQARNDTIHDRFFDESITKADYQRAKARCESEMNRVQEKIAAIKQRQTLNTDTQTLKPDIRAAITGIVSGRTADDDFYGHLLQQMTVYRDGRVEVALNLLPTKWVYVLDGLEKYRAKIGGHDASSVPMSVSSPLSSG

SEQ ID NO: 2398 - protein, 545 aa, Unknown
  Description of Unknown: Integrase B2399 sequence
  PTHR30461:SF3,SM00857,G3DSA:1.10.10.2600,IPR036162,PF13408, IPR025827,PS51737,G3DSA:3.40.50.1390,IPR006119,IPR038109, PF07508,IPR011109,SSF53041,PTHR30461,Coil, PS51736,cd00338,PF00239
MLQVAAYCRVSTDKEDQANSFEAQQRYFREYIQRQPDWELQGIYADEGFSGTSTNKRVEFNKMLHAAELGQIDLIVTKEVSRFTRNTVDALQITRELRRRGVGVLFLNDSLDTRTNDGELRLTIMSSFAQDESRRTSERSKWGQMRSMEKGVVFGGSLLGYDVIGGKMTVNPEGAEVVRLIFHKYLQERKGCSTIARELREAGILSSKGNCLWSSATVTKILKNEKYCGDLIQKKTYTPDYLTHEKKYNHGKEPLVELKDHHEPIIDRETWQAVQRELSRRNRATGCGGHGNRYPLSGKIRCGECGKSFSHRTKKRQDGSSYYRWCCFTATNEGLRRTDGAGNVIGCSVGRQIRDDIAMDLLQRSVNDVTLDKKAIISNLARIVESVLASGEDSGEQELRRLELELEKLQARNDTIHDRFFDESITKADYQRAKARCESEMNRVQEKIAAIKQRQTLNTDTQTLKPDIRTAITGIVSGRTADDDFYGHLLQQMTVYRDGRVEVALNLLPAKWVYVLDGLEKYRDKIGVHDASSVPMSVSSPLSSG

SEQ ID NO: 2399 - protein, 545 aa, Unknown
  Description of Unknown: Integrase B2400 sequence
  PTHR30461:SF3,SM00857,G3DSA:1.10.10.2600,IPR036162,PF13408, IPR025827,G3DSA:3.40.50.1390,PS51737,IPR006119,IPR038109, PF07508,IPR011109,SSF53041,PTHR30461,cd00338, PF00239
MPTSKTAARKYAAGGGSDNSCGVEPLRAVIYARYSSSGQREESIEGQLRDCYEFAKKHGIIVIGEYIDKAMTGRVDRRPDFQRMMKDSEKGRFNCVLLWKMDRFARNRYDSAMYKYKLKKNGIRIFYAKETIPDGPEGIILESVMEGYAEYYSENLAQNVKRGNYDSALELKTLGKTCLGLKTGPDGRYMIDQAEAVIVRRIFEEYAEGERAKDIYGRLNSEGYRTSRGGKFNKNSLRRILSNKKYIGVYEYEDIYVENGIPAIITDRDLFERVQKMLKINHDAPARGKAQNFLLTTKLFCGLCGSPMIGDGGTSHTGKAYAYYSCTKRKRGRSCKKESVPKDWIEDLVVGELVKIVHNDELIEQIADRVMEYQKREKDQSGLHALEIRQKENEKAISNMLAAIEAGIITPSTKTRLMELEADRADIEKGIAHELLAEPEFERDQIIYFLERFRSGDINDEAYRIMLVDTFLNSVYLYDDDHLVLVMNYSGENCKVDLKLVEGAVSGDGCKGSAFAPSSALNGAKPNPVYFFKKVFAVVVNFTRK

SEQ ID NO: 2400 - protein, 545 aa, Unknown
  Description of Unknown: Integrase B2401 sequence
  PTHR30461:SF3,cd00338,SM00857,G3DSA:1.10.10.2600,IPR036162, PF13408,IPR025827,PS51737,G3DSA:3.40.50.1390,IPR006119, IPR038109,PF07508,IPR011109,SSF53041,PTHR30461, PS51736,Coil,PF00239
MARKKNIAAGLDAVIYARYSSHNQREVSIEQQIAECTKHAAALGLRVVGTYEDRAISGKTDNRPRFQQMMRDAEKGKFQAVVAWKSNRIGRNMLQAMVNEAKLDDYGVKVFYAEEDFDDTAAGRFALRNMMNVNQFYSENMAEDITRGLYDNANKCMANGRQPLGYKRGADGKVMLDEPAAAVVREIFTRVATGDLFVDIARDLNAKGIKTSKGAAWNKGSFQSICQNERYKGIYIYGNVRIVDGIPRIVSDELWYRVQEAMRMKKNPVGTRHRVGAEDYLLTGKLRCGHCGSYMTGVSGTSRNGELHYYYTCQKRRTEHACNKKNVRRDVIEPAIAQAIKMYCLTDDVIEWVADRTVEYWEKHDNDLHIEALEQQLEENKKATSNMLKAIEMGIITDATRSRMIELETEQSKLAVQLNAAKADVVKIDRDDLIDELQIFRDMDVNNRSVQAELFKDFLVAAYLYDDNRLKLVFSFMGKEKNVEIPLETGEDPPDGGDSPDTKMFVFAPDCSTKKALYFAGSMVLFFFCSSKKIRNAQLAMQAGQ

SEQ ID NO: 2401 - protein, 545 aa, Unknown
  Description of Unknown: Integrase B2402 sequence
  PTHR30461:SF3,SM00857,G3DSA:1.10.10.2600,IPR036162,PF13408, PS51737,G3DSA:3.40.50.1390,IPR025827,IPR006119,IPR038109, PF07508,IPR011109,SSF53041,PTHR30461,Coil, PS51736,cd00338,PF00239
MGADSCMAASAKKVSANIMIRAVIYARYSSSAQKDESIEQQIEACKEYAQRNGIHIVSVYADRAVSGRTDRRPEFQKMMRHAENGEFTMVLAYKSNRIARNMLNALAYEEKLAKVGVNVSYVKEEFGDNAAGRFALRTMMNLNQFFSESLAEDVKRGMDDNARQCRVNGSIPLGYKKGADGKFAIDENTAPIVREVFQRIAKGETQASIADDLNARQIRTAAGKPWGKGSFHNLLKNERYTGVYIYGDIRIPGGMPAIIDRDLFENAQRRIEIMKTLVKSRRRREDVEYLLTGKLFCGHCNSAMTGSSGTSKTGTVHYYYRCHNQAVAKTCNKKAVRKDSIERLVVGIIRDYVLRDDTIERLADLLMEYRKKVEDSSELGYLEERLKESKATSKNIMKAIEAGIFNKTTNERMQELEQEQAELTEQIAEELRHIPNYTRKQAIYYLESFRHGDLDDKKHQKHLIANFLRAVYLYDDHIKITFDFDDDETGLDVPLETAESEALDSESSCVLINTPRVYHNVLIRTPVKIQMVGRVFVLVFYFDFL

SEQ ID NO: 2402 - protein, 545 aa, Unknown
  Description of Unknown: Integrase B2403 sequence
  PTHR30461:SF3,SM00857,G3DSA:1.10.10.2600,IPR036162,PS51737, G3DSA:3.40.50.1390,IPR006119,IPR038109,PF07508,SSF53041, IPR011109,PTHR30461,Coil,cd00338,PF00239
MYKDYPVFYNYETMEYGRKSRTDDPLLTTDEILAKHSKIIEEYAIKNLGGPIPEKNKYMEVGSGESLKERPEITRLLKDIESPAVKAIIVVEVQRLSRGDLEDAGKLIRLLRYTNTYVITPMKIYDLRDEYDRDAFERELKRGNEYLEYYKKIQARGKLASVKAGNYVGSVAPYGFDRIEKTDGKETYHTLIERKDQADVVRMIFDWYCNDDIGVTAICRRLEELGVKTKTGGKIWKPSIIFSMLENHHYIGCTRWNWRKTIKIIENQEIKKLRPKAKVDEFLIFEGKHDGIISEEVFNKAREIRGKRHRTRRDLTLKNPFSGLMFCKCGAKMGYNTYTRRGIEYAPPKLVCNNQVHCKSGSVHFEEVMDYVCGVLKDCISDFEVRIENNQDDSIKLHMDLIARLQDQLKVLEKKEVDQWEAQYDPDPAKRMPQHIFQKLNEKVLAEKEEINKALKKAKDSAPKHIDYREELIKTTDALNALLDPNMDAKTKNQHLRMIIDKMVYERGPIVRITKENAAKYNVDTSKGLQYYNPPYKIDIDLKCD

SEQ ID NO: 2403 - protein, 545 aa, Unknown
  Description of Unknown: Integrase B2404 sequence
  cd03768,PTHR30461:SF3,SM00857,G3DSA:1.10.10.2600, IPR036162,PF13408,PS51737,G3DSA:3.40.50.1390, IPR025827,IPR006119,IPR038109,PF07508, IPR011109,SSF53041,PTHR30461,PS51736,Coil,PF00239
MKIAIYSRKSKYTGKGDSIGNQIQICKDYIETNYRNKDHEYIIYEDEGFSGGNINRPKFQKLLNDIKKEKFDILICYRLDRISRNVSDFSTTLDEIQSYGVDFISVKEQFDTTTPMGRAMIYIASVFAQLERETIAERVRDNMVELAKSGKWSGGRTPLGFDSEGSSYIDEEGNERRLVKLVKNDEELKLVNLIYDTYLKEGSLHKTEAYFASHNIKSNRNILLEKTSLKVILNNPVYAISSPELKEWLEDDGWNVYGEPDGKHSYLSYNKTKHVTRNGKSIKIPNDKENWIAAISNCPGVIEADKWIQVQEQFKGNRGSFPKKARTHDAKLVGKIYCAHCNNYMQVVHGNIKKDTGKRQHYYSCSLKKKSKNQLCRNKNVKIDAVEDLLLLELERLGKNKKSYIQSLKKKNETVKKKKDVKQKQISIQKEIDAKQKILNNLVDKLAVADDLADIIIQRIRTTKKEMQELQEELDKVSKEIEDSNYKKLDLDFIESLLEKCADITKLDSNEQRLLIGVLIDKILWDSNTQNVTVYFIGSGDEKKK

SEQ ID NO: 2404 - protein, 545 aa, Unknown
  Description of Unknown: Integrase B2405 sequence
  PTHR30461:SF3,SM00857,G3DSA:1.10.10.2600,IPR036162,PF13408, IPR025827,G3DSA:3.40.50.1390,PS51737,IPR006119,IPR038109, PF07508,IPR011109,SSF53041,PTHR30461,cd00338, PF00239
MPTSKNTARKYAAGGSSDNSCGVEPLRAVIYARYSSSGQREESIEGQLRDCYEFAKKHGIIVIGEYIDKAMTGRVDRRPDFQRMMKDSEKGRFNCVLLWKMDRFARNRYDSAMYKYKLKKNGIRIFYAKETIPDGPEGIILESVMEGYAEYYSENLAQNVKRGNYDSALELKTLGKTCLGLKTGPDGRYMIDQAEAAIVRRIFEEYAEGERAKDIYERLNSEGYRTSRGGKFNKNSLRRILSNKKYIGVYEYEDIYVENGIPAIITDRDLFERVQKMLKINHDAPARGKAQNFLLTTKLFCGLCGSPMIGDGGTSHTGKAYAYYSCTKRKRGRSCKKESVPKDWIEDLVVGELVKIVHNDELIEQIADRVMEYQKREKDQSGLHALEIRQKENEKAISNMLAAIEAGIITPSTKTRLMELEADRADIEKGIAHELLAEPEFERDQIIYFLERFRSGDINDEAYRIMLVDTFLNSVYLYDDDHLVLVMNYSGENCKVDLKLVEGAVSGDGCKGSAFAPSSALNGAKPNPVYFFKKVFAVVVNFTWR

SEQ ID NO: 2405 - protein, 545 aa, Unknown
  Description of Unknown: Integrase B2406 sequence
  PTHR30461:SF3,cd00338,SM00857,G3DSA:1.10.10.2600,IPR036162, PF13408,IPR025827,G3DSA:3.40.50.1390,PS51737,IPR006119, IPR038109,PF07508,SSF53041,IPR011109,PTHR30461, PS51736,Coil,PF00239
MSSVDKTAVIYARYSSHGQTEQSIEGQIAAAQKYAEGKGYTIIHIYADRAMTGRNDDREQFQKMLSDTATHQFGVILLWKIDRFGRNREEIAFNRYRCKKNGVRVERVAEDVPDGPEGVILDSVLEGMAEYYSLQLAQNVRRGQRESAKKSQTVGGCNIIGYKVNPDTKRYEVDPKTAPFVTEVFKRYANGETISEIVAWLNVQGVRATRGGEFTVNSLHRLLKNEKYTGVYIFHDIRNEGGMPALTDRATFDKVQEMLKVNRRAPARVWSKTEYLLTDKLFCGHCGAMMVGESGHGRNGTKHSYYTCWNRKKKKSCSKKPVRQDVIEPMVLRVISKMLSDEATLEYIADQVWAVYERSDTSGDTIKALDKQIADVDRALSNVMKAIEMGIINEMTKARMDELTDQKQALSVARAEAGLAGGFKLTRDMILFFLHDMAATNMTDRDCQKRLIKTFVNAIYLYDDHFDIAFNYTSNGKMVVKMQEINDTTSGEVFGRCAQSPAKVSRTPSGVRLFLLAVRRELQWRCKSIQFGRCFGEIYFSLQPT

SEQ ID NO: 2406 - protein, 545 aa, Unknown
  Description of Unknown: Integrase B2407 sequence
  PTHR30461:SF3,SM00857,G3DSA:1.10.10.2600,IPR036162,PF13408, PS51737,IPR025827,G3DSA:3.40.50.1390,IPR006119,IPR038109, PF07508,IPR011109,SSF53041,PTHR30461,cd00338, PF00239
MGKVAYCRVSDKKGIDSFENQKQYFNEFGVEKLYTDFDISGMSLKHRQGFIEMLRDAGLNVTKIDDAKMNYKLVVTTSDREPKFNHIYIKSTSRFSRNSAEAMDIIRCLSSKGVYVTFLDLNKSTKEEGIDMVLSILFTINNEESLAISKRTRWGNAVTASNGVFRAFNLYGYTKKEDKVEIVEEEAEIIKLIYKLRIEENIGSRKIAKEINKLGYRTRKNEEWSANSVMNILTNEAYTGKIIRNKYHCDTLYGNNKRTLKPKEEWVITEAPELRIISDNDWGKAEKLIKSATNENKRGINNGSNIYRDKIKCAKCGSNYTINISSTGRQFYNCNKKKKYGLKECSSRNIDLSKIDEIIENYVGKGYKINSEKIVKEFMEPMISGIINNLKSNYDKNNDKKIEDNMKRLNELQIQSSRIMDLYLIGTFDKKMVEIKGLEVKEEIDKLIKENNELSKGNSLIDKKINYIETLMNFIYSQLENIAEDISKEEFINKYLHSIIIDDNNYIVFTLFNKALEMIVKLTSLEDIENFDEEAKKLLDMELTL

SEQ ID NO: 2407 - protein, 545 aa, Unknown
  Description of Unknown: Integrase B2408 sequence
  cd03768,PTHR30461:SF3,SM00857,G3DSA:1.10.10.2600,IPR036162, PF13408,PS51737,G3DSA:3.40.50.1390,IPR025827,IPR006119, IPR038109,PF07508,IPR011109,SSF53041,PTHR30461, PS51736,Coil,PF00239
MKIAIYSRKSKYTGKGDSIGNQIQMCKDYIETNYRNKDHEYIIYEDEGFSGGNINRPKFQKLLNDIKKEKFDILICYRLDRISRNVSDFSTTLDEIQSYGVDFISVKEQFDTTTPMGRAMIYIASVFAQLERETIAERVRDNMVELAKSGKWSGGRTPLGFNSEGSSYIDEEGNERRLVKLVKNDEELKLVNLIYDTYLKEGSLHKTEAYFASHNIKSNRNILLEKTSLKVILNNPVYAISSLSLKEWLENDGWNVYGEPDGKHSYLSYNKTKHVTRNGKSMKIPNDKENWIAAISNCPGVIEADKWIQVQEQFTGNRGSFPKKARTHDAKLVGKIYCSHCNNYMQVVHGNIKKDTGKRQHYYSCSLKKKSKSELCQNKNVKTDDIENLLLQELERLGKNKKNYIQSLKKKNETVKKKKDVKQKQIEIQKKIDAKQKILNNLVDKLAVADDIDDIIIQRIKTTKNEMQELQQELEKFSQEIEDSNYKKLDLDFIESLLEKCADITKLNSNEQRLLIGVLIDKILWDGNTQNVTIYFIGSGDEKKK

SEQ ID NO: 2408 - protein, 545 aa, Unknown
  Description of Unknown: Integrase B2409 sequence
  PTHR30461:SF3,SM00857,G3DSA:1.10.10.2600,IPR036162,PF13408, IPR025827,G3DSA:3.40.50.1390,PS51737,IPR006119,IPR038109, PF07508,SSF53041,IPR011109,PTHR30461,Coil, PS51736,cd00338,PF00239
MKFKYPAMGTTKNAVIYARYSSHSQREESIEGQLRICHEYAKVEGLAIVGEYIDRAISGTTDARPDFQRMIDDAKKKQFSYVIVYRLDRFARNRYDSVLYKHELKQCGVKVVSATEGIGTGDESILLEALIEASAEYYSMELSRKIKRGRQDSAMKGNFLGGAVPLGYKVVDSKFIIDDETAPIVRYIFERYAAGIGKKQIIDELTAKGYMRRTGKPFTYRAFDSVLRNRKYTGEFTQTGITVEGGCPAIVDTEMFEKVQARLEINRRAPAKAKAKTEYLLSGKMFCGYCGEPMIGISGTGRHEKTFYYYSCVGRRGKSGCKKQHEKKDFIEWYVCEQTVQYMQDPERLSHVAKRIIEINDAEFDGGKVKELERAVENCDNDIRKLVDALTTIPDAGRAALYDKIERIGAAKADMEIDLAKLRVLSEVRYKQEDVEAWIRSMCRGDLMDFEFRRQLIDVFINSVYLFDDRVVIVYNIKHGKQVSAIDVLNAVEELDGVELFPDSAEDSSAGGNGSFLVADAPPKQLKYEPQVFFIKETFGLVFER

SEQ ID NO: 2409 - protein, 545 aa, Unknown
  Description of Unknown: Integrase B2410 sequence
  PTHR30461:SF3,SM00857,G3DSA:1.10.10.2600,IPR036162,PF13408, IPR025827,PS51737,G3DSA:3.40.50.1390,IPR006119,IPR038109, PF07508,IPR011109,SSF53041,PTHR30461,Coil, PS51736,cd00338,PF00239
MHGAYILARYSTDRQNEDSIEVQVSACRKWCDERSLPVLDVFADEATSGMKDTRPQYARMMWQLEHGGADTVVIYDQSRMFRKLTAWFDFRDQLARLGVDVVSVTQPMIGGDLRDPANFLTEGSMALFNQMWVLQTRQKVVAKMRYMAEQGLHTGGTPPLGYKVVDGRLVIDAAEAETVRLIFGLYASGMTYREIIRRLNAEGRHTKRGGNFGVNSLHDLLKNPKYVGDMVYGKVAKRPDGSRNSHAAAVDAIVVKDALPAIVDREIWEKVQLKMQDNKRSTAGRPASAREYPLKGKVFCRECKSAMLVTASNRGAKRYYYYACAAKHRKGLCDNTPIPAGTLETLVADAVRQRLGQPGNVEGLIRILREQRSKLSGSAVQRLRELQKRDKEISKQLDAAVAAVLAGLHSPTLTAKVNALEAERAKIAHDMQQLRAQVSGAEIDEPHLRELLALAMQDDAAVLSIVVRVEVGKDEIAVWTLLDADPNGDFDFAEDGVPITPSEVAPSYNNSGCPATGTTNYYNIVTPAGLLLFYIARPRQRDRRS

SEQ ID NO: 2410 - protein, 545 aa, Unknown
  Description of Unknown: Integrase B2411 sequence
  PTHR30461:SF3,IPR036162,PS51737,IPR011109,PTHR30461, PF00239,G3DSA:1.10.10.2600,IPR006119,PF14287,SSF53041, IPR025378,SM00857,IPR025827,cd03770,IPR038109, PS51736,PF13408,G3DSA:3.40.50.1390,PF07508,Coil
MNNNRQSYNAEEKITALYCRLSRDDELQGDSNSIINQKAILQKYADDNGFRNTFLFVDDGYSGTTFDRPDWNRLMGLVDEGKVGTIIVKDMSRLGRDYLKVGMYTEMVFPNADIRFIAINNGVDSANQAENDMTPFINIFNEFYAKDTSRKIRAVFKAKGQSGKPLSTNPPYGYVKDPEDKTHWLVDEQAAEVVRDIFRLCVQGYGISQIANEITRRNILNPTAYAKASGRSVPDNRDGDNDYTWRSSTISHMLSRPEYLGHTVNFKTYRKSYKQKKQLHHSPSEWQIFENTHEAIVDRETYDIVQRIRDGRRRRTPMGEMPMLSGMVFCADCGAKLYQVRSTGFSPGQEYMVCATYRKKGKEKCTSHQIRNSVIEEFLLEGIRSMTAYVREHEDEFVEMVTKLSKAETEKALRDEKRELEQAESRVHKLDTIIQRLYEDNVEGKISDERFAKMSENYESEQKLLERRITEIRCSIAAQKESSMNVNSFVALVRKHTDIQELNAEVIREFVERVEVFQPARVGGRKVRRLRIVWNCIGEFTPPQL

SEQ ID NO: 2411 - protein, 545 aa, Unknown
  Description of Unknown: Integrase B2412 sequence
  PTHR30461:SF3,cd00338,SM00857,G3DSA:1.10.10.2600,IPR036162, PF13408,IPR025827,G3DSA:3.40.50.1390,PS51737,IPR006119, IPR038109,PF07508,SSF53041,IPR011109,PTHR30461, PS51736,Coil,PF00239
MSSVDKTAVIYARYSSHGQTEQSIDGQIAAAQKYAEGKGYTIIHIYADRAMTGRNDDREQFQKMLSDTATHQFGVILLWKIDRFGRNREEIAFNRYRCKKNGVRVERVAEDVPDGPEGVILDSVLEGMAEYYSLQLAQNVRRGQRESAKKSQTVGGCNIIGYKVNPDTKRYEVDPKTAPFVTEVFKRYANGETISEIVAWLNVQGVRATRGGEFTVNSLHRLLKNEKYTGVYIFHDIRNEGGMPALTDRATFDKVQEMLKVNRRAPARVWSKTEYLLTDKLFCGHCGAMMVGESGHGRNGTKHSYYTCWNRKKKKSCSKKPVRQDVIEPMVLRVISKMLSDEATLEYIADQVWAVYERSDTSGDTIKALDKQIADVDRALSNVMKAIEMGIINEMTKARMDELTDQKQALSVARAEAGLAGGFKLTRDMILFFLHDMAATNMTDRDCQKRLIKTFVNAIYLYDDHFDIAFNYTSNGKMVVKMQEINDTTSGEVFGRCAQSPAKVSRTSSGVRLFLLAVRRELQWRCKSIQFSRCFGGIYFSLQPT

SEQ ID NO: 2412 - protein, 545 aa, Unknown
  Description of Unknown: Integrase B2413 sequence
  PTHR30461:SF3,SM00857,G3DSA:1.10.10.2600,IPR036162,PF13408, IPR025827,G3DSA:3.40.50.1390,PS51737,IPR006119,IPR038109, PF07508,IPR011109,SSF53041,PF00239,PTHR30461, PS51736,Coil,cd00338
MAKRKFNKGGEVRLVAYYRYSGGSGQTEQSIEGQRRDCETYARLHNMTIQKEYVDRHISGKTDDRAAFQQMIADSDKGAFDMVICWKTDRFARNRYDSAVYKKRLRDNGVEIVYAAESNIAGAEGIIIEGVMEALAEYYSAELAEKMRRGMRESALKGQAISRCRALGLKTDERKRFVIDEKTAPTVRFIFEHYAAGESAMSIVEQLNAKGLRTSQGNPFNKSSIPRIIQNEAYRGVYVSKSYDVRIEGAIPAIIDNELWERAQTMLKLNRQLKAKNEPKADYILSGKLYCSCGSLMRGMSGHSATGEVYRYYTCPNKDCHLRNIPKDDLEGKVIQSIVDHLLQPESMEALAEAMVEVQKADAEKPNAERVAIEQSLADVRRRSKNILDAIENGTANAQLCARLNDLTEQEQTLSFQLSSLEKEKPVAFTKEQYLFLLEQFLVEPSERTPEYGRRLVNAFVTSMVVSDRELVINFNVSDETVNKNKKASQTNLQKESSSGMRLVRLTFPQSNLSVTIFPSYFFLTCPLSHQPLSADTSSSISSFR

SEQ ID NO: 2413 - protein, 545 aa, Unknown
  Description of Unknown: Integrase B2414 sequence
  PTHR30461:SF3,SM00857,G3DSA:1.10.10.2600,IPR036162,PF13408, PS51737,G3DSA:3.40.50.1390,IPR025827,IPR006119,IPR038109, PF07508,IPR011109,SSF53041,PTHR30461,Coil, PS51736,cd00338,PF00239
MLQVAAYCRVSTDKEDQANSFEAQQRYFREYIQRQPDWELQGIYADEGFSGTSTNKRVEFNKMLHAAELGQIDLIVTKEVSRFTRNTVDALQITRELRRRGVGVLFLNDSLDTRTNDGELRLTIMSSFAQDESRRTSERSKWGQMRSMEKGVVFGGSLLGYDVIGGKMTVNTEGAEVVRLIFHKYLQERKGCSTIARELREAGILSSKGNCLWSSATVTKILKNEKYCGDLIQKKTYTPDYLTHEKKYNHGKEPLVELKDHHEAIIDRETWQAVQRELSRRNRATGCGGHGNRYPLSGKICCGECGKSFSHRTKKRQDGSSYYRWCCFTATNEGLRRTDGAGNVIGCSVGRQIRDDVAMDLLRRSVSAVTLDKKSIISSLTRVVESVLASGEDSGEQELRRLELELEKLQARNDTIHDRFFDESITKADYQRAKARCESEMNRVQEKIAAIKQRQTLNTDTQTLKPDIRAAITGIVSGRTADDDFYGHLLQQMTVYRDGRVEVALNLLPAKWVYVLDGLEKYRAKIGGHDASSVPMSVSSPLSSG

SEQ ID NO: 2414 - protein, 545 aa, Unknown
  Description of Unknown: Integrase B2415 sequence
  PTHR30461:SF3,cd00338,SM00857,G3DSA:1.10.10.2600,IPR036162, PF13408,PS51737,IPR025827,G3DSA:3.40.50.1390,IPR006119, IPR038109,PF07508,IPR011109,SSF53041,PTHR30461, PS51736,Coil,PF00239
MARKKNIAAGQNAVIYARYSSHNQREVSIEQQVRECMKHAAELGLHVVGTYEDRAISGKTDKRPNFQRMMRDAEKGKFQAVVAWKSNRIGRNMLQAMVNEAKLEDCGVKVFYAEEDFDDTAAGRFALRNMMNVNQFYSENMAEDITRGLYDNASKCMANGRQPLGYKRGEDGRVVLDEANAAVVREIFTRVAAGDLFVDIARDLNAQGIKTSKGANWNKGSFQSICQNERYRGIYIYGDVRVADGIPRIVSDDLWYRVQEAMRMKKNPVGTRHRVGAEDYLLTGKLRCGHCGSYMTGVSGTSRNGELHYYYTCQKRRTEHACDKKNIRRDVIEPAVAQAIKMYCLTDDVIAWIADRTVEYWEKHDNDLQIEALEQQLEENKKATSNMLKAIEMGIITEATRTRMVELETEQSRLSVQLNVAKEDVVKIDREQIISYLELLQQGDIHDRDFQMELFKNFLVAVYVYDDNRMKLVFSCMGDQNSVEIPLETGEDPPDGGLSPDAKMFVLTPDSSTKKALYFVGSTVLFFFIPAKKSGGAPLAMQAGQ

SEQ ID NO: 2415 - protein, 544 aa, Unknown
  Description of Unknown: Integrase B2416 sequence
  PTHR30461:SF3,SM00857,G3DSA:1.10.10.2600,IPR036162,PF13408, IPR025827,G3DSA:3.40.50.1390,PS51737,IPR006119,IPR038109, PF07508,IPR011109,SSF53041,PF00239,PTHR30461, PS51736,Coil,cd00338
MRVSVNLNAQKPDTTTNAVIYARYSSHGQTEQSIEGQLAKGHEYAAAQGYTVVHEYIDRAMTGRNDNREAFQKMLSDTGKHQFQVVIVWKVDRFGRNREEIAFNKHTCKKNGVRVEYVAESLPNSPEAVILESVLEGMAEYYSIQLSQNIRRGQLESAKKCQCVGGSVPLGYTLDSDKHFVIDPQTAPVVKKIFDLYAEGATISEITGQLNEQGIRTARKQLFTKNSLTKLLKNEKYIGVYTYKDIVRVEGGVPAIVDKSTFDRVQELLKINRRAPSHTWTKVEYLLTDKLFCGHCGSPMVGESGFSHTGAKYSYYGCIKRRREKACDKKPVRQDWIEALVLDETVKLLHDDELMEYIIDRTWEYYQVTDKVQEEKAVLEAQLAEVDKAINNLVRAIEAGIFNAATKSRMDELDAQKAALTASLADLELTSGIRITRDHIEYFLLRLRDLDVKDRECQKRLVQTFVNAVFIYDDGRVKITYNYSGQSSTITLNQIASAEKGKGFVCCLPCSTSSPRFPRGVAALFLFWGKIGCESTTNFSCIVL

SEQ ID NO: 2416 - protein, 544 aa, Unknown
  Description of Unknown: Integrase B2417 sequence
  SM00857,G3DSA:1.10.10.2600,IPR036162,PF13408,PS51737, IPR025827,G3DSA:3.40.50.1390,IPR006119,IPR038109,PF07508, SSF53041,IPR011109,PTHR30461,Coil,cd00338, PF00239
MAYRKITDIKDTIGMRAVFYARVSTAEEEQLNAIELQIEENRGCIKDHGWKLVGEYIDRSKSGTMVKGRDDYQRLYEDLYEDLFDIVVIKDQERLQRNTLDWYLFINRVVQTGKLLFMYMDGKFYSPDDALITGVRAIIAEEFSRNLSKKLHNYHDHRIEKARQGQEIALQGSGNVYGWDKKDGKYYINPEQAKVRRLMCEGIMARKGSTLIAKELNDAGYRNTVGKPWKPMDIPKFVYDCKNVGTMIINKERHDFESKQTIKLPKEEWVYVENALPPIVTQEEWDLICKIHEERVIATGSDRRGKKTSGYSFSGKLVCGICGAPYWRKQRVSKDEYWVCSTKQTKGRRTRKRDSTMGKAGEINPLGCDNENISYNSLMEIMRVVSERLQANTDTIKQDMINWLTKLRKQLLEANGGHTEADLQRELSRKSKLLDAYLDGILNKQEYQKKAEELDERLIQLKAETEKNKANSGDIAEIDKVLADIDEEVSRYVDGNEKLKVEYLLEHLEQVQIFPDKVIVIVPILSEGIVVEKTQYVSREKWRR

SEQ ID NO: 2417 - protein, 544 aa, Unknown
  Description of Unknown: Integrase B2418 sequence
  SM00857,G3DSA:1.10.10.2600,IPR036162,PF13408,IPR025827, G3DSA:3.40.50.1390,PS51737,IPR006119,IPR038109,PF07508, SSF53041,IPR011109,PTHR30461,Coil,cd00338, PF00239
MAYRKITDIKDTIGMRAVFYARVSTAEEEQLNAIELQIEENRGCIKDHGWKLVGEYIDRSKSGTMVKGRDDYQRLYEDLYEDLFDIVVIKDQERLQRNTLDWYLFINRVVQTGKLLFMYMDGKFYSPDDALITGVRAIIAEEFSRNLSKKLHNYHDHRIEKARQGQEIALQGSGNVYGWDKKDGKYYINPEQAKVRRLMCEGIMARKGSTLIAKELNDAGYRNTVGKPWKPMDIPKFVYDCKNVGTMIINKERHDFESKQTIKLPKEEWVYVENALPPIVTQEEWDLICKIHEERVIATGSDRRGKKTSGYSFSGKLVCGICGAPYWRKQRVSKDEYWVCSTKQTKGRRTRKRDSTMGKAGEINPLGCDNENISYNSLMEIMGVVSERLQANTDTIKQDMINWLTKLRKQLLEANGGHTEADLQREISRKSKLLDAYLDGILNKQEYQKKAEELDERIIQLKAETEKNKANSGDIAEIDKVLANIDEEVARYIDGNEKLKVEYLLEHLEQVQIFPDKVIVIVPILSEGIVVEKTQYVSREKWRW

SEQ ID NO: 2418 - protein, 544 aa, Unknown
  Description of Unknown: Integrase B2419 sequence
  PTHR30461:SF3,SM00857,G3DSA:1.10.10.2600,IPR036162,PF13408, PS51737,G3DSA:3.40.50.1390,IPR025827,IPR006119,IPR038109, PF07508,IPR011109,SSF53041,PF00239,PTHR30461, PS51736,Coil,cd00338
MRVSVNLNAQKPDTTTNAVIYARYSSHGQTEQSIEGQLAKGHEYAAAQGYTVVHEYIDRAMTGRNDNREAFQKMLSDTGKHQFQVVIVWKVDRFGRNREEIAFNKHTCKKNGVRVEYVAESLPNSPEAVILESVLEGMAEYYSIQLSQNIRRGQLESAKKCQCVGGSVPLGYTLDSDKHFVIDPQTAPVVKKIFDLYAEGATISEITGQLNEQGIRTARKQLFTKNSLTKLLKNEKYIGVYTYKDIVRVEGGVPAIVDESTFDRVQELLKINRRAPSHTWTKVEYLLTDKLFCGHCGSPMVGESGFSHTGAKYSYYGCIKRRREKACDKKPVRQDWIEALVLDETVKLLHDDELMEYIIDRTWEYYQVTDKVQEEKAVLEAQLAEVDKAINNLVRAIEAGIFNAATKSRMDELDAQKAALTASLADLELTSGIRITRDHIEYFLLRLRDLDVKDRECQKRLVQTFVNAVFIYDDGRVKITYNYSGQSSTITLNQIASAEKGKGFVCCLPCSTSSPRFPRGVAALFLFWGKNGCESTTNFSCFVL

SEQ ID NO: 2419 - protein, 544 aa, Unknown
  Description of Unknown: Integrase B2420 sequence
  PTHR30461:SF3,SM00857,G3DSA:1.10.10.2600,IPR036162,PF13408, PS51737,G3DSA:3.40.50.1390,IPR025827,IPR006119,IPR038109, PF07508,IPR011109,SSF53041,PTHR30461,Coil, PS51736,cd00338,PF00239
MPAALAYCMASVNLVFAWADLRIYYTIISLVLERRTDYIMTKNAVIYARFSSDKQREESIDGQIRECRAFAEANEINIINIYIDRAMSARTDQRPSFLQMVKDSAKHLFDYVIVYQLDRFSRSRYDSAIYKHRLKKNGVKVLSAKENIKDDPSGILLESVIEGMAEYYSAELSQKVKRGMTENLLEGKWIGGIVPFGYELTSENKLAISPATGHLVSEIYDKYLSGVKTTDILSKLNSLGIKTQRGCNFTRNSLNRILKNQIYTGTFTWAGTSYPEYAPALITQEQYTAMQNLFESRKRKSNTARRVSPQYALTGKIYCGTCGLPMTGYCGKSHTGTTYYYYQCSSKNNKSEKAQRSRIKCDAKNINRDKLEKLVLDTTISILKDKAALKCIADQCMAIQEAEIAHKPAEQLRLESQIKDIEKRLKNSVKAIENGLISQTITNNIETYEKQLTELKAELDGVKLETHIIPITEEAVIYYLNQLIERANKKDGYSLDTFDDFIRRVVVTGKRVDIYYNYTAVPHVLENPAVKMLRGSSEDCLVTR

SEQ ID NO: 2420 - protein, 544 aa, Unknown
  Description of Unknown: Integrase B2421 sequence
  PTHR30461:SF3,SM00857,G3DSA:1.10.10.2600,IPR036162,PF13408, IPR025827,G3DSA:3.40.50.1390,PS51737,IPR006119,IPR038109, PF07508,SSF53041,IPR011109,PF00239,PTHR30461, PS51736,Coil,cd00338
MSATIPSLMQAPRAFGYCRKSTNEQREESLEAQQRAIVTFAATAGYELVQVYKDHGNSGRRGERPEFQRMLADAAAAGVQYIIVHKLDRFFRNADQQTVVEMQLRRQGIQVISAAEHFDATPQGQFMRNVTKAINQWYSANLAQEVAKGLRENALTARTTGGPPPLGYTVDKSTGQYAIVPREAEAVQLIFKLYQQGAGYTEIIDALNAGGYVTRRGQPFGKNSLYDILRNEKYTGLYIWNRLAPADVDGRTSRRRLKPRDEWVCVENGMPQIIPTEQWQAVQDEMDKRKHRNAQYKAKSFYLLSGLVYCGGCGGTMAGEMHRYNSHGKAVEYRYYRCAAQHRQHDGGVHAHRVNADRLENAVIDYIQHIVLDPVNMDALCVAVLEALQPDGRNAERAKELKQEAGIIQQKVDRLYQAIENGLDAAGAIERINALQKQRMTLLAQANDLDISAESAAASVDELRRVWSGINLRELQPEKMRVIVRDLIYKIVVFDDGPRGSRLRIILNPARLNPSAIPKAIETMPFSELQNFSHTGGSGLPLPR

SEQ ID NO: 2421 - protein, 544 aa, Unknown
  Description of Unknown: Integrase B2422 sequence
  SM00857,G3DSA:1.10.10.2600,IPR036162,PF13408,PS51737, IPR025827,G3DSA:3.40.50.1390,IPR006119,IPR038109,PF07508, SSF53041,IPR011109,PTHR30461,Coil,cd00338, PF00239
MAYRKITDIRDTIGMRAVFYARVSTAEEEQLNAIELQIEENRGCIKDHGWKLVGEYIDRSKSGTMVKGRDDYQRLYEDLYEDLFDIVVIKDQERLQRNTLDWYLFINRVVQTGKLLFMYMDGKFYSPDDALITGVRAIIAEEFSRNLSKKLHNYHDHRIEKARQGQEIALQGSGNVYGWDKKDGKYYINPEQARVRRLMCEGIMARKGSTLIAKELNDAGYRNTVGKPWKPMDIPKFVYDCKNVGTMIINKERHDFESKQTIKLPKEEWVYVENALPPIVTQEEWDLICKIHEERVIATGSDRRGKKTSGYSFSGKLVCGICGAPYWRKQRVSKDEYWVCSTKQTKGRRTRKRDSTMGKAGEINPLGCDNENISYNSLMEIMGVVSERLQANTDTIKQDMINWLTKLRKQLLEANGGHTEADLQRELSRKSKLLDAYLDGILNKQEYQKKAEELDERIIQLKTETEKNKANSGDIAEIDKVLANIDEEVARYVDGNEKLKVEYLLEHLEQVQIFPDKVIVIVPILSEGIVVEKTQYVSREKWRW

SEQ ID NO: 2422 - protein, 544 aa, Unknown
  Description of Unknown: Integrase B2423 sequence
  PTHR30461:SF3,SM00857,G3DSA:1.10.10.2600,IPR036162,PF13408, PS51737,G3DSA:3.40.50.1390,IPR025827,IPR006119,IPR038109, PF07508,SSF53041,IPR011109,PTHR30461,Coil, PS51736,cd00338,PF00239
MPAALAYCMASVNLVFAWADLRIYYTIISLVLERRTDYIMTKNAVIYARFSSDKQREESIDGQIRECRAFAEANEINIINTYIDRAMSARTDQRPSFLQMVKDSAKHLFDYVIVYQLDRFSRSRYDSAIYKHRLKKNGVKVLSAKENIKDDPSGILLESVIEGMAEYYSAELSQKVKRGMTENLLEGKWIGGIVPFGYELTSENKLAISPATGHLVSEIYDKYLSGVKMTDILSKLNSLGIKTQRGCNFTRNSLNRILKNQIYTGTFTWSGTSYPDYAPALITQEQYTAMQNLFESRKRKNNTARRVSPQYALTGKIYCGTCGLPMTGYCGKSHTGTTYYYYQCSSKNNKSEKAARSQIACDAKNINRDKLEKLVLDTTISILKNKDAVKCIADQCMAIQKAELEHKPAEQLRLESQIKEIEKRLKNSVKAVENGLISQTITNNIETYEKQLTELNAQLDGVKLDTHIIPITEEAVIYYLNQLTERANKKDGYSLDTFDDFIRRVVVTGKRVDIYYNYTAVPNILENPAVKMLRGSSEDCLVTR

SEQ ID NO: 2423 - protein, 544 aa, Unknown
  Description of Unknown: Integrase B2424 sequence
  PTHR30461:SF3,SM00857,G3DSA:1.10.10.2600,IPR036162,PF13408, IPR025827,G3DSA:3.40.50.1390,PS51737,IPR006119,IPR038109, PF07508,IPR011109,SSF53041,PF00239,PTHR30461, PS51736,Coil,cd00338
MRVSVNLNAQKPDTTTNAVIYARYSSHGQTEQSIEGQLAKGHEYAAAQGYTVVHEYIDRAMTGRNDNREAFQKMLSDTGKHQFQVVIVWKVDRFGRNREEIAFNKHTCKKNGVRVEYVAESLPNSPEAVILESVLEGMAEYYSIQLSQNIRRGQLESAKKCQCVGGSVPLGYTLDSDKHFVIDPQTAPVVKKIFDLYAEGATISEITGQLNEQGIRTARKQLFTKNSLTKLLKNEKYIGVYTYKDIVRVEGGVPAIVDKSTFDRVQELLKINRRAPSHTWTKVEYLLTDKLFCGHCGSPMVGESGFSHTGAKYSYYGCIKRRREKACDKKPVRQDWIEALVLDETVKLLHDDELMEYIIDRTWEYYQVTDKVQEEKAVLEAQLAEVDKAINNLVRAIEAGIFNAATKSRMDELDAQKAALTASLADLELTSGIRITRDHIEYFLLRLRDLDVKDRECQKRLVQTFVNAVFIYDDGRVKITYNYSGQSSTITLNQIASAEKGKGFVCCLPCSTSSPRFPRGVAALFLFWGKNGCESTTNFSCIVL

SEQ ID NO: 2424 - protein, 544 aa, Unknown
  Description of Unknown: Integrase B2425 sequence
  SM00857,G3DSA:1.10.10.2600,IPR036162,PF13408,PS51737, IPR025827,G3DSA:3.40.50.1390,IPR006119,IPR038109,PF07508, SSF53041,IPR011109,PTHR30461,Coil,cd00338, PF00239
MAYRKITDIRDTIGMRAVFYARVSTAEEEQLNAIELQIEENRGCIKDHGWKLVGEYIDRSKSGTMVKGRDDYQRLYEDLYEDLFDIVVIKDQERLQRNTLDWYLFINRVVQTGKLLFMYMDGKFYSPDDALITGVRAIIAEEFSRNLSKKLHNYHDHRIEKARQGQEIALQGSGNVYGWDKKDGKYYINPEQAKVRRLMCEGIMARKGSTLIAKELNDAGYHNTVGKPWKPMDIPKFVYDCKNVGTMIINKERHDFESKQTIKLPKEEWVYVENALPPIVTQEEWDLICKIHEERVIATGSDRRGKKTSGYSFSGKLVCGICGAPYWRKQRVSKDEYWVCSTKQTKGRRTRKRDSTMGKAGEINPLGCDNENISYNSLMEIMGVVSERLQANTDTIKQDMINWLTKLRKQLLEANGGHTEADLQRELSRKSKLLDAYLDGILNKQEYQKKAEELDERIIQLKAETEKNKANFGDIAEIDKVLANIDEEVARYVDGNEKLKVEYLLEHLEQVQIFPDKVIVIVPILSEGIVVEKTQYVSREKWSW

SEQ ID NO: 2425 - protein, 544 aa, Unknown
  Description of Unknown: Integrase B2426 sequence
  PTHR30461:SF3,SM00857,G3DSA:1.10.10.2600,IPR036162,PF13408, PS51737,G3DSA:3.40.50.1390,IPR025827,IPR006119,IPR038109, PF07508,SSF53041,IPR011109,PF00239,PTHR30461, Coil,cd00338
MEKTVYESNVPRVYTLYRVSTIGQVEKDDIPMQKQVCRDFAKKQGWVVVKEFSEKGISGYKVSAKDRDAIQEIQHDAALGKFDILLVFMFDRLGRRDDETPFIVEWFVKNGVEVWSAMEGQQRFDNHVDKLMNYIRYWQASGESLKTSIRTKTRLGQLTEEGHYTGGTVPYGYRAVDKGRVNKRNRTVLDLEIDEDEAEVIRLIFHKYVDEGYGAQRLSHYLHEQGIKSRDGKGFPNTTVNRIIKNIAYTGIIKNGESQSGYIDELRIIDVSTFSKAQEIMRQRTLPHGNVPLNCKGKSLLVGNIFCAHCGNRLTLTTSGRRVYRADGTVKYEPRMRYQCHYNVRHPGECDGQSGYGVTKLDGIVEKVIRMKFAEIAAAPESEILNHQHKKEIELARIKLDQANAHLAEKQKDLSDYKAETLKVIRGQSNLSVELLNALVKETETMIALAQTRIDAAQTEYESLLASAENLRQEYDRLLTWADLFDTCSFEAKKMIVAQFVKAVRVSRDYNIEIDFNVSFEEFQNFSVKNGEPVILQPLRSHTA

SEQ ID NO: 2426 - protein, 544 aa, Unknown
  Description of Unknown: Integrase B2427 sequence
  PTHR30461:SF3,SM00857,G3DSA:1.10.10.2600,IPR036162,PF13408, IPR025827,PS51737,G3DSA:3.40.50.1390,IPR006119,IPR038109, PF07508,IPR011109,SSF53041,PF00239,PTHR30461, PS51736,Coil,cd00338
MPETPAKTVTVIPATITGPQVKRRSDLLRVAAYCRVSTDDKEQLTSYRNQIDFYTQKISSNPEWTMAGIYADEGITGTIARKRKEFNKLMAACRRGRVDLILTKSVSRFARNTLDCLTYVRMLKELGIGVLFEKENINTLKDSNETILTLCSALAQSESESMSGNITWSKRKAFRDGKVTFQYNRTLGYRRGADGKPEIIPEDARVIRRIFCSYLAGGSLGRICKELMEAGIKNSTGGDEWKASTLLYLLQNEKYCGDALLQKTFVSDCISKKVKKNNGELPQVYVKDNHPAIVSRELFNWVQEEIARRRSRPKATTKPSKTNLGKFSSQYALSELLCCGECGTPYRRVTWTSCDRKRIVWRCISRLESGKKICKSSPTIPEPVLHDAILRGMRLLLDNKAELLASIRDALNAALASSAEGDAPSIQRRIEEKNAAMMKLVQFAVESGATEDYFDAKFAELAAEIAALHAQAEKLEQSDVTRDTLQTRFGEMLKRLESEEPDLETYNDNLVRYYIESITVMSKTQINIRFKMGIEIAEELKYEE

SEQ ID NO: 2427 - protein, 544 aa, Unknown
  Description of Unknown: Integrase B2428 sequence
  PTHR30461:SF3,IPR036162,PS51737,IPR011109,PTHR30461, PF00239,G3DSA:1.10.10.2600,IPR006119,SSF53041,cd00338, SM00857,IPR025827,IPR038109,PS51736,mobidb-lite, PF13408,G3DSA:3.40.50.1390,PF07508,Coil
MNAVIYARFSSHSQREQSIEGQLRDCYEYAKRYDINIVGEYIDRAISGMTDDRPDFQRMIADAPKKQFERIIVWKLDRFARNRYDSALYKHKLKQYGIRVISAMENVGEGDESILLEALLEASAEYYSLDLKKKILRGQRETIAKGRWCGGPIPYGYKAVDGKLVADEKTAPIIRYVFEQYAQGVPMKEIIDELKRRGVRSSRGGELTYTTFSRALTNPVYIGNFMYKGELVPGVADALIDEDTYNKVQIIVKANAHAPAANKAKVEYLLQGKAFCGHCGSHMVGESGKSRNGDVYYYYSCAARKKAHKCRKKNEKKDFIEWYVVEQTLNYVLTPTRMRDIAKAVVAEYDKEFSGSKVQEYEKAIKQYERELDKLVDALVDAPKVAHKRIYEKMETLETQKASMENELVKLRIASEIRFTEEEVRAWLRRFCTGDLFDPEFRRNIIDTFINCIYLYDDRIIIFYNIKGGKQVSFVDLAESLDNESESSGSDLNANAPPEQVRIGLPVRIFCIQHGCAYQKSGRRGGPRFPHREWEMQEGAMAPP

SEQ ID NO: 2428 - protein, 544 aa, Unknown
  Description of Unknown: Integrase B2429 sequence
  SM00857,G3DSA:1.10.10.2600,IPR036162,PF13408,PS51737, IPR025827,G3DSA:3.40.50.1390,IPR006119,IPR038109,PF07508, IPR011109,SSF53041,PF00239,PTHR30461,Coil, cd00338
MAYRKITDIRDTIGMRAVFYARVSTAEEEQLNAIELQIEENRGCIKDHGWKLVGEYIDRSKSGTMVKGRDDYQRLYEDLYEDLFDIVVIKDQERLQRNTLDWYLFINRVVQTGKLLFMYMDGKFYSPDDALITGVRAIIAEEFSRNLSKKLHNYHDHRIEKARQGQEIALQGSGNVYGWDKKDGKYYINPEQAKVRRLMCEGIMARKGSTLIAKELNDAGYRNTVGKPWKPMDIPKFVYDCKNVGTMIINKERHDFESKQTIKLPKEEWVYVENALPPIVTQEEWDLICKIHEERVIATGSDKRGKKTSGYSFSGKLVCGICGAPYWRKQRVSKDEYWVCSTKQTKGRKTRKRDSTMGKAGEINPLGCDNENISYNSLMEIMGVVSERLQANTDTIKHDMINWLTKLRKQLLEANGGHTEADLQRELSRKSKLLDAYLDGILNKQEYQKKAEELDERIIQLKAETEKNKANSGDIAEIDKVLANIDEEVARYVDGNEKLKVEYLLEHLEQVQIFPDKVIVIVPILSEGIVVEKTQYVSREKRSR

SEQ ID NO: 2429 - protein, 544 aa, Unknown
  Description of Unknown: Integrase B2430 sequence
  SM00857,G3DSA:1.10.10.2600,IPR036162,PF13408,IPR025827, PS51737,G3DSA:3.40.50.1390,IPR006119,IPR038109,PF07508, SSF53041,IPR011109,PTHR30461,Coil,cd00338, PF00239
MAYRKITDIKDTIGMRAVFYARVSTAEEEQLNAIELQIEENRGCIKDHGWKLVGEYIDRSKSGTMVKGRDDYQRLYEDLYEDLFDIVVIKDQERLQRNTLDWYLFINRVVQTGKLLFMYMDGKFYSPDDALITGVRAIIAEEFSRNLSKKLHNYHDHRIEKARQGQEIALQGSGNVYGWDKKNGKYYINPEQAKVRRLMCEGIMARKGSTLIAKELNDAGYRNTVGKPWKPMDIPKFVYDCKNVGTMIINKERHDFESKQTIKLPKEEWVYVENALPPIVTQEEWDLICKIHEERVIATGSDRRGKKTSGYSFSGKLVCGICGAPYWRKQRVSKDEYWVCSTKQTKGRRTRKRDSTMGKAGEINPLGCDNENISYNSLMEIMGVVSERLQANTDTIKQDMINWLTKLRKQLIEANGGHTEADLQRELSRKSKLLDAYLDGILNKQEYQTKAEELDERIIQLKAETEKNKANSGDIAEIDKVLANIDEEVSRYVDGNEKLKVEYLLEHLEQVQIFPDKVIVIVPILSEGIVVEKTQYVSREKWRR

SEQ ID NO: 2430 - protein, 544 aa, Unknown
  Description of Unknown: Integrase B2431 sequence
  PTHR30461:SF3,SM00857,G3DSA:1.10.10.2600,IPR036162,PF13408, PS51737,G3DSA:3.40.50.1390,IPR025827,IPR006119,IPR038109, PF07508,IPR011109,SSF53041,PF00239,PTHR30461, PS51736,Coil,cd00338
MRVSVNLNAQKPDTTTNAVIYARYSSHGQTEQSIEGQLAKGHEYAAAQGYTVVHEYIDRAMTGRNDNREAFQKMLSDTGKHQFQVVIVWKVDRFGRNREEIAFNKHTCKKNGVRVEYVAESLPNSPEAVILESVLEGMAEYYSIQLSQNIRRGQLESAKKCQCVGGSVPLGYTLDSDKHFVIDPQTAPVVKKIFDLYAEGATISEITGQLNEQGIRTIRKQLFTKNSLTKLLKNEKYIGVYTYKDIVRVEGGVPAIVDKSTFDRVQELLKINRRAPSHTWTKVEYLLTDKLFCGHCGSPMVGESGFSHTGAKYSYYGCIKRRREKACDKKPVRQDWIEALVLDETVKLLHDDELMEYIIDRTWEYYQVTDKVQEEKAVLEAQLAEVDKAINNLVRAIEAGIFNAATKSRMDELDAQKAALTTSLADLELTSGIRITRDHIEYFLLRLRDLDVKDRECQKRLVQTFVNAVFVYDDGRVKITYNYSGQSSTITLNQIASAEKGKGFVCCLPCSTSSPRFPRGVAALFLFWGKNGCESATNFSCIVL

SEQ ID NO: 2431 - protein, 544 aa, Unknown
  Description of Unknown: Integrase B2432 sequence
  SM00857,G3DSA:1.10.10.2600,IPR036162,PF13408,IPR025827, G3DSA:3.40.50.1390,PS51737,IPR006119,IPR038109,PF07508, SSF53041,IPR011109,PTHR30461,Coil,cd00338, PF00239
MAYRKITDIRDTIGMRAVFYARVSTAEEEQLNAIELQIEENRGCIKDHGWKLVGEYIDRSKSGTMVKGRDDYQRLYEDLYEDLFDIVVIKDQERLQRNTLDWYLFINRVVQTGKLLFMYMDGKFYSPDDALITGVRAIIAEEFSRNLSKKLHNYHDHRIEKARQGQEIALQGSGNVYGWDKKDGKYYINPEQAKVRRLMCEGIMARKGSTLIAKELNDAGYRNTVGKPWKPMDIPKFVYDCKNVGTMIINKERHDFESKQTIKLPKEEWVYVENALPPIVTQEEWDLICKIHEERVIATGSDRRGKKTSGYSFSGKLVCGICGAPYWRKQRVSKDEYWVCSTKQTKGRRTRKRDSTMGKAGEINPLGCDNENISYNSLMEIMGVVSERLQANTDTIKQDMINWLTKLRKQLLEANGGHTEADLQRELSRKSKLLDAYLDGILNKQEYQKKAEELDERIIQLKAETEKNKANSGDIAEIDKVLANIDEEVSRYVDGNEKLKVEYLLEHLEQVQIFPDKVIVIVPILSEGIVVEKTQYVSREKRSR

SEQ ID NO: 2432 - protein, 544 aa, Unknown
  Description of Unknown: Integrase B2433 sequence
  PTHR30461:SF3,IPR036162,PS51737,IPR011109,PTHR30461, PF00239,G3DSA:1.10.10.2600,IPR006119,PF14287,SSF53041, IPR025378,SM00857,IPR025827,cd03770,IPR038109, PS51736,PF13408,G3DSA:3.40.50.1390,PF07508,Coil
MTNGQTRYNTALYLRLSKDDGTDSESSSIQTQKEMLTRYCRENGFAISQIYIDDGWIGTNTNRPSFQRMLSDIEDGKINCVITKDLSRLGRNYLETGSFTEIYFPEHNVRYIAVTDGVDTAKGSTMDITPFKNLLNDMYAQDISKKIKSSLITRQKQGKFIGTKAPYGYVKDPADKNHLLIDERFAPTVRYIFKMAKDGIGITQIARQLRSEKIPRPVAAAAEELECYDRYLTTEESIYKWSMGSVREILRNPVYKGAVRGQKRPKISLKNEKRKPVQSAGTFVVEGMHEPIIDPEEWELVQRLITSRKKTRKVEKKYDNIFSGLVKCADCGFAMTFTKAHRNWNSENIYANYDYQCNNYRMEGKSVCTHHRITALNLYNAVLADIKRLACEALGDDKQMISAIAARLGKSEKENVRQAERELKRANKRLSELDRLFAKLYEEHVNGKVNERNYNSLSASYENEQTELECRISELNAAIKTERENDENAVNFVDLIKQYTDIDELSQALLNTLIDRIEVHEPEDVDGELIQKLDVYYKFVGRLD

SEQ ID NO: 2433 - protein, 544 aa, Unknown
  Description of Unknown: Integrase B2434 sequence
  SM00857,G3DSA:1.10.10.2600,IPR036162,PF13408,IPR025827, G3DSA:3.40.50.1390,PS51737,IPR006119,IPR038109,PF07508, IPR011109,SSF53041,PTHR30461,Coil,cd00338, PF00239
MAYRKITDIRDTIGMRAVFYARVSTAEEEQLNAIELQIEENRGCIKDHGWKLVGEYIDRSKSGTMVKGRDDYQRLYEDLYEDLFDIVVIKDQERLQRNTLDWYLFINRVVQTGKLLFMYMDGKFYSPDDALITGVRAIIAEEFSRNLSKKLHNYHDHRIEKARQGQEIALQGSGNVYGWDKKDGKYYINSEQAKIRRLMCEGIMARKGSTLIAKELNDAGYRNTVGKPWKPMDIPKFVYDCKNVGTMIINKERHDFESKQTIKLPKEEWVYVENALPPIVTQEEWDLICKIHEERVIATGSDRRGKKTSGYSFSGKLVCGICGAPYWRKQRVSKDEYWVCSTKQTKGRRTRKRDSTMGKAGEINPLGCDNENISYNSLMEIMGVVSERLQANTDTIKHDMINWLTKLRKQLLEANGGHTEADLQRELSRKSKLLDAYLDGILNKQEYQKKAEELDERIIQLKAETEKNKANSGDIEEIDKVLANIDEEVSRYVDGNEKLKVEYLLEHLEQVQIFPDKVIVIVPILSEGIVVEKTQYVSREKWCW

SEQ ID NO: 2434 - protein, 544 aa, Unknown
  Description of Unknown: Integrase B2435 sequence
  PTHR30461:SF3,SM00857,G3DSA:1.10.10.2600,IPR036162,PF13408, PS51737,IPR025827,G3DSA:3.40.50.1390,IPR006119,IPR038109, PF07508,IPR011109,SSF53041,PF00239,PTHR30461, PS51736,Coil,cd00338
MRVSVNLNAQKPDTTTNAVIYARYSSHGQTEQSIEGQLAKGHEYAAAQGYTVVHEYIDRAMTGRNDNREAFQKMLSDTGKHQFQVVIVWKVDRFGRNREEIAFNKHTCKKNGVRVEYVAESLPNSPEAVILESVLEGMAEYYSIQLSQNIRRGQLESAKKCQCVGGSVPLGYTLDSDKHFVIDPQTAPVVKKIFDLYAEGATISEITGQLNEQGIRTARKQLFTKNSLTKLLKNEKYIGVYTYKDIVRVEGGVPAIVDESTFDRVQELLKINRRAPSHTWTKVEYLLTDKLFCGHCGSPMVGESGFSHTGAKYSYYGCIKRRREKACDKKPVRQDWIEALVLDETVKLLHDDELMEYIIDRTWEYYQVTDKVQEEKAVFEAQLAEVDKAINNLVRAIEAGIFNAATKSRMDELDAQKAALTASLADLELTSGIRITRDHIEYFLLRLRDLDVKDRECQKRLVQTFVNAVFVYDDGRVKITYNYSGKSSTITLNQIDGAEKGKGFVCCLPCSTSSPRFPRGVAALFLFWGKIGCESTTNFSCFVL

SEQ ID NO: 2435 - protein, 544 aa, Unknown
  Description of Unknown: Integrase B2436 sequence
  PTHR30461:SF3,SM00857,G3DSA:1.10.10.2600,IPR036162,PF13408, IPR025827,PS51737,G3DSA:3.40.50.1390,IPR006119,IPR038109, PF07508,SSF53041,IPR011109,PTHR30461,Coil, PS51736,cd00338,PF00239
MSMENCANTKPKITIIPAKTRVERLDPLSIAMGQKPKIRVAAYARVSTDHEEQESSYEAQVDHFTKLIASHDDWTMVDIYADPGLSGKNTKRVQFKRMIKDCEDGKIDLIITKSVSRFARNTLDCVQTARKLKADGIGIIFEKENLDTLQERSEFVLTIMASLAEEESRSISNNIRWSVKKKFQEGKVILNTKHFLGYTRDKKGTVLKIVPEEAITVRRIYAEFLDGKSLKEIAEGLERDGIASPSGRETWHPSTVKSILQNEKYKGDCHLQKTYLPDFLSPRRIKNEGFAQSWYVEDSHAAIISKETFDMVQQEFQNRQSLRSTGETGCGKFSGKYPFSGMIVCGECGETYRRHQQYNKYKKYYIWVCKRHENTGAEYCKSRPIKEEALEKAFVRALNELIGDKERILEKLQSATVSEITDSCATAINEVNAEIEKLQEQMMELLMKRNNGEITDKEYEQQSQQVGMQIDQLLMRKEEILSEQGKVQLASYRIEEVTKLLQTGKILEEFDRVMFKSLVRKITVLSNKEIEIEFECGITVRETL

SEQ ID NO: 2436 - protein, 544 aa, Unknown
  Description of Unknown: Integrase B2437 sequence
  PTHR30461:SF3,SM00857,G3DSA:1.10.10.2600,IPR036162,PF13408, PS51737,G3DSA:3.40.50.1390,IPR025827,IPR006119,IPR038109, PF07508,IPR011109,SSF53041,PF00239,PTHR30461, PS51736,Coil,cd00338
MRVSVNLNAQKPDTTTNAVIYARYSSHGQTEQSIEGQLAKGHEYAAAQGYTVVHEYIDRAMTGRNDNREAFQKMLSDTGKHQFQVVIVWKVDRFGRNREEIAFNKHTCKKNGVRVEYVAESLPNSPEAVILESVLEGMAEYYSIQLSQNIRRGQLESAKKCQCVGGSVPLGYTLDSDKHFVIDPQTAPVVKKIFDLYAEGATISEITGQLNEQGIRTARKQLFTKNSLTKLLKNEKYIGVYTYKDIVRVEGGVPAIVDESTFDRVQELLKINRRAPSHTWTKVEYLLTDKLFCGHCGSPMVGESGFSHTGAKYSYYGCIKRRREKACDKKPVRQDWIEALVLDETVKLLHDDELMEYIIDRTWEYYQVTDKVQEEKAVLEAQLAEVDKAINNLVRAIEAGIFNAATKSRMDELDAQKAALTASLADLELTSGIRITRDHIEYFLLRLRDLDVKDRECQKRLVQTFVNAVFIYDDGRVKITYNYSGQSSTITLNQIASAEKGKGFVCCLPCSTSSPRFPRGVAALFLFWGKNGCELTTNFSCFVL

SEQ ID NO: 2437 - protein, 544 aa, Unknown
  Description of Unknown: Integrase B2438 sequence
  cd03768,PTHR30461:SF3,SM00857,IPR036162,PF13408, PS51737,IPR025827,G3DSA:3.40.50.1390,IPR006119,PF07508, IPR011109,SSF53041,PTHR30461,PS51736,Coil, PF00239
MKVAIYSRKSKFTGKGDSIENQIEMCKNYIMTHFGADCEVIVYEDEGFSGGTIDRPQFKLMLQDAKRKRFDSLICYRLDRVSRNIADFSSLIEDLQTYNIGFISIKEQFDTTTPMGRAMMYISGVFAQLERETIAERIRDNMLQLAKTGRWLGGITPIGYESQEVITVDQNGKSRKSFKLSPLPDEINLVKLIFEKFLQLKSLTKVETYLIQNEIKTRNNVYFSRFALRTILNNPVYAIADELVYNYFIANGYEVYADKSSFDGLMGVMAYNKTLQKKNQSNKLRDANEWIIAIGAHEGIIAGIKWVQVQELIQENKSKTFRYVRGRDALLSGLLKCAHCGSYMRPKMGRVDKQGNQLFYYMCEMKEKSKRTKCSCKNAHGPQIDNAVEAYLKQLATSESDIRHKLKDGKLNVSSQNEFLANEIEIIKQKIKENTDQINNLVSTLSISQNTSAGKYIIDQINKLDDETSTLKESLLNLSKQMDLSEMKNNELQLIDDMINSFANTVDTLELEEKRKLLRAFISQVVWDGNNIDIILFGSKPIDK

SEQ ID NO: 2438 - protein, 544 aa, Unknown
  Description of Unknown: Integrase B2439 sequence
  SM00857,G3DSA:1.10.10.2600,IPR036162,PF13408,IPR025827, PS51737,G3DSA:3.40.50.1390,IPR006119,IPR038109,PF07508, SSF53041,IPR011109,PTHR30461,Coil,cd00338, PF00239
MAYRKITDIRDTIGMRAAFYARVSTAEEEQLNAIELQIEENRGCIKDHGWKLVGEYIDRSKSGTMVKGRDDYQRLYEDLYEDLFDIVVIKDQERLQRNTLDWYLFINRVVQTGKLLFMYMDGKFYSPDDALITGVRAIIAEEFSRNLSKKLHNYHDHRIEKARQGQEIALQGSGNVYGWDKKDGKYYINPEQAKVRRLMCEGIMARKGSTLIAKELNDAGYRNTVGKPWKPMDIPKFVYDCKNVGTMIINKERHDFESKQTIKLPKEEWVYVENALPPIVTQEEWDLICKIHEERVIATGSDRRGKKTSGYSFSGKLVCGICGAPYWRKQRVSKDEYWVCSTKQTKGRRTRKRDSTMGKAGEINPLGCDNENISYNSLMEIMGVVSERLQANTDTIKQDMINWLTKLRKQLLEANGGHTEVDLQRELSRKSKLLDAYLDGILNKQEYQKKAEELDERIIQLKAETEKNKANSGDIAEIDKVLANIDEEVSRYIDGNEKLKVEYLLEHLEQVQIFPDKVIVIVPILSEGIVVDKTQYVSREKWCR

SEQ ID NO: 2439 - protein, 544 aa, Unknown
  Description of Unknown: Integrase B2440 sequence
  PTHR30461:SF3,SM00857,G3DSA:1.10.10.2600,IPR036162,PF13408, PS51737,G3DSA:3.40.50.1390,IPR025827,IPR006119,IPR038109, PF07508,IPR011109,SSF53041,PF00239,PTHR30461, PS51736,Coil,cd00338
MRVSVNLNAQKPDTTTNAVIYARYSSHGQTEQSIEGQLAKGHEYAAAQGYTVVHEYIDRAMTGRNDNREAFQKMLSDTGKHQFQVVIVWKVDRFGRNREEIAFNKHTCKKNGVRVEYVAESLPNSPEAVILESVLEGMAEYYSIQLSQNIRRGQLESAKKCQCVGGSVPLGYTLDSDKHFVIDPQTAPVVKKIFDLYAEGATISEITGQLNEQGIRTARKQLFTKNSLTKLLKNEKYIGVYTYKDIVRVEGGVPAIVDESTFDRVQELLKINRRAPSHTWTKVEYLLTDKLFCGHCGSPMVGESGFSHTGAKYSYYGCIKRRREKACDKKPVRQDWIEALVLDETVKLLHDDELMEYIIDRTWEYYQVTDKVQEEKAVLEAQLAEVDKAINNLVRAIEAGIFNAATKSRMDELDAQKAALTASLADLELTSGIRITRDHIEYFLLRLRDLDVKDRECQKRLVQTFVNAVFIYDDGRVKITYNYSGQSSTITLNQIASAEKGKGFVCCLPCSTSSPRFPRGVAALFLFWGKNGCESTTNFSCIVL

SEQ ID NO: 2440 - protein, 544 aa, Unknown
  Description of Unknown: Integrase B2441 sequence
  PTHR30461:SF3,SM00857,G3DSA:1.10.10.2600,IPR036162,PF13408, IPR025827,PS51737,G3DSA:3.40.50.1390,IPR006119,IPR038109, PF07508,SSF53041,IPR011109,PF00239,PTHR30461, PS51736,Coil,cd00338
METAVTAPRQKTVTKIEANPALASRKNSNRPLNVAAYCRVSTDAEDQINSYRAQVSYYTEHINQNPKWRFVNVYADEGITGTMVKKRDGFLKMIRDCEKGKIDMILTKSVSRFARNIVDSISYVRKLKAMGIGIYFEEQNIDSLKEDSETYIGIYSVMAQSESENISANISWGIRKRMQNGTYACRFNMLGYRKEKGETEPRIIPEEAEVVRNIFKMYDEGHSLDQIKAYLESKSIKTPTGKPVWSKENIRKMLTNEKYVGDVIYQKTYRTDCISKHTKINRGERTKYLVSNNHPAIVDRDLFNAVQAELVRRSSKRKTSDKTLTSLGKYSGKYALSELLICAECGSPYKRKTWTQGDEKRIYWRCLSRIEHGKKYCPYSKGLEENKLHSAICRALKAAMNENAEALALIKANLAYAVTGDEANLDLGAIEKRIKEATKEMENYMASYRNTGGDKTRYLECIQKVADEIKSLRDQEATAKAKLEKSTEVNSEIKRLCDWLDSHDTSFSEYDDMVIRRVVECIKVFKDGTIKVITKFGTEATETV

SEQ ID NO: 2441 - protein, 544 aa, Unknown
  Description of Unknown: Integrase B2442 sequence
  PTHR30461:SF3,SM00857,G3DSA:1.10.10.2600,IPR036162,PF13408, IPR025827,G3DSA:3.40.50.1390,PS51737,IPR006119,IPR038109, PF07508,IPR011109,SSF53041,PF00239,PTHR30461, PS51736,Coil,cd00338
MPAEINFNLPGNKKSEHNSRDKIAVVYARYSSHSQTEQSIEGQLAAAQAYAAAHDYTIVHEYIDRAKSGRTDSREQFQAMLHDTAKKQFGVILVWKVDRFGRNREELTINKLKCKKNGVRVEYIAEKIPDSPEGVILESVLEGFAEYYSLQLSQNVRRGRAESAEKCQVLGGTNLLGYSTGPDKKYVIDPNTAPTVKMIFEMYASGSTTPEIVRHLNSLGLRSSRGTPFTKNSLCGILKNEKYTGVYTYKDKRIPGGIPRIIDDETFQKVQALLKVNKRAPSHKWSRAEYILTDKLFCGKCGSPMAGESGTSHTGAKHNYYLCTKHKRQGKSACDKKAIRQEQIEDAVLNAAIELVSNDELIDFITDCTWEYYQKQDFTKAEVEALQKELSRVEAAIKNLLHAIELGIFNEATKARMDELTAQQKELTASIAEKELASGFRLTRDHIKYFLGQFKNKNYKDRECQKQLINTFVNSVFLYDDHIDLNFNYSGGSRTLSLTESEEKGGSEGFVCCLPCSTITRTYEPNIVWFGHVFKIRIRLPESY

SEQ ID NO: 2442 - protein, 544 aa, Unknown
  Description of Unknown: Integrase B2443 sequence
  SM00857,G3DSA:1.10.10.2600,IPR036162,PF13408,PS51737, IPR025827,G3DSA:3.40.50.1390,IPR006119,IPR038109,PF07508, IPR011109,SSF53041,PTHR30461,Coil,cd00338, PF00239
MAYRKITDIRDTIGMRAVFYARVSTAEEEQLNAIELQIEENRGCIKDHGWKLVGEYIDRSKSGTMVKGRDDYQRLYEDLYEDLFDIVVIKDQERLQRNTLDWYLFINRVVQTGKLLFMYMDGKFYSPDDALITGVRAIIAEEFSRNLSKKLHNYHDHRIEKARQGQEIALQGSGNVYGWDKKDGKYYINQEQAKVRRLMCEGIMARKGSTLIAKELNEAGYRNTVGKPWKPMDIPKFVYDCKNVGTMIINKERHDFESKQTIKLPKEEWVYVENALPPIVTQEEWDLICKIHEERVIATGSDRRGKKTSGYSFSGKLVCGICGAPYWRKQRVSKDEYWVCSTKQTKGRRTRKRDSTMGKAGEINPLGCDNENISYNSLMEIMGVVSERLQANTDTIKQDMINWLTKLRKQLLEANGGHTGADLQRELSRKSKLLDAYLDGILNKQEYQIKAEELDERIIQLKAETEKNKANSGDIAEIDKVLANIDEEVSRYVDGNEKLKVEYLLEHLEQVQIFPDKVIVIVPILSEGIVVEKTQYVSREKWSR

SEQ ID NO: 2443 - protein, 544 aa, Unknown
  Description of Unknown: Integrase B2444 sequence
  SM00857,G3DSA:1.10.10.2600,IPR036162,PF13408,IPR025827, G3DSA:3.40.50.1390,PS51737,IPR006119,IPR038109,PF07508, SSF53041,IPR011109,PTHR30461,Coil,cd00338, PF00239
MAYRKITDIKDTIGMRAVFYARVSTAEEEQLNAIELQIEENRGCIKDHGWKLVGEYIDRSKSGTMVKGRDDYQRLYEDLYEDLFDIVVIKDQERLQRNTLDWYLFINRVVQTGKLLFMYMDGKFYSPDDALITGVRAIIAEEFSRNLSKKLHNYHDHRIEKARQGQEIALQGSGNVYGWDKKDGKYYINPEQAKVRRLMCEGIMARKGSTLIAKELNDAGYRNTVGKPWKPMDIPKFVYDCKNVGTMIINKERHDFESKQTIKLPKEEWVYVENALPPIVTQEEWDLICKIHEERVIATGSDRRGKKTSGYSFSGKLVCGICGAPYWRKQRVSKDEYWVCSTKQTKGRRTRKRDSTMGKAGEINPLGCDNENISYNSLMEIMGVVSERLQANTDTIKHDMINWLTKLRKQLLEANGGHTEADLQRELSRKSKLLDAYLDGILNKQEYQKKAEELDERIIQLKAETEKNKANSGDIAEIDKVLANIDEEVSRYVDGNEKLKVEYLLEHLEQVQIFPDKVIVIVPILSEGIVVEKTQYVSREKWGR

SEQ ID NO: 2444 - protein, 544 aa, Unknown
  Description of Unknown: Integrase B2445 sequence
  SM00857,G3DSA:1.10.10.2600,IPR036162,PF13408,IPR025827, G3DSA:3.40.50.1390,PS51737,IPR006119,IPR038109,PF07508, SSF53041,IPR011109,PTHR30461,Coil,cd00338, PF00239
MAYRKITDIRDTIGMRAVFYARVSTAEEEQLNAIELQIEENRGCIKDHGWKLVGEYIDRSKSGTMVKGRDDYQRLYEDLYEDLFDIVVIKDQERLQRNTLDWYLFINRVVQTGKLLFMYMDGKFYSPDDALITGVRAIIAEEFSRNLSKKLHNYHDHRIEKARQGQEIALQGSGNVYGWDKKDGKYYINPEQAKVRRLMCEGIMARKGSTLIAKELNDAGYRNTVGKPWKPMDIPKFVYDCKNVGTMIINKERHDFESKQTIKLPKEEWVYVENALPPIVTQEEWDLICKIHEERVIATGSDRRGKKTSGYSFSGKLVCGICGAPYWRKQRVSKDEYWVCSTKQTKGRRTRKRDSTMGKAGEINPLGCDNENISYNSLMEIMGVVSERLQANTDTIKQDMINWLTKLRKQLLEANGGHTEADLQRELSRKSKLLDAYLDGILNKQEYQTKAEELDERIIQLKAETEKNKANSGDIAEIDKVLANIDEEVSRYVDGNEKLKVEYLLEHLEQVQIFPDKVIVIVPILSEGIVVEKAQYVSREKWIR

SEQ ID NO: 2445 - protein, 544 aa, Unknown
  Description of Unknown: Integrase B2446 sequence
  PTHR30461:SF3,SM00857,G3DSA:1.10.10.2600,IPR036162,PF13408, IPR025827,G3DSA:3.40.50.1390,PS51737,IPR006119,IPR038109, PF07508,SSF53041,IPR011109,PF00239,PTHR30461, PS51736,Coil,cd00338
MSATIPSLMQAPRAFGYCRKSTNEQREESLEAQQRAIVTFAATAGYELVQVYKDHGNSGRRGERPEFQRMLADAAAAGVQYIIVHKLDRFFRNADQQTVVEMQLRRQGIQVISAAEHFDATPQGQFMRNVTKAINQWYSANLAQEVAKGLRENALTARTTGGPPPLGYTVDKSTGQYAIVPREAEAVQLIFKLYQQGAGYTEIIDALNAGGYVTRRGQPFGKNSLYDILRNEKYTGLYIWNRLAPADVDGRTSRRRLKPRDEWVCVENGMPQIIPTEQWQAVQDEMDKRKHRNAQYKAKAFYLLSGLVYCGGCGGVMSGEMHRYNSHGKAVEYRYYRCTAQHRQHDGGAHAHRVNADRLENAVIDYIQHIVLDPVNMDALCVAVLEALQPDGRNAERAKELKQEAGIIQQKVDRLYQAIENGLDAAGAIERINALQKQRMTLLAQANDLDISAESAAASVDELRRVWSGINLRELQPEKMRVIVRDLIYKIVVFDDGPRGSRLRIILNPARLNPSAIPKAIETMPFSELQNFSHTGGSGLPLPR

SEQ ID NO: 2446 - protein, 544 aa, Unknown
  Description of Unknown: Integrase B2447 sequence
  SM00857,G3DSA:1.10.10.2600,IPR036162,PF13408,IPR025827, G3DSA:3.40.50.1390,PS51737,IPR006119,IPR038109,PF07508, SSF53041,IPR011109,PTHR30461,Coil,cd00338, PF00239
MAYRKITDIKDTIGMRAVFYARVSTAEEEQLNAIELQIEENRGCIKDHGWKLVGEYIDRSKSGTMVKGRDDYQRLYEDLYEDLFDIVVIKDQERLQRNTLDWYLFINRVVQTGKLLFMYMDGKFYSPDDALITGVRAIIAEEFSRNLSKKLHNYHDHRIEKARQGQEIALQGSGNVYGWDKKDGKYYINPEQAKVRRLMCEGIMARKGSTLIAKELNDAGYRNTVGKPWKPMDIPKFVYDCKNVGTMIINKERHDFESKQTIKLPKEEWVYVENALPPIVTQEEWDLICKIHEERVIATGSDRRGKKTSGYSFSGKLVCGICGAPYWRKQRVSKDEYWVCSTKQTKGRRTRKRDSTMGKAGEINPLGCDNENISYNSLMEIMGVVSERLQANTDTIKHDMINWLTKLRKQLLEANGGHTEADLQRELSRKSKLLDAYLDGILNKQEYQKKAEELDERIIQLKAETEKNKANSGDIEEIDKVLANIDEEVSRYVDGNEKLKVEYLLEHLEQVQIFPDKVIVIVPILSEGIVVEKTQYVSREKWIW

SEQ ID NO: 2447 - protein, 544 aa, Unknown
  Description of Unknown: Integrase B2448 sequence
  SM00857,G3DSA:1.10.10.2600,IPR036162,PF13408,PS51737, G3DSA:3.40.50.1390,IPR025827,IPR006119,IPR038109,PF07508, SSF53041,IPR011109,PTHR30461,Coil,cd00338, PF00239
MAYRKITDIKDTIGMRAVFYARVSTAEEEQLNAIELQIEENRGCIKDHGWKLVGEYIDRSKSGTMVKGRDDYQRLYEDLYEDLFDIVVIKDQERLQRNTLDWYLFINRVVQTGKLLFMYMDGKFYSPDDALITGVRAIIAEEFSRNLSKKLHNYHDHRIEKARQGQEIALQGSGNVYGWDKKDGKYYINPEQAKVRRLMCEGIMARKGSTLIAKELNDAGYRNTVGKPWKPMDIPKFVYDCKNVGTMIINKERHDFESKQTIKLPKEKWVYVENALPPIVTQEEWDLICKIHEERVIATGSDKRGKKTSGYSFSGKLVCGICGAPYWRKQRVSKDEYWVCSTKQTKGRKTRKRDSTMGKAGEINPLGCDNENISYNSLMEIMGVVSERLQANTDTIKQDMINWLTKLRKQLLEANGGHTEADLQRELSRKSKLLDAYLDGILNKQEYQKKAEELDERIIQLKAETEKNKANSGDIAEIDKVLANIDEEVARYVDGNEKLKVEYLLEHLEQVQIFPDKVIVIVPILSEGIVVEKTQYVSREKRSR

SEQ ID NO: 2448 - protein, 544 aa, Unknown
  Description of Unknown: Integrase B2449 sequence
  PTHR30461:SF3,SM00857,G3DSA:1.10.10.2600,IPR036162,PF13408, IPR025827,PS51737,G3DSA:3.40.50.1390,IPR006119,IPR038109, PF07508,SSF53041,IPR011109,PTHR30461,Coil, PS51736,cd00338,PF00239
MSMENCANTKPKITIIPAKTRVERLDPLSIAMGQKPKIRVAAYARVSTDHEEQESSYEAQVDHFTKLIASHDDWTMVDIYADPGLSGKNTKRVQFKRMIKDCEDGKIDLIITKSVSRFARNTLDCVQTARKLKADGIGIIFEKENLDTLQERSEFVLTIMASLAEEESRSISNNIRWSVKKKFQEGKVILNTKHFLGYTRDKKGTVLKIVPEEAITVRRIYAEFLDGKSLKEIAEGLERDGIASPSGRETWHPSTVKSILQNEKYKGDCHLQKTYLPDFLSPRRIKNEGFAQSWYVEDSHAAIISKETFDMVQQEFQNRQSLRSTGETGCGKFSGKYPFSGMIVCGECGETYRRHQQYNKYKKYYIWVCKRHENTGAEYCKSRPIKEEALEKAFVRALNELIGDKEQILEKLQSATVSEITDSCATAINEVNAEMEKLQEQMMELLMKRNNGEITDKEYEQQSQQVGMKIDQLLMRKEEILSEQGKVQLASYRIEEVTKLLQTGKILEEFDRVMFKSLVRKITVLSNKEIEIEFECGITVRETL

SEQ ID NO: 2449 - protein, 544 aa, Unknown
  Description of Unknown: Integrase B2450 sequence
  SM00857,G3DSA:1.10.10.2600,IPR036162,PF13408,PS51737, G3DSA:3.40.50.1390,IPR025827,IPR006119,IPR038109,PF07508, SSF53041,IPR011109,PTHR30461,Coil,cd00338, PF00239
MAYRKITDIRDTIGMRAVFYARVSTAEEEQLNAIELQIEENRGCIKDHGWKLVGEYIDRSKSGTMVKGRDDYQRLYEDLYEDLFDIVVIKDQERLQRNTLDWYLFINRVVQTGKLLFMYMDGKFYSPDDALITGVRAIIAEEFSRNLSKKLHNYHDHRIEKARQGQEIALQGSGNVYGWDKKDGKYYINPEQAKVRRLMCEGIMARKGSTLIAKELNDAGYRNTVGKPWKPMDIPKFVYDCKNVGTMIINKERHDFESKQTIKLPKEEWVYVENALPPIVTQEEWDLICKIHEERVIATGSDRRGKKTSGCSFSGKLVCGICGAPYWRKQRVSKDEYWVCSTKQTKGRRTRKRDSTMGKAGEINPLGCDNENISYNFLMEIMGVVSERLQANTDTIKHDMINWLTKLRKQLLEANGGHTEADLQRELSRKSKLLDAYLDGILNKQEYQKKAEELDERIIQLKAETEKNKANSGDIAEIDKVLANIDEEVSRYVDGNEKLKVEYLLEHLEQVQIFPDKVIVIVPILSEGIVVEKTQYVSREKWRW

SEQ ID NO: 2450 - protein, 544 aa, Unknown
  Description of Unknown: Integrase B2451 sequence
  SM00857,G3DSA:1.10.10.2600,IPR036162,PF13408,PS51737, IPR025827,G3DSA:3.40.50.1390,IPR006119,IPR038109,PF07508, SSF53041,IPR011109,PTHR30461,Coil,cd00338, PF00239
MAYRKITDIRDTIGMRAVFYARVSTAEEEQLNAIELQIEENRGCIKDHGWKLVGEYIDRSKSGTMVKGRDDYQRLYEDLYEDLFDIVVIKDQERLQRNTLDWYLFINRVVQTGKLLFMYMDGKFYSPDDALITGVRAIIAEEFSRNLSKKLHNYHDHRIEKARQGQEIALQGSGNVYGWDKKDGKYYINPEQAKVRRLMCEGIMARKGSTLIAKELNEAGYRNTVGKLWKPMDIPKFVYDCKNVGTMIINKERHDFESKQTIKLPKEEWVYVENALPPIVTQEEWDLICKIHEERVIATGSDRRGKKTSGYSFSGKLVCGICGAPYWRKQRVSKDEYWVCSTKQTKGRRTRKRDSTMGKAGEINPLGCDNENISYNSLMEIMGVVSERLQANTDTIKHDMINWLTKLRKQLLEANGGHTEADLQRELSRKSKLLDAYLDGILNKQEYQKKAEELDERIIQLKAETEKNKANSGDIAEIDKVLANIDEEVSRYVDGNEKLKVEYLLEHLEQVQIFPDKVIVIVPILSEGIVVEKAQYVSREKRGR

SEQ ID NO: 2451 - protein, 544 aa, Unknown
  Description of Unknown: Integrase B2452 sequence
  PTHR30461:SF3,SM00857,G3DSA:1.10.10.2600,IPR036162,PF13408, PS51737,G3DSA:3.40.50.1390,IPR025827,IPR006119,IPR038109, PF07508,IPR011109,SSF53041,PF00239,PTHR30461, PS51736,Coil,cd00338
MRVSVNLNAQKPDTTTNAVIYARYSSHGQTEQSIEGQLAKGHEYAAAQGYTVVHEYIDRAMTGRNDNREAFQKMLSDTGKHQFQVVIVWKVDRFGRNREEIAFNKHTCKKNGVRVEYVAESLPNSPEAVILESVLEGMAEYYSIQLSQNIRRGQLESAKKCQCVGGSVPLGYTLDSDKHFVIDPQTAPVVKKIFDLYAEGATISEITGQLNEQGIRTARKQLFTKNSLTKLLKNEKYIGVYTYKDIVRVEGGVPAIVDESTFDRVQELLKINRRAPSHTWTKVEYLLTDKLFCGHCGSPMVGESGFSHTGAKYSYYGCIKRRREKACDKKPVRQDWIEALVLDETVKLLHDDELMEYIIDRTWEYYQVTDKVQEEKAVLEAQLAEVDKAINNLVRAIEAGIFNAATKSRMDELDAQKAALTASLADLELTSGIRITRDHIEYFLLRLRDLDVKDRECQKRLVQTFVNAVFIYDDGRVKITYNYSGQSSTITLNQIASAEKGKGFVCCLPCSTSSPRFPRGVAALFLFWGKNGCESTTNFSCIVQ

SEQ ID NO: 2452 - protein, 544 aa, Unknown
  Description of Unknown: Integrase B2453 sequence
  SM00857,G3DSA:1.10.10.2600,IPR036162,PF13408,PS51737, G3DSA:3.40.50.1390,IPR025827,IPR006119,IPR038109,PF07508, SSF53041,IPR011109,PTHR30461,Coil,cd00338, PF00239
MAYRKITDIRDTIGMRAVFYARVSTAEEEQLNAIELQIEENRGCIKDHGWKLVGEYIDRSKSGTMVKGRDDYQRLYEDLYEDLFDIVVIKDQERLQRNTLDWYLFINRVVQTGKLLFMYMDGKFYSPDDALITGVRAIIAEEFSRNLSKKLHNYHDHRIEKARQGQEIALQGSGNVYGWDKKDGKYYINPEQAKVRRLMCEGIMARKGSTLIAKELNDAGYRNTVGKPWKPMDIPKFVYDCKNVGTMIINKERHDFESKQTIKLPKEEWVYVENALPPIVTQEEWDLICKIHEERVIATGSDRRGKKTSGYSFSGKLVCGICGAPYWRKQRVSKDEYWVCSTKQTKGRKTRKRDSTMGKAGEINPLGCDNENISYNSLMEIMGVVSERLQANTDTIKQDMINWLTKLRKQLLEANGGHTEADLQRELSRKSKLLDAYLDGILNKQEYQKKAEELDERIIQLKTETEKNKANSGDIAEIDKVLANIDEEVARYVDGNEKLKVEYLLEHLEQVQIFPDKVIVIVPILSEGIVVEKTQYVSREKRSR

SEQ ID NO: 2453 - protein, 544 aa, Unknown
  Description of Unknown: Integrase B2454 sequence
  SM00857,G3DSA:1.10.10.2600,IPR036162,PF13408,IPR025827, PS51737,G3DSA:3.40.50.1390,IPR006119,IPR038109,PF07508, IPR011109,SSF53041,PF00239,PTHR30461,Coil, cd00338
MAYRRITDIRDTIGMRAVFYARVSTAEEEQLNAIELQIEENRGCIKDHGWKLVGEYIDRSKSGTMVKGRDDYQRLYEDLYEDLFDIVVIKDQERLQRNTLDWYLFINRVVQTGKLLFMYMDGKFYSPDDALITGVRAIIAEEFSRNLSKKLHNYHDHRIEKARQGQEIALQGSGNVYGWDKKDGKYYINPEQAKVRRLMCEGIMARKGSTLIAKELNDAGYRNTVGKPWKPMDIPKFVYDCKNVGTMIINKERHDFESKQTIKLPKEEWVYVENALPPIVTQEEWDLICKIHEERVIATGSDRRGKKTSGYSFSGKLVCGICGAPYWRKQKVSKDEYWVCSTKQTKGRRTRKRDSTMGKAGEINPLGCDNENISYNSLMEIMGVVSERLQANTDTIKRDMINWLTKLRKQLLEANGGHTEADLQREFSRKSKLLDAYLDGILNKQEYQKKAEELDERIIQLKAETEKNKANSGDIAEIDKVLANIDEEVSRYVDGNEKLKVEYLLEHLEQVQIFPDKVIVIVPILSEGIVVEKTQYVSREKWRW

SEQ ID NO: 2454 - protein, 544 aa, Unknown
  Description of Unknown: Integrase B2455 sequence
  PTHR30461:SF3,SM00857,G3DSA:1.10.10.2600,IPR036162,PF13408, PS51737,G3DSA:3.40.50.1390,IPR025827,IPR006119,IPR038109, PF07508,IPR011109,SSF53041,PF00239,PTHR30461, PS51736,Coil,cd00338
MRVSVNLNAQKPDTTTNAVIYARYSSHGQTEQSIEGQLAKGHEYAAAQGYTVVHEYIDRAMTGRNDNREAFQKMLSDTGKHQFQVIIVWKVDRFGRNREEIAFNKHTCKKNGVRVEYVAESLPNSPEAVILESVLEGMAEYYSIQLSQNIRRGQLESAKKCQCVGGSVPLGYTLDSDKHFVIDPQTAPVVKKIFDLYAEGATISEITGQLNEQGIRTIRKQLFTKNSLTKLLKNEKYIGVYTYKDIVRVEGGVPAIVDKSTFDRVQELLKINRRAPSHTWTKVEYLLTDKLFCGHCGSPMVGESGFSHTGAKYSYYGCIKRRREKACDKKPVRQDWIEALVLDETVKLLHDDELMEYIIDRTWEYYQVTDKVQEEKAVLEAQLAEVDKAINNLVRAIEAGIFNAATKSRMDELDAQKAALTASLADLELTSGIRITRDHIEYFLLRLRDLDVKDRECQKRLVQTFVNAVFIYDDGRVKITYNYSGQSSTITLNQIASAEKGKGFVCCLPCSTFSPRFPRGVAALFLFWGKNGCESATNFSCIVL

SEQ ID NO: 2455 - protein, 544 aa, Unknown
  Description of Unknown: Integrase B2456 sequence
  PTHR30461:SF3,cd00338,SM00857,G3DSA:1.10.10.2600,IPR036162, PF13408,PS51737,IPR025827,G3DSA:3.40.50.1390,IPR006119, IPR038109,PF07508,IPR011109,SSF53041,PTHR30461, PS51736,Coil,PF00239
MSMENCANTKPKITIIPAKTRVERLDPLSIAMGQKPKIRVAAYARVSTDHEEQESSYEAQVDHFTKLIASHDDWTMVDIYADPGLSGKNTKRVQFKRMIKDCEDGKIDLIITKSVSRFARNTLDCVQTARKLKADGIGIIFEKENLDTLQERSEFVLTIMASLAEEESRSISNNIRWSVKKKFQEGKVILNTKHFLGYTRDKKGTVLKIVPEEAITVRRIYAEFLDGKSLKEIAEGLERDGIASPSGRETWHPSTVKSILQNEKYKGDCHLQKTYLPDFLSPRRIKNEGFAQSWYVEDSHAAIISKETFDMVQQEFQNRQSLRSTGETGCGKFSGKYPFSGMIVCGECGETYRRHQQYNKYKKYYIWVCKRHENTGAEYCKSRPIKEEALEKAFVRALNELIGDKERILEKLQSATVSEITDSCASAINEVNAEIEKLQEQMMELLMKRNNGEVTDKEYEQQSQQVGMKIDQLLMRKEEILSEQGKVQLASYRIEEVTKLLQTGKILEEFDRVMFKSLVRKITVLSNKEIEIEFECGITVRETL

SEQ ID NO: 2456 - protein, 544 aa, Unknown
  Description of Unknown: Integrase B2457 sequence
  SM00857,G3DSA:1.10.10.2600,IPR036162,PF13408,IPR025827, PS51737,G3DSA:3.40.50.1390,IPR006119,IPR038109,PF07508, SSF53041,IPR011109,PTHR30461,Coil,cd00338, PF00239
MAYRKITDIRDTIGMRAVFYARVSTAEEEQLNAIELQIEENRGCIKEHGWKLVGEYIDRSKSGTMVKGRDDYQRLYEDLYEDLFDIVVIKDQERLQRNTLDWYLFINRVVQTGKLLFMYMDGKFYSPDDALITGVRAIIAEEFSRNLSKKLHNYHDHRIEKARQGHEIALQGSGNVYGWDKKDGKYYINPEQAKVRRLMCEGIMARKGSTLIAKELNNAGYRNTVGKPWKPMDIPKFVYDCKNVGTMIINKERHDFESKQTIKLPKEEWVYVENALPPIVTQEEWDLICKIHEERVIATGSDRRGKKTSGYSFSGKLVCGICGAPYWRKQRVSKDEYWVCSTKQTKGRRTRKRDSTMGKAGEINPLGCDNENISYNSLMEIMGVVSERLQANTDTIKHDMINWLTKLRKQLLEANGGHTEADLQRELSRKSKLLDAYLDGILNKQEYQKKAEELDERIIQLKSETEKNKANSGDIAEIDKVLANIDEEVSRYVDGNEKLKVEYLLEHLEQVQIFPDKVIVIVPILSEGIVVEKAQYVSREKWRW

SEQ ID NO: 2457 - protein, 544 aa, Unknown
  Description of Unknown: Integrase B2458 sequence
  PTHR30461:SF3,SM00857,G3DSA:1.10.10.2600,IPR036162,PF13408, PS51737,G3DSA:3.40.50.1390,IPR025827,IPR006119,IPR038109, PF07508,SSF53041,IPR011109,PTHR30461,Coil, PS51736,cd00338,PF00239
MSMENCANTKPKITIIPAKTRVERLDPMSVAMGQKPKIRVAAYARVSTDHEEQESSYEAQVDHFTKLIASHDDWTMVDIYADPGLSGKNTKRVQFKRMIKDCEDGKIDLIITKSVSRFARNTLDCVQTARKLKADGIGIIFEKENLDTLQERSEFVLTIMASLAEEESRSISNNIRWSVKKKFQEGKVILNTKHFLGYTRDKKGTVLKIVPEEAITVRRIYAEFLDGKSLKEIAEGLERDGIASPSGRETWHPSTVKSILQNEKYKGDCHLQKTYLPDFLSPRRIKNEGFAQSWYVEDSHAAIISKETFDMVQQEFQNRQSLRSTGETGCGKFSGKYPFSGMIVCGECGETYRRHQQYNKYKKYYIWVCKRHENNGAEYCKSRPIKEEALEKAFVRALNELIGDKERILEKLQSATVSEITDSCATAINEVNAEIEKLQEQMMELLMKRNNGEITDKEYEQQSQQVGMKIDQLLMRKEEILSEQGKVQLASYRIEEVTKLLQTGKILEEFDRVMFKSLVRKITVLSNKEIEIEFECGITVRETL

SEQ ID NO: 2458 - protein, 544 aa, Unknown
  Description of Unknown: Integrase B2459 sequence
  PTHR30461:SF3,SM00857,G3DSA:1.10.10.2600,IPR036162,PF13408, PS51737,G3DSA:3.40.50.1390,IPR025827,IPR006119,IPR038109, PF07508,SSF53041,IPR011109,PTHR30461,Coil, PS51736,cd00338,PF00239
MSMENCANTKPKITIIPAKTRVERLDPMSIAMGQKPKIRVAAYARVSTDHEEQESSYEAQVDHFTKLIASHDDWTMVDIYADPGLSGKNTKRVQFKRMIKDCEDGKIDLIITKSVSRFARNTLDCVQTARKLKADGIGIIFEKENLDTLQERSEFVLTIMASLAEEESRSISNNIRWSVKKKFQEGKVILNTKHFLGYTRDKKGTVLKIVPEEAITVRRIYAEFLDGKSLKEIAEGLERDGIASPSGRETWHPSTVKSILQNEKYKGDCHLQKTYLPDFLSPRRIKNEGFAQSWYVEDSHAAIISKETFDMVQQEFQNRQSLRSTGETGCGKFSGKYPFSGMIVCGECGETYRRHQQYNKYKKYYIWVCKRHENNGAEYCKSRPIKEEALEKAFVRALNELIGDKERILEKLQSATVSEITDSCATAINEVNAEMEKLQEQMMELLMKRNNGEITDKEYEQQSQQVGMQIDQLLMRKEEILSEQGKVQLASYRIEEVTKLLQTGKILEEFDRVMFKSLVRKITVLSNKEIEIEFECGITVRETL

SEQ ID NO: 2459 - protein, 544 aa, Unknown
  Description of Unknown: Integrase B2460 sequence
  PTHR30461:SF3,SM00857,G3DSA:1.10.10.2600,IPR036162,PF13408, PS51737,G3DSA:3.40.50.1390,IPR025827,IPR006119,IPR038109, PF07508,IPR011109,SSF53041,PF00239,PTHR30461, PS51736,Coil,cd00338
MRVSVNLNAQKPDTTTNAVIYARYSSHGQTEQSIEGQLAKGHEYAAAQGYTVVHEYIDRAMTGRNDNREAFQKMLSDTGKHQFQVVIVWKVDRFGRNREEIAFNKHTCKKNGVRVEYVAESLPNSPEAVILESVLEGMAEYYSIQLSQNIRRGQLESAKKCQCVGGSVPLGYTLDSDKHFVIDPQTAPVVKKIFDLYAEGATISEITGQLNEQGIRTARKQLFTKNSLTKLLKNEKYIGVYTYKDIVRVEGGVPAIVDESTFDRVQELLKINRRAPSHTWTKVEYLLTDKLFCGHCGSPMVGESGFSHTGAKYSYYGCIKRRREKACDKKPVRQDWIEALVLDETVKLLHDDELMEYIIDRTWEYYQVTDKVQEEKAVLEAQLAEVDKAINNLVRAIEAGIFNAATKSRMDELDAQKAALTASLADLELTSGIRITRDHIEYFLLRLRDLDVKDRECQKRLVQTFVNAVFIYDDGRVKITYNYSGQSSTITLNQIASAEKGKGFVCCLPCSTSSPRFPRGVAALFLFLGKNGCESTTNFSCIVQ

SEQ ID NO: 2460 - protein, 544 aa, Unknown
  Description of Unknown: Integrase B2461 sequence
  PTHR30461:SF3,SM00857,G3DSA:1.10.10.2600,IPR036162,PF13408, PS51737,G3DSA:3.40.50.1390,IPR025827,IPR006119,IPR038109, PF07508,IPR011109,SSF53041,PF00239,PTHR30461, PS51736,Coil,cd00338
MRVSVNLNAQKPDTTTNAVIYARYSSHGQTEQSIEGQLAKGHEYAAAQGYTVVHEYIDRAMTGRNDNREAFQKMLSDTGKHQFQVVIVWKVDRFGRNREEIAFNKHTCKKNGVRVEYVAESLPNSPEAVILESVLEGMAEYYSIQLSQNIRRGQLESAKKCQCVGGSVPLGYTLDSDKHFVIDPQTAPVVKKIFDLYAEGATISEITGQLNEQGIRTARKQLFTKNSLTKLLKNEKYIGVYTYKDIVRVEGGVPAIVDESTFDRVQELLKINRRAPSHTWTKVEYLLTDKLFCGHCGSPMVGESGFSHTGAKYSYYGCIKRRREKACDKKPVRQDWIEALVLDETVKLLHDDELMEYIIDRTWEYYQVTDKVQEEKAVLEAQLAEVDKAINNLVRAIEAGIFNAATKSRMDELDAQKAALTASLADLELTSGIRITRDHIEYFLLRLRDLDVKDRECQKRLVQTFVNAVFIYDDGRVKITYNYSGQSSTITLNQIASAEKGKGFVCCLPCSTSSPRFPRGVAALFLFLGKNGCESTTNFSCFVL

SEQ ID NO: 2461 - protein, 544 aa, Unknown
  Description of Unknown: Integrase B2462 sequence
  SM00857,G3DSA:1.10.10.2600,IPR036162,PF13408,PS51737, IPR025827,G3DSA:3.40.50.1390,IPR006119,IPR038109,PF07508, IPR011109,SSF53041,PTHR30461,Coil,cd00338, PF00239
MAYRKITDIKDTIGMRAVFYARVSTAEEEQLNAIELQIEENRGCIKDHGWKLVGEYIDRSKSGTMVKGRDDYQRLYEDLYEDLFDIVVIKDQERLQRNTLDWYLFINRVVQTGKLLFMYMDGKFYSPDDALITGVRAIIAEEFSRNLSKKLHNYHDHRIEKARQGQEIALQGSGNVYGWDKKDGKYYINPEQAKVRRLMCEGIMARKGSTLIAKELNDAGYRNTVGKPWKPMDIPKFVYDCKNVGTMIINKERHDFESKQTIKLPKEEWVYVENALPPIVTQEEWDLICKIHEERVIATGSDRRGKKTSGYSFSGKLVCGICGAPYWRKQRVSKDEYWVCSTKQTKGRRTRKRDSTMGKAGEINPLGCDNENISYNSLMEIMEVVSERLQANTDTIKQDMINWLTKLRKQLLEANGGHTEADLQRELSRKSKLLDAYLDGILNKQEYQTKAEELDERIIQLKAETEKNKANSGDIAEIDKVLANINEEVSRYVDGNEKLKVEYLLEHLEQVQIFPDKVIVIVPILSEGIVVEKTQYVSREKWRW

SEQ ID NO: 2462 - protein, 544 aa, Unknown
  Description of Unknown: Integrase B2463 sequence
  SM00857,G3DSA:1.10.10.2600,IPR036162,PF13408,IPR025827, G3DSA:3.40.50.1390,PS51737,IPR006119,IPR038109,PF07508, SSF53041,IPR011109,PTHR30461,Coil,cd00338, PF00239
MAYRKITDIKDTIGMRAVFYARVSTAEEEQLNAIELQIEENRGCIKDHGWKLVGEYIDRSKSGTMVKGRDDYQRLYEDLYEDLFDIVVIKDQERLQRNTLDWYLFINRVVQTGKLLFMYMDGKFYSPDDALITGVRAIIAEEFSRNLSKKLHNYHDHRIEKARQGQEIALQGSGNVYGWDKKDGKYYINPEQAKVRRLMCEGIMARKGSTLIAKELNDAGYRNTVGKPWKPMDIPKFVYDCKNVGTMIINKERHDFESKQTIKLPKEEWVYVENALPPIVTQEEWDLICKIHEERVIATGSDRRGKKTSGYSFSGKLVCGICGAPYWRKQRVSKDEYWVCSTKQTKGRRTRKRDSTMGKAGEINPLGCDNENISYNSLMEIMGVVSERLQANTDTIKQDMINWLTKLRKQLLEANGGHTEADLQRELSRKSKLLDAYLDGILNKQEYQKKAEELDERIIQLKTETEKNKANSGDIAEIDKVLANIDEEVARYVDGNEKLKVEYLLEHLEQVQIFPDKVIVIVPILSEGIVVEKTQYVSREKWCR

SEQ ID NO: 2463 - protein, 544 aa, Unknown
  Description of Unknown: Integrase B2464 sequence
  PTHR30461:SF3,SM00857,G3DSA:1.10.10.2600,IPR036162,PF13408, PS51737,G3DSA:3.40.50.1390,IPR025827,IPR006119,IPR038109, PF07508,IPR011109,SSF53041,PTHR30461,PS51736, cd00338,PF00239
MGTTAKKVSVIPAKVQFDTSIKLSDKMLKVAAYCRVSTDEEEQDSSYEAQVEYYTNKIQDNPNWKFAGIYADDGKSGTNTKKRADFKTMVKDALNGKIDMILTKSVSRFARNTVDSLVTIRELKAKNIAIVFEKEGVNTLEGTGEILITILSSLAQEESRNISENVRWGIARKFEKGKVLVNCAKFMGYTKNENGDLIIVPKEAEIVRLIYRLYLEGYSSVKIKKYLEDREIKTATGQERWHTTVIDNMLCNEKYMGDALLQKTYTVDFMTKKRVVNNGIVPQYYVENDHEAIIPKEIYYRVQEERMRRANLCKAAVTRKKNQKSKYSSLYALTGIVICGKCGHEYRRVTWSRNGQKKIVWRCSNRLTNGVKKCPNSETIKEEALNRAVMEAIHKITCDDREFIETFRQNVISVINTKEALREEEDYDTLLKNKQEEMLALIMENAKAGEYTQEFDARYHAIAEEIQSIKKNQTETRKREETLRECNQRMYEIDDFLRTTTCRIPEFDNDLVRRLISTVKIISEEKLMIQFKSGIVVEQEIRYD

SEQ ID NO: 2464 - protein, 544 aa, Unknown
  Description of Unknown: Integrase B2465 sequence
  SM00857,G3DSA:1.10.10.2600,IPR036162,PF13408,PS51737, IPR025827,G3DSA:3.40.50.1390,IPR006119,IPR038109,PF07508, SSF53041,IPR011109,PTHR30461,Coil,cd00338, PF00239
MAYRKITDIRDTIGMRAVFYARVSTAEEEQLNAIELQIEENRGCIKEHGWKLVGEYIDRSKSGTMVKGRDDYQRLYEDLYEDLFDIVVIKDQERLQRNTLDWYLFINRVVQTGKLLFMYMDGKFYSPDDALITGVRAIIAEEFSRNLSKKLHNYHDHRIEKARQGQEIALQGSGNVYGWDKKDGKYYINPEQAKVRRLMCEGIMARKGSTLIAKELNEAGYRNTVGKLWKPMDIPKFVYDCKNVGTMIINKERHDFESKQTIKLPKEEWVYVENALPPIVTQEEWDLICKIHEERVIATGSDRRGKKTSGYSFSGKLVCGICGAPYWRKQRVSKDEYWVCSTKQTKGRRTRKRDSTMGKAGEINPLGCDNENISYNSLMEIMGVVSERLQANTDTIKQDMINWLTKLRKQLLEANGGHTEADLQRELSRKSKLLDAYLDGILNKQEYQKKAEELDERIIQLKAETEKNKANSGDIAEIDKVLANIDEEVSRYVDGNEKLKVEYLLEHLEQVQIFPDKVIVIVPILSEGIVVEKTQYVSREKWSR

SEQ ID NO: 2465 - protein, 544 aa, Unknown
  Description of Unknown: Integrase B2466 sequence
  SM00857,G3DSA:1.10.10.2600,IPR036162,PF13408,IPR025827, PS51737,G3DSA:3.40.50.1390,IPR006119,IPR038109,PF07508, SSF53041,IPR011109,PTHR30461,Coil,cd00338, PF00239
MAYRKITDIKDTIGMRAVFYARVSTAEEEQLNAIELQIEENRGCIKDHGWKLVGEYIDRSKSGTMVKGRDDYQRLYEDLYEDLFDIVVIKDQERLQRNTLDWYLFINRVVQTGKLLFMYMDGKFYSPDDALITGVRAIIAEEFSRNLSKKLHNYHDHRIEKARQGQEIALQGSGNVYGWDKKDGKYYINPEQAKVRRLMCEGIMARKGSTLIAKELNDAGYRNTVGKPWKPMDIPKFVYDCKNVGTMIINKERHDFESKQTIKLPKEEWVYVENALPPIVTQEEWDLICKIHEERVIATGSDRRGKKTSGYSFSGKLVCGICGAPYWRKQRVSKDEYWVCSTKQTKGRRTRKRDSTMGKAGEINPLGCDNENISYNSLMEIMGVVSERLQANTDTIKHDMINWLTKLRKQLLEANGGYTEADLQRELSRKSKLLDAYLDGILNKQEYQKKAEELDERIIQLKAETEKNKANSGDIAEIDKVLANIDEEVSRYVDGNEKLKVEYLLEHLEQVQIFPDKVIVIVPILSEGIVVEKTQYVSREKRSR

SEQ ID NO: 2466 - protein, 544 aa, Unknown
  Description of Unknown: Integrase B2467 sequence
  PTHR30461:SF3,SM00857,G3DSA:1.10.10.2600,IPR036162,PF13408, PS51737,G3DSA:3.40.50.1390,IPR025827,IPR006119,IPR038109, PF07508,IPR011109,SSF53041,PTHR30461,Coil, PS51736,cd00338,PF00239
MPAALAYCMASVNLVFAWADLRIYYTTISLVLERRTDYIMTKNAVIYARFSSDKQREESIDGQIRECQAFAEANEINIINTYIDRAMSARTDQRPSFLQMVKDSAKHLFDYVIVYQLDRFSRSRYDSAIYKHRLKKNGVKVLSAKENIKDDPSGILLESVIEGMAEYYSAELSQKVKRGMTENLLEGKWIGGIVPFGYELTSENKLAISPATGHLVPEIYDKYLSGIKTTDILSKLNSLGIKTQRGCNFTRNSLNRILKNQIYTGTFTWAGTSYPDYAPALITQEQYTAMQNLFESRKRKSNTARRVSPQYALTGKIYCGTCGLPMTGYCGKSHTGTTYYYYQCSSKNNKSEKAARSQIACDAKNISRDKLEKLVLDTTISILKNKDAVKCIADQCMAIQKAELEHKPAEQLRLESQIKEIEKRLKNSVKAVENGLISQTITNNIETYEKQLTELNAQLDGLKLETHIIPITEEAVIYYLNQLTERANKKDGYSLDTFDDFIRRVVVTGKRVDIYYNYTAVPNILENPAVKMLRGSSENHLVTR

SEQ ID NO: 2467 - protein, 544 aa, Unknown
  Description of Unknown: Integrase B2468 sequence
  SM00857,G3DSA:1.10.10.2600,IPR036162,PF13408,IPR025827, G3DSA:3.40.50.1390,PS51737,IPR006119,IPR038109,PF07508, SSF53041,IPR011109,PTHR30461,Coil,cd00338, PF00239
MAYRKITDIRDTIGMRAVFYARVSTAEEEQLNAIELQIEENRGCIKDHGWKLVGEYIDRSKSGTMVKGRDDYQRLYEDLYEDLFDIVVIKDQERLQRNTLDWYLFINRVVQTGKLLFMYMDGKFYSPDDALITGVRAIIAEEFSRNLSKKLHNYHDHRIEKARQGQEIALQGSGNVYGWDKKDGKYYINPEQAKVRRLMCEGIMARKGSTLIAKELNDAGYRNTVGKPWKPMDIPKFVYDCKNVGTMIINKERHDFESKQTIKLPKEEWVYVENALPPIVTQEEWDLICKIHEERVIATGSDRRGKKTSGYSFSGKLVCGICGAPYWRKQRVSKDEYWVCSTKQTKGRRTRKRDSTMGKSGEINPLGCDNENISYNSLMEIMGVVSERLQANTDTIKHDMINWLTKLRKQLLEANGGHTEADLQRELSRKSKLLDAYLDGILNKQEYQKKAEELDERIIQLKAETEKNKANSGDIAEIDKVLANIDEEVSRYVDGNEKLKVEYLLEHLEQVQIFPDKVIVIVPILSEGIVVEKTQYVSREKWCR

SEQ ID NO: 2468 - protein, 544 aa, Unknown
  Description of Unknown: Integrase B2469 sequence
  SM00857,G3DSA:1.10.10.2600,IPR036162,PF13408,PS51737, IPR025827,G3DSA:3.40.50.1390,IPR006119,IPR038109,PF07508, SSF53041,IPR011109,PTHR30461,Coil,PS51736, cd00338,PF00239
MDDIRRTVTVIPAKPQMDQRTVMRQLRVAAYCRVSTEEEEQQSSYEAQCTYYTDKIMTNPEWTMAGIFADEGISGTSTKNRDDFNRMIRRCRQKKIDLILTKSISRFARNTLDSLKYIRALKGMGIGIIFEKENINTLETDTELIITFMSAFAQSESESISANVRWGKRQAMKEGKASVNFKKLYGYYLDDEGNPQVNSDQAEAIRSIYDQYLQGASLRMIKLSLEGKAVPNPAGGAKWDISQIRSILGNEKYCGDVLMQKTFTQDCINKKVIKNTGQLPMYLIQNNHPAIVSREIYQAVQAEKTRRSASASPSKKMSSTGRSCYASKFALSERLVCGECGTLYRRCTWKRNGKTRIVWRCVSRLDYGAKYCHQSPTMDEEPLQWAIMTAINSVMDSKETICRQITEAAVEETGILPDSTMTLGEINRRLEELEAEFNILLQQPDSAVKNAARFGSIANEMASLKEQREKVAARLRKDQTVQLHVHTMKAALDGMSHHMQQWDEEMVRQLVHTVKVISADHIKVFLYDGTEIDQTVGHGNSIID

SEQ ID NO: 2469 - protein, 544 aa, Unknown
  Description of Unknown: Integrase B2470 sequence
  SM00857,G3DSA:1.10.10.2600,IPR036162,PF13408,IPR025827, G3DSA:3.40.50.1390,PS51737,IPR006119,IPR038109,PF07508, SSF53041,IPR011109,PTHR30461,Coil,cd00338, PF00239
MAYRKITDIRDTIGMRAVFYARVSTAEEEQLNAIELQIEENRGCIKDHGWKLVGEYIDRSKSGTMVKGRDDYQRLYEDLYEDLFDIVVIKDQERLQRNTLDWYLFINRVVQTGKLLFMYMDGKFYSPDDALITGVRAIIAEEFSRNLSKKLHNYHDHRIEKARQGQEIALQGSGNVYGWDKKDGKYYINPEQAKVRRLMCEGIMARKGSTLIAKELNDAGYRNTVGKPWKPMDIPKFVYDCKNVGTMIINKERHDFESKQTIKLPKEEWVYVENALPPIVTQEEWDLICKIHEERVIATGSDRRGKKTSGYSFSGKLVCGICGAPYWRKQRVSKDEYWVCSTKQTKGRRTRKRDSTMGKAGEINPLGCDNENISYNSLMEIMGVVSERLQANTDTIKQDMINWLTKLRKQLIEANGGHTEADLQRELSRKSKLLDAYLDGILNKQEYQTKAEELDERIIQLKAETEKNKANSGDIAEIDKVLANIDEEVSRYVDGNEKLKVEYLLEHLEQVQIFPDKVIVIVPILSEGIVVEKAQYVSREKRSR

SEQ ID NO: 2470 - protein, 544 aa, Unknown
  Description of Unknown: Integrase B2471 sequence
  cd00338,SM00857,G3DSA:1.10.10.2600,IPR036162,PF13408, IPR025827,G3DSA:3.40.50.1390,PS51737,IPR006119,IPR038109, PF07508,SSF53041,IPR011109,PTHR30461,Coil, PF00239
MAYRKITDIKDTIGMRAVFYARVSTAEEEQLNAIELQIEENRGCIKDHGWKLVGEYIDRSKSGTMVKGRDDYQRLYEDLYEDLFDIVVIKDQERLQRNTLDWYLFINRVVQTGKLLFMYMDGKFYSPDDALITGVRAIIAEEFSRNLSKKLHNYHDHRIEKARQGQEIALQGSGNVYGWDKKDGKYYINPEQAKVRRLMCEGIMARKGSTLIAKELNDAGYRNTVGKPWKPMDIPKFVYDCKNVGTMIINKERHDFESKQTIKLPKEEWVYVENALPPIVTQEEWDLICKIHEERVIATGSDRRGKKTSGYSFSGKLVCGICGAPYWRKQRVSKDEYWVCSTKQTKGRRTRKRDSTMGKAGEINPLGCDNENISYNSLMEIMGVVSERLQANTDTIKQDMINWLTKLRKQLLEANGGHTEADLQREISRKSKLLDAYLDGILNKQEYQKKAEELDERIIQLKAETEKNKANSGDIAEIDKVLANIDEEVARYIDGNEKLKVEYLLEHLEQVQIFPDKVIVIVPILSEGIVVEKTQYVSREKWIW

SEQ ID NO: 2471 - protein, 544 aa, Unknown
  Description of Unknown: Integrase B2472 sequence
  SM00857,G3DSA:1.10.10.2600,IPR036162,PF13408,IPR025827, G3DSA:3.40.50.1390,PS51737,IPR006119,IPR038109,PF07508, SSF53041,IPR011109,PTHR30461,Coil,cd00338, PF00239
MAYRKITDIRDTIGMRAVFYARVSTAEEEQLNAIELQIEENRGCIKEHGWKLVGEYIDRSKSGTMVKGRDDYQRLYEDLYEDLFDIVVIKDQERLQRNTLDWYLFINRVVQTGKLLFMYMDGKFYSPDDALITGVRAIIAEEFSRNLSKKLHNYHDHRIEKARQGQEIALQGSGNVYGWDKKDGKYYINPEQAKVRRLMCEGIMARKGSTLIAKELNDAGYRNTVGKPWKPMDIPKFVYDCKNVGTMIINKERHDFESKQTIKLPKEEWVYVENALPPIVTQEEWDLICKIHEERVIATGSDRRGKKTSGYSFSGKLVCGICGAPYWRKQRVSKDEYWVCSTKQTKGRRTRKRDSTMGKAGEINPLGCDNENISYNSLMEIMGVVSERLQANTDTIKHDMINWLTKLRKQLLEANGGHTEADLQRELSRKSKLLDAYLDGILNKQEYQKKAEELDERIIQLKAETEKNKANSGDIAEIDKILANIDEEVSRYVDGNEKLKVEYLLEHLEQVQIFPDKVIVIVPILSEGIVVEKAQYVSREKRSR

SEQ ID NO: 2472 - protein, 544 aa, Unknown
  Description of Unknown: Integrase B2473 sequence
  PTHR30461:SF3,SM00857,G3DSA:1.10.10.2600,IPR036162,PF13408, IPR025827,G3DSA:3.40.50.1390,PS51737,IPR006119,IPR038109, PF07508,IPR011109,SSF53041,PTHR30461,Coil, PS51736,cd00338,PF00239
MAETAKKISMIPAKVQYDRNVKLSEKKMKVAAYCRVSTELEEQDSSYEAQVEYYTSKISENENWKNAGIYADDGKSGTNTKKRADFNAMIQDALAGKIDMILTKSVSRFARNTVDSLVTIRKLKEKNVAVVFEKEGINTLEGTGEILITILSSLAQEESRNISENIRWGVVRKFEKGKVIVNCTKFMGYTKNEDGDLVIVPEEAEIVKLIFRLYLEGYSTGKIAKHLEEQGIKTATGQDKWHSTVIDKMLRNEKYMGDALLQKTYTVDFMTKKKVKNTGIVPQYYVEDDHEAIIPKELFYRVQEEMMRRASLCKAAVTRKKNQKSRYSSTYALTGMLICGKCGQEYRRVTWARNGKKKVVWRCSNRLTNGVKKCGESETLEENALNRAVMEAIHRITSDDMEFMEHFRQNIIHVIGSYGTAKESGEYEEKIKEKQEEMVALIAENAKTGSYTPEFDERYRIIAEEINALKEAQKTARNEKRMADSYEQRIQDIDHYLSTSTCQIPEFDNDLVRRLISTIKVESSEKLLIQFQSGIVMEQEIRYE

SEQ ID NO: 2473 - protein, 544 aa, Unknown
  Description of Unknown: Integrase B2474 sequence
  SM00857,G3DSA:1.10.10.2600,IPR036162,PF13408,IPR025827, G3DSA:3.40.50.1390,PS51737,IPR006119,IPR038109,PF07508, SSF53041,IPR011109,PTHR30461,Coil,cd00338, PF00239
MAYRKITDIRDTIGMRAVFYARVSTAEEEQLNAIELQIEENRGCIKDHGWKLVGEYIDRSKSGTMVKGRDDYQRLYEDLYEDLFDIVVIKDQERLQRNTLDWYLFINRVVQTGKLLFMYMDGKFYSPDDALITGVRAIIAEEFSRNLSKKLHNYHDHRIEKARQGQEIALQGSGNVYGWDKKDGKYYINPEQAKVRRLMCEGIMARKGSTLIAKELNDAGYRNTVGKPWKPMDIPKFVYDCKNVGTMIINKERHDFESKQTIKLPKEEWVYVENALPPIVTQEEWDLICKIHEERVIATGSDRRGKKTSGYSFSGKLVCGICGAPYWRKQRVSKDEYWVCSTKQTKGRRTRKRDSTMGKAGEINPLGCDNENISYNSLMEIMGVVSERLQANTDTIKHDMINWLTKLRKQLLEANGGHTEADLQRELSRKSKLLDAYLDGILNKQEYQKKAEELDERIIQLKAETEKNKANSGDIAEIDKVLANIDEEVSRYVDGNEKLKVEYLLEHLEQVQIFPDKVIVIVPILSEGIVVEKAQYVSREKRSR

SEQ ID NO: 2474 - protein, 544 aa, Unknown
  Description of Unknown: Integrase B2475 sequence
  PTHR30461:SF3,SM00857,G3DSA:1.10.10.2600,IPR036162,PF13408, PS51737,IPR025827,G3DSA:3.40.50.1390,IPR006119,IPR038109, PF07508,SSF53041,IPR011109,PTHR30461,Coil, PS51736,cd00338,PF00239
MNTVIYARYSAGPRQTDQSIEGQLRVCTDFCKQRGLTVIDTYCDRHISGRTDERPEFQRLIADAKRKKFEAVVVYKTDRFARNKYDSAVYKRELKRNGIQIFYAAEAIPDGPEGIILESLMEGLAEYYSAELAQKIKRGMHESALKCQSTGSGRPLGYRVDEQKHFQIDPESAQTVQTIFEQYIKGESNAAICELLNSRGLRTAQGKPFNKNSINRIIKNRKYIGEYRYHDIVVESGIPAIISKDTFNLAQAEMERRRTRKAPKSPKAEYLLAGRLFCGHCKGPMQGVSGTGKSGNKWYYYYCGNTRGKNKTCDKKQVSRDRLERAVVDFTVRYILQEEVLEELARKVHAAQERQNDTASEIAFYEKKLADNKKSIANVLRAIESGAATQTLPARLQELENEQAVILGEISFLKGKRLAFTEDQILFALMKHLEPYPGESEQDYRRRIISDFVSEVYLYDDRLLIYFNISSEDGKLKSADLSNIEGGEFDEGLVSSTMKADLFRQVCFSYASMQTFVLSFAPPLHAACNCWNCSKETLNSTSSV

SEQ ID NO: 2475 - protein, 544 aa, Unknown
  Description of Unknown: Integrase B2476 sequence
  PTHR30461:SF3,SM00857,G3DSA:1.10.10.2600,IPR036162,PF13408, PS51737,G3DSA:3.40.50.1390,IPR025827,IPR006119,IPR038109, PF07508,IPR011109,SSF53041,PF00239,PTHR30461, PS51736,Coil,cd00338
MRVSVNLNAQKPDTTTNAVIYARYSSHGQTEQSIEGQLAKGHEYAAAQGYTVVHEYIDRAMTGRNDNREAFQKMLSDTGKHQFQVVIVWKVDRFGRNREEIAFNKHTCKKNGVRVEYVAESLPNSPEAVILESVLEGMAEYYSIQLSQNIRRGQLESAKKCQCVGGSVPLGYTLDSDKHFVIDPQTAPVVKKIFDLYAEGATISEITGQLNEQGIRTARKQLFTKNSLTKLLKNEKYIGVYTYKDIVRVEGGVPAIVDESTFDRVQELLKINRRAPSHTWTKVEYLLTDKLFCGHCGSPMVGESGFSHTGAKYSYYGCIKRRREKACDKKPVRQDWIEALVLDETVKLLHDDELMEYIIDRTWEYYQVTDKVQEEKAVLEAQLAEVDKAINNLVRAIEAGIFNAATKSRMDELDAQKAALTASLADLELTSGIRITRDHIEYFLLRLRDLDVKDRECQKRLVQTFVNAVFIYDDGRVKITYNYSGQSSTITLNQIASAEKGKGFVCCLPCSTFSPRFPRGVAALFLFWGKNGCESTTNFSCIVL

SEQ ID NO: 2476 - protein, 544 aa, Unknown
  Description of Unknown: Integrase B2477 sequence
  SM00857,G3DSA:1.10.10.2600,IPR036162,PF13408,PS51737, G3DSA:3.40.50.1390,IPR025827,IPR006119,IPR038109,PF07508, SSF53041,IPR011109,PTHR30461,Coil,cd00338, PF00239
MAYRKITDIKDTIGMRAVFYARVSTAEEEQLNAIELQIEENRGCIKDHGWKLVGEYIDRSKSGTMVKGRDDYQRLYEDLYEDLFDIVVIKDQERLQRNTLDWYLFINRVVQTGKLLFMYMDGKFYSPDDALITGVRAIIAEEFSRNLSKKLHNYHDHRIEKARQGQEIALQGSGNVYGWDKKDGKYYINPEQAKVRRLMCEGIMARKGSTLIAKELNDAGYRNTVGKPWKPMDIPKFVYDCKNVGTMIINKERHDFESKQTIKLPKEEWVYVENALPPIVTQEEWDLICKIHEERVIATGSDKRGKKTSGYSFSGKLVCGICGAPYWRKQRVSKDEYWVCSTKQTKGRKTRKRDSTMGKAGEINPLGCDNENISYNSLMEIMGVVSERLQANTDTIKHDMINWLTKLRKQLLEANGRHTEADLQRELSRKSKLLDAYLDGILNKQEYQKKAEELDERIIQLKAETEKNKANAGDIAEIDKVLANIDEEVARYVDGNEKLKVEYLLEHLEQVQIFPDKVIVIVPILSEGIVVEKTQYVSREKWIW

SEQ ID NO: 2477 - protein, 544 aa, Unknown
  Description of Unknown: Integrase B2478 sequence
  PTHR30461:SF3,SM00857,G3DSA:1.10.10.2600,IPR036162,PF13408, IPR025827,PS51737,G3DSA:3.40.50.1390,IPR006119,IPR038109, PF07508,SSF53041,IPR011109,PTHR30461,Coil, PS51736,cd00338,PF00239
MSMENCANTKPKITIIPAKTRVERLDPMSVAMGQKPKIRVAAYARVSTDHEEQESSYEAQVDHFTKLIASHDDWTMVDIYADPGLSGKNTKRVQFKRMIKDCEDGKIDLIITKSVSRFARNTLDCVQTARKLKADGIGIIFEKENLDTLQERSEFVLTIMASLAEEESRSISNNIRWSVKKKFQEGKVILNTKHFLGYTRDKKGTVLKIVPEEAITVRRIYAEFLDGKSLKEIAEGLERDGIASPSGRETWHPSTVKSILQNEKYKGDCHLQKTYLPDFLSPRRIKNEGFAQSWYVEDSHAAIISKETFDMVQQEFQNRQSLRSTGETGCGKFSGKYPFSGMIVCGECGETYRRHQQYNKYKKYYIWVCKRHENTGAEYCKSRPIKEEALEKAFVRALNELIGDKERILEKLQSATVSEITDSCATAINEVNAEIEKLQEQMMELLMKRNNGEITDKEYEQQSQQVGMKIDQLLMRKEEILSEQGKVQLASYRIEEVTKLLQTGKILEEFDRVMFKSLVRKITVLSNKEIEIEFECGITVRKTL

SEQ ID NO: 2478 - protein, 544 aa, Unknown
  Description of Unknown: Integrase B2479 sequence
  PTHR30461:SF3,SM00857,G3DSA:1.10.10.2600,IPR036162,PF13408, IPR025827,G3DSA:3.40.50.1390,PS51737,IPR006119,IPR038109, PF07508,SSF53041,IPR011109,PF00239,PTHR30461, PS51736,Coil,cd00338
MSATIPSLMQAPRAFGYCRKSTNEQREESLEAQQRAIVTFAATAGYELVQVYKDHGNSGRRGERPEFQRMLADAAAAGVQYIIVHKLDRFFRNADQQTVVEMQLRRQGIQVISAAEHFDATPQGQFMRNVTKAINQWYSANLAQEVAKGLRENALTARTTGGPPPLGYTVDKSTGQYAIVPREAEAVQLIFKLYQQGAGYTEIIDALNAGGYVTRRGQPFGKNSLYDILRNEKYTGLYIWNRLAPADVDGRTSRRRLKPRDEWVCVENGMPQIIPTEQWQAVQDEMDKRKHRNAQYKAKSFYLLSGLVYCGGCGGTMAGEMHRYNSHGKAVEYRYYRCAAQHRQHDGGVHAHRVNADRLENAVIDYIQHIVLDPVNMDALCVAVLEALQPDGRNAERAKELKQEAGIIQQKVDRLYQAIENGLDAAGAIERINALQKQRMTLLAQANDLDISAESAAASVDELRRVWSGINLRELQPEKMRVIVRDLIYKIVVFDDGPRGSRLRIILNPARLNPSAIPKAIETMPFSELQDFSHTGGSGLPLPR

SEQ ID NO: 2479 - protein, 544 aa, Unknown
  Description of Unknown: Integrase B2480 sequence
  SM00857,G3DSA:1.10.10.2600,IPR036162,PF13408,PS51737, G3DSA:3.40.50.1390,IPR025827,IPR006119,IPR038109,PF07508, SSF53041,IPR011109,PTHR30461,Coil,cd00338, PF00239
MAYRKITDIRDTIGMRAVFYARVSTAEEEQLNAIELQIEENRGCIKDHGWKLVGEYIDRSKSGTMVKGRDDYQRLYEDLYEDLFDIVVIKDQERLQRNTLDWYLFINRVVQTGKLLFMYMDGKFYSPDDALITGVRAIIAEEFSRNLSKKLHNYHDHRIEKARQGQEIALQGSGNVYGWDKKDGKYYINPEQAKVRRLMCEGIMARKGSTLIAKELNDAGYRNTVGKPWKPMDIPKFVYDCKNVGTMIINKERHDFESKQTIKLPKEEWVYVENALPPIVTQEEWDLICKIHEERVIATGSDRRGKKTSGYSFSGKLVCGICGAPYWRKQRVSKDEYWVCSTKQTKGRKTRKRDSTMGKAGEINPLGCDNENISYNSLMEIMGVVSERLQANTDTIKQDMINWLTKLRKQLLEANGGHTEADLQRELSRKSKLLDAYLDGILNKQEYQKKAEELDERIIQLKTETEKNKANSGDIAEIDKVLANIDEEVARYVDGNEKLKVEYLLEHLEQVQIFPDKVIVIVPILSEGIVVEKTQYVSREKWRW

SEQ ID NO: 2480 - protein, 544 aa, Unknown
  Description of Unknown: Integrase B2481 sequence
  PTHR30461:SF3,SM00857,G3DSA:1.10.10.2600,IPR036162,PF13408, IPR025827,G3DSA:3.40.50.1390,PS51737,IPR006119,IPR038109, PF07508,IPR011109,SSF53041,PTHR30461,Coil, PS51736,cd00338,PF00239
MPAALAYCMASVNLVFAWADLRIYYTIISLVLERRTDYIMTKNAVIYARFSSDKQREESIDGQIRECRAFAEANEINIINTYIDRAMSARTDQRPSFLQMVKDSAKHLFDYVIVYQLDRFSRSRYDSAIYKHRLKKNGVKVLSAKENIKDDPSGILLESVIEGMAEYYSAELSQKVKRGMTENLLEGKWIGGIVPFGYELTSENKLVISPTTGHLVSEIYDKYLSGVKTTDILSKLNSLGIKTQRGCNFTRNSLNRILKNQIYTGTFTWAGTSYPDYAPALITQEQYTAMQNLFESRKRKNNTARRVSPQYALTGKIYCGTCGLPMTGYCGKSHTGTTYYYYQCSSKNNKSEKAARSQIACDAKNISRDKLEKLVLDTTISILKNKDAVKCIADQCMTIQKAELEHKPAEELRLESQIKEIEKRLKNSVKAVENGLISQTITNNIETYEKQLTELNAQLDGVKLDTHIIPITEEAVIYYLNQLTERANKKDGYSLDTFDDFIRRVVVTGKRVDIFYNYTAVPNILENPAVKMLRGSSEDCLVTR

SEQ ID NO: 2481 - protein, 544 aa, Unknown
  Description of Unknown: Integrase B2482 sequence
  PTHR30461:SF3,SM00857,G3DSA:1.10.10.2600,IPR036162,PF13408, IPR025827,G3DSA:3.40.50.1390,PS51737,IPR006119,IPR038109, PF07508,IPR011109,SSF53041,PF00239,PTHR30461, PS51736,Coil,cd00338
MAETAKKISMIPAKVQYDRNVKLSEKKMKVAAYCRVSTELEEQDSSYEAQVEYYTSKISENENWKNAGIYADDGKSGTNTKKRADFNAMIQDALAGKIDMILTKSVSRFARNTVDSLVTIRKLKEKNVAVVFEKEGINTLEGTGEILITILSSLAQEESRNISENIRWGVVRKFEKGKVIVNCTKFMGYTKNEDGDLVIVPEEAEIVKLIFRLYLEGYSTGKIAKHLEEQGIKTATEQDKWHSTVIDKMLRNEKYMGDALLQKTYTVDFMTKKKVKNTGIVPQYYVEDDHEAIIPKELFYRVQEEMMRRASLCKAAVTRKKNQRSRYSSTYALTGMLICGKCGQEYRRVTWARNGKKKVVWRCSNRLTNGVKKCGESETLEENALNRAVMETIHRITSDDMEFMENFRQNIIHVIGNYSTAKESEEYEEKIKEKQEEMVALIAENAKTGSYTPEFDERYRTIAEEINALKEAQKTARNEKRMADSYEQRIQDIDHYLSTSTCQIPEFDNDLVRRLISTIKVESSEKLLIQFQSGIVMEQEIRYE

SEQ ID NO: 2482 - protein, 544 aa, Unknown
  Description of Unknown: Integrase B2483 sequence
  PTHR30461:SF3,cd00338,SM00857,G3DSA:1.10.10.2600,IPR036162, PF13408,PS51737,IPR025827,G3DSA:3.40.50.1390,IPR006119, IPR038109,PF07508,IPR011109,SSF53041,PTHR30461, mobidb-lite,Coil,PF00239
MPRKPAKHPAKPKRGKKLEIEEPGVLYGRYSSHNQKDISVEQQFEKGYELAAEYGIRIIDTYADRAVSGRTDKRRDFQRMMTDAAKGKFRYVIAWKSNRMGRNMLEALINEARLQDLGVRVLYVEEDFDDTAAGRFAARSMMNVNQFYSENMAEDIKRGLYDNAANCMVANGHLPYGYKADETLHYAIDEPKAAVIREIFARVSCGEAFVDIMASLNARGIKTSYGRPWGRSSFQKILSNERYRGIYIYGDVRKEGGIPRIISDELYFKVQEVITTKKNPQGRHRVNGDYLLTGKLFCGHCKSPMTGVSGTGRSGNLHYYYVCQKRRTEKTCDKKNVRRDEIELQVAQAIKDYALKDDVIEWIADSTVAYNERKEAESKVGILEDQLAGTEHGIKNIMSAIEQGIITETTKSRLVELESERAAIKANIAAARADIVTVSRDDIISGLEMFRDGDVHDKKYQARLFDTFLVAVYAYDDDLRLVFSFSGNKNTIQIPIESAVNAVENNEAECSFKLCSAPPNSANPNSFFFVKHCVGFVFIVEDVG

SEQ ID NO: 2483 - protein, 544 aa, Unknown
  Description of Unknown: Integrase B2484 sequence
  PTHR30461:SF3,SM00857,G3DSA:1.10.10.2600,IPR036162,PF13408, IPR025827,G3DSA:3.40.50.1390,PS51737,IPR006119,IPR038109, PF07508,IPR011109,SSF53041,PF00239,PTHR30461, PS51736,Coil,cd00338
MRVVLYMRYSSDRQTEQSIEGQNRVCTAFCEQQGYEIVDRYIDRATSAFKDTDKRTEFQRMIRDSEKQLWEGIVVYKLDRFARNRYDSATYKARLKKNGVRVISATENISDNPEGVILEAVLEGMAEFYSKELSQKITRGMFESANKCHSIGGHIPLGYKIENKKLVIDEAGAAIVREAFDLYANGATVAEICETFNTKGYRTAKNAEFNKNSFRSMFKNERYIGIYKYKDLRIEGGVPAIVDKDIFTIVQKKLSKNAEAPSRGKAKIDYLLSQKLFCGHCGSLMTGESGTGKGGTTYFYYTCGKRKREHTCDKKPLKKDFIERAVVEDALTLLTPETINELADIAVKESVREMEENSIIPALKNQLHETERSINNLVKMVEKGVESDTIADRLKELEKEKRAIEKRLVVAQDDYVILEKDHIVWWLSEFCNGDIEDEDFRRHIIDLLVNSVTVWDEPDGWYKITSVYNLTSNKTKTFRCSDLSGQAPPKEIRRNTVSAVFLYNRPTVFVPVPHRQRRHHEKETDRKRVHLCCKHAVWLVLRRR

SEQ ID NO: 2484 - protein, 544 aa, Unknown
  Description of Unknown: Integrase B2485 sequence
  PTHR30461:SF3,SM00857,G3DSA:1.10.10.2600,IPR036162,PF13408, PS51737,G3DSA:3.40.50.1390,IPR025827,IPR006119,IPR038109, PF07508,IPR011109,SSF53041,PF00239,PTHR30461, PS51736,Coil,cd00338
MRVSVNLNAQKPDTTTNAVIYARYSSHGQTEQSIEGQLAKGHEYAAAQGYTVVHEYIDRAMTGRNDNREAFQKMLSDTGKHQFQVIIVWKVDRFGRNREEIAFNKHTCKKNGVRVEYVAESLPNSPEAVILESVLEGMAEYYSIQLSQNIRRGQLESAKKCQCVGGSVPLGYTLDSDKHFVIDPQTAPVVKKIFDLYAEGATISEITGQLNEQGIRTIRKQLFTKNSLTKLLKNEKYIGVYTYKDIVRVEGGVPAIVDKSTFDRVQELLKINRRAPSHTWTKVEYLLTDKLFCGHCGSPMVGESGFSHTGAKYSYYGCIKRRREKACDKKPVRQDWIEALVLDETVKLLHDDELMEYIIDRTWEYYQVTDKVQEEKAVLEAQLAEVDKAINNLVRAIEAGIFNAATKSRMDELDAQKAALTASLADLELTSGIRITRDHIEYFLLRLRDLDIKDRECQKRLVQTFVNAVFVYDDGRVKITYNYSGKSSTITLNQIDGAEKGKGFVCCLPCSTFSPRFPRGVAALFLFWGKNGCESATNFSCIVL

SEQ ID NO: 2485 - protein, 544 aa, Unknown
  Description of Unknown: Integrase B2486 sequence
  SM00857,G3DSA:1.10.10.2600,IPR036162,PF13408,IPR025827, G3DSA:3.40.50.1390,PS51737,IPR006119,IPR038109,PF07508, SSF53041,IPR011109,PTHR30461,Coil,cd00338, PF00239
MAYRKITDIKDTIGMRAVFYARVSTAEEEQLNAIELQIEENRGCIKDHGWKLVGEYIDRSKSGTMVKGRDDYQRLYEDLYEDLFDIVVIKDQERLQRNTLDWYLFINRVVQTGKLLFMYMDGKFYSPDDALITGVRAIIAEEFSRNLSKKLHNYHDHRIEKARQGQEIALQGSGNVYGWDKKDGKYYINPEQAKVRRLMCEGIMARKGSTLIAKELNDAGYRNTVGKPWKPMDIPKFVYDCKNVGTMIINKERHDFESKQTIKLPKEEWVYVENALPPIVTQEEWDLICKIHEERVIATGSDRRGKKTSGYSFSGKLVCGICGAPYWRKQRVSKDEYWVCSTKQTKGRRTRKRDSTMGKAGEINPLGCDNENISYNSLMEIMGVVSERLQANTDTIKQDMINWLTKLRKQLLEANGGHTEADLQRELSRKSKLLDAYLDGILNKQEYQKKAEELDERIIQLKAETEKNKANSGDIAEIDKVLANIDEEVSRYVDGNEKLKVEYLLEHLEQVQIFPDKVIVIVPILSEGIVVEKAQYVSREKWIW

SEQ ID NO: 2486 - protein, 544 aa, Unknown
  Description of Unknown: Integrase B2487 sequence
  SM00857,G3DSA:1.10.10.2600,IPR036162,PF13408,IPR025827, G3DSA:3.40.50.1390,PS51737,IPR006119,IPR038109,PF07508, SSF53041,IPR011109,PTHR30461,Coil,cd00338, PF00239
MAYRKITDIRDTIGMRAVFYARVSTAEEEQLNAIELQIEENRGCIKDHGWKLVGEYIDRSKSGTMVKGRDDYQRLYEDLYEDLFDIVVIKDQERLQRNTLDWYLFINRVVQTGKLLFMYMDGKFYSPDDALITGVRAIIAEEFSRNLSKKLHNYHDHRIEKARQGQEIALQGSGNVYGWDKKDGKYYINPEQAKVRRLMCEGIMARKGSTLIAKELNDAGYRNTVGKPWKPMDIPKFVYDCKNVGTMIINKERHDFESKQTIKLPKEEWVYVENALPPIVTQEEWDLICKIHEERVIATGSDRRGKKTSGYSFSGKLVCGICGAPYWRKQRVSKDEYWVCSTKQTKGRRTRKRDSTMGKAGEINPLGCDNENISYNSLMEIMEVVSERLQANTDTIKHDMINWLTKLRKQLLEANGGHTEADLQRELSRKSKLLDAYLDGILNKQEYQKKAEELDERIIQLKAETEKNKANSGDIAEIDKVLANIDEEVSRYVDGNEKLKVEYLLEHLEQVQIFPDKVIVIVPILSEGIVVEKTQYVSREKWRW

SEQ ID NO: 2487 - protein, 544 aa, Unknown
  Description of Unknown: Integrase B2488 sequence
  cd03768,PTHR30461:SF3,SM00857,G3DSA:1.10.10.2600,IPR036162, PF13408,PS51737,G3DSA:3.40.50.1390,IPR025827,IPR006119, IPR038109,PF07508,SSF53041,IPR011109,PTHR30461, PS51736,Coil,PF00239
MKIAIYSRKSKYTGVGDSIENQVQMCKDYANAKYMGQDLEFATYEDEGFSGRNLIRPEFQKLINNINSYDILMCYKLDRISRNVADFSSTLEVLQDAKCDFVSIKENFDTSTPMGRAMIHIASVFAQLERETIAERVKDNMLELAKNGRWSGGRTPLGYKSEPVQYIDEEGNERKAVKLVQDQEELELVKLIYDTYLKQGSLHKTEVWFTQHKIKSNSAVLLEKTSLKIILQNPVYVRSAPEVINYLKDNNWNVYGEADGVHGLLTYNKTESVAGSNGKVTKRVQNKENWIAAVSNVKGIIDADTWIRVQEQFKKNKNTFPNLGKTHTAILTGKLRCSKCKNYMLVQHGRTSVKTGDKIYYYICSMKRKSKGELCNCKNIKANEIEPAVLNLIEELATNKEEFKNKLREKNTASKLDNDIKLKKSALEKQIADKEKQITGLVDKLSLDDSIADILINRIKNYKAEIETLKADLLNISAEIEQNNNYKLAESFLDGFFEQCKDISSQPKEKQRQLINSYVNYINFDSDTEEAELKLYEPGEIKKN

SEQ ID NO: 2488 - protein, 544 aa, Unknown
  Description of Unknown: Integrase B2489 sequence
  PTHR30461:SF3,SM00857,G3DSA:1.10.10.2600,IPR036162,PF13408, IPR025827,PS51737,G3DSA:3.40.50.1390,IPR006119,IPR038109, PF07508,IPR011109,SSF53041,PTHR30461,Coil, PS51736,cd00338,PF00239
MRVSVNLNAQKPDTTTNAVIYARYSSHGQTEQSIEGQLAKGHEYAAAQGYTVVHEYIDRAMTGRNDNREAFQKMLSDTGKHQFQVVIVWKVDRFGRNREEIAFNKHTCKKNGVRVEYVAESLPNSPEAVILESVLEGMAEYYSIQLSQNIRRGQLESAKKCQCVGGTVPLGYTLDSDKHFVIDPQTAPIVKKIFDLYAEGATISEITGQLNEQGIRTARKQLYTKNSLTKLLKNEKYIGIYAYKDVVRVEGGVPAIVDKSTFDRVQELLKINRRAPSHTWTKVEYLLTDKLFCGHCGSPMVGESGFSHTGAKYSYYGCIKRRREKACDKKPVRQDWIEALVLDETVKLLHDDELMEYIIDRTWEYYQVTDKVQEEKAVFEAQLAEIDKAINNLVRAIEAGIFNAATKSRMDELDAQKAALTASLADLELTSGIRITREHIEYFLLRLRDLDVKDRECQKRLVQTFVNAVFVYDDGRVKITYNYSGKSNTVTLDQIDGAEKEKGFVCCLPCSTSSPRFPRGVAALFLFLGKNGCESTTNFSCIVQ

SEQ ID NO: 2489 - protein, 544 aa, Unknown
  Description of Unknown: Integrase B2490 sequence
  PTHR30461:SF3,cd00338,SM00857,G3DSA:1.10.10.2600,IPR036162, PF13408,IPR025827,G3DSA:3.40.50.1390,PS51737,IPR006119, IPR038109,PF07508,IPR011109,SSF53041,PTHR30461, PS51736,Coil,PF00239
MARSTKKTECLPLERIGVIYARYSSHNQKEESIEQQVEECMTFALLNGIKVVHVYADKALSGRTDKRPQFQRLMRDAEKRSFSVVVAYKSNRIARDMLNALKYEDRLGKYGIETLYAKEEFGNTAAGRFALRTMMNVNQFYSENMAEDIKRGMLDNAENCKVNGALPLGYVSGPDGRYAIEPKEAEIVRGIYDKVLEGVSFADIASDLNVRGVRTKHGSLWNKCSFHRILTNDVYIGVYRHSGVVKEGGVPPILEREVFIAMQKYLETKKNPRGRHRENGDYLLTGKLRCGYCESFMVGVSGTSKTGDKHYYYNCNGRRSGSGCKKENVRRDSIEYAVAALTQQIVFKEDIIDWIATAAVKLAKESSGQSEIDAMEAELAEDRKATKNIMTAIEQGIFTATTKNRLLELEADIATLEQSIRDAKAISEGELLEKERVVYFLTSLREGNLHSKTYQKRLIDTFVRAVYLWDDYIGIDYYYAGKDSVVKYSLSEIESEIGENIREVLKDSLTGHHTRVIRTQDGQEITIVLTVNGFVLLSPLSVCG

SEQ ID NO: 2490 - protein, 544 aa, Unknown
  Description of Unknown: Integrase B2491 sequence
  PTHR30461:SF3,SM00857,G3DSA:1.10.10.2600,IPR036162,PF13408, PS51737,G3DSA:3.40.50.1390,IPR025827,IPR006119,IPR038109, PF07508,IPR011109,SSF53041,PF00239,PTHR30461, PS51736,Coil,cd00338
MRVSVNLNAQKPDTTTNAVIYARYSSHGQTEQSIEGQLAKGHEYAAAQGYTVVHEYIDRAMTGRNDNREAFQKMLSDTGKHQFQVVIVWKVDRFGRNREEIAFNKHTCKKNGVRVEYVAESLPNSPEAVILESVLEGMAEYYSIQLSQNIRRGQLESAKKCQCVGGSVPLGYTLDSDKHFVIDPQTAPVVKKIFDLYAEGATISEITGQLNEQGIRTIRKQLFTKNSLTKLLKNEKYIGVYTYKDIVRVEGGVPAIVDKSTFDRVQELLKINRRAPSHTWTKVEYLLTDKLFCGHCGSPMVGESGFSHTGAKYSYYGCIKRRREKACDKKPVRQDWIEALVLDETVKLLHDDELMEYIIDRTWEYYQVTDKVQEEKAVLEAQLAEVDKAINNLVRAIEAGIFNAATKSRMDELDAQKAALTTSLADLELTSGIRITRDHIEYFLLRLRDLDVKDRECQKRLVQTFVNAVFVYDDGRVKITYNYSGQSSTITLNQIASAEKGKGFVCCLPCSTSSPRFPRGVAALFLFLGKNGCESTTNFSCIVQ

SEQ ID NO: 2491 - protein, 544 aa, Unknown
  Description of Unknown: Integrase B2492 sequence
  SM00857,G3DSA:1.10.10.2600,IPR036162,PF13408,PS51737, G3DSA:3.40.50.1390,IPR025827,IPR006119,IPR038109,PF07508, SSF53041,IPR011109,PTHR30461,Coil,cd00338, PF00239
MAYRKITDIRDTIGMRAVFYARVSTAEEEQLNAIELQIEENRGCIKDHGWKLVGEYIDRSKSGTMVKGRDDYQRLYEDLYEDLFDIVVIKDQERLQRNTLDWYLFINRVVQTGKLLFMYMDGKFYSPDDALITGVRAIIAEEFSRNLSKKLHNYHDHRIEKARQGQEIALQGSGNVYGWDKKDGKYYINPEQAKVRRLMCEGIMARKGSTLIAKELNDAGYRNTVGKPWKPMDIPKFVYDCKNVGTMIINKERHDFESKQTIKLPKEEWVYVENALPPIVTQEEWDLICKIHEERVIATGSDRRGKKTSGCSFSGKLVCGICGAPYWRKQRVSKDEYWVCSTKQTKGRRTRKRDSTMGKAGEINPLGCDNENISYNFLMEIMGVVSERLQANTDTIKHDMINWLTKLRKQLLEANGGHTEADLQRELSRKSKLLDAYLDGILNKQEYQKKAEELDERIIQLKAETEKNKANSGDIAEIDKVLANIDEEVSRYVDGNEKLKVEYLLEHLEQVQIFPDKVIVIVPILSEGIVVEKTQYVSREKRSR

SEQ ID NO: 2492 - protein, 544 aa, Unknown
  Description of Unknown: Integrase B2493 sequence
  SM00857,G3DSA:1.10.10.2600,IPR036162,PF13408,IPR025827, G3DSA:3.40.50.1390,PS51737,IPR006119,IPR038109,PF07508, SSF53041,IPR011109,PTHR30461,Coil,cd00338, PF00239
MAYRKITDIRDTIGMRAVFYARVSTAEEEQLNAIELQIEENRGCIKDHGWKLVGEYIDRSKSGTMVKGRDDYQRLYEDLYEDLFDIVVIKDQERLQRNTLDWYLFINRVVQTGKLLFMYMDGKFYSPDDALITGVRAIIAEEFSRNLSKKLHNYHDHRIEKARQGQEIALQGSGNVYGWDKKDGKYYINPEQAKVRRLMCEGIMARKGSTLIAKELNDAGYRNTVGKPWKPMDIPKFVYDCKNVGTMIINKERHDFESKQTIKLPKEEWVYVENALPPIVTQEEWDLICKIHEERVIATGSDRRGKKTSGYSFSGKLVCGICGAPYWRKQRVSKDEYWVCSTKQTKGRRTRKRDSTMGKSGEINPLGCDNENISYNSLMEIMGVVSERLQANTDTIKHDMINWLTKLRKQILEANGGHTEADLQRELSRKSKLLDAYLDGILNKQEYQKKAEELDERIIKLKAETEKNKANSGDIAEIDKVLANIDEEVSRYVDGNEKLKVEYLLEHLEQVQIFPDKVIVIVPILSEGIVVEKTQYVSREKRCG

SEQ ID NO: 2493 - protein, 543 aa, Unknown
  Description of Unknown: Integrase B2494 sequence
  PTHR30461:SF3,IPR036162,PS51737,IPR011109,PTHR30461, PS00397,PF00239,G3DSA:1.10.10.2600,IPR006119,SSF53041, cd00338,SM00857,IPR025827,IPR038109,PS51736, IPR006118,PF13408,G3DSA:3.40.50.1390,PF07508,Coil
MPVAVYCRVSSEEQAERGAIEIQKEFAAKYVDLYQLEVFDYYCDDGISGTIPVEARPEGSHLFRDAREKKFDTILFYKIDRLGRKVRVILNAVHDLEELGVSIRSMTEPLETETPTGRFMLTSLAGISELERDTILSRMWAGSQRAARLGNWLGGIVPFGYHVVDKQLRISDDIMPGCNLSEADVIQLIFDLSGNQKMSAIKISDYLNALNIPTRYDLNGINGKRKKNASSIWYPSRILSIIKSTTYKGTHKYGKRATNKNSKIILRPVPAIVSNELWEKANEALKINQITAMRNAVREYLLRGIIKCGNCGRTYMGTAYSGSGRKKIPYYVCNAKNSYLAHNTEKCISKNVRADWLEHLVLEDCIKILKSPNKILNMDSEKEQESPTNEVKKEHDQIKASLKKLSEERASIIELYRKKIISETDLSCQLEKLSTEEATLQERLKMKIDSKKSAATKQNKEKTISLLKEFADRCQNLDPEKLSFETRRAIIELIVEKITVTTESAPEKYYPEISVDIEYRFATTPNHIAYVEDCTVTGSALCT

SEQ ID NO: 2494 - protein, 543 aa, Unknown
  Description of Unknown: Integrase B2495 sequence
  PTHR30461:SF3,SM00857,G3DSA:1.10.10.2600,IPR036162,PF13408, IPR025827,PS51737,G3DSA:3.40.50.1390,IPR006119,IPR038109, PF07508,IPR011109,SSF53041,PTHR30461,PS51736, cd00338,PF00239
MKKLKVAAYARVSTDKDDQANSLENQKQYFQSYILNHEDWDFVDVYFDEGISGTQTKKRLGFNKMIDDAENGDIDLIITKEVSRFARNTVDTLSYTRRLKDSGIGVIFTLDNIDTRQSDGEFRLTIMASIAQEESRKTSERVKWGQKRQMEKGVVFGRDLLGYTVKNGVLYINEEEVPVVRAIFHKYTNEGKGSHTIARELLEEGMKPKRISLWSNTIILKVLRNEKYVGDLLQKKTYTPNYLTHSKKYNHGQEEMIYLKDHHEAIIDRDLWNRTQEELRRRSPSAQQKAKHSNRYWCSGKIYCAECGSLFVGRTKRWKDGKQYKSWKCNASVNYMRAKQDEYGNPIKCHNNSINQKTLNFCMNYCISLMQTEQDSLKKEIITEISKVKEQSSYESKTKHIEEKIKQVETKKRRLIDLALDNVISGQDLKTQTAWYNEEIESLQLQLNESLTEDKKHQAQIRDMESYVNELDKIMSINSADSELVYKEIVKHIDVHNDKILDVWLKPLPFGIQLKVKTTGRRDNYMTEILEYSYIKPEIKGTI

SEQ ID NO: 2495 - protein, 543 aa, Unknown
  Description of Unknown: Integrase B2496 sequence
  PTHR30461:SF3,SM00857,G3DSA:1.10.10.2600,IPR036162,PF13408, IPR025827,G3DSA:3.40.50.1390,PS51737,IPR006119,IPR038109, PF07508,SSF53041,IPR011109,PTHR30461,Coil, PS51736,cd00338,PF00239
MKRVICLYRVSTKGQVDKDDIPMQRIECRKFIETQGWTLVGEYAEKGVSGFKVSAEKRDAIMSIRKEAERGAFDVLLVFMFDRLGRRDDETPFLVEWFISKGIEVWSTREGQQKMESRADKLINYIRYWQAGGESEKTSERVRTKHRQMVEAGLWRGGARPFGYKLIHTGRIGKKNRQLFDLAIDEKESVIIRDIFDGYIRRGMGMHRLANYLNSHYPSPDKIWAPQSIKTILTNPVYIGVSRCGDVRSPVNEALRIVSDEDFQFARHVMDMRVTRKTQTRGDIDEDNLDEAKRTKTSIYGASLLSGLLYCAHCGHKLVGTYHTKQRVNGEYYYRPVYRCYNGATKAKGCDGQRTYSAARIEKAVLEIVHQYFSHFGESMDAVWKEQQRLQIKQGSGARLKQAELSLSRLQAQHKKLREELVKVLMGESVFDEETIKSMLDEKQDAIEKAEAYLKEVRASAEDTEQKLQQLIFQYRSIKNWSSVFDQANDDEKKMILARIIEKITVDKNYNISIYFFLTLEDFRKEMEDNAEKIEIFEASQCI

SEQ ID NO: 2496 - protein, 543 aa, Unknown
  Description of Unknown: Integrase B2497 sequence
  PTHR30461:SF3,SM00857,G3DSA:1.10.10.2600,IPR036162,PF13408, PS51737,G3DSA:3.40.50.1390,IPR025827,IPR006119,IPR038109, PF07508,IPR011109,SSF53041,PTHR30461,Coil, PS51736,cd00338,PF00239
MEVKKIPKKTVTLIEPKRSILVDKEKYHQKRVAAYCRVSTDSEEQLTSYVNQKKFYTDMIARNTEWEFAGLYADEGISGTRADKRPEFNNMIKACLAGKIDYIITKSVSRFARNTVDCLDYVRLLRARGIGIFFEEQNIDTLKSDSELYLVIYAGFAQSESESISKNITWSYRKNFEDGKPIFMFKKLLGYKKGEDGEPVIVPEEAEIVERIYTMYLSGMTVDVISRQLQSEHIVIPDKKFSFGKNMVMNILKNEKYCGDCILQKTVTVDCISKTRKKNEGEAPMYIVENSHPAIISREMFNRAQEELSKRKARSPQSQKTAITASGKYSKYALTDVLICAECGSRYKRVTWTSLGQKRIVWRCVNRLDNGKKYCQHSPTLSEPALQEAIVRALNKFNDEDTSTYLTLMKATIGEAIGANGGSDEIDLLERRIDALNSRMLKMVSDSVERGADMEENEDEFKTISEQIEQLNRRIEAIRKSEGSDEDRQERLSLIQATIDQREAHRDTYDDAIVRQMIECVKVHEGGKLTIIFGGGYEIEEQI

SEQ ID NO: 2497 - protein, 543 aa, Unknown
  Description of Unknown: Integrase B2498 sequence
  PTHR30461:SF3,IPR036162,PS51737,IPR011109,PTHR30461, PS00397,PF00239,G3DSA:1.10.10.2600,IPR006119,SSF53041, cd00338,SM00857,IPR025827,IPR038109,PS51736, IPR006118,PF13408,G3DSA:3.40.50.1390,PF07508,Coil
MPVAVYCRVSSEEQAERGTIEIQKEFAAKYVDLYQLEVFDYYCDDGISGTIPVEARPEGSRLFRDAREKKFDTILFYKIDRLGRKVRVILNAVHDLEELGVSIRSMTEPLETETPTGRFMLTSLAGISELERDTILSRMWAGSQRAARLGNWLGGIVPFGYHVVDKQLQISDDIMPGCNLSEADVIQLIFDLSGNQKMSAIKISDYLNALNIPTRYDLNGINGKRKKNASSIWYPSRVLSIIKSTTYKGTHKYGKRATNKNSKIILRPVPAIVSDELWEKANEALKTNQITAMRNAVRKYLLRGIIKCGNCGRTYMGTAYSGSGREKIPYYVCNAKNSYLAHNTEKCISKNVRADWLEHLVLEDCIKILKSPNKILNMDPEKEQQSLADEVKKEHDQIKASLKKLSEERASIIELYRKKIISETDLSCQLEKLSTEEATLQERLKMKIDSRKSAATKQNKEKAISLLKKFTDKCQNLDPEKLSFETKRAIIELIVEKITVTTESAPEKYYPEISVDIEYRFATTPNHIAYVEDCTVTGSALCT

SEQ ID NO: 2498 - protein, 543 aa, Unknown
  Description of Unknown: Integrase B2499 sequence
  PTHR30461:SF3,IPR036162,PS51737,IPR011109,PTHR30461, PS00397,PF00239,G3DSA:1.10.10.2600,IPR006119,SSF53041, cd00338,SM00857,IPR025827,IPR038109,PS51736, IPR006118,PF13408,G3DSA:3.40.50.1390,PF07508,Coil
MPVAVYCRVSSEEQAERGTIEIQKEFAAKYVDLYQLEVFDYYCDDGISGTIPVEARPEGSRLFRDAKEKKFDTILFYKIDRLGRKVRVILNAVHDLEELGVSIRSMTEPLETETPTGRFMLTSLAGISELERDTILSRMWAGSQRAARLGNWLGGIVPFGYHVVDKQLQISDDIMPGCNLSEADVIQLIFDLSGNQKMSAIKISDYLNALNIPTRYDLNGINGKRKKNASSIWYPSRVLSIIKSTTYKGTHKYGKRATNKNSKIILRPVPAIVSDELWEKANEALKTNQITAMRNAVREYLLRGIIKCGNCGRTYMGTAYSGSGREKIPYYVCNAKNSYLAHNTEKCISKNVRADWLEHLVLEDCIKILKSPNKILNMDPEKEQQSLADEVKKEHDQIKASLKKLSEERASIIELYRKKIISETDLSCQLEKLSTEEATLQERLKMKIDSRKSAATKQNKEKAISLLKKFTDKCQNLDPEKLSFETKRAIIELIVEKITVTTESAPEKYYPEISVDIEYRFATTPNHIAYVEDCTVTGSALCT

SEQ ID NO: 2499 - protein, 543 aa, Unknown
  Description of Unknown: Integrase B2500 sequence
  PTHR30461:SF3,cd00338,SM00857,G3DSA:1.10.10.2600,IPR036162, PF13408,PS51737,IPR025827,G3DSA:3.40.50.1390,IPR006119, IPR038109,PF07508,IPR011109,SSF53041,PTHR30461, PS51736,Coil,PF00239
MARKKNIAAGQNAVIYARYSSHNQREVSIEQQIAECTKYAAALGLRIVGTYEDRAISGKTDNRPRFQQMMRDAEKGKFQAVVAWKSNRIGRNMLQAMVNEAKLDDYGVKVFYAEEDFDDTAAGRFALRNMMNVNQFYSENMAEDITRGLYDNASKCMANGRQPLGYKRGEDGRVVLDEANAAVVREIFTRVAAGDLFVDIARDLNAQGIKTSKGANWNKGSFQSICQNERYRGIYIYGDIRVADGIPRIVSDDLWYRVQEAMRMKKNPVGTRHRVGAEDYLLTGKLRCGHCGSYMTGVSGTSRNGELHYYYTCQKRRTEHACDKKNIRRDVIEPAVAQAIKMYCLTDDVIAWIADRTVEYWEKHDNDLQIEALEQQLEENKKATSNMLKAIEMGIITEATRTRMVELETEQSRLSVQLNAAKEDVVKIDREQIISYLELLQQGDIHDRDFQMELFKNFLVAVYVYDDNRMKLVFSCMGDQNSVEIPLETGEDPPDGGLSPDAKMFVLTPDSSTNQEQNEHRTTIQMVGNVFVLFCEIPNVTLT

SEQ ID NO: 2500 - protein, 543 aa, Unknown
  Description of Unknown: Integrase B2501 sequence
  PTHR30461:SF3,cd00338,SM00857,G3DSA:1.10.10.2600,IPR036162, PF13408,IPR025827,G3DSA:3.40.50.1390,PS51737,IPR006119, IPR038109,PF07508,SSF53041,IPR011109,PTHR30461, PS51736,Coil,PF00239
MSFSPPRKAALYARFSTEHQCSIEIQFAKMQEFCLAQGFSVSPLHAYSDEALSGMRTARRSGFQDLMVAAERHEFDVVVLYDLTRGSREVVDWFTFRRKMQSLGIQVLSMHDRLGNLDDPADFLPELISVGMGQVHVLTSRLKSMDKVDFLAQQGKFLGGYAPLGYEIKDGEYFICEREAAYVRTIYAMYADGKSYNEILAALPSALRGKRGRPIGKNSLYTILRNDRYIGRYSWCKRQVKYFSEWAGGGQSDRAVIIEDAIPAIIDKATWERVQTRMQENRINKTNHSSAHREYLLSGVLFCGSCGASFFGATTINKKGFEYKFYKCGNKNRTGTCHSKNISANDIEPLIVNLLRNALLNGSLIEKTADAILSVGAGNSSTDLKTLNAQLAQLDLKISNLVDALSNGLSSDAVREKLGLLESERAALKLKQDSLEPCHETLDRDFIISELQRDCEILQNSPSAMKQLIKKYIPHIDVFDDHIEIHCVADLAATSGIPLKTKKDGVSNISAENTITNGCGSAQHGVLVFTIPRSILALLNFSA

SEQ ID NO: 2501 - protein, 543 aa, Unknown
  Description of Unknown: Integrase B2502 sequence
  PTHR30461:SF3,cd00338,SM00857,G3DSA:1.10.10.2600,IPR036162, PF13408,PS51737,IPR025827,G3DSA:3.40.50.1390,IPR006119, IPR038109,PF07508,IPR011109,SSF53041,PTHR30461, PS51736,Coil,PF00239
MARKKNIAAGLDAVIYARYSSHNQREVSIEQQVRECMKHAAELGLHVVGTYEDRAISGKTDKRPNFQRMMRDAEKGKFQAVVAWKSNRIGRNMLQAMVNEAKLEDCGVKVFYAEEDFDDTAAGRFALRNMMNVNQFYSENMAEDITRGLYDNASKCMANGRQPLGYKRGEDGRVVLDEANAAVVREIFTRVAAGDLFVDIARDLNAQGIKTSKGANWNKGSFQSICQNERYRGIYIYGDVRVADGIPRIVSDDLWYRVQEAMRMKKNPVGTRHRVGAEDYLLTGKLRCGHCGSYMTGVSGTSRNGELHYYYTCQKRRTEHACDKKNIRRDVIEPAVAQAIKMYCLTDDVIAWIADRTVEYWEKHDNDLQIEALEQQLEENKKATSNMLKAIEMGIITEATRTRMVELETEQSRLSVQLNAAKEDVVKIDREQIISYLELLQQGDIHDRDFQMELFKNFLVAVYVYDDNRMKLVFSCMGDQNSVEIPLETGEDPPDGGLSPDAKMFVLTPDSSTNQEQNEHRTTIQMVGNVFVLFCEIPNVTLT

SEQ ID NO: 2502 - protein, 543 aa, Unknown
  Description of Unknown: Integrase B2503 sequence
  PTHR30461:SF3,IPR036162,PS51737,IPR011109,PTHR30461, PS00397,PF00239,G3DSA:1.10.10.2600,IPR006119,SSF53041, cd00338,SM00857,IPR025827,IPR038109,PS51736, IPR006118,PF13408,G3DSA:3.40.50.1390,PF07508,Coil
MPVAVYCRVSSEEQAERGTIEIQKEFAAKYVDLYQLEVFDYYCDDGISGTIPVEARPEGSRLFRDAREKKFDTILFYKIDRLGRKVRVILNAVHDLEELGVSIRSMTEPLETETPTGRFMLTSLAGISELERDTILSRMWAGSQRAARLGNWLGGIVPFGYHVVDKQLQISDDIMPGCNLSEADVIQLIFDLSGNQKMSAIKISDYLNALNIPTRYDLNGINGKRKKNASSIWYPSRVLSIIKSTTYKGTHKYGKRATNKNSKIILRPVPAIVSDELWEKANEALKTNQITAMRNAVREYLLRGIIKCGNCGRTYMGTAYSGSGREKIPYYVCNAKNSYLAHNTEKCISKNVRADWLEHLVLEDCIKILKSPNKILNMDPEKEQQSLADEVKKEHDQIKASLKKLSEERASIIELYRKKIISETDLSCQLEKLSTEEATLQERLKMKIDSRKSAATKQNKKKAISLLKKFTDKCQNLDPEKLSFETKRAIIELIVEKITVTTESAPEKYYPEISVDIEYRFATTPNHIAYVEDCTVTGSALCT

SEQ ID NO: 2503 - protein, 543 aa, Unknown
  Description of Unknown: Integrase B2504 sequence
  PTHR30461:SF3,IPR036162,PS51737,IPR011109,PTHR30461, PS00397,PF00239,G3DSA:1.10.10.2600,IPR006119,SSF53041, cd00338,SM00857,IPR025827,IPR038109,PS51736, IPR006118,PF13408,G3DSA:3.40.50.1390,PF07508,Coil
MPVAVYCRVSSEEQAERGTIEIQKEFAAKYVDLYQLEVFDYYCDDGISGTIPVEARPEGSRLFRDAREKKFDTILFYKIDRLGRKVRVILNAVHDLEELGVSIRSMTEPLETETPTGRFMLTSLAGISELERDTILSRMWAGSQRAARLGNWLGGIVPFGYHVVDKQLQISDDIMPGCNLSEADVIQLIFDLSGNQKMSAIKISDYLNALNIPTRYDLNGINGKRKKNASSIWYPSRVLSIIKSTTYKGTHKYGKRATNKNSKIILRPVPAIVSDELWEKANEALKTNQITAMRNAVREYLLRGIIKCGNCGRTYMGTAYSGSGREKIPYYVCNAKNSYLAHNTEKCISKNVRADWLEHLVLEDCIKILKSPNKILNMDPEKEQQSLADEVKKEHDQIKASLKKLSEERASIIELYRKKIISETDLSCQLEKLSTEEATLQERLKMKIDSRKSAATKQNKEKAISLLKKFTDKCQNLDPEKLSFETKRAIIELIVEKITVTTESAPEKYYPEISVDIEYRFATTPNHIAYVEDCTVTGSALCT

SEQ ID NO: 2504 - protein, 543 aa, Unknown
  Description of Unknown: Integrase B2505 sequence
  cd03768,SM00857,G3DSA:1.10.10.2600,IPR036162,PS51737, SSF109709,G3DSA:3.40.50.1390,IPR006119,IPR038109,PF07508, IPR011109,SSF53041,PTHR30461,PS51736,PF00239
MAKVNCAIYVRKSTEKGLELEFNSLHNQEDACRSYIMSQAFNNWEYFKTYTDGGISGGTMERPALKQMLEDIRRGLIQTVVVYKVDRLSRSIMDFHNMMKEFDKYGCSFVSITQAFDTSTSMGKLTLNMLLSFAQFEREVSSERVRDKIRASKAKGLWTGGIPKLGYDIKDKKLVINPIEAEQVRSIFEGYLQCGSLAELEKFAEIKGFKHKGWITNKGEQKGGKPFKISALHRLLHEKLYLGMIENKRTGQAFKGQHEAIISKELWEKVQAKLKDNDNSSSHTRNRNNNLLTGKLFDANGTIFTNQANSKKKATKRHYYSIKGLFLPTEQIDKLAKDAIIEILNGNLNGLNKDSAMALKLINFNDMDYFAQRNFIRNFINKIIYQKDHLTFFFNTDPTILSAYTGDSLNKSNDPLEFIADNANNQVIYEKQVVINRGLSSNIYNAGKVGLMSINDNNRLIVRTFAYAWKFKKLYEKGIRMEDIMKQEKMTKRTIYKYLNLAYLSPKIVNQLLSGTLTVNLQTLFDIASKNLSFEEQEKKVFN

SEQ ID NO: 2505 - protein, 543 aa, Unknown
  Description of Unknown: Integrase B2506 sequence
  PTHR30461:SF3,cd00338,SM00857,G3DSA:1.10.10.2600,IPR036162, PF13408,PS51737,IPR025827,G3DSA:3.40.50.1390,IPR006119, IPR038109,PF07508,IPR011109,SSF53041, PTHR30461,PS51736,Coil,PF00239
MAKKKKPAGGIAVIYARYSSHNQRDVSIEQQIEACRKHAAELGLTIIATYEDRAISGRTDNRPAFQRLMHDAEKGKFSYVLAWKSNRMGRNMMQAMVNESRLMDCGIKVYYAEEDFDDSAAGRFALRSMMNVNQFYSDNLAEDVRRGLMDNANKCMVNGRQPLGYKRGKDGKVVVDEPAAAIVREVYTRVASGELFTDIARDLNRRGIKTADKGEWNKNSFHRLCSNEKYRGIYIYGDVRIEGGIPTIIDDTLWYKVQEALRVKKLKRNGRHRPGDEDYLLTGKLRCGKCGGYMIGMSGRSKTGDIHYYYACQNRRVGRTCDKKNIRRDVIEPAVAQAIKEYCLTDDAIEWIADKTVEYWEKADRNLQLDSIEGDLAAVQSSISNVMKAIEMGVVTETTRDRLIELEKQRTDLKSKLALAKEEVVHVDRKKLISSLLLFRNGDIHDRQYQEDLFKTFLISVYVYDDDDNGHLKIVFNAFGDNNTVDLPIDFGETDNQSAFSDGAEKFDYSLHRSTKRELGEHSTIEMVGSVFVLFCSLPKIRK

SEQ ID NO: 2506 - protein, 543 aa, Unknown
  Description of Unknown: Integrase B2507 sequence
  PTHR30461:SF3,IPR036162,PS51737,IPR011109,PTHR30461, PS00397,PF00239,G3DSA:1.10.10.2600,IPR006119,SSF53041, cd00338,SM00857,IPR025827,IPR038109,PS51736, IPR006118,PF13408,G3DSA:3.40.50.1390,PF07508,Coil
MPVAVYCRVSSEEQAERGTIEIQKEFAAKYVDLYQLEVFDYYCDDGISGTIPVEARPEGSRLFRDAREKKFDTILFYKIDRLGRKVRVILNAVHDLEELGVSIRSMTEPLETETPTGRFMLTSLAGISELERDTILSRMWAGSQRAARLGNWLGGIVPFGYHVVDKQLQISDEIMPGCNLSEADVIQLIFDLSGNQKMSAIKISDYLNALNIPTRYDLNGINGKRKKNASSIWYPSRVLSIIKSTTYKGTHKYGKRATNKNSKIILRPVPAIVSDELWEKANEALKTNQITAMRNAVREYLLRGIIKCGNCGRTYMGTAYSGSGREKIPYYVCNAKNSYLAHNTEKCISKNVRADWLEHLVLEDCIKILKSPNKILNMDPEKEQQSLADEVKKEHDQIKASLKKLLEERTSIIELYRKKIISETDLSYQLEKLSTEEATLQERLKMKIDSRKSAATKQNKEKAISLFKKFTDKCQNLDSEKLSFETKRAIIELIVEKITVTTESAPEKYYPEISVDIEYRFATTPNHIAYVEDCTVTGSALCT

SEQ ID NO: 2507 - protein, 543 aa, Unknown
  Description of Unknown: Integrase B2508 sequence
  PTHR30461:SF3,cd00338,SM00857,G3DSA:1.10.10.2600,IPR036162, PF13408,PS51737,G3DSA:3.40.50.1390,IPR025827,IPR006119, IPR038109,PF07508,IPR011109,SSF53041,PTHR30461, PS51736,Coil,PF00239
MKKFPIDLSCLTEEEISQFQEDPYTLYNGDQNVAIYLRYSSTGQSDQSIEGQLRDCRTFCKANHYRIVAIYVDRATTARKDVEKRLHLMEMISDSAKQNWEYVIVWKLDRFARNRNDSAIMKMRLRKNGVKVLSATEHLTDSPESIILESVLEGMAEFFSAELSQKVTRGMRESALKCHSVGGHIPLGYKVENHKLVIDPDTAHIVQEAFSLYANGESVAAICRKFNSAGYKTAKNTEFNRSSFKAMFRNTRYIGTYTYKDIVIENGIPAIIDKELFETVQRRLSKTATAPARGKAKVDYLLSGKLFCGHCGASMNGESGAGRHGKVYHYYSCYTKKRKLGCDKRPLKKDYIEGIVARDALNLLTDQLIDEIADMAIRQSEQDLINDTHIPQLTAQLSEVEKSITNITAAIEKGIASETLMNRLVQLEHEKKTLNKEIKAEEKFVYRIDRDQIVFWLSQFKYGNIEDEDFRRRLIDLLVNSVTVWDEPDGYKITTAYNLTSCKTKTFRVEKNPAAEEATGFDFGESECTKSEQALYRLLRLIL

SEQ ID NO: 2508 - protein, 543 aa, Unknown
  Description of Unknown: Integrase B2509 sequence
  PTHR30461:SF3,SM00857,G3DSA:1.10.10.2600,IPR036162,PF13408, IPR025827,PS51737,G3DSA:3.40.50.1390,IPR006119,IPR038109, PF07508,IPR011109,SSF53041,PF00239,PTHR30461, PS51736,Coil,cd00338
MEVAKIPKKIVTVIEPKRSMTVDKEKYRQKKVAAYCRVSTDSEEQLVSYANQKKVYTEMIASRKDWCFAGLFADEGKSGTRADKRPEFNKMINDCLAGKIDYIITKSVSRFARNTVDCLDYVRMLKSKGIGVYFEEQQIDTLKTDSELYLVIYAGFAQSESESISKNITWSVRKKFEEGTPVFIYKRFLGYKKGADGEPEIVPSEAAIVERIFNLYLAGETVDNISKMMQAENYDIPGKTISFSKGMIMNMLSNERYCGDAILQKSVTVDCIEKKRKKNTGEAPMYYVQNNHPAIIDRVTFNKVQEELARRKTKTPGSAKSSITSTGKYSRYALTDVLICGNCGTRYRRVTWSRNGTKRIVWRCISRLDYGKKYCSDSPTIMEDKLQEAIVRAVNKFNKQDNATYKALMRATISEALGLNGDPEEVDMLERKIEALNNKMLALVNESVSSGDGIEAHESEFMTLSQEAELLKQRIAAIQESTAKDNGEQNRLEQIQAIIAERESKCMEYDDSIVRQMVECIKVYPGGKLEIIFGGGYLVEESV

SEQ ID NO: 2509 - protein, 543 aa, Unknown
  Description of Unknown: Integrase B2510 sequence
  PTHR30461:SF3,SM00857,G3DSA:1.10.10.2600,IPR036162,PF13408, PS51737,G3DSA:3.40.50.1390,IPR025827,IPR006119,IPR038109, PF07508,IPR011109,SSF53041,PF00239,PTHR30461, PS51736,Coil,cd00338
MARKKNIAAGQNAVIYARYSSHNQREVSIEQQIAECTKYAAALGLRIVGTYEDRAISGKTDNRPRFQQMMRDAGKGKFQAVVAWKSNRIGRNMLQAMVNEAKLDDYGVKVFYAEEDFDDTAAGRFALRNMMNVNQFYSENMAEDITRGLYDNASKCMANGRQPLGYKRGEDGRVVLDEANAAVVREIFTRVAAGDLFVDIARDLNAQGIKTSKGANWNKGSFQSICQNERYRGIYIYGDVRVADGIPRIVSDDLWYRVQEAMRMKKNPVGTRHRVGAEDYLLTGKLRCGHCGSYMTGVSGTSRNGELHYYYTCQKRRTEHACDKKNIRRDVIEPAVARAIKMYCLTDDVIAWIADRTVEYWEKHDNDLQIEALEQQLEENKKATSNMLKAIEMGIITEATRTRMVELETEQSRLSVQLNAAKEDVVKIDREQIISYLELLQQGDIHDRDFQMELFKNFLVAVYVYDDNRMKLVFSCMGDQNSVEIPLETGEDPPDGGLSPDAKMFVLTPDSSTNQEQNEHRTTIQMVGNVFVLFCEIPNVTLT

SEQ ID NO: 2510 - protein, 543 aa, Unknown
  Description of Unknown: Integrase B2511 sequence
  PTHR30461:SF3,IPR036162,PS51737,IPR011109,PTHR30461, PF00239,G3DSA:1.10.10.2600,IPR006119,SSF53041,cd00338, SM00857,IPR025827,IPR038109,PS51736,mobidb-lite, PF13408,G3DSA:3.40.50.1390,PF07508,Coil
MSLASRTVTVPDENRLNAVIYARFSSERQTENSIEFQLRADKAYCEQKGFRVIGEYIDRAMTGTNDNRPEFQRMIADAKKRQFAFIVVYRFDRFARNRYDSAIYKKQLERSGVRVLSTEESVGTGDEGIILESIYEAMAESYSRKLSRIVTEGMKQRALAGFSTGGNLPYAYKIVDRRLAIDEEKAPAVRLAFEMYVDGKTKSEIARELTARGYRTQKGNNISVWFVSGLLSNPTFKGESSFCGVKRDNPAIISPELFDKVQDLLEKNKRHYGKKTEGMYFALTGKVFCGHCGAAMVGDSGNGVGGRYYYYSCINKKNRRACKKKSERQDWLEKYVCEQTANFVLAPKNISYIAKRVAEASAADLGCDRIAELERELARIDRQFDALTESLVKTTNPTFLKKINEKAEALTAQKEAAEKEHAALCLRRELCVTPSDVEMYLRSFAHGDPSDPDYRRRLINTLVNAVYVWDDKILIYYNYNVENNAEMEFADVCKDADKPLPPSRQDASDHMPPSSSPSPATAPTPPKCSDSLTIGSPTIKGRL

SEQ ID NO: 2511 - protein, 543 aa, Unknown
  Description of Unknown: Integrase B2512 sequence
  PTHR30461:SF3,SM00857,G3DSA:1.10.10.2600,IPR036162,PF13408, IPR025827,PS51737,G3DSA:3.40.50.1390,IPR006119,IPR038109, PF07508,SSF53041,IPR011109,PTHR30461,Coil, PS51736,cd00338,PF00239
MARKKNIAAGLDAVIYARYSSHNQREVSIEQQIAECTKHAAALGLRIVGTYEDRAISGKTDNRPRFQQMMRDAEKGKFQAVVAWKSNRIGRNMLQAMVNEAKLDDYGVKVFYAEEDFDDTAAGRFALRNMMNVNQFYSENMAEDITRGLYDNASKCMANGRQPLGYKRGEDGRVVLDEANAAVVREIFTRVAAGDLFVDIARDLNAQGIKTSKGANWNKGSFQSICQNERYRGIYIYGDVRVADGIPRIVSDDLWYRVQEAMRMKKNPVGTRHRVGAEDYLLTGKLRCGHCGSYMTGVSGTSRNGELHYYYTCQKRRTEHACDKKNIRRDVIEPAVAQAIKMYCLTDDVIEWMADRTVEYWEKHDNDLQIEALEQQLEENKKATSNMLKAIEMGIITEATRTRMVELETEQSRLSVQLNAAKEDVVKIDREQIISYLELLQQGDIHDRDFQMELFKNFLVAVYVYDDNRMKLVFSCMGDQNSVEIPLETGEDPPDGGLSPDAKMFVLTPDSSTNQEQNEHRTTIQMVGNVFVLFCEIPNVTLT

SEQ ID NO: 2512 - protein, 543 aa, Unknown
  Description of Unknown: Integrase B2513 sequence
  PTHR30461:SF3,cd00338,SM00857,G3DSA:1.10.10.2600,IPR036162, PF13408,PS51737,G3DSA:3.40.50.1390,IPR025827,IPR006119, IPR038109,PF07508,IPR011109,SSF53041,PTHR30461, PS51736,Coil,PF00239
MARKKNIAAGQDAVIYARYSSHNQREVSIEQQVSECMKHAAELGLHVVGTYEDRAISGKTDKRPNFQRMMRDAEKGKFQAVVAWKSNRIGRNMLQAMVNEAKLEDCGVKVFYAEEDFDDTAAGRFALRNMMNVNQFYSENMAEDITRGLYDNASKCMANGRQPLGYKRGEDGRVVLDEANAAVVREIFTRVAAGDLFVDIARDLNAQGIKTSKGANWNKGSFQSICQNERYRGIYIYGDVRVADGIPRIVSDDLWYRVQEAMRMKKNPVGTRHRVGAEDYLLTGKLRCGHCGSYMTGVSGTSRNGELHYYYTCQKRRTEHACDKKNIRRDVIEPAVAQAIKMYCLTDDVIAWIADRTVEYWEKHDNDLQIEALEQQLEENKKATSNMLKAIEMGIITEATRTRMVELETEQSRLSVQLNAAKEDVVKIDREQIISYLELLQQGDIHDRDFQMELFKNFLVAVYVYDDNRMKLVFSCMGDQNSVEIPLETGEDPPDGGLSPDAKMFVLTPDSSTNQEQNEHRTTIQMVGNVFVLFCEIPNVTLT

SEQ ID NO: 2513 - protein, 543 aa, Unknown
  Description of Unknown: Integrase B2514 sequence
  PTHR30461:SF3,SM00857,G3DSA:1.10.10.2600,IPR036162,PF13408, PS51737,IPR025827,G3DSA:3.40.50.1390,IPR006119,IPR038109, PF07508,IPR011109,SSF53041,PTHR30461,Coil, cd00338,PF00239
MENTFMDFTEMIRVDCLYRVSTDKQVDYNDKSQADIPMQRRECHRFCEKMGWTIVHEEQEDGVSGHKVRAENRDKLQIIKERAKQGKFDILLVFMFDRIGRIADETPFVVEWFVKNGIRVWSTQEGEQRFDNHTDKLTNYIRFWQADGESEKTSIRTKTALGQLVEDGGFKGGFAPYGYDLVKSGRFNKRKHEVFELAVNADEASVVRIIYDKYVQEGFGAQRIATYLNNLGYRARTGKMWHHATVRGILCNLTYTGVLRSGESRSEILPHLQIIEPELFDVAQRIRTARVNAIEQENHVPLNTRGQYLLAGNVFCGHCGSRLSLTTNGKAYPCKDDPSRVVKRVRYICYGKTRKQTECDGQTGYTAHILNDIIDKVVRQIFERMKAVPKSEVVGVRYREKMEERKALLRSVKADYTKAAAELEALKSEVVKAIKGESSFSKELLASLISDTERKCQELQAALEQAQSEYDAGEATLQSLNSQYDDMISWAEMYDSASVESKKMIVSCLIRRVDVYRGYRVHIDFNIDFKQFSLGLDIAEIAA

SEQ ID NO: 2514 - protein, 543 aa, Unknown
  Description of Unknown: Integrase B2515 sequence
  PTHR30461:SF3,SM00857,G3DSA:1.10.10.2600,IPR036162,PF13408, IPR025827,PS51737,G3DSA:3.40.50.1390,IPR006119,IPR038109, PF07508,IPR011109,SSF53041,PF00239,PTHR30461, PS51736,Coil,cd00338
MEVTKVPKKIVTVIEPKRSMTVDKEKYRQKKVAAYCRVSTDSEEQLVSYANQKKVYTEMIASRKDWCFAGLFADEGKSGTRADKRPEFNKMINDCLAGKIDYIITKSVSRFARNTVDCLDYVRMLKSKGIGVYFEEQQIDTLKTDSELYLVIYAGFAQSESESISKNITWSVRKKFEEGTPVFIYKRFLGYKKGADGEPEIVPSEAAIVERIFNLYLAGETVDNISKMMQAENYDIPGKTISFSKGMIMNMLSNERYCGDAILQKSVTVDCIEKKRKKNTGEAPMYYVQNNHPAIIDRVTFNKVQEELARRKTKTPGSAKSSITSTGKYSRYALTDVLICGNCGTRYRRVTWSRNGTKRIVWRCISRLDYGKKYCSDSPTIMEDKLQEAIVRAVNKFNEQDNATYKALMRATISEALGLNGDPEEVDMLERKIEALNNKMLALVNESVSSGDGIEAHESEFMTLSQEAELLKQRIAAIQESTAKDNGEQNRLEQIQAIIAERESKCMEYDDSIVRQMVECIKVYPGGKLEIIFGGGYLVEESV

SEQ ID NO: 2515 - protein, 543 aa, Unknown
  Description of Unknown: Integrase B2516 sequence
  PTHR30461:SF3,cd00338,SM00857,G3DSA:1.10.10.2600,IPR036162, PF13408,PS51737,G3DSA:3.40.50.1390,IPR025827,IPR006119, IPR038109,PF07508,IPR011109,SSF53041,PTHR30461, PS51736,Coil,PF00239
MARKKNIAAGQNAVIYARYSSHNQREVSIEQQVRECMKHAAELGLHVVGTYEDRAISGKTDKRPNFQRMMRDAEKGKFQAVVAWKSNRIGRNMLQAMVNEAKLEDCGVKVFYAEEDFDDTAAGRFALRNMMNVNQFYSENMAEDITRGLYDNASKCMANGRQPLGYKRGEDGRVVLDEANAAVVREIFTRVAAGDLFVDIARDLNAQGIKTSKGANWNKGSFQSICQNERYRGIYIYGDVRVADGIPRIVSDDLWYRVQEAMRMKKNPVGTRHRVGAEDYLLTGKLRCGHCGSYMTGVSGTSRNGELHYYYTCQKRRTEHACDKKNIRRDVIEPAVAQAIKMYCLTDDVIAWIADRTVEYWEKHDNDLQIEALEQQLEENKKATSNMLKAIEMGIITEATRTRMVELETEQSRLSVQLNVAKEDVVKIDREQIISYLELLQQGDIHDRDFQMELFKNFLVAVYVYDDNRMKLVFSCMGDQNSVEIPLETGEDPPDGGLSPDAKMFVLTPDSSTNQEQNEHRTTIQMVGNVFVLFCEIPNVTLT

SEQ ID NO: 2516 - protein, 543 aa, Unknown
  Description of Unknown: Integrase B2517 sequence
  cd00338,SM00857,G3DSA:1.10.10.2600,IPR036162,PF13408, IPR025827,PS51737,G3DSA:3.40.50.1390,IPR006119,IPR038109, PF07508,IPR011109,SSF53041,PTHR30461,PS51736, Coil,PF00239
MKKKQPNTRHGRAAIYARYSSHNQREASIEQQVKACRELAVRLGLDVVETYEDKAISGKSDRRPSFQHLLRDAEKGYFDCVLAWKSNRMGRNMLQAMTNEARLKDWGVRTFYAEEDFDDTAAGRFALRNMMNVNQFYSENMAEDITRGMMDNASKCLSNGALPLGYKAGENGRVVLDKAQAAVVQEIYTRVACREPFVDIAADLNRRGIKTKRGGPWTKSSFYTICRNERYRGIYIYDDVRVEGGVPRIVSDGLFYRVQEVLKVKKTPQSARHHTGAEDYLLTGKLFCGKCGRPMTGVSGTSRSGEMHYYYTCQKRRREHACDKKNVIREQIEKSVAQAIKQYMLTDEMIQHMADATMAYNARQEKDLHLQDLQGQLAAVKTSAANLLKAIEMGVITETTKARMVELEQEQGRLNAQIENARAELVPITRDNFVSLLHIYRDGDINDSKYLASLFETFLVRVDLYDDHFLIWFNPLGQKTPADIPITSIENGDADEFFDECRSKNVFDWGGKWSTINHQDEHTTFITMIGNVFVLFCPFPGLK

SEQ ID NO: 2517 - protein, 543 aa, Unknown
  Description of Unknown: Integrase B2518 sequence
  PTHR30461:SF3,SM00857,G3DSA:1.10.10.2600,IPR036162,PF13408, PS51737,IPR025827,G3DSA:3.40.50.1390,IPR006119,IPR038109, PF07508,IPR011109,SSF53041,PF00239,PTHR30461, PS51736,Coil,cd00338
MEVTKVPKKIVTVIEPKRSMTVDKEKYRQKRVAAYCRVSTDSEEQLVSYANQKKVYTEMIASRKDWCFAGLFADEGKSGTRADKRPEFNKMINDCLAGKIDYIITKSVSRFARNTVDCLDYVRMLKSKGIGVYFEEQQIDTLKTDSELYLVIYAGFAQSESESISKNITWSVRKKFEEGTPVFMYKRFLGYRKGADGEPEIVPSEATIVERIFNLYLAGETVDKISKMMQAENYDIPGKTISFSKGMIMNMLSNERYCGDAILQKSVTIDCIEKKRKKNTGEAPMYYVQNNHPAIIDRVTFNKVQEELARRKTKTPGSAKSSITSTGKYSRYALTDVLICGNCGTRYRRVTWSRNGVKRIVWRCISRLDYGKKFCSDSPTIMEDKLQEAIVRAVNKFNEQDNATYKALMRATISEALGLNGDPEEVDMLERKVEALNNKMLALVNESVSSGDGIEAHESEFMTLSQETELLKQRIAAIQESTAKDNGEQSRLEQIQAIISERESKCMEYDDSIVRQMVECIKVYPGGKLEIIFGGGYLVEESV

SEQ ID NO: 2518 - protein, 543 aa, Unknown
  Description of Unknown: Integrase B2519 sequence
  PTHR30461:SF3,cd00338,SM00857,G3DSA:1.10.10.2600,IPR036162, PF13408,PS51737,G3DSA:3.40.50.1390,IPR025827,IPR006119, IPR038109,PF07508,IPR011109,SSF53041,PTHR30461, PS51736,Coil,PF00239
MARKKNIAAGLDAVIYARYSSHNQREVSIEQQIAECTKHAAALGLRIVGTYEDRAISGKTDNRPRFQQMMRDAEKGKFQAVVAWKSNRIGRNMLQAMVNEAKLDDYGVKVFYAEEDFDDTAAGRFALRNMMNVNQFYSENMAEDITRGLYDNASKCMANGRQPLGYKRGEDGRVVLDEANAAVVREIFTRVAAGDLFVDIARDLNAQGIKTSKGANWNKGSFQSICQNERYRGIYIYGDVRVADGIPRIVSDDLWYRVQEAMRMKKNPVGTRHRVGAEDYLLTGKLRCGHCGSYMTGVSGTSRNGELHYYYTCQKRRTEHACDKKNIRRDVIEPAVAQAIKMYCLTDDVIAWIADRTVEYWEKHDNDLQIEALEQQLEENKKATSNMLKAIEMGIITEATRTRMVELETEQSRLSVQLNVAKEDVVKIDREQIISYLELLQQGDIHDRDFQMELFKNFLVAVYVYDDNRMKLVFSCMGDQNSVEIPLETGEDPPDGGLSPDAKMFVLTPDSSTNQEQNEHRTTIQMVGNVFVLFCEIPNVTLT

SEQ ID NO: 2519 - protein, 543 aa, Unknown
  Description of Unknown: Integrase B2520 sequence
  PTHR30461:SF3,IPR036162,PS51737,IPR011109,PTHR30461, PS00397,PF00239,G3DSA:1.10.10.2600,IPR006119,SSF53041, cd00338,SM00857,IPR025827,IPR038109,PS51736, IPR006118,PF13408,G3DSA:3.40.50.1390,PF07508,Coil
MSVAVYCRVSSEEQAERGTIEIQKEFAAKYVDLYQLEVFDYYCDDGISGTIPVEARPEGSRLFRDAREKKFDTILFYKIDRLGRKVRVILNAVHDLEELGVSIRSMTEPLETETPTGRFMLTSLAGISELERDTILSRMWAGSQRAARLGNWLGGIVPFGYHVVDKQLRISDDIMPGCNLSEADVIQLIFDLSGNQKMSAIKISDYLNALNIPTRYDLNGINGKRKKNASSIWYPSRILSIIKSTTYKGTHKYGKRATNKNSKIILRPVPAIVSNELWEKANEALKINQITAMRNAVREYLLRGIIKCGNCGRTYMGTAYSGSGRKKIPYYVCNAKNSYLAHNTEKCISKNVRADWLEHLVLEDCIKILKSPNKILNMDSEKEQETPTNEVKKEHDQIKASLKKLSEERASIIELYRKKIISETDLSCQLEKLSTEEATLQERLKMKIDSKKSAATKQNKEKTISLLKEFADRCQNLDPEKLSFETRRAIIELIVEKITVTTESAPEKYYPEISVDIEYRFATTPNHIAYVEDCTVTGSALCT

SEQ ID NO: 2520 - protein, 543 aa, Unknown
  Description of Unknown: Integrase B2521 sequence
  PTHR30461:SF3,SM00857,G3DSA:1.10.10.2600,IPR036162,PF13408, IPR025827,G3DSA:3.40.50.1390,PS51737,IPR006119,IPR038109, PF07508,SSF53041,IPR011109,PF00239,PTHR30461, PS51736,Coil,cd00338
MEVTKVPKKIVTVIEPKRSMTVDKEKYRQKRVAAYCRVSTDSEEQLVSYANQKKVYTEMIASRKDWCFAGLFADEGKSGTRADKRPEFNKMINDCLAGKIDYIITKSVSRFARNTVDCLDYVRMLKSKGIGVYFEEQQIDTLKTDSELYLVIYAGFAQSESESISKNITWSVRKKFEEGTPVFMYKRFLGYRKGADGEPEIVPSEAVIVERIFNLYLAGETVDKISKMMQAENYDVPGKTISFSKGMIMNMLSNERYCGDAILQKSVTIDCIEKKRKKNTGEAPMYYVQNNHPAIIDRVTFNKVQEELARRKTKTPGSAKSSITSTGKYSRYALTDVLICGNCGTRYRRVTWSRNGVKRIVWRCISRLDYGKKYCSDSPTIMEDKLQEAIVRAVNKFNEQDNATYKALMRATISEALGLNGDPEEVDMLERKVEALNNKMLALVNESVSSGAGIEAHESEFMTLSQETELLKQRIAAIQESTAKDNGEQSRLEQIQAIISERENKCMEYDDSIVRQMVECIKVYPGGKLEIIFGGGYLVEESV

SEQ ID NO: 2521 - protein, 543 aa, Unknown
  Description of Unknown: Integrase B2522 sequence
  PTHR30461:SF3,SM00857,G3DSA:1.10.10.2600,IPR036162,PF13408, IPR025827,PS51737,G3DSA:3.40.50.1390,IPR006119,IPR038109, PF07508,IPR011109,SSF53041,PF00239,PTHR30461, PS51736,Coil,cd00338
MAKKKKPAGGNAIIYARYSSHNQRDVSIEQQIEACRKHAAELGLTITDTYEDRAISGRTDNRPAFQRMMHDAENGKFSYVLAWKSNRMGRNMMQAMVNESRLMDCGIKVYYAEEDFDDSAAGRFALRSMMNVNQFYSDNLAEDVRRGLMDNASKCMANGKQPLGYKRGEDGKVVVDEPAAAIVREVYTRVASGELFTDIARDLNRRGIKTADKGEWNKNSFHRLCSNEKYRGIYIYGDVRIEGGIPTIIDDTLWYKVQEALRVKKLKRNGRHRPGDEDYLLTGKLRCGKCGGYMIGMSGRSKTGEIHYYYTCQNRRVGRTCDKKNIRRDVIEPAVAQAIKDYCLTDDAIEWIADKTVEYWEKADRNLQLDSIEGDLAAVQSSISNVMKAIEMGVVTETTRDRLIELEKQRTDLKSKLALAKEEVVHVDRKKLISSLLLFRNGNIHDRQYQEDLFKTFLISVYVYDDDDNGHLKIVFNAFGDNNTVDLPIDFGETDNQSGFSDGAEKFDYALHRSTKRELGEHGTIEMVGSVFVLFYSLPKIRK

SEQ ID NO: 2522 - protein, 543 aa, Unknown
  Description of Unknown: Integrase B2523 sequence
  PTHR30461:SF3,cd00338,SM00857,G3DSA:1.10.10.2600,IPR036162, PF13408,PS51737,G3DSA:3.40.50.1390,IPR025827,IPR006119, IPR038109,PF07508,IPR011109,SSF53041,PTHR30461, PS51736,Coil,PF00239
MARKKNIAAGQNAVIYARYSSHNQREVSIEQQVRECMKHAAELGLHVVGTYEDRAISGKTDKRPNFQRMMRDAEKGKFQAVVAWKSNRIGRNMLQAMVNEAKLEDCGVKVFYAEEDFDDTAAGRFALRNMMNVNQFYSENMAEDITRGLYDNASKCMANGRQPLGYKRGEDGRVVLDEANAAVVREIFTRVAAGDLFVDIARDLNAQGIKTSKGANWNKGSFQSICQNERYRGIYIYGDVRVADGIPRIVSDDLWYRVQEAMRMKKNPVGTRHRVGAEDYLLTGKLRCGHCGSYMTGVSGTSRNGELHYYYTCQKRRTEHACDKKNIRRDVIEPAVAQAIKMYCLTDDVIAWIADRTVEYWEKHDNDLQIEALEQQLEENKKATSNMLKAIEMGIITEATRTRMVELETEQSRLSVQLNAAKEDVVKIDREQIISYLELLQQGDIHDRDFQMELFKNFLVAVYVYDDNRMKLVFSCMGDQNSVEIPLETGEDPPDGGLSPDAKMFVLTPDSSTNQEQNEHRTTIQMVGNVFVLFCEIPNVTLT

SEQ ID NO: 2523 - protein, 543 aa, Unknown
  Description of Unknown: Integrase B2524 sequence
  PTHR30461:SF3,SM00857,G3DSA:1.10.10.2600,IPR036162,PF13408, IPR025827,PS51737,G3DSA:3.40.50.1390,IPR006119,IPR038109, PF07508,IPR011109,SSF53041,PF00239,PTHR30461, PS51736,Coil,cd00338
MEVTKVPKKIVTVIEPKRSMTVDKEKYRQKKVAAYCRVSTDSEEQLVSYANQKKVYTEMIASRKDWCFAGLFADEGKSGTRADKRPEFNKMINDCLAGKIDYIITKSVSRFARNTVDCLDYVRMLKSKGIGVYFEEQQIDTLKTDSELYLVIYAGFAQSESESISKNITWSVRKKFEEGTPVFIYKRFLGYKKGADGEPEIVPSEAAIVERIFNLYLAGETVDNISKMMQAENYDIPGKTISFSKGMIMNMLSNERYCGDAILQKSVTVDCIEKKRKKNTGEAPMYYVQNNHPAIIDRVTFNKVQEELARRKTKTPGSAKSSITSTGKYSRYALTDVLICGNCGTRYRRVTWSRNGTKRIVWRCISRLDYGKKYCSDSPTIMEDKLQEAIVRAVNKFNKQDNATYKALMRATISEALGLNGDPEEVDMLERKIEALNNKMLALVNESVSSGDGIEAHESEFMTLSQEAELLKQRIAAIQESTAKDNGEQNRLEQIQAIIAERESKCMEYDDSIVRQMVECIKVYPGGKLEIIFGGGYLVEESV

SEQ ID NO: 2524 - protein, 543 aa, Unknown
  Description of Unknown: Integrase B2525 sequence
  PTHR30461:SF3,IPR036162,PS51737,IPR011109,PTHR30461, PS00397,PF00239,G3DSA:1.10.10.2600,IPR006119,SSF53041, cd00338,SM00857,IPR025827,IPR038109,PS51736, IPR006118,PF13408,G3DSA:3.40.50.1390,PF07508,Coil
MPVAVYCRVSSEEQAERGTIEIQKEFAAKYVDLYQLEVFDYYCDDGISGTIPVEARPEGSRLFRDAKEKKFDTILFYKIDRLGRKVRVILNAVHDLEELGVSIRSMTEPLETETPTGRFMLTSLAGISELERDTILSRMWAGSQRAARLGNWLGGIVPFGYHVVDKQLQISDDIMPGCNLSEADVIQLIFDLSGNQKMSAIKISDYLNALNIPTRYDLNGINGKRKKNASSIWYPSRVLSIIKSTTYKGTHKYGKRATNKNSKIILRPVPAIVSDELWEKANEALKINQITAMRNAVREYLLRGIIKCGNCGRTYMGTAYSGSGREKIPYYVCNAKNSYLAHNTEKCISKNVRADWLEHLVLEDCIKILKSPNKILNMDPEKEQQSLADEVKKEHDQIKASLKKLSEERASIIELYRKKIIFETDLSCQLEKLSTEEATLQERLKMKIDSRKSAATKQNKEKAISLLKKFTDKCQNLDPEKLSFETKRAIIELIVEKITVTTESAPEKYYPEISVDIEYRFATTPNHIAYVEDCTVTGSALCT

SEQ ID NO: 2525 - protein, 543 aa, Unknown
  Description of Unknown: Integrase B2526 sequence
  PTHR30461:SF3,IPR036162,PS51737,IPR011109,PTHR30461, PS00397,PF00239,G3DSA:1.10.10.2600,IPR006119,SSF53041, cd00338,SM00857,IPR025827,IPR038109,PS51736, IPR006118,PF13408,G3DSA:3.40.50.1390,PF07508,Coil
MLKYLKNDNEIVAVYCRVSSDEQADKGTIENQKEYAEKYVRLNMLNVYDYYLDDGVTGTLPLQKRPEGKRLLEDAKAGKFNLVLFFKLDRLGRSVRVILNAVYDLMELNVDVRSMTEAFDTTTPSGRFTLNTFAGIAELERDTILTRMRMGTIRHAKLGKWLGGPVPYGYTLENGYLEISRTKIPGLTYSEADIVKLIFEKTVYEKMSAEAIADYLNNLCVPTKYKILNRKLITSGYWYPSRILSMLHNTVYYGVHIFGQMSKHQKPEIIKQTNPAIVDIDLWDAAQKQLTSNKLLAARCRKNDYLLSGLIKCGLCGRTYIGTGYAGSKKEKVLYYVCNDKNRYHPDKNQKICQSQNLRADWIENIVWNDCLSYIMQPDKLYLENKAQNLTDPKDELNALEQTAVKLERERSSILDLFRKKIITENDLKNQLDKIAKEQDKLNRAINDKKALISKIDKINSNMIKMVDLLKSFQKYISDNITFADKRKIVEALVENIIVYTDYDNGQRDIPIVTIAINYVFKNEKNPLKRNYQPSSKQNIHGF

SEQ ID NO: 2526 - protein, 543 aa, Unknown
  Description of Unknown: Integrase B2527 sequence
  PTHR30461:SF3,SM00857,G3DSA:1.10.10.2600,IPR036162,PF13408, PS51737,G3DSA:3.40.50.1390,IPR025827,IPR006119,IPR038109, PF07508,SSF53041,IPR011109,PF00239,PTHR30461, PS51736,Coil,cd00338
MEVTKIPKKIVTVIEPKRSMSVDKEKYRQKRVAAYCRVSTDSEEQLVSYANQKKVYTEMIGSRKDWCFAGLFADEGKSGTRADKRPEFNKMINACLAGKIDYIITKSVSRFARNTVDCLDYVRMLKSKGIGVYFEEQQIDTLKTDSELYLVIYAGFAQSESESISKNIIWTVRNKFEEGIPVFMYKRFLGYRKGANGEPEIVPSEAAIVERIFNLYLAGETVDSISKMMQAEHYQIPGKNISFSKGMIMSMLANERYCGDAILQKSVTVDCIEKKRKKNTGEAPMYYVQNSHPAIIDRVTFNKVQEELARRRAKTPASTKTTITSTGKYSRYALTDVLICGECGTRYRRVTWSRNGVKRIVWRCISRLDYGKKYCKDSPTIFEDKLKEAIVRAVNKFNDQDNATYKALMRATIGEALGLNSDPEEVDLLERKIEALNNKMLALVNESVISGEGIEAHESEFMSLSQEVELLKQRIAAMQESAATDSGEQERLEQIQAIIAEREDNRTEYDDSIVRQMIECIKVYPGGKLEIIFGGGYLVEETV

SEQ ID NO: 2527 - protein, 543 aa, Unknown
  Description of Unknown: Integrase B2528 sequence
  PTHR30461:SF3,SM00857,G3DSA:1.10.10.2600,IPR036162,PF13408, PS51737,G3DSA:3.40.50.1390,IPR025827,IPR006119,IPR038109, PF07508,IPR011109,SSF53041,PTHR30461,Coil, PS51736,cd00338,PF00239
MRKCAYVRVSTDKDEQAESLENQILHYAEIGITEDNIFADKGLTGTSLDRTSFRKMLRLCGLDIDNVRGRLVIFQSNRESKYDYIYCKSITRFSRNISEGVELVRALKKKKVYCKFEMENIDTKDTSSEFLMNMLLVMSQNESQQTSDRVRWGNVQTAKKGNLRSFFNYGYKRVDDHLEIVESEAEVVKKIYKYKLEGLGNRRIAGQLNKEGYLTKKGKNWTESSVHNIVRNPIYTGVIARNRYECNSLFGNNSVKLKDESEWILTESDKVPAIISKEIFEEAQNMIKKHTMSNVKRGVNIGTSEFAKKILCGKCKSYYSRNINSTTKKVYYNCSNKKKNGVSACNSKNIYLDDLDKTINMFIGNGCKEIGLRFLNKTAFKKIDEKISNLKKDINKDNTKEIETNNQQISNLKEQLGRLVKLYISNTIPEDVLNIEKASLEEEIKVLENKNSELQEGIDGITEKIKYFENIKNAALKQINNIPDNLTREEFIRDYLLYFTVKENGQIGIMTKVHALFMAINNIAKEAELKEIVKWLALIDLHK

SEQ ID NO: 2528 - protein, 543 aa, Unknown
  Description of Unknown: Integrase B2529 sequence
  PTHR30461:SF3,IPR036162,PS51737,IPR011109,PTHR30461, PF00239,G3DSA:1.10.10.2600,IPR006119,SSF53041,cd00338, SM00857,IPR025827,IPR038109,PS51736,PF13408, cd17916,G3DSA:3.40.50.1390,PF07508,Coil
MPAALAYCMASVNLVFAWADLRIYYTIISLVLERTDYIMTKNAVIYARFSSDKQREESIDGQIRECRAFAEANEINIINTYIDRAMSARTDQRPSFLQMVKDSAKHLFDYVIVYQLDRFSRSRYDSAIYKHRLKKNGVKVLSAKENIKDDPSGILLESVIEGMAEYYSAELSQKVKRGMTENLLEGKWIGGIVPFGYELTSENKLAISPATGHLVPEIYDKYLSGIKTTDILSKLNSLGIKTQRGCNFTRNSLNRILKNQIYTGTFTWAGTSYPDYAPALITQEQYTAMQNLFESRKRKSNTARRVSPQYALTGKIYCGTCGLPMTGYCGKSHTGTTYYYYQCSSKNNKSEKAARSQITCDAKNINRDKLEKLVLDTTISILENKDAVKCIADQCMAIQKAELEHKPAEQLRLESQIKEIEKRLKNSVKAVENGLISQTITNNIETYEKQLTELNAQLDGVKLDTHIIPITEEAVIYYLNQLTERANKKDGYSLDTFDDFIRRVVVTGKRVDIFYNYTAVPNILENPAVKMLRGSSKDCLVTR

SEQ ID NO: 2529 - protein, 543 aa, Unknown
  Description of Unknown: Integrase B2530 sequence
  PTHR30461:SF3,cd00338,SM00857,G3DSA:1.10.10.2600,IPR036162, PF13408,IPR025827,PS51737,G3DSA:3.40.50.1390,IPR006119, IPR038109,PF07508,IPR011109,SSF53041,PTHR30461, PS51736,Coil,PF00239
MCAKKKPAMLEPDMQDAVIYTRYSSHNQRDCSIEQQVADCEIFARQNNLRVVKVYADRHLSGTTDNRPQFQQMLKDASHGHWAYVICWKIDRFARNRYDSATYKFRLKKAGVRVLYAKESIPDGPEGILLESVLEGSAEYYSAALAQNIRRGMKFNAEQCKVNSGSIPFGYCKGPDGRFAIHEANAEVVREIFRKAAAGMPFVDIANDLNSRGLKTSRGGRWNKGSFRLLMNEAYIGVYHFSDTRIEGGMPALIDHGTFWAANERLKANSSVRGRHQDGGDYLLTGKLKCAHCGSYMIGFSGTGKSGELHYYYGCQKRRRERACKKANVPREWIERVVVKAALDYVLRPDVMEWIADAVMEYQEREAASAQLAALTAELEENQKATDNVMKAIEAGIITSTTKQRLLDLEAKAQDLKRAIELEKLSHVRLERDQVLFWLDRFRGGSLQSQEFRRKVIDAFVSVVYLSDDHLRIAFNYSGGSNAEADFDLVMDAEAAAGELSKKFAQGHVTSTNRNAVEPAESGVKSLGSAGFLFVEKGAEGYS

SEQ ID NO: 2530 - protein, 543 aa, Unknown
  Description of Unknown: Integrase B2531 sequence
  PTHR30461:SF3,cd00338,SM00857,G3DSA:1.10.10.2600,IPR036162, PF13408,PS51737,G3DSA:3.40.50.1390,IPR025827,IPR006119, IPR038109,PF07508,IPR011109,SSF53041,PTHR30461, PS51736,Coil,PF00239
MARKKNIAAGQNAVIYARYSSHNQREVSIEQQVRECMKHAAELGLHVVGTYEDRAISGKTDKRPNFQRMMRDAEKGKFQAVVAWKSNRIGRNMLQAMVNEAKLEDCGVKVFYAEEDFDDTAAGRFALRNMMNVNQFYSENMAEDITRGLYDNASKCMANGRQPLGYKRGEDGRVVLDEANAAVVREIFTRVAAGDLFVDIARDLNAQGIKTSKGANWNKGSFQSICQNERYRGIYIYGDVRVADGIPRIVSDDLWYRVQEAMRMKKNPVGTRHRVGAEDYLLTGKLRCGHCGSYMTGVSGTSRNGELHYYYTCQKRRTEHACDKKNIRRDVIEPAVAQAIKMYCLTDDVIAWIADRTVEYWEKHDNDLQIEALEQQLEENKKATSNMLKAIEMGIITEATRTRMVELETEQSRLSVQLNAAKEDVVKIDREQIISYLELLQQGDIHDRDFQMELFKNFLVAVYVYDDNRMKLVFSCMGDQNSVEIPLETGEDPPDGGLSPDAKMFVLTPDSSTKKALYFVGSTVLFFLLKLVFGAASLRLHRF

SEQ ID NO: 2531 - protein, 543 aa, Unknown
  Description of Unknown: Integrase B2532 sequence
  PTHR30461:SF3,IPR036162,PS51737,IPR011109,PTHR30461, PS00397,PF00239,G3DSA:1.10.10.2600,IPR006119,SSF53041, cd00338,SM00857,IPR025827,IPR038109,PS51736, IPR006118,PF13408,G3DSA:3.40.50.1390,PF07508,Coil
MPVAVYCRVSSEEQAERGTIEIQKEFAAKYVDLYQLEVFDYYCDDGISGTIPVEARPEGSRLFRDAREKKFDTILFYKIDRLGRKVRVILNAVHDLEELGVSIRSMTEPLETETPTGRFMLTSLAGISELERDTILSRMWAGSQRAARLGNWLGGIVPFGYNVVDKQLQISDDIMPGCNLSEADVIQLIFDLSGNQKMSAIKISDYLNALNIPTRYDLNGINGKRKKKASSIWYPSRVLSIIKSTTYKGTHKYGKRATNKNSKIILRPVPAIVSDELWEKANEALKTNQITAMRNAVREYLLRGIIKCGNCGRTYMGTAYSGSGREKISYYVCNAKNSYLAHNTEKCISKNVRADWLEHLVLEDCIKILKSPNKILNMDPEKEQQSLADEVKKEHDQIKASLKKLSEERASIIELYRKKIISETDLSCQLEKLSTEEATLQERLKMKIDSRKSATTKQNKEKAISLLKKFTDKCQNLDPEKLSFETKRAIIELIVEKITVTTESAPEKYYPEISVDIEYRFATTPNHIAYVEDCTVTGSALCT

SEQ ID NO: 2532 - protein, 543 aa, Unknown
  Description of Unknown: Integrase B2533 sequence
  PTHR30461:SF3,SM00857,G3DSA:1.10.10.2600,IPR036162,PF13408, PS51737,IPR025827,G3DSA:3.40.50.1390,IPR006119,IPR038109, PF07508,IPR011109,SSF53041,PF00239,PTHR30461, PS51736,Coil,cd00338
MRYSSHAQDDGFSIEAQEKAIKKYADEHGYDLQYYYCDKAKTGTNSKRPEFQKMIADSKKKLFQVCIVHKTDRFARSRYDSIFFKSILKKSGVELLSVTENFGNDPEGKVMEGIAEVFAEYYSNNLAREVKKGLDVIASQGLHTGGLPPLGYDVSEKRLVINESEAEIVRLIFDRYSNGYTYNDIAKELNAKGYKTKIGREFTSASLNSILNQRKYIGEYVYNRRSSKNINGSYNSHKNKPEEEIIRIPDAVPKIIDEKIFEKVQQRLEMNKRKAGHYKSKSNYLLSGLIVCGECGFHYQGNTRAAGRGSQSMYSSYRCGKKQNHKIGCGNSEIEKNRLETFVLEQMQKYLFSDNAIKTIVKQVNEYNISVSKSKNSDLALYEKQLNEINKQIKNITLAIAKGVNQELMIEQIKSIDSSKKDLEKRIEESKITAFPPIVEEDVRKALSKFKEFMKENNYIECKNFINQYIDKIIVYRDKVEVTFKVASAIFNASFPDDKSGMLKIIIEISRTELKTLPKQRRKVPANGQFGESYLKQYQITTK

SEQ ID NO: 2533 - protein, 543 aa, Unknown
  Description of Unknown: Integrase B2534 sequence
  PTHR30461:SF3,cd00338,SM00857,G3DSA:1.10.10.2600,IPR036162, PF13408,PS51737,G3DSA:3.40.50.1390,IPR025827,IPR006119, IPR038109,PF07508,SSF53041,IPR011109,PTHR30461, PS51736,Coil,PF00239
MYEDIKTACLYVRFSSHNQTEQSIEGQTRVCRDFCKRHNIRIVEIYADRATSASKDIEKRVQFLKMIKDSEKGLFDAVIVYKLDRFARSRYDSATYKYRLKRNGVQLISATENISNDPEGIILESVLEGMAEFYSAELSQKINRGMRESAYKHNSIGGAVPLGYKIEDKKLVIDPKTAPIVKEAFEKYADGETVAEICRQFNARGYKTSKGTAFGKSSFTKIFRNERYIGVYSFHDYRAEDAIPAIIDKDLWDRVQLRVGKIKNAPARNKAKVVYLLSGKIFCGHCGSKMNGNCNAGNYYYYQCYGKKNGNVDCKKKNIRKEFIERLVAQDALSLLTDEYIEQIATIACEKNQHEIELDSALPTIRDRIHQVDLSLNNLLKAIESGSAPDMLVKRMGELEKEKKDLQVQAKKESEDIVELDKAQVIYWLEQFRGGSIEDEEFCRMLIDLFVNSVTVWDEDDNTYKVTVAYNLTSLPTKTYRLNKGGTLSDFTSNAPGAAADRAAGRIGGQLEDGIIQLLMGDVGRLVNVNGIGQIEAAAGRLR

SEQ ID NO: 2534 - protein, 543 aa, Unknown
  Description of Unknown: Integrase B2535 sequence
  PTHR30461:SF3,cd00338,SM00857,G3DSA:1.10.10.2600,IPR036162, PF13408,IPR025827,G3DSA:3.40.50.1390,PS51737,IPR006119, IPR038109,PF07508,IPR011109,SSF53041,PTHR30461, PS51736,Coil,PF00239
MKKKQPNARHGRAAVYARYSSHNQREASIEQQVKACRELAVRLGLDVVETYEDKAISGKSDRRPSFQRLLRDAERGCFDCVLAWKSNRMGRNMLQAMTNEARLKDWGVRTFYAEEDFDDTAAGRFALRNMMNVNQFYSENMAEDITRGMMDNASKCLSNGALPLGYKAGENGRIVLDKAQAAVVQEIYTRVACREPFVDIAADLNRRGIKTKRGGPWTKSSFYTICRNERYRGIYIYDDVRVEGGVPRIVSDGLFYRVQEVLKVKKTPQSSRHHTGAEDYLLTGKLFCGKCGRPMTGVSGTSRSGEMHYYYTCQKRRREHACDKKNVIREQIEKSVAQAIKQYMLTDEMIQHMADATMAYNARQEKDLHLQDLQGQLAAVKTSAANLLKAIEMGVITETTKARMVELEQEQGRLNAQIENARAELVPITRDNFVSLLHIYRDGDINDSKYLASLFDTFLVRVDLYDDHFLIWFNPLGQKTPADIPITSIENGGMDEFFDECRSENVFDWGGEWSTINHQDEHTTFITMIGNVFVLFCPFPNLK

SEQ ID NO: 2535 - protein, 543 aa, Unknown
  Description of Unknown: Integrase B2536 sequence
  PTHR30461:SF3,SM00857,G3DSA:1.10.10.2600,IPR036162,PF13408, IPR025827,G3DSA:3.40.50.1390,PS51737,IPR006119,IPR038109, PF07508,SSF53041,IPR011109,PF00239,PTHR30461, PS51736,Coil,cd00338
MAKKKKPAGGIAVIYARYSSHNQRDVSIEQQIEACRKHAAELGLTIIATYEDRAISGRTDNRPAFQRLMHDAEKGKFSYVLAWKSNRMGRNMMQAMVNESRLMDCGIKVYYAEEDFDDSAAGRFALRSMMNVNQFYSDNLAEDVRRGLMDNANKCMVNGRQPLGYKRGKDGKVVVDEPAAAIVREVYARVASGELFTDIARDLNRRGIKTADKGEWNKNSFHRLCSNEKYRGIYIYGDVRIAGGIPTIIDDTLWYKVQEALRVKKLKRNGRHRPGDEDYLLTGKLRCGKCGGYMIGMSGRSKTGDIHYYYACQNRRVGRTCDKKNIRRDVIEPAVAQAIKEYCLTDDAIEWIADKTVEYWEKADRNLQLDSIEGDLAAVQSSISNVMKAIEMGVVTETTRDRLIELEKQRTDLKSKLALAKEEVVHVDRKKLISSLLLFRNGDIHDRQYQEDLFKTFLISVYVYDDDDNGHLRIVFNAFGDNNTVDLPIDFGETDNQSAFSNGAEKFDYSLHRSTKRELGEHSTIEMVGSVFVLFCSLPKIRK

SEQ ID NO: 2536 - protein, 543 aa, Unknown
  Description of Unknown: Integrase B2537 sequence
  cd00338,SM00857,G3DSA:1.10.10.2600,IPR036162,PF13408, PS51737,IPR025827,G3DSA:3.40.50.1390,IPR006119,IPR038109, PF07508,IPR011109,SSF53041,PTHR30461,PS51736, Coil,PF00239
MSVDIKWQVPKAQPEASELAVVYARYSSHSQGEQSIEGQLSNARDYAAAHGYTIVHEYVDRAKSGRTDNRAEFQQMLKDTAKRQFSVIILWKVDRFGRNREEIAINKMKCRKNGVRVEYVAETIPDSPEGVILESVLEGFAEYYSLQLSQNIRRGRAESAEKCQSLGGNRPLGYKTGPDKKFVIDENTAPTVKMIFTMYADGKTVTEIVDKLNEMGLRTLRGGPFTKNSLHSILKNKKYIGIYEYQGREIKDGVPRIIEDDVFNKVQEMLKINKRAPAKTWSRADYILTDKLFCGKCGALMFGESGTSKTGAKHNYYICSNKKRFRSCDKKAVRQADIEDTVLNATHELLQDDELLDYIVDRTWEYYLAQDNSQEELRNLQRQLAQTDTAISNLIRAIEAGILTEETKKRMDELTQQKADLKASIADREIARGFHLKKSHIAYYLRSLRDADWSDKEAQKRLIQTFVNAVFVYDDHITLTYNFSGDKSTVTLRDMQRFEDGEEFGCRASRSTNTIESEPFADWPWVRIYCFVRRPGIIFPAAA

SEQ ID NO: 2537 - protein, 543 aa, Unknown
  Description of Unknown: Integrase B2538 sequence
  PTHR30461:SF3,SM00857,G3DSA:1.10.10.2600,IPR036162,PF13408, PS51737,IPR025827,G3DSA:3.40.50.1390,IPR006119,IPR038109, PF07508,IPR011109,SSF53041,PF00239,PTHR30461, PS51736,Coil,cd00338
MARKKNIAAGQDAVIYARYSSHNQREVSIEQQIAECTKYAAALGLRIVGTYEDRAISGKTDNRPRFQQMMRDAGKGKFQAVVAWKSNRIGRNMLQAMVNEAKLDDYGVKVFYAEEDFDDTAAGRFALRNMMNVNQFYSENMAEDITRGLYDNASKCMANGRQPLGYKRGEDGRVVLDEANAAVVREIFTRVAAGDLFVDIARDLNAQGIKTSKGANWNKGSFQSICQNERYRGIYIYGDVRVADGIPRIVSDDLWYRVQEAMRMKKNPVGTRHRVGAEDYLLTGKLRCGHCGSYMTGVSGTSRNGELHYYYTCQKRRTEHACDKKNIRRDVIEPAVAQAIKMYCLTDDVIEWMADRTVEYWEKHDNDLQIEALEQQLAENKKATSNMLKAIEMGIITEATRTRMVELETEQSRLSVQLNAAKEDVVKIDREQIISYLELLQQGDIHDRDFQMELFKNFLVAVYVYDDNRMKLVFSCMGDQNSVEIPLETGEDPPDGGLSPDAKMFVLTPDSSTRRKSTARKRVVFFVVTDQRRNYELRDRIQQ

SEQ ID NO: 2538 - protein, 543 aa, Unknown
  Description of Unknown: Integrase B2539 sequence
  PTHR30461:SF3,cd00338,SM00857,G3DSA:1.10.10.2600,IPR036162, PF13408,PS51737,IPR025827,G3DSA:3.40.50.1390,IPR006119, IPR038109,PF07508,IPR011109,SSF53041,PTHR30461, PS51736,Coil,PF00239
MPRKKAPAAEAPRLVAYYRYSGGSRQTEQSIEGQRRDCEAYARAHGMTILREYVDRHISGKTDDRPAFQQLVADSAAHIFDAVICWKTDRLARNRYDSAVYKKKLRDNGVEILYAAESNISGAEGIIIEGLMEALAEYYSAELAEKARRGMRESALKGKALGSSRPLGLTVDADKHYIIEPTGAEAVRYIFEQYAAGLSSSSIVERLNAMGLRTSHGGPFNKSSINRIIQNEMYRGVYVSKKFDVRIEGAIPAIIDNDLWKRAQNMFERNRQSRTPHASRADYILSGKLYCGECGCLMKGVCGRSSGNGQMYHYYACPGRSIGRACTRKNIPQDELEAMVVNSVADLLLEPELLEQIADAIVELQQAEAARPDPEKQALEKSLSDVRNKIQNILSAIENGTSSAALSARLADLEQQESTLSYQLSSLTAKKPLTFTRDQILFLLQQFRVSPSERTKAYCRRLVDTFVDHIELTNTELILYFNLSDETVDKNKKAPRSNPSEESSTEKRLVHLAHQQANYSLYAASGYFSLVEHQFSARWWRTA

SEQ ID NO: 2539 - protein, 543 aa, Unknown
  Description of Unknown: Integrase B2540 sequence
  SM00857,G3DSA:1.10.10.2600,IPR036162,PF13408,PS51737, G3DSA:3.40.50.1390,IPR025827,IPR006119,IPR038109,PF07508, IPR011109,SSF53041,PF00239,PTHR30461,PS51736, Coil,cd00338
MVKNRAAIYARFSSHNQRSESIEIQVENSRAYCEREGLQVVREYCDYAQTGRNVNRAEFQRMMNDAKLGLFDFVVIYKVTRIMRNRDEMALARIMLRKAGVEILYAGEEIASGSSGVLQLGMLEVLAEWESAIDSERIRDGIQKNAARCLANGHSLYGWDIVDGRYSVNEREAALMRKMKNMLFSGHSVADIVRALEGEKTRNGKPFNQDKVTKLLRRVQNGGTYSYAGHVVEGGMPGLWPQVEQDMIESVLNDRHRPRRKVDSSKEFPLSGKLYCTKCGMPMAGMSGTSKTGKAYHYYRCRKCRRTVRRDLIEDAVVDMTLQAVARDDVRQRIAQGMALYQSEQEETKPKSYYLKKELRRIDAAFERIWQAIEDGIAPPGGKERTDELKCRKAEIEAQLRIAERDESMSFGVDELMLWLDEIATELTPLDILNKFVRFAEIDGKSNRIRVYFAFDKHGDGFSPNSADKGEHLYEERCSPNSTLVEARRIELRSILNCPQGATGLVSDRASERIGSQTNVAAPSRFRLSSGHTDYVPRGIPLK

SEQ ID NO: 2540 - protein, 543 aa, Unknown
  Description of Unknown: Integrase B2541 sequence
  PTHR30461:SF3,IPR036162,PS51737,IPR011109,PTHR30461, PS00397,PF00239,G3DSA:1.10.10.2600,IPR006119,SSF53041, cd00338,SM00857,IPR025827,IPR038109,PS51736, IPR006118,PF13408,G3DSA:3.40.50.1390,PF07508,Coil
MSVAVYCRVSSEEQAERGTIEIQKEFAAKYVDLYQLEVFDYYCDDGISGTIPVEARPEGSRLFRDAREKKFDTILFYKIDRLGRKVRVILNAVHDLEELGVSIRSMTEPLETETPTGRFMLTSLAGISELERDTILSRMWAGSQRAARLGNWLGGIVPFGYHVVDKQLQISDEIMPGCNLSEADVIQLIFDLSGNQKMSAIKISDYLNALNIPTRYDLNGINGKRKKNASSIWYPSRVLSIIKSTTYKGTHKYGKRATNKNSKIILRPVPAIVSDELWEKANEALKINQITAMRNAVREYLLRGIIKCGNCGRTYMGTAYSGSRREKIPYYVCNAKNSYLAHNTEKCISKNVRADWLEHLVLEDCIKILKSPNKILNMDPEKEQQSLADEVKKEHDQIKASLKKLLEERTSIIELYRKKIISETDLSCQLEKLSTEEATLQERLKMKIDSRKSAATKQNKKKAISLLKKFTDKCQNLDPEKLSFETKRAIIELIVEKITVTTESAPEKYYPEISVDIEYRFATTPNHIAYVEDCTVTGSALCT

SEQ ID NO: 2541 - protein, 543 aa, Unknown
  Description of Unknown: Integrase B2542 sequence
  PTHR30461:SF3,cd00338,SM00857,G3DSA:1.10.10.2600,IPR036162, PF13408,PS51737,G3DSA:3.40.50.1390,IPR025827,IPR006119, IPR038109,PF07508,SSF53041,IPR011109,PTHR30461, PS51736,Coil,PF00239
MYEDIKTACLYVRFSSHNQTEQSIEGQTRVCRDFCKRHNIRIVEIYADRATSASKDIEKRVQFLKMIKDSEKGLFDAVIVYKLDRFARSRYDSATYKYRLKRNGVQLISATENISNDPEGIILESVLEGMAEFYSAELSQKINRGMRESAYKHNSIGGAIPLGYKIEDKKLVIDPKTAPIVKEAFEKYADGETVAEICRQFNARGYKTSKGTAFGKSSFTKIFRNERYIGVYTFHDYRAEDAIPAIIDKDLWDRVQLRVGKIKNAPARNKAKVVYLLSGKIFCGHCGSKMNGNCNAGNYYYYQCYGKKNGNVDCKKKNIRKEFIERLVAQDALSLLTDEYIEQIATIACEKNQHEIELDSALPTIRDRIHQVDLSLNNLLKAIESGSAPDMLVKRMGELEKEKKDLQAQAKKESEDIVELDKAQVIYWLEQFRGGSIEDEEFCRMLIDLFVNSVTVWDEDDNTYKVTVAYNLTSLPTKTYRLNKGGTLSDFTSNAPDWELKCSQFPSCVDFTGFNCIQNCVYCYYLSFFSKIALKHRPHYFHI

SEQ ID NO: 2542 - protein, 543 aa, Unknown
  Description of Unknown: Integrase B2543 sequence
  PTHR30461:SF3,IPR036162,PS51737,IPR011109,PTHR30461, PF00239,G3DSA:1.10.10.2600,IPR006119,SSF53041,cd00338, SM00857,IPR025827,IPR038109,PS51736,mobidb-lite, PF13408,G3DSA:3.40.50.1390,PF07508,Coil
MAKKKKPAGGNAIIYARYSSHNQRDVSIEQQIEACRKHAAELGLTITDAYEDRAISGRTDNRPAFQRMMRDAEDGKFQYVLAWKSNRMGRNMMQAMVNESRLMDCGVKVFYAEEDFDDSAAGRFALRSMMNVNQFYSDNLAEDVRRGLMDNASKCMANGRQPLGYKRGEGGKVVVDEPAAAIVREIYTRIASGEMFMDIARDLNRRGIKTQSGSEWNKSSFKVLCRNERYRGIYIYGDTRIEGGIPPIVDDVLWYKVQEVLKVKKSKNRHHCPSDEDYLLTGKLRCGKCGGYMIGMSGRSKTGDVHHYYACQNRRVGHTCDKKNIRRDVVEPAVAQAIKQYCLTDDAIEWITDQTIAYWEDEDRKLQIDSIENDLSAVQSSISNVMKAIEMGVITETTRDRLIELERQQTDLKSKLALAKEEIVHVDRKDLISSLLAFRHGNVHDRAYQEKLFNAFLIAVYVYDDDHLKLVFNSFGKDDTVNIALDLGENDDNSGLSDVSKSSPILSNGQPEQSHLRKLRWLFCLYHSELQPQGRDSSKLEES

SEQ ID NO: 2543 - protein, 543 aa, Unknown
  Description of Unknown: Integrase B2544 sequence
  PTHR30461:SF3,cd00338,SM00857,G3DSA:1.10.10.2600,IPR036162, PF13408,IPR025827,G3DSA:3.40.50.1390,PS51737,IPR006119, IPR038109,PF07508,SSF53041,IPR011109,PTHR30461, PS51736,Coil,PF00239
MARKKNIAAGQNAVIYARYSSHNQREVSIEQQVRECMKHAAELGLHVVGTYEDRAISGKTDKRPNFQRMMRDAEKGKFQAVVAWKSNRIGRNMLQAMVNEAKLEDCGVKVFYAEEDFDDTAAGRFALRNMMNVNQFYSENMAEDITRGLYDNASKCMANGRQPLGYKRGEDGRVVLDDANAAVVREIFPRVAAGDLFVDIARDLNAQGIKTSKGANWNKGSFQSICQNERYRGIYIYGDVRVVDGIPRIVSDDLWYRVQEAMRMKKNPVGTRHRVGAEDYLLTGKLRCGHCGSYMTGVSGTSRNGELHYYYTCQKRRTEHACDKKNIRRDVIEPAVAQAIKMYCLTDDVIEWMADRTVEYWEKHDNDLQIEALEQQLEENKKATSNMLKAIEMGIITEATRTRMVELETEQSRLSVQLNTAKEDVVKIDREQIISYLELLQQGDIHDRDFQMELFKNFLVAVYVYDDNRMKLVFSCMGDQNSVEISLETGEDPPDGGLSPDAKMFVLTPDSSTNQEQNEHRTTIQMVGNVFVLFCEIPNVTLT

SEQ ID NO: 2544 - protein, 543 aa, Unknown
  Description of Unknown: Integrase B2545 sequence
  PTHR30461:SF3,cd00338,SM00857,G3DSA:1.10.10.2600,IPR036162, PF13408,IPR025827,PS51737,G3DSA:3.40.50.1390,IPR006119, IPR038109,PF07508,SSF53041,IPR011109,PTHR30461, PS51736,Coil,PF00239
MAKKKKPAGGIAVIYARYSSHNQRDVSIEQQIKACRKHAAELGLTIIATYEDRAISGRTDNRPAFQRLMHDAEKGKFSYVLAWKSNRMGRNMMQAMVNESRLMDCGIKVYYAEEDFDDSAAGRFALRSMMNVNQFYSDNLAEDVRRGLMDNANKCMVNGRQPLGYKRGKDGKVVVDEPAAAIVREVYARVASGELFTDIARDLNRRGIKTADKGEWNKNSFHRLCSNEKYRGIYIYGDVRIEGGIPTIIDDTLWYKVQEALRVKKLKRNGRHRPGDEDYLLTGKLRCGKCGGYMIGMSGRSKTGDIHYYYACQNRRVGRTCDKKNIRRDVIEPAVAQAIKEYCLTDDAIEWIADKTVEYWEKADRNLQLDSIEGDLAAVQSSISNVMKAIEMGVVTETTRDRLIELEKQRTDLKSKLALAKEEVVHVDRKKLISSLLLFRNGDIHDRQYQEDLFKTFLISVYVYDDDDNGHLKIVFNAFGDNNTVDLPIDFGETDNQSAFSDGAEKFDYSLHRSTKRELGEHSTIEMVGSVFVLFCSLPKIRK

SEQ ID NO: 2545 - protein, 543 aa, Unknown
  Description of Unknown: Integrase B2546 sequence
  PTHR30461:SF3,SM00857,G3DSA:1.10.10.2600,IPR036162,PF13408, PS51737,G3DSA:3.40.50.1390,IPR025827,IPR006119,IPR038109, PF07508,IPR011109,SSF53041,PF00239,PTHR30461, PS51736,Coil,cd00338
MEVTKIPKKIVTVIEPKRSMAVDKEKYRQKRVAAYCRVSTDSEEQLVSYANQKKVYTEMIGSRKDWCFAGLFADEGKSGTRADKRPEFNKMINACLAGKIDYIITKSVSRFARNTVDCLDYVRMLKSKGIGVYFEEQQIDTLKTDSELYLVIYAGFAQSESESISKNIIWTVRNKFEEGIPVFMYKRFLGYRKGADGQPEIVPSEAAIVERIFNLYLAGETVDNISKMMQAEHYQIPGKNISFSKGMIMSMLANERYCGDAILQKSVTVDCIEKKRKKNTGEAPMYYVQNSHPAIIDRVTFNKVQEELARRRAKSPASTKAAITSTGKYSRYALTDVLICGECGTRYRRVTWSRNGVKRIVWRCISRLDYGKKYCKDSPTVFEDKLKEAIVRAVNKFNDQDNATYKALMRATIGEALGLNADPEEVDMLERKIEALNSKMLALVNESVASGEGIEAHESEFMSLSQEAELLKQRIATIQESAAADSDEQDRLEQIQAIIAEREHNRTEYDDAIVRQMIECIKVYPGGKLEIIFGGGYLVEEAV

SEQ ID NO: 2546 - protein, 543 aa, Unknown
  Description of Unknown: Integrase B2547 sequence
  PTHR30461:SF3,SM00857,G3DSA:1.10.10.2600,IPR036162,PF13408, PS51737,G3DSA:3.40.50.1390,IPR025827,IPR006119,IPR038109, PF07508,IPR011109,SSF53041,PTHR30461,PS51736, cd00338,PF00239
MKKLKVAAYARVSTDKDDQINSLENQKQYFQSYILNHEDWDFVDVYFDEGISGTQTKKRLGFNKMIDDAENGDIDLIITKEVSRFARNTVDTLFYTRRLKDSGIGVIFTLDNIDTRQSDGEFRLTIMASIAQEESRKTSERVKWGQKRQMEKGVVFGRDLLGYTVKSGVLYINEEEVPVVRAIFHKYTNEGKGTHTIARELLEEGMKPKRISLWSNTIILKVLRNEKYVGDLLQKKTYTPNYLTHSKKYNHGQEEMIYLKDHHEAIIDRDLWNRTQEELRHRSPSAQQKAKHSNRYWCSGKIYCAECGSLFVGRTKRWKDGKQYKSWKCNASVNYMRSKQDEYGNPIKCHNNSINQKTLNFCMNYCISLMQTKQDSLKKEIITEISKVKEQSSYESKTKHIEEKIKQVETKKRRLIDLALDNLISGQDLKTQTAWYNEEIESLHLQLNESLAEDKKQQVQIKNMESYVNELDRIMSIDSIDSELIYKEIVDHIDVHNDKILDIWLKPLPFGIQLKVKTTGRRDNYMTEILEYSYIKSEIKGTI

SEQ ID NO: 2547 - protein, 543 aa, Unknown
  Description of Unknown: Integrase B2548 sequence
  PTHR30461:SF3,SM00857,G3DSA:1.10.10.2600,IPR036162,PF13408, PS51737,G3DSA:3.40.50.1390,IPR025827,IPR006119,IPR038109, PF07508,IPR011109,SSF53041,PTHR30461,Coil, PS51736,cd00338,PF00239
MKRVICLYRVSTKGQVDKDDIPMQRIECRKFIETQGWKLVGEYAEKGVSGFKVSAEKRDAIMSIRKEAERGAFDVLLVFMFDRLGRRDDETPFLVEWFISKGIEVWSTREGQQKMESRADKLINYIRYWQAGGESEKTSERVRTKHRQMVEAGLWRGGARPFGYKLIHTGRIGKKNRQLFDLAIDEKESVIIRDIFDGYIRRGMGMHRLANYLNSHYPSPDKIWAPQSIKTILTNPIYIGISRCGDVRSPVNEALRIVSDEDFQFARHVMDMRVTRKTQTCGDIDEDNLDEAKRTKTSIYGASLLSGLLYCAHCGHKLVGTYHTKQRANGAYYYRPVYRCYNGATKAKGCDGQRTYSAARIEKAVLEIVHQYFSHFGESMDAVWKEQQRLQIKQGSGARLKQAELSLSRLQAQHKKLREELVKVLMGESVFDEETIKSMLDEKQDAIEKAEAYLKEIRASAEDTEQKLQQLIFQYRSIKNWSSVFDQANDDEKKMILARIIEKITVDKNYNISIYFFLTLEDFRKEVEDNAEKIEILEASQCI

SEQ ID NO: 2548 - protein, 543 aa, Unknown
  Description of Unknown: Integrase B2549 sequence
  SM00857,G3DSA:1.10.10.2600,IPR036162,PF13408,IPR025827, G3DSA:3.40.50.1390,PS51737,IPR006119,IPR038109,PF07508, IPR011109,SSF53041,PTHR30461,Coil,PS51736, cd00338,PF00239
MSKHKLAVVYARYSSHRQGEQSIEGQLAAARDYATANGLTIIREYVDRAATGRNDNRTAFQEMLKDTSKNQFGTIILWKIDRFGRNREEIAFNKYRCKKNGVKVVYVAESIPDSPEGVILESVLEGMAEYYSLQLSQNILRGQRASAEKCQSTGGNRPLGYLTGADKKFIIDPDTAPTVRLIFDMYAKGNTCTEITKFLNEKGLRTLRGGKFNKNSLRSILKNEKYIGVYKYKNEIRIENGVPAIVDKDTFYKVQDMLKINKRAPAHKWSKSDYILTDKIFCGKCGSKMVGESGTSKTGKKHNYYVCTKKKRQQTCNKKAVKQRYIEDLVISHVHMILQDDELLSFIADSVYAYYIEQNKENNYLESLNKKLSQVNQAISNVMKAIESGIINDITKQRLDELDTQRTEISTEIADLEHAKSLQLTRDQILFFLCCFRNEDIEDRECCKRLIDTFVNAIFVYDDKIIGTFNYSGDKNTVTLAEINDAETLGKVFVHCAQCSTTRLSLDASRIPDSFFCLFTRVCSGYFLQHKSTTKKFEFVSDW

SEQ ID NO: 2549 - protein, 543 aa, Unknown
  Description of Unknown: Integrase B2550 sequence
  PTHR30461:SF3,SM00857,G3DSA:1.10.10.2600,IPR036162,PF13408, IPR025827,G3DSA:3.40.50.1390,PS51737,IPR006119,IPR038109, PF07508,IPR011109,SSF53041,PTHR30461,PS51736, cd00338,PF00239
MMKFPIDLSMLTEEEIDQFREDPSTLFEGDTDVSLYLRFSSERQREQSIEGQLRDCRAFCKMNRYRIVAIYVDRATTARKDVEKRTHFQEMIRDSDKQPWEAVVVWKLDRFARNRTDSALFKFRLRKNGVRVISATEAISEKPEGIILEAVLEGMAEFYSADLSQKITRGMRESALKCHSIGGHVPLGYKIENHKLVIDPNTAHIVQEAFQLYANGETVADICRLFNFKGYRTAKGVEFNRNSFKSMFRNKRYIGIYTYKDIEIEGGVPAIIDKELFETVHHRLSVNAEAPARGKAKVDYLLAGKLFCGHCGGSMNGESGTSKTGAIHNYYTCYTRKRQHSCDKKPLKKDWIEYIVAQDAMALMTDEVIEELADMAMAQTEQDLKENTRIPELSDRLKEIESSISNITRAIEKGIASDTLMERLVELEKDKKKVLRLLADEEKYICRIDREQIIFWLNKFKGGSIKDEGFRRVMIDLIVNSVTVWDEPDGFRITTAYNLTSCKNKTYRVSPSSGKEFGFEGPESTIKITTPKGVVIFMDALRN

SEQ ID NO: 2550 - protein, 543 aa, Unknown
  Description of Unknown: Integrase B2551 sequence
  PTHR30461:SF3,SM00857,G3DSA:1.10.10.2600,IPR036162,PF13408, IPR025827,G3DSA:3.40.50.1390,PS51737,IPR006119,IPR038109, PF07508,IPR011109,SSF53041,PF00239,PTHR30461, PS51736,Coil,cd00338
MKNERTMLPAVAYYRYSPGGGQTEQSIEGQRRDCLAYARSHGYVIVKEYIDRHMTGRNDKRPNFQLMMHDAELHRFDTLIAWKNDRISRNRRDALNYKDQLRRCGVQIRYAEMDIPRGPEGILMESVMDGLAEYYSAELAQKIRRGMTESAHKCYALGSTPPFGLMVQDHKYVPDPATAPYVRWIFEQYASGTLITEICSTLNAKGVRTARGHEFSKNSLRVLLRNEKYIGVYEAKGIRTEDAIPPIIPRDLFYAVQQRIPQNAHSSHKLSGPRSFPLSGIAYCAICGAPLIGTCGTGKSGAVHTYYACTAHKHKRTCAKKNIRQASLEKQVYTATLDYVLQPSVIRPIAKQVEALSAADNANQEEMLAVQSQLKDTTRRINNILTAMEEGDFSKAVSARLSVLESEQTRLEGQLAALRRAKPKVMASRVEFMLEKMRQTLTDLTSDQLTALTKIFLSRVDLSDDELILTYTLIGTPSSPHPITLKDTPSATLVPFPLSSQDVLSAPPYCANPNSIFFVKHCFGFVFVLEDVDQSTSSFFGAS

SEQ ID NO: 2551 - protein, 543 aa, Unknown
  Description of Unknown: Integrase B2552 sequence
  PTHR30461:SF3,IPR036162,PS51737,IPR011109,PTHR30461, PS00397,PF00239,G3DSA:1.10.10.2600,IPR006119,SSF53041, cd00338,SM00857,IPR025827,IPR038109,PS51736, IPR006118,PF13408,G3DSA:3.40.50.1390,PF07508,Coil
MPVAVYCRVSSEEQAERGTIEIQKEFAAKYVDLYQLEVFDYYCDDGISGTIPVEARPEGSRLFRDAREKKFDTILFYKIDRLGRKVRVILNAVHDLEELGVSIRSMTEPLETETPTGRFMLTSLAGISELERDTILSRMWAGSQRAARLGNWLGGIVPFGYHVVDKQLRISDDIMPGCNLSEADVIQLIFDLSGNQKMSAIKISDYLNALNIPTRYDLNGINGKRKKNASSIWYPSRILSIIKSTTYKGTHKYGKRATNKNSKIILRPVPAIVSNELWEKANEALKINQITAMRNAVREYLLRGIIKCGNCGRTYMGTAYSGSGRKKIPYYVCNAKNSYLAHNTEKCISKNVRADWLEHLVLEDCIKILKSPNKILNMDSEKEQESPTNEVKKEHDQIKASLKKLSEERASIIELYRKKIISETDLSCQLEKLSTEEATLQERLKMKIDSKKSAATKQNKEKTISLLKEFADRCQNLDPEKLSFETRRAIIELIVEKITVTTESAPEKYYPEISVDIEYRFATTPNHIAYVEDCTVTGSALCT

SEQ ID NO: 2552 - protein, 543 aa, Unknown
  Description of Unknown: Integrase B2553 sequence
  PTHR30461:SF3,IPR036162,PS51737,IPR011109,PTHR30461, PS00397,PF00239,G3DSA:1.10.10.2600,IPR006119,SSF53041, cd00338,SM00857,IPR025827,IPR038109,PS51736, IPR006118,PF13408,G3DSA:3.40.50.1390,PF07508,Coil
MPVAVYCRVSSEEQAERGTIEIQKEFAAKYVDLYQLEVFDYYCDDGISGTIPVEARPEGSRLFRDAREKKFDTILFYKIDRLGRKVRVILNAVHDLEELGVSIRSMTEPLETETPTGRFMLTSLAGISELERDTILSRMWAGSQRAARLGNWLGGIVPFGYHVVDKQLQISDDIMPGCNLSEADVIQLIFDLSGNQKMSAIKISDYLNALNIPTRYDLNGINGKRKKNASSIWYPSRVLSIIKSTTYKGTHKYGKRATNKNSKIILRPVPAIVSDELWEKANEALKTNQITAMRNAVREYLLRGIIKCGNCGRTYMGTAYSGSGREKIPYYVCNAKNSYLAHNTEKCISKNVRADWLEHLVLEDCIKILKSPNKILNMDPEKEQQLLADEVKKEHDQIKASLKKLSEERASIIELYRKKIISETDLSCQLEKLSTEEATLQERLKMKIDSRKSAATKQNKEKAISLLKKFTDKCQNLDPEKLSFETKRAIIELIVEKITVTTESAPEKYYPEISVDIEYRFATTPNHIAYVEDCTVTGSALCT

SEQ ID NO: 2553 - protein, 543 aa, Unknown
  Description of Unknown: Integrase B2554 sequence
  PTHR30461:SF3,cd00338,SM00857,G3DSA:1.10.10.2600,IPR036162, PF13408,IPR025827,G3DSA:3.40.50.1390,PS51737,IPR006119, IPR038109,PF07508,SSF53041,IPR011109,PTHR30461, PS51736,Coil,PF00239
MARSKKTECLPLERIGVIYARYSSHNQKEESIEQQVEECTSFALLNGIKIVHVYADKALSGRTDKRPQFQRLMRDAEKRSFSVVVAYKSNRIARDMLNALKYEDRLGKYGIETLYAKEEFGNTAAGRFALRTMMNVNQFYSENMAEDIKRGMLDNAENCKVNGALPLGYVSGPDKRYAIEPKEAEIVRGIYDRVLEGVSFADIANDLNACGVRTKHGSLWNKCSFHRILTNDVYIGVYRHSGVVKEGGVPPILEREVFIAMQKYLETKKNPRGRHRENGDYLLTGKLRCGYCESFMVGVSGTSKTGDKHYYYTCNSRHAGSGCKKENVRRDTIEYTVAALTQQVVFKEDIIEWIATAAVKLAKEASGQNEIDAMEAELAEDRKATKNIMAAIEQGIFTATTKSRLLELEADIASLEQSIRDAKAISEGKLLEKERVVYFLTSLREGNLHSKTYQKRLIDTFVRAVYLWDDRIGIDYYYAGKDSMVKYSLSEIEADIGENIREVLKDSLTGHHTRVIRTQDGQEITIVLTVNGFVLLSPLSVCG

SEQ ID NO: 2554 - protein, 543 aa, Unknown
  Description of Unknown: Integrase B2555 sequence
  PTHR30461:SF3,IPR036162,PS51737,IPR011109,PTHR30461, PF00239,G3DSA:1.10.10.2600,IPR006119,PF14287,SSF53041, IPR025378,SM00857,IPR025827,cd03770,IPR038109, PS51736,PF13408,G3DSA:3.40.50.1390,PF07508,Coil
MAGQPKYNTALYLRLSKDDGTMSESSSIQTQKEMLTRYCRENGFAISQIYIDDGWSGTNTNRPSFQRMLSDIEDGKINCVVTKDLSRLGRNYLETGSFTEIYFPEHNVRYIAVTDGVDTAKGSTMDITPFKNLLNDMYAQDISKKIKSSLLTRQKQGKFIGTKAPYGYVKDPADKNHLLIDKRFAPTVRYIFKLAKDGIGITQIARQLRSEKVPRPVAAAAEELECYDRYLTTEESIYKWSMGSVREILRNPVYKGAVRGQKRPKISLKSEKRKPVQSAGTFVVEGMHEPIIDPEEWELVQRLITSRKKTRKVEKKYDNIFSGLVKCADCGFAMTFTKAHRNWNSENIYANYDYQCNNYRMEGKSVCTHHRITALNLYNAVLADIKRLACEALGDDKQMISAIAARLGKSEKENVRQAERELKRANKRLSELDRLFAKLYEEHVNGKVNERNYNSLSATYEAEQNELESRIAELNAAIKTERENDENAVNFVDLIKQYADIDELTQALLNTLIDRIEVHEPEDLDGELIQKLDVYYKFVGRLD

SEQ ID NO: 2555 - protein, 543 aa, Unknown
  Description of Unknown: Integrase B2556 sequence
  PTHR30461:SF3,IPR036162,PS51737,IPR011109,PTHR30461, PS00397,PF00239,G3DSA:1.10.10.2600,IPR006119,SSF53041, cd00338,SM00857,IPR025827,IPR038109,PS51736, IPR006118,PF13408,G3DSA:3.40.50.1390,PF07508,Coil
MSVAVYCRVSSEEQAERGTIEIQKEFAAKYVDLYQLEVFDYYCDDGISGTIPVEARPEGSRLFRDAREKKFDTILFYKIDRLGRKVRVILNAVHDLEELGVSIRSMTEPLETETPTGRFMLTSLAGISELERDTILSRMWAGSQRAARLGNWLGGIVPFGYHVVDKQLQISDEIMPGCNLSEADVIQLIFDLSGNQKMSAIKISDYLNALNIPTRYDLNGINGKRKKNASSIWYPSRVLSIIKSTTYKGTHKYGKRATNKNSKIILRPVPAIVSDELWEKANEALKINQITAMRNAVREYLLRGIIKCGNCGRTYMGTAYSGSRREKIPYYVCNAKNSYLAHNTEKCISKNVRADWLEHLVLEDCIKILKSPNKILNMDPEKEQQSLADEVKKEHDQIKASLKKLLEERTSIIELYRKKIISETDLSCQLEKLSTEEATLQERLKMKIDSRKSAATKQNKEKAISLLKKFTDKCQNLDPEKLSFETKRAIIELIVEKITVTTESAPEKYYPEISVDIEYRFATTPNHIAYVEDCTVTDSALCT

SEQ ID NO: 2556 - protein, 543 aa, Unknown
  Description of Unknown: Integrase B2557 sequence
  PTHR30461:SF3,cd00338,SM00857,G3DSA:1.10.10.2600,IPR036162, PF13408,PS51737,IPR025827,G3DSA:3.40.50.1390,IPR006119, IPR038109,PF07508,IPR011109,SSF53041,PTHR30461, Coil,PF00239
MYEEIKTACLYLRYSSSNQTEQSIEGQMHVCQDFCKRHNIRIVEMYIDRATSASKDIEKRVEFLKMIKDSEKGNFNAVIVYKLDRFARSRYDSATYKYRLKRNGVQLISATENITQDPEGIILESVLEGMAEFYSAELSQKINRGMRESAMKHNSIGGAIPLGYKTVDKKLVIDETTAPIVREAFQMYADGESVAEICRTFNNRGYKTSKGTRFGKSSFTKIFRNEKYIGVYKYHDYRAEDVIPPIIDKDLWDRVQVRVGKIKKAPARNKARHTYLLTGKLFCGHCGSAMNADGNSQGYLYYRCYGKKNLDKQCNKRNMEKNLIERLVAQDAMSFLTDEYIEKIATIACDRNKQEIESDSPIPVIRDRIRQVDVSLNNLLKAIETGSAPDMLVKRMGELETEKKDMEVQLKKEMAHQVYIDKEQVIFWLEKFREGDINDEEFCQTVIDLFVNSVTVWDEPDDKFKITIAYNLTSIPQKTYRLSKDGRLSDYASNTPDWKLKCSQFPSCVDFTGFNCIQNCVYCYYLSFFSKIALKHRPHYFHI

SEQ ID NO: 2557 - protein, 543 aa, Unknown
  Description of Unknown: Integrase B2558 sequence
  PTHR30461:SF3,cd00338,SM00857,G3DSA:1.10.10.2600,IPR036162, PF13408,PS51737,G3DSA:3.40.50.1390,IPR025827,IPR006119, IPR038109,PF07508,SSF53041,IPR011109,PTHR30461, PS51736,Coil,PF00239
MYEDIKTACLYVRFSSHNQTEQSIEGQTRVCRDFCKRHNIRIVEIYADRATSASKDIEKRVQFLKMIKDSEKGLFDAVIVYKLDRFARSRYDSATYKYRLKRNGVQLISATENISNDPEGIILESVLEGMAEFYSAELSQKINRGMRESAYKHNSIGGAIPLGYKIEDKKLVIDPKTAPIVKEAFEKYADGETVAEICRQFNARGYKTSKGTAFGKSSFTKIFRNERYIGVYTFHDYRAEDAIPAIIDKDLWDRVQLRVGKIKNAPARNKAKVVYLLSGKIFCGHCGSKMNGNCNAGNYYYYQCYGKKNGNVDCKKKNIRKEFIERLVAQDALSLLTDEYIEQIATIACEKNQHEIELDSALPTIRDRIHQVDLSLNNLLKAIESGSAPDMLVKRMGELEKEKKDLQVQAKKESEDIIELDKVQVIYWLEQFRGGNIEDEEFCRMLIDLFVNSVTVWDEDDNTYKVTVAYNLTSLPTKTYRLNKGGTLSDFASNAPDWELKCSQFPSCVDFTGFNCIQNCVYCYYLSFFSKIALKHRPHYFHI

SEQ ID NO: 2558 - protein, 542 aa, Unknown
  Description of Unknown: Integrase B2559 sequence
  PTHR30461:SF3,SM00857,G3DSA:1.10.10.2600,IPR036162,PF13408, IPR025827,PS51737,G3DSA:3.40.50.1390,IPR006119,IPR038109, PF07508,IPR011109,SSF53041,PTHR30461,Coil, PS51736,cd00338,PF00239
MKITAPARSARAVSLEAFVDNLNLANVVIYARYSSAGQNDQSIDGQLAKCREYAQQRGYRVVGEYCDRALSGRYAETRPEFQRMISDSAKHAFDFVLVWKLDRFSRDRYDSAIYKKKLRANGVRVLSVTEGVGDSSESVLLEAILEAMAEEYSRQLAQNVRRGMRQNAEKGLSLGGLAPLGYRVVNKQYEINEDEARIVRFIHEQYADGAGQKQIVADCARLGYRNQRGNPLTLASVKRILANERYVGRYDYLGEIVIEDAFPAIVSKDLKKRVRDRLKANSKAPGHAKAKVEYLLHGKLFCGECGAPMIGECGRGRHGATYYYYTCAARKKQHTCKKRNERKDELEACIVDYIGSCVLTDSWIDGAAERVVAEYQKSYDASGIKPLEKQIRDADKEIDQLVDALISATAEAARRRINERIETAEARKQALEADLASLRIASRVQIKKEDIVVWLSQFRTGDRSDLEYRKKVIDLFVNAIYLYDDSFKLFLNVADSAQVTYADALALAPPSVSDFGASGVPDMHLSEHIIFINGVIGMIVQR

SEQ ID NO: 2559 - protein, 542 aa, Unknown
  Description of Unknown: Integrase B2560 sequence
  PTHR30461:SF3,SM00857,G3DSA:1.10.10.2600,IPR036162,PF13408, PS51737,G3DSA:3.40.50.1390,IPR025827,IPR006119,IPR038109, PF07508,IPR011109,SSF53041,PTHR30461,Coil, PS51736,cd00338,PF00239
MRLTHGAYILARFSTDNQEVDSIDVQVQKCREWCAREHLSVLDVFADEATSGMKNTRPEYSRMMRQLAEGGADTVVIYDQSRMFRKLTAWFQFREQMACYGVRVVAVTQPIIGGDLRDPMTFLSEGSMALMNQMWVLQTRQKVIEKMRYMAEQGKHTGGKPPLGYDVNDERLVINEDEADTVREIFRQYADGKSYREIIKWLNDSGKRTKRGGCFGTNSLHDLLKNEKYIGNIVYGRSERRPDGTRNSHSFSIRTMRMENAVPPIINRETWERVQKKMEDNRRVQAGRPPKAREYPLKGKVFCRECKSAMTIVSSKKTYYYYACSGKKRTGQCDNPQIGAGELENIVADAIREILGNPGNIENIISIIREEKNEIINVATQRMQILLARRMEINRQLEAGTNAILAGLHSQTLKTKMQELEEELAEIDQQMTTLKHSADGTQIPEYRLRALLNAAGDDVNALLSLVMRVEVGKDKIVVWTLLDADPNGHFDFSEDGINIDLQPVDRGDENSGCPLTGTTNFHNFSIVGGLLRFSIPRKKRWG

SEQ ID NO: 2560 - protein, 542 aa, Unknown
  Description of Unknown: Integrase B2561 sequence
  PTHR30461:SF3,SM00857,G3DSA:1.10.10.2600,IPR036162,PF13408, IPR025827,G3DSA:3.40.50.1390,PS51737,IPR006119,IPR038109, PF07508,SSF53041,IPR011109,PTHR30461,Coil, PS51736,cd00338,PF00239
MKITAPARSAGAVSLEAFVDNLNLSNVVIYARYSSAGQNDQSIDGQLAKCREYAQHRGYRVVGEYCDRALSGRYAETRPEFQRMISDSAKHAFDFVLVWKLDRFSRDRYDSAIYKKKLRANGVRVLSVTEGVGDSSESVLLEAILEAMAEEYSRQLAQNVRRGMRQNAEKGLSLGGLPPLGYRVVNKQYEINEDEARIVRFIHEQYADGAGQKQIVADCARLGYRNQRGNPLTLAAVKRILANDRYIGRYDYLGEIVIEDAFPAIVSKELKKRVRDRLNANAKAPGHAKAKVEYLLHGKLFCGECGAPMIGECGRGRHGATYYYYTCAARKKQHTCKKRNERKDELEACIVDYIGSCVLTDSWIDGAAERVVAEYQKSYDASGIKPLEKQIRDADKEIDQLVDALISATAEAARRRINERIETAEARKQALEADLASLRIASRVQIKKEDIVVWLNQFRTGDRSDLEYRKKVIDLFVNSIYLYDDTFKLFLNVTDSTQITYSDSLALAPPSVSDFGASGVPDMHLSEHIIFVNGVIGMIVQR

SEQ ID NO: 2561 - protein, 542 aa, Unknown
  Description of Unknown: Integrase B2562 sequence
  PTHR30461:SF3,cd00338,SM00857,G3DSA:1.10.10.2600,IPR036162, PF13408,IPR025827,G3DSA:3.40.50.1390,PS51737,IPR006119, IPR038109,PF07508,IPR011109,SSF53041,PTHR30461, PS51736,Coil,PF00239
MKKKQPNARHGRAAIYARYSSHNQREASIEQQVKACRELAVRLGLDVVETYEDKAISGKSDRRPSFQRLLRDAEKGYFDCVLAWKSNRMGRNMLQAMTNEARLKDWGVRTFYAEEDFDDTAAGRFALRNMMNVNQFYSENMAEDITRGMMDNASKCLSNGALPLGYKAGENGRIVLDKAQAAVVQEIYTRVACREPFVDIAADLNRRGIKTKRGGPWTKSSFYTICRNERYRGIYIYDDVRVEGGVPRIVSDGLFYRVQEVLKVKKTPQSARHHTGAEDYLLTGKLFCGKCGRPMTGVSGTSRSGEMHYYYTCQKRRREHACDKKNVIREQIEKSVAQAIKQYMLTDEMIQHMADATMAYNARQEKDLHLQDLQGQLAAVKTSAANLLKAIEMGVITETTKARMVELEQEQGRLNAQIENARAELVPITRDNFVSLLHIYRDGDINDSKYLASLFETFLVRVDLYDDHFLIWFNPLGQKTPADIPITSIENGDVDEFFDECRSKNVFDWGGKWSTIVRTSEPLIAIVVSCSVFVFSVKMPEA

SEQ ID NO: 2562 - protein, 542 aa, Unknown
  Description of Unknown: Integrase B2563 sequence
  PTHR30461:SF3,SM00857,G3DSA:1.10.10.2600,IPR036162,PF13408, PS51737,G3DSA:3.40.50.1390,IPR025827,IPR006119,IPR038109, PF07508,IPR011109,SSF53041,PTHR30461,Coil, PS51736,cd00338,PF00239
MRLTHGAYILARFSTDNQEVDSIDVQVQKCREWCAREHLPVLDVFADEATSGMKNTRPEYARMMRQLAEGGADTVVIYDQSRMFRKLTAWFQFREQMACYGVRVVAVTQPIIGGDLRDPMTFLSEGSMALMNQMWVLQTRQKVIEKMRYMAEQGKHTGGKPPLGYDVEDERLVINEDEAETVREIFRQYAAGKSYREIIKWMNDSGKRTKRGGCFGTNSLHDLLKNEKYIGNIVYGRSERRPDGTRNSHSFSIRTMRIENAVPAIIDRETWERVQKKMEDNRRVQAGRPPKAREYPLKGRVFCRECKSAMTIVSSKKTYYYYACSGKKRTGQCDNPQIGAGELENIVADAIREILGNPGNIENIISIIREEKNEIINVATQRMQILLSRRMEINRQLEAGTNAILAGLHSQTLKTKMQELEEELAEIDQQMTTLKHSADGTQIPEDRLRTLLNAAGDDVNALLSLVMRVEVGKDRIVVWTLLDADPNGHFDFSEDGINIDLQPTDRGDENSGCPLTGTMNFHNFFIAGGLLKFSIPRKKRRG

SEQ ID NO: 2563 - protein, 542 aa, Unknown
  Description of Unknown: Integrase B2564 sequence
  PTHR30461:SF3,cd00338,SM00857,G3DSA:1.10.10.2600,IPR036162, PF13408,IPR025827,PS51737,G3DSA:3.40.50.1390,IPR006119, IPR038109,PF07508,IPR011109,SSF53041,PTHR30461, PS51736,Coil,PF00239
MRLKQQEPRRCDTGGALEYYCRRAKNKNMRAVIYARYSCDRQTEQSIEGQLHECKAFAESEGIAIVGEYIDRALSGTTDKRPEFQRMVSDSRSHAFDAVIVYKLDRFARNRYDSAVYKSKLKANGVKVLSAKERITDSPEGIILEGLLESMNEYYSAELAQKVKRGMRENILKGMTTGGVVALGYRVGADKRMEVDPGGAALVRRIFEMYDKGHTYAEICDQINAEGYVTQRRKRYRGNTISRILANERYTGVRHYDGVELEYPKIIEPELFARVQKRLEVSKTKHKRRKKAEQHEYLLTGKAVCGECGKNLHGRCGSGRSGRYYYYCCPDKHLGWIPAEELERAVFDAISKYITPEMCDEIAKRTYAMYLQSTGNHDELTAAQKQLQDVSKKLDNAVNAILSGVASDTLKAAMQQLEEQKASLEATIKRLQTESPKLELAHFEYFARRILTMQEEGAEKIVELLINQVIVYKDRITVLVNLTNNSNKPPLEQVTKILADGSHSVPLPPPVSKYRPRHCALDGIFLGKNPPKSCNFFGFMLQ

SEQ ID NO: 2564 - protein, 542 aa, Unknown
  Description of Unknown: Integrase B2565 sequence
  PTHR30461:SF3,SM00857,G3DSA:1.10.10.2600,IPR036162,PF13408, IPR025827,PS51737,G3DSA:3.40.50.1390,IPR006119,IPR038109, PF07508,IPR011109,SSF53041,PF00239,PTHR30461, PS51736,Coil,cd00338
MKKFPIDLSCLTEEEISQFQEDPSTLYNGDQNVAIYLRYSSTGQSDQSIEGQLRDCRTFCKANHYRIVAIYVDRATTARKDVEKRVHLMEMISDSAKQNWEYVIVWKLDRFARNRNDSAIMKMRLRKNGVKVLSATEHLTDSPESIILESVLEGMAEFFSAELSQKVTRGMRESALKCHSVGGHIPLGYKVENHKLAVDPDTAHIVQEAFSLYANGESVAAICRKFNSAGYKTAKNTEFNRSSFKAMFRNTRYIGTYTYKDIVIENGIPAIIDKELFETVQRRLSKTATAPARGKAKVDYLLSGKLFCGHCGASMNGESGAGRHGKVYHYYSCYTKKRKLGCDKRPLKKDYIEGIVARDALNLLTDQLIDEIADMAIRQSEQDLINDTHIPQLTAQLSEVEKSITNITAAIEKGIASETLMNRLVQLEHEKKTLNKEIKAEEKFVYRIDRDQIVFWLSQFKYGNIEDEDFRRRLIDLLVNSVTVWDEPDGYKITTAYNLTSCKTKTFRVEKNPAAEEATGFDFGESECTKKPHQFGYFKRNA

SEQ ID NO: 2565 - protein, 542 aa, Unknown
  Description of Unknown: Integrase B2566 sequence
  SM00857,G3DSA:1.10.10.2600,IPR036162,PF13408,PS51737, G3DSA:3.40.50.1390,IPR025827,IPR006119,IPR038109,PF07508, IPR011109,SSF53041,PTHR30461,PS51736,cd00338, PF00239
MAKPVRVIPAKPKAELERELKKGRLRVAAYCRVSTDDEEQLTSYQNQIEYYTEKINANPDWEMVGVYADEGISGTSTKHRDEFNKLMALCRRGRVDLILTKSVSRFARNTVDCLKYVRLLKEKGIGILFEKENINTLELSGELMLTFYGDFAQAESESISTNVAIGQRMAMKAGKVVFQYKWLYGYKRGENNMPEIVPEEAVIVRRIYDNMLSGYSAKRIADSLNNDHVPPPNFSEKWSSIIIQRILKNEIYAGDSLRQKTYVADCISKTVKKNTGELPQYYIMDNHSAIVPRDIYNRVQEEFARRNSRISPSTKSPTVNKGRFSSKYALTELLRCGACGAAYRRVTWPAKEKGGEKRIVWRCISRLEHGKKICKTAPTIPEPALHAALMEAIQLLKLDTFEAETDVREILPEVIQYPYGETVQDIEILIERRQDELIQYLAQNPTANEPESTGHADFTMLLNSIEVLRNRREALLRRAQADETVEQRMTGIIERLHNEKPDITGYDDILVRKLVECITVVSDKIKVVFKNGTEIWARWDCE

SEQ ID NO: 2566 - protein, 542 aa, Unknown
  Description of Unknown: Integrase B2567 sequence
  PTHR30461:SF3,SM00857,G3DSA:1.10.10.2600,IPR036162,PF13408, IPR025827,PS51737,G3DSA:3.40.50.1390,IPR006119,IPR038109, PF07508,IPR011109,SSF53041,PTHR30461,Coil, PS51736,cd00338,PF00239
MKITAPARSARAVSLEAFVDNLNLANVVIYARYSSAGQNDQSIDGQLAKCREYAQQRGYRVVGEYCDRALSGRYAETRPEFQRMISDSAKHAFDFVLVWKLDRFSRDRYDSAIYKKKLRANGVRVLSVTEGVGDSSESVLLEAILEAMAEEYSRQLAQNVRRGMRQNAEKGLSLGGLAPLGYRVVNKQYEINEDEARIVRFIHEQYADGAGQKQIVADCARLGYRNQRGNPLTLASVKRILANERYAGRYDYLGEIVIEDAFPAIVSKDLKKRVRDRLKANARAPGHAKAKVEYLLHGKLFCGECGAPMIGECGRGRHGATYYYYTCAARKKQHTCKKRNERKDELEASIVDYIGSCVLTDSWIDGAAERVVAEYQKSYDASGIKPLEKQIRDADKEIDQLVDALISATAEAARRRINERIETAEARKQALEADLASLRIASRVQIKKEDIVVWLNQFRTGDRSDLEYRKKVIDLFVNAIYLYDDSFKLFLNVADSAQVTYADALALAPPSVSDFGASGVPDMHLSEHIIFVNGVIGMIVQR

SEQ ID NO: 2567 - protein, 542 aa, Unknown
  Description of Unknown: Integrase B2568 sequence
  PTHR30461:SF3,SM00857,G3DSA:1.10.10.2600,IPR036162,PF13408, IPR025827,G3DSA:3.40.50.1390,PS51737,IPR006119,IPR038109, PF07508,SSF53041,IPR011109,PF00239,PTHR30461, PS51736,Coil,cd00338
MRLTHGAYILARFSTDNQEVDSIDVQVQKCREWCAREHLPVLDVFADEAASGMKNTRPEYARMMRQLAEGGADTVVIYDQSRMFRKLTAWFQFREQMARYGVRVVAVTQPIIGGDLRDPMTFLSEGSMALMNQMWVLQTRQKVIEKMRYMAEQGKHTGGKPPLGYDVKDERLVINEDEAETVREIFRQYAAGKSYREIIKWLNDSGTRTKRGGCFGTNSLHDLLKNEKYIGNIVYGRSERRPDGTRNSHSFSIRTMRMENAVPSIIDRETWERVQKKMEDNRRVQAGRPPKAREYPLKGKVFCRECKSAMTIVSSKKTYYYYACSGKKRTGQCDNPQIGAGELENIVADAIREILGNPGNIENIISIIREEKNEIINVATQRMQILLSRRMEINRQLEAGTNAILAGLHSQTLKTKMQELEEELAEIDQQMTTLKHSADGTQIPEDRLRALLNAAGDDVNALLSLVMRVEVGKDRIVVWTLLDADPNGHFDFSEDGINIDLQPIDRGDENSGCPLTGTMNFHNFFIAGGLLRFSIPRKKRRG

SEQ ID NO: 2568 - protein, 542 aa, Unknown
  Description of Unknown: Integrase B2569 sequence
  PTHR30461:SF3,SM00857,G3DSA:1.10.10.2600,IPR036162,PF13408, IPR025827,PS51737,G3DSA:3.40.50.1390,IPR006119,IPR038109, PF07508,IPR011109,SSF53041,PTHR30461,Coil, PS51736,cd00338,PF00239
MKITAPARSARAVSLEAFVDNLNLANVVIYARYSSAGQNDQSIDGQLSKCREYAQQRGYRVVGEYCDRALSGRYAETRPEFQRMISDSAKHAFDFVLVWKLDRFSRDRYDSAIYKKKLRANGVRVLSVTEGVGDSSESVLLEAILEAMAEEYSRQLAQNVRRGMRQNAEKGLSLGGLAPLGYRVVNKQYEINEDEARIVRFIHEQYADGAGQKQIVADCARLGYRNQRGNPLTLASVKRILANERYAGRYDYLGEIVIEDAFPAIVSKELKKRVRDRLKANSKAPGHAKAKVEYLLHGKLFCGECGAPMIGECGRGRHGATYYYYTCAARKKQHTCKKRNERKDELEAGIVDYIGSCVLTDSWIDGAAERVVAEYQKSYDASGIKPLEKQIRDADKEIDQLVDALISATAEAARRRINERIETAEARKQALEADLASLRIASRVQIKKEDIVVWLNQFRTGDRSDLEYRKKVIDLFVNAIYLYDDSFKLFLNVADSAQVTYADALALAPPSVSDFGASGVPDMHLSEHIIFVNGVIGMIVQR

SEQ ID NO: 2569 - protein, 542 aa, Unknown
  Description of Unknown: Integrase B2570 sequence
  PTHR30461:SF3,cd00338,SM00857,G3DSA:1.10.10.2600,IPR036162, PF13408,PS51737,G3DSA:3.40.50.1390,IPR025827,IPR006119, IPR038109,PF07508,IPR011109,SSF53041,PTHR30461, PS51736,Coil,PF00239
MAPALRRVVRTMPQIAVVQIDDTPQVKKTKVAAYARVSTEKEEQEDSFERQVEHYTHLIESNPEWTMVEVYKDPGITGTKAEKRPDFLRMIDDCRAGKIDKILVKSVSRFARNTVDALNYIRELRDMNISVQFESENIDTLTPGGEVLLTILAAMAEQESRTMSNNIKWAYQKKFEKGEVTINTGLMLGYTKNGKDEDGRAVYAIVEEEAEIIRRIYREYLNGSTVTQIIHGLEEDGVKTKRGTEKWYHTAVTSILTNEKYTGNAYLGKTYKPDVLSKKRYRNDGEKAPMYYAENSHPAIVTMEMFNMVKLEMERRKTEKEKAVGNTRYTSKYPFSGILICGTCGSRLRRHVRKTGSGKLVPSWGCSNRILNGREVCDSYHVNEDVLYATYHAAVQAMVEDAGSILSTLESATEKELQPSNKAALDEVEQKIIDLQEKVLALHRQKRAQAVNDAYYNAQVNDYSQQLAALEDRQQALQTADARYATVRMWLADFQQHMQEGDATDDRDGKMMKSLVESIIIWPDRMEIHFKCGVNIEQKYVK

SEQ ID NO: 2570 - protein, 542 aa, Unknown
  Description of Unknown: Integrase B2571 sequence
  PTHR30461:SF3,SM00857,G3DSA:1.10.10.2600,IPR036162,PF13408, IPR025827,PS51737,G3DSA:3.40.50.1390,IPR006119,IPR038109, PF07508,IPR011109,SSF53041,PTHR30461,Coil, PS51736,cd00338,PF00239
MRLTHGAYILARFSTDNQEVDSIDVQVQKCREWCAREHMPVLDVFADEATSGMKNTRPEYARMMRQLADGGADTVVIYDQSRMFRKLTAWFQFREQMACYGVRVVAVTQPIIGGDLRDPMTFLSEGSMALMNQMWVLQTRQKVIEKMRYMAEQGKHTGGKPPLGYDVEDERLVINDDEAETVREIFRQYAVGKSYREIIKWLNDSGKRTKRGGCFGTNSLHDLLKNEKYIGNIVYGRSERRPDGTRNSHSFSVRTMRMENAVPAIIDHETWERVQKKMEDNRRVQAGRPPRAREYPLKGKVFCRECKSAMTIVSSKKTYYYYACSGKKRTGQCDNPQIGAGELENIVADAIREILGNPGNIENIISIIREEKNEIINVATQRMQILLARRMEINRQLEAGTNAILAGLHSQTLKTKMQELEEELAEIDQQMTTLKHSADGTQIPEDRLRTLLNAAGDDVNALLSLVMRVEVGKDRIVVWTLLDADPNGHFDFSEDGINIDLQPVDRGDENSGCPLTGTTNFHNFSIVGGLLRFSIPRKKRWG

SEQ ID NO: 2571 - protein, 542 aa, Unknown
  Description of Unknown: Integrase B2572 sequence
  PTHR30461:SF3,IPR036162,PS51737,IPR011109,PTHR30461, PF00239,G3DSA:1.10.10.2600,IPR006119,PF14287,SSF53041, cd17289,IPR025378,SM00857,IPR025827,cd03770, IPR038109,PS51736,PF13408,G3DSA:3.40.50.1390,PF07508,Coil
MEKPISALNVVRAGLYMRLSRDDDQAGESGSIQNQRDILRQYAISNQMLIVKEYVDDGWSGTNFNRPGFQEMISDIEKGKINCVITKDLSRLGRNYIEVGKYTEYFFPQKGVRYIAIGDHVDTIQADNDVAPFLNIFNEFHAKQTSKKTRAVFETKFKNGMNCNSVLPYGYKKDADHKGKILIDDEHANVVRLIFDMADNGYGSGMILKKLFEMKIESPGYVLYKTTGLLKETYDDAPEYKKYAWNVQRIRSILKNEYYIGNTVHYRTRTRSFKDRTRIPSKKEDMLIIENTHEPIVSKETFFSVQRKLEMKKRPASEEFVQVFSGLVKCADCGRRMRLECQKYKGKRYRYFACPGRKPLPVKQCTMHYIRYDVLEKYVLDDIKGVLSQFRTDNDAIIRKMVESEQKRKANDSSSLKAKIEKNIKRKAELVKMFSKLYEDWAGGRISEQNFDSMVDKIQKEQSEVDATIEMLNREDIASDEEHNISRFESIVKNIKAPKKLTRELVNALIDRIEIHESEGEKGARNKTQKIEIYYKFVGVIN

SEQ ID NO: 2572 - protein, 542 aa, Unknown
  Description of Unknown: Integrase B2573 sequence
  PTHR30461:SF3,cd00338,SM00857,G3DSA:1.10.10.2600,IPR036162, PF13408,PS51737,G3DSA:3.40.50.1390,IPR025827,IPR006119, IPR038109,PF07508,IPR011109,SSF53041,PTHR30461, PS51736,Coil,PF00239
MKKFPIDLSCLTEEEISQFQEDPYTLYNGDQNVAIYLRYSSTGQSDQSIEGQLRDCRTFCKANHYRIVAIYVDRATTARKDVEKRVHLMEMISDSAKQNWEYVIVWKLDRFARNRNDSAIMKMRLRKNGVKVLSATEHLTDSPESIILESVLEGMAEFFSAELSQKVTRGMRESALKCHSVGGHIPLGYKVENHKLVVDPDTAHIVQEAFSLYANGESVAAICRKFNSAGYKTAKNTEFNRSSFKAMFRNTRYIGTYTYKDIVIENGIPAIIDKELFETVQRRLSKTATAPARGKAKVDYLLSGKLFCGHCGASMNGESGAGRHGKVYHYYSCYTKKRKLGCDKRPLKKDHIEGIVARDALNLLTDQLIDEIADMAIRQSEQDLINDTHIPQLTAQLSEVEKSITNITAAIEKGIASETLMNRLVQLEHEKKTLNKEIKAEEKFVYRIDRDQIVFWLSQFKYGNIEDENFRRRLIDLLVNSVTVWDEPDGYKITTAYNLTSCKTKTFRVEKNPAAEEATGFDFGESECTIRWQQFGYFKRNA

SEQ ID NO: 2573 - protein, 542 aa, Unknown
  Description of Unknown: Integrase B2574 sequence
  PTHR30461:SF3,SM00857,G3DSA:1.10.10.2600,IPR036162,PF13408, IPR025827,PS51737,G3DSA:3.40.50.1390,IPR006119,IPR038109, PF07508,IPR011109,SSF53041,PTHR30461,Coil, PS51736,cd00338,PF00239
MRLTHGAYILARFSTDNQEVDSIDVQVQKCREWCAREHLPVLDVFADEATSGMKNTRPEYARMMRQLADGGADTVVIYDQSRMFRKLTAWFQFREQMARYGVRVVAVTQPIIGGDLRDPMTFLSEGSMALMNQMWVLQTRQKVIEKMRYMAEQGKHTGGKPPLGYDVEDERLVINEDEAETVREIFRQYAAGKSYREIIKWLNDSGTRTKRGGCFGTNSLHDLLKNEKYIGNIVYGRSERRPDGTRNSHSFSIRTMRIENAVPAIIDRETWERVQKKMEDNRRVQAGRPPKAREYPLKGRVFCRECKSAMTIVSSKKTYYYYACSGKKRTGQCDNPQIGAGELENIVADAIREILGNPGNIENIISIIREEKNEIINVATQRMQILLARRMEINRQLEAGTNAILAGLHSHTLKTKMQELEEELAEIDRQMTTLKHSADGTQIPEDRLRTLLNAAGDDVNALLSLVMRVEVGKDRIVVWTLLDADPNGHFDFSEDGINIDLQPIDRGDENSGCPLTGTMNFHNFSIAGGLLRFSIPRKKRWG

SEQ ID NO: 2574 - protein, 542 aa, Unknown
  Description of Unknown: Integrase B2575 sequence
  PTHR30461:SF3,SM00857,G3DSA:1.10.10.2600,IPR036162,PF13408, IPR025827,PS51737,G3DSA:3.40.50.1390,IPR006119,IPR038109, PF07508,IPR011109,SSF53041,PTHR30461,Coil, PS51736,cd00338,PF00239
MKITAPARSARAVSLEAFVDNLNLANVVIYARYSSAGQNDQSIDGQLAKCREYAQQRGYRVVGEYCDRALSGRYAETRPEFQRMISDSAKHAFDFVLVWKLDRFSRDRYDSAIYKKKLRANGVRVLSVTEGVGDSSESVLLEAILEAMAEEYSRQLAQNVRRGMRQNAEKGLSLGGLAPLGYRVVNKQYEINEDEARIVRFIHEQYADGAGQKQIVADCARLGYRNQRGNPLTLASVKRILANERYAGRYDYLGEIVIEDAFPAIVSKDLKKRVRDRLKANAKAPGHAKAKVEYLLHGKLFCGECGAPMIGECGRGRHGATYYYYTCAARKKQHTCKKRNERKDELEASIVDYIGSCVLTDSWIDGAAERVVAEYQKSYDASGIKPLEKQIRDADKEIDQLVDALISATAEAARRRINERIETAEARKQALEADLASLRIASRVQIRKEDIVVWLNQFRTGDRSDLEYRKKVIDLFVNAIYLYDDSFKLFLNVTDSSQVTYADALALAPPSVSDFGASGVPDMHLSEHIIFVNGVIGMIVQR

SEQ ID NO: 2575 - protein, 542 aa, Unknown
  Description of Unknown: Integrase B2576 sequence
  SM00857,G3DSA:1.10.10.2600,IPR036162,PF13408,IPR025827, PS51737,G3DSA:3.40.50.1390,IPR006119,IPR038109,PF07508, IPR011109,SSF53041,PF00239,PTHR30461,PS51736, Coil,cd00338
MVQEKLRAVFYARVSTEEERQLNALEKQVAECKDAVLQKGWKLVDQYVDEGKSGTQIKRRDEYRRLFEDLENDKFDIVVIKSQDRLQRNTLDWYIWIDRLTTHGKRLYMYLEDTFYSPDNALISGIKAILAEEYSRELSKKINNSYKRRIEAAKNGEKISIVNNSRSLGYDKVNGELVINEKEAEVVRMIFNMYASGEGLRAISNTLYDMGYRNRSGNEIDPTTISRMLSSEKYKGVYVINQRHYDFDTKKTVLNPKSEWVHIPGAVPAIVEPELWDRVQEIKGSKVQSIKNEKRGRNCGKSIFSGKIYCAKCGAKYWRSLENGYVKFKCSSYSKYGKIPGKGCDNKSFSENALYSILQSLSEQIVEINTAEVRKSLLNWLESLRERLRASQGDDTIKEEIRKQTARKEKLTDAYMDGIISKEDYSKRYKELEKTLEDLKDKLLTLEVNEDLQSIEEVIQNIDKEMEEYLQTQSFNESRVEFLNQHLTKVTVNKDSFLLEFDLIGGAILTGKDFYLFVDNPRWYSIQTDKRNSVDVGIKIAA

SEQ ID NO: 2576 - protein, 542 aa, Unknown
  Description of Unknown: Integrase B2577 sequence
  SM00857,G3DSA:1.10.10.2600,IPR036162,PF13408,IPR025827, G3DSA:3.40.50.1390,PS51737,IPR006119,IPR038109,PF07508, IPR011109,SSF53041,PF00239,PTHR30461,PS51736, Coil,cd00338
MVQEKLRAVFYARVSTEEERQLNALEKQVAECKDAILQKGWKLVDQYVDEGKSGTQIKRRDEYRRLFEDLENDKFDIVVIKSQDRLQRNTLDWYIWIDRLTTHGKRLYMYLEDTFYSPDNALISGIKAILAEEYSRELSKKINNSYKRRIEAAKNGEKISIVNNSRSLGYDKVNGELVINEKEAEVVRMIFNMYVSGEGLRAISNTLYDMGYRNRSGNEIDPTTISRMLSSEKYKGVYVINQRHYDFDTKKTVLNPKSEWVHIPGAVPAIVEPELWDRVQEIKGSKVQSIKNEKRGRNCGKSIFSGKIYCAKCGAKYWRSLENGYVKFKCSSYSKYGKIPGKGCDNKSFSENALYSILQSLSEQIVEVNTAEVRKSLLNWLESLRERLRASQGDDTIKEEIRKQTARKEKLTDAYMDGIISKEDYSKRYKELEKTLEDLKDKLLTLEVNEDLQSIEEVIQNIDKEMEEYLQTQSFNESRVEFLNQHLTKVTVNKDYFLLEFDLIGGAILTGKDFYLFVDNPRWYSIQTDKRNSVDVGIKIAA

SEQ ID NO: 2577 - protein, 542 aa, Unknown
  Description of Unknown: Integrase B2578 sequence
  PTHR30461:SF3,SM00857,G3DSA:1.10.10.2600,IPR036162,PF13408, PS51737,IPR025827,G3DSA:3.40.50.1390,IPR006119,IPR038109, PF07508,IPR011109,SSF53041,PTHR30461,Coil, PS51736,cd00338,PF00239
MKITAPARSAGAVSLEAFVDNLNLANVVIYARYSSAGQNDQSIDGQLAKCREYAQQRGYRVVGEYCDRALSGRYAETRPEFQRLIADSAKRAFDFVLVWKLDRFSRDRYDSAIYKKKLRANGVRVLSVTEGVGDSSESVLLEAILEAMAEEYSRQLAQNVRRGMRQNAEKGLSLGGLAPLGYRVVNKQYEINEDEARIVRFIHEQYADGAGQKQIVADCARLGYRNQRGNPLTLASVKRILANERYVGRYDYLGEIVIEDAFPAIVSKELKKRVRDRLKANSKAPGHAKAKVEYLLHGKLFCGECGAPMIGECGRGRHGATYYYYTCAARKKQHTCKKRNERKDELEASIVDYIGSCVLTDSWIDGAAERVVAEYQKSYDASGIKPLEKQIRDADKEIDQLVDALISATAEAARRRINERIETAEARKQALEADLASLRIASRVQIRKEDIVVWLNQFRTGDRSDLEYRKKVIDLFVNAIYLYDDSFKLFLNVADSSQVTYADALALAPPSVSDFGASGVPDMHLSEHIIFVNGVIGMIVQR

SEQ ID NO: 2578 - protein, 542 aa, Unknown
  Description of Unknown: Integrase B2579 sequence
  PTHR30461:SF3,SM00857,G3DSA:1.10.10.2600,IPR036162,PF13408, IPR025827,PS51737,G3DSA:3.40.50.1390,IPR006119,IPR038109, PF07508,IPR011109,SSF53041,PTHR30461,Coil, PS51736,cd00338,PF00239
MKITAPARSARAVSLEAFVDNLNLANVVIYARYSSAGQNDQSIDGQLAKCREYAQQRGYRVVGEYCDRALSGRYAETRPEFQRMISDSAKHAFDFVLVWKLDRFSRDRYDSAIYKKKLRANGVRVLSVTEGVGDSSESVLLEAILEAMAEEYSRQLAQNVRRGMRQNAEKGLSLGGLAPLGYRVVNKQYEINEDEARIVRFIHEQYADGAGQKQIVADCARLGYRNQRGNPLTLASVKRILANERYAGRYDYLGEIVIEDAFPAIVSKDLKKRVRDRLKANARAPGHAKAKVEYLLHGKLFCGECGAPMIGECGRGRHGATYYYYTCAARKKQHTCKKRNERKDELEASIVDYIGSCVLTDSWIDGAAERVVAEYQKSYDASGIKPLEKQIRDADKEIDQLVDALISATAEAARRRINERIETAEARKQALEADLASLRIASRVQIKKEDIVVWLNQFRTGDRSDLEYRKKVIDLFVNAIYLYDDSFKLFLNVADSAQVTYADALALAPPSVSDFGASGVPDMHLSEHIIFINGVIGMIVQR

SEQ ID NO: 2579 - protein, 542 aa, Unknown
  Description of Unknown: Integrase B2580 sequence
  PTHR30461:SF3,SM00857,G3DSA:1.10.10.2600,IPR036162,PF13408, PS51737,IPR025827,G3DSA:3.40.50.1390,IPR006119,IPR038109, PF07508,IPR011109,SSF53041,PTHR30461,Coil, PS51736,cd00338,PF00239
MKITAPARSAGAVSLEAFVDNLNLANVVIYARYSSAGQNDQSIDGQLAKCREYAQQRGYRVVGEYCDRALSGRYAETRPEFQRLIADSAKRAFDFVLVWKLDRFSRDRYDSAIYKKKLRANGVRVLSVTEGVGDSSESVLLEAILEAMAEEYSRQLAQNVRRGMRQNAEKGLSLGGLAPLGYRVVNKQYEINEDEARIVRFIHEQYADGAGQKQIVADCARLGYRNQRGNPLTLASVKRILANERYVGRYDYLGEIVIEDAFPAIVSKELKKRVRDRLKANAKAPGHAKAKVEYLLHGKLFCGECGAPMIGECGRGRHGATYYYYTCAARKKQHTCKKRNERKDELEASIVDYIGSCVLTDSWIDGAAERVVAEYQKSYDASGIKPLEKQIRDADKEIDQLVDALISATAEAARRRINERIETAEARKQALEADLASLRIASRVQIRKEDIVVWLNQFRTGDRSDLEYRKKVIDLFVNAIYLYDDSFKLFLNVADSAQVTYADALALAPPSVSDFGASGVPDMHLSEHIIFVNGVIGMIVQR

SEQ ID NO: 2580 - protein, 542 aa, Unknown
  Description of Unknown: Integrase B2581 sequence
  PTHR30461:SF3,SM00857,G3DSA:1.10.10.2600,IPR036162,PF13408, PS51737,G3DSA:3.40.50.1390,IPR025827,IPR006119,IPR038109, PF07508,IPR011109,SSF53041,PTHR30461,Coil, PS51736,cd00338,PF00239
MRLTHGAYILARFSTDNQEVDSIDVQVQKCREWCAREHLPVLDVFADEATSGMKNTRPEYSRMMRQLADGGADTVVIYDQSRMFRKLTAWFQFREQMACYGVRVVAVTQPIIGGDLRDPMTFLSEGSMALMNQMWVLQTRQKVIEKMRYMAEQGKHTGGKPPLGYDVEDERLVINEDEAETVREIFRQYAAGKSYREIIKWLNDSGKRTKRGGCFGTNSLHDLLKNEKYIGNIVYGRSERRPDGTRNSHSFSIRTMRMENAVPAIIDRETWERVQKKMEDNRRVQAGRPPKAREYPLKGKVFCRECKSAMTIVSSKKTYYYYACSGKKRTGQCDNPQIGAGELENIVADAIREILGNPGNIENIISIIREEKNEIINVATQRMQILLARRMEINRQLEAGTNAILAGLHSQTLKTKMQELEEELAEIDQQMTTLKHSADGTQIPEDRLRALLNAAGDDINALLSLVMRVEVGKDKIVVWTLLDADPDGHFDFSEDGINIDLQPVDRGDENSGCPLTGTMNFHNFFIAGGLLRFSIPRKKRWG

SEQ ID NO: 2581 - protein, 542 aa, Unknown
  Description of Unknown: Integrase B2582 sequence
  PTHR30461:SF3,SM00857,G3DSA:1.10.10.2600,IPR036162,PF13408, PS51737,G3DSA:3.40.50.1390,IPR025827,IPR006119,IPR038109, PF07508,IPR011109,SSF53041,PTHR30461,Coil, PS51736,cd00338,PF00239
MKITAPARSARAVSLEAFVDNLNLANVVIYARYSSAGQNDQSIDGQLSKCREYAQQRGYRVVGEYCDRALSGRYAETRPEFQRLIADSAKRAFDFVLVWKLDRFSRDRYDSAIYKKKLRANGVRVLSVTEGVGDSSESVLLEAILEAMAEEYSRQLAQNVRRGMRQNAEKGLSLGGLAPLGYRVVNKQYEINEDEARIVRFIHEQYADGAGQKQIVADCARLGYRNQRGNPLTLASVKRILANERYAGRYDYLGEIVIEDAFPAIVSKELKKRVRDRLKANSKAPGHAKAKVEYLLHGKLFCGECGAPMIGECGRGRHGATYYYYTCAARKKQHTCKKRNERKDELEACIVDYIGSCVLTDSWIDGAAERVVAEYQKSYDASGIKPLEKQIRDADKEIDQLVDALISATAEAARRRINERIETAEARKQALEADLASLRIASRVQIKKEDIVVWLNQFRTVDRSDLEYRKKVIDLFVNSIYLYDDTFKLFLNVTDSTQITYSDSLALAPPSVSDFGASGVPDMHLSEHIIFVNGVIGMIVQR

SEQ ID NO: 2582 - protein, 542 aa, Unknown
  Description of Unknown: Integrase B2583 sequence
  PTHR30461:SF3,SM00857,G3DSA:1.10.10.2600,IPR036162,PF13408, IPR025827,G3DSA:3.40.50.1390,PS51737,IPR006119,IPR038109, PF07508,IPR011109,SSF53041,PTHR30461,Coil, PS51736,cd00338,PF00239
MRLTHGAYILARFSTDNQEVDSIDVQVQRCREWCEREHLPVLDVFADEATSGMKNTRPEYSRMMRQLAEGGADTVVIYDQSRMFRKLTAWFQFREQMACYGVRVVAVTQPIIGGDLRDPMTFLSEGSMALMNQMWVLQTRQKVIEKMRYMAEQGKHTGGKPPLGYDVKDERLVINEDEADTVREIFRKYADGKSYREIIKWLNDSGKRTKRGGCFGTNSLHDLLKNEKYIGNIVYGRSERRPDGTRNSHSFSIRTMRMENAVPPIIDRETWERVQKKMEDNRRVQAGRPPKAREYPLKGKVFCRECKSAMTIVSSKKTYYYYACSGKKRTGQCDNPQISAGELENIVADAIREILGNPENIENIVSIIREEKNEIINVATQRMQILLARRMEINRQLEAGTNAILAGLHSKTLKTKMQELEEELTEIDQQMTTLKHSADGTQIPEERLRALLNAAGDDVNALLSLVMRVEVGKDRIVVWTLLDADPNGHFDFSEDGINIDLQPVDRGDENSGCPLTGTMNFYNFSIAGGLLRFSIPRKKRWG

SEQ ID NO: 2583 - protein, 542 aa, Unknown
  Description of Unknown: Integrase B2584 sequence
  PTHR30461:SF3,SM00857,G3DSA:1.10.10.2600,IPR036162,PF13408, IPR025827,PS51737,G3DSA:3.40.50.1390,IPR006119,IPR038109, PF07508,IPR011109,SSF53041,PTHR30461,Coil, PS51736,cd00338,PF00239
MKITAPARSAGAVSLEAFVDNLNLANVVIYARYSSAGQNDQSIDGQLAKCREYAQQRGYRVVGEYCDRALSGRYAETRPEFQRMISDSAKHAFDFVLVWKLDRFSRDRYDSAIYKKKLRANGVRVLSVTEGVGDSSESVLLEAILEAMAEEYSRQLAQNVRRGMRQNAEKGLSLGGLAPLGYRVVNKQYEINEDEARIVRFIHEHYADGAGQKQIVADCARLGYRNQRGNPLTLASVKRILANERYAGRYDYLGEIVIEDAFPAIVSKELKKRVRDRLKANSKAPGHAKAKVEYLLHGKLFCGECGAPMIGECGRGRHGATYYYYTCAARKKQHTCKKRNERKDELEACIVDYIGSCVLTDSWIDGAAERVVAEYQKSYDASGIKPLEKQIRDADKEIDQLVDALISATAEAARRRINERIETAEARKQALEADLASLRIASRVQIKKEDIVVWLNQFRTGDRSDLEYRKKVIDLFVNSIYLYDDTFKLFLNVTDSTQITYSDSLALAPPSVSDFGASGVPDMHLSEHIIFVNGVIGMIVQR

SEQ ID NO: 2584 - protein, 542 aa, Unknown
  Description of Unknown: Integrase B2585 sequence
  PTHR30461:SF3,SM00857,G3DSA:1.10.10.2600,IPR036162,PF13408, PS51737,G3DSA:3.40.50.1390,IPR025827,IPR006119,IPR038109, PF07508,IPR011109,SSF53041,PTHR30461,Coil, PS51736,cd00338,PF00239
MKITAPARSARAVSLEAFVDNLNLANVVIYARYSSAGQNDQSIDGQLAKCREYAQQRGYRVVGEYCDRALSGRYAETRPEFQRLIADSAKRAFDFVLVWKLDRFSRDRYDSAIYKKKLRTNGVRVLSVTEGVGDSSESVLLEAILEAMAEEYSRQLAQNVRRGMRQNAEKGLSLGGLAPLGYRVVNKQYEINEDEARIVRFIHEQYADGAGQKQIVADCARLGYRNQRGNPLTLASVKRILANERYVGRYDYLGEIVIEDAFPAIVSKDLKKRVRDRLKANAKAPGHAKAKVEYLLHGKLFCGECGAPMIGECGRGRHGATYYYYTCAARKKQHTCKKRNERKDELEASIVDYIGSCVLTDSWIDGAAERVVAEYQKSYDASGIKPLEKQIRDADKEIDQLVDALISATAEAARRRINERIETAEARKQALEADLASLRIASRVQIRKEDIVVWLNQFRTGDRSDLEYRKKVIDLFVNAIYLYDDSFKLFLNVTDSSQVTYADALALAPPSVSDFGASGVPDMHLSEHIIFVNGVIGMIVQR

SEQ ID NO: 2585 - protein, 542 aa, Unknown
  Description of Unknown: Integrase B2586 sequence
  PTHR30461:SF3,SM00857,G3DSA:1.10.10.2600,IPR036162,PF13408, PS51737,G3DSA:3.40.50.1390,IPR025827,IPR006119,IPR038109, PF07508,SSF53041,IPR011109,PTHR30461,Coil, PS51736,cd00338,PF00239
MRLTHGAYILARFSTDNQEVDSIDVQVQKCREWCAREHLPVLDVFADEATSGMKNTRPEYSRMMRQLAEGGADTVVIYDQSRMFRKLTAWFQFREQVACYGVRVVAVTQPIIGGDLRDPMTFLSEGSMALMNQMWVLQTRQKVIEKMRYMAEQGKHTGGKPPLGYDVKDKRLVINEDEADTVREIFRQYADGKSYREIIKWLNDSGKRTKRGGCFGTNSLHDLLKNEKYIGNIVYGRSERRPDGTRNSHSFSIRTMRMENAVPSIIDRETWERVQKKMEDNRRVQAGRPPKAREYPLKGKVFCRECKSAMTIVSSKKTYYYYACSGKKRTGQCDNPQIGAGELENIVADAIREILGNPGNIENIISIIREEKNEIINVATQRMQILLARRMEINRQLEAGTNAILTGLHSQTLKTKMQELEEELSEIDQQMTTLKHSADGTQIPEERLRALLNAAGDDINALLSLVMRVEVGKDRIVVWTLLDADPNGHFDFSEDGINIDLQPVDRGDENSGCPLTGTMNFHNFSIAGGLLRFSIPRKKRWG

SEQ ID NO: 2586 - protein, 542 aa, Unknown
  Description of Unknown: Integrase B2587 sequence
  PTHR30461:SF3,SM00857,G3DSA:1.10.10.2600,IPR036162,PF13408, PS51737,G3DSA:3.40.50.1390,IPR025827,IPR006119,IPR038109, PF07508,IPR011109,SSF53041,PTHR30461,Coil, PS51736,cd00338,PF00239
MRLTHGAYILARFSTDNQEVDSIDVQVQKCREWCAREHLPVLDVFADEATSGMKNTRPEYSRMMRQLAEGGADTVVIYDQSRMFRKLTAWFQFREQVACYGVRVVAVTQPIIGGDLRDPMTFLSEGSMALMNQMWVLQTRQKVIEKMRYMAEQGKHTGGKPPLGYDVKDERLVINEDEADTVREIFRKYAAGKSYREIIKWLNDSGKRTKRGGCFGTNSLHDLLKNEKYIGNIVYGRSERRPDGTRNSHSFSIRTMRMENAVPSIIDRETWERVQKKMEDNRRVQAGRPPKAREYPLKGKVFCRECKSAMTIVSSKKTYYYYACSGKKRTGQCDNPQIGAGELENIVADAIREILGNPENIENIVSIIREEKNEIINVATQRMQILLARRMEINRQLEAGTNAILAGLHSQTLKTKMQELEEELTEIDQQMTTLKHSADGTQIPEERLRALLNAAGDDVNALLSLVMRVEVGKDRIVVWTLLDADPNGHFDFSEDGINIDLQPVDRGDENSGCHLTGTMNFHNFSIAGGLLRFSIPRKKRWG

SEQ ID NO: 2587 - protein, 542 aa, Unknown
  Description of Unknown: Integrase B2588 sequence
  PTHR30461:SF3,SM00857,G3DSA:1.10.10.2600,IPR036162,PF13408, PS51737,IPR025827,G3DSA:3.40.50.1390,IPR006119,IPR038109, PF07508,IPR011109,SSF53041,PTHR30461,Coil, PS51736,cd00338,PF00239
MKITAPARSARAVSLEAFVDNLNLANVVIYARYSSAGQNDQSIDGQLAKCREYAQQRGYRVVGEYCDRALSGRYAETRPEFQRMISDSAKRAFDFVLVWKLDRFSRDRYDSAIYKKKLRANGVRVLSVTEGVGDSSESVLLEAILEAMAEEYSRQLAQNVRRGMRQNAEKGLSLGGLAPLGYRVVNKQYEINEDEARIVRFIHEQYADGAGQKQIVADCARLGYRNQRGNPLTLASVKRILANERYVGRYDYLGEIVIEDAFPAIVSKELKKRVRDRLKANAKAPGHAKAKVEYLLHGKLFCGECGAPMIGECGRGRHGATYYYYTCAARKKQHTCKKRNERKDELEASIVDYIGSCVLTDSWIDGAAERVVAEYQKSYDASGIKPLEKQIRDADKEIDQLVDALISATAEAARRRINERIETAEARKQALEADLASLRIASRVQIKKEDIVVWLNQFRTGDRSDLEYRKKVIDLFVNAIYLYDDSFKLFLNVADSAQVTYADAVALAPPSVSDFGASGVPDMHLSEHIIFVNGVIGMIVQR

SEQ ID NO: 2588 - protein, 542 aa, Unknown
  Description of Unknown: Integrase B2589 sequence
  PTHR30461:SF3,SM00857,G3DSA:1.10.10.2600,IPR036162,PF13408, IPR025827,G3DSA:3.40.50.1390,PS51737,IPR006119,IPR038109, PF07508,SSF53041,IPR011109,PF00239,PTHR30461, PS51736,Coil,cd00338
MKKQPTGGNRLVAYYRYSGGSHQTEQSIEGQRRDCETYARIHGMVILHEYIDRHISGKTDDRPEFQQMIADAGKGMFDYVICWKTDRIARSRYDSIIYKKKLRDNGVELLYAAEANVEGSGGIIVEGLMEALAEYYSAELAEKVRRGMRESALKGKAIGSSRPLGLTVDKDKKYIIDPAGAAAVRYIFEQYAAGAASSAIVAHLNEQGLCTSRGNPFNKSSVVRIIQNEVYRGVYVSPKFDVRIEGAVPAIIDDDLWERAQKMFIRNRQSRSPRNDRADYILSGKLFCGECGTAMKGVSGHSSNGEVYFYYNCPCKDCHRRNIPKDELEGLVIRTVCNDVLQPDVMDRIADSVIEAQTAELNQPNPEKEALQHELADVQRKAKNLLSALENGTAGAMLTNRLAELEQRADTLSYQLSSLESEPKFPVFSKEEVLYLLEQFLIAPSEKTKAYRRRLIDTFVSKIEVSNTELTIYFNIADEDCGKMKKAPQSNQPEGCSTEKQMVHLLLPQSNFSIFILPTYFYIAIPIFQARKSISVESVTNL

SEQ ID NO: 2589 - protein, 542 aa, Unknown
  Description of Unknown: Integrase B2590 sequence
  PTHR30461:SF3,SM00857,G3DSA:1.10.10.2600,IPR036162,PF13408, IPR025827,PS51737,G3DSA:3.40.50.1390,IPR006119,IPR038109, PF07508,IPR011109,SSF53041,PTHR30461,Coil, PS51736,cd00338,PF00239
MRLTHGAYILARFSTDNQEVDSIDVQVQKCREWCAREHLSVLDVFADEATSGMKNTRPEYARMMRQLAEGGADTVVIYDQSRMFRKLTAWFQFREQMACYGVRVVAVTQPIIGGDLRDPMTFLSEGSMALMNQMWVLQTRQKVIEKMRYMAEQGKHTGGKPPLGYDVEDERLVINEDEAETVREIFRQYAAGKSYREIIKWLNDSGTRTKRGGCFGTNSLHDLLKNEKYIGNIVYGRSERRPDGTRNSHSFSVRTMRIENAVPAIIDHETWERVQKKMEDNRRVQAGRPPKAREYPLKGKVFCRECKSAMTIVSSKKTYYYYACSGKKRTGQCDNPQIGAGELENIVADAIREILGNPGNIENIISIIREEKNEIINVATRRMQILLARRMEINRQLEAGTNAILAGLHSQTLKTKMQELEEELAEIDRQMTTLKHSADGTQIPEDRLRALLNAAGDDVNALLSLVMRVEVGKDKIVVWTLLDTDPNGHFDFSEVGINIDLQPVDRGAENSGCPLTGTTNFHNFSIAGGLLKFSIPRKKRWG

SEQ ID NO: 2590 - protein, 542 aa, Unknown
  Description of Unknown: Integrase B2591 sequence
  PTHR30461:SF3,SM00857,G3DSA:1.10.10.2600,IPR036162,PF13408, IPR025827,PS51737,G3DSA:3.40.50.1390,IPR006119,IPR038109, PF07508,IPR011109,SSF53041,PTHR30461,Coil, PS51736,cd00338,PF00239
MKITAPARSAGAVSLEAFVDNLNLANVVIYARYSSAGQNDQSIDGQLAKCREYAQQRGYRVVGEYCDRALSGRYAETRPEFQRLIADSAKRAFDFVLVWKLDRFSRDRYDSAIYKKKLRANGVRVLSVTEGVGDSSESVLLEAILEAMAEEYSRQLAQNVRRGMRQNAEKGLSLGGLAPLGYRVVNKQYEINEDEARIVRFIHEHYADGAGQKQIVADCARLGYRNQRGNPLTLASVKRILANERYVGRYDYLGEIVIEDAFPAIVSKDLKKRVRDRLKANAKAPGHAKAKVEYLLHGKLFCGECGAPMIGECGRGRHGATYYYYTCAARKKQHTCKKRNERKDELEASIVDYIGSCVLTDSWIDGAAERVVAEYQKSYDVSGIKPLEKQIRDADKEIDQLVDALISATAEAARRRINERIETAEARKQALEADLASLRIASRVQIKKEDIVVWLNQFRNGARSDLEYRKKVIDLFVNSIYLYDDTFKLFLNVTDSTQITYSDSLALAPPSVSDFGASGVPDMHLSEHIIFINGVIGMIVQR

SEQ ID NO: 2591 - protein, 542 aa, Unknown
  Description of Unknown: Integrase B2592 sequence
  PTHR30461:SF3,SM00857,G3DSA:1.10.10.2600,IPR036162,PF13408, PS51737,IPR025827,G3DSA:3.40.50.1390,IPR006119,IPR038109, PF07508,IPR011109,SSF53041,PTHR30461,Coil, PS51736,cd00338,PF00239
MKITAPARSARAVSLEAFVDNLNLANVVIYARYSSAGQNDQSIDGQLAKCREYAQQRGYRVVGEYCDRALSGRYAETRPEFQRMISDSAKHAFDFVLVWKLDRFSRDRYDSAIYKKKLRANGVRVLSVTEGVGDSSESVLLEAILEAMAEEYSRQLAQNVRRGMRQNAEKGLSLGGLAPLGYRVVNKQYEINEDEARIVRFIHEQYADGAGQKQIVADCARLGYRNQRGNPLTLASVKRILANERYVGRYDYLGEIVIEDAFPAIVSKDLKKRVRDRLKANAKAPGHAKAKVEYLLHGKLFCGECGAPMIGECGRGRHGATYYYYTCAARKKQHTCKKRNERKDELEASIVDYIGSRILTDSWIDGAAERVVAEYQKSYDASGIKPLEKQIRDADKEIDQLVDALISATAEAARRRINERIETAEARKQALEADLASLRIASRVQIKKEDIVVWLNQFRTGDRSDLEYRKKVIDLFVNSIYLYDDTFKLFLNVTDSTQITYSDSLALAPPSVSDFGASGVPDMHLSEHIIFVNGVIGMIVQR

SEQ ID NO: 2592 - protein, 542 aa, Unknown
  Description of Unknown: Integrase B2593 sequence
  SM00857,G3DSA:1.10.10.2600,IPR036162,PF13408,PS51737, G3DSA:3.40.50.1390,IPR025827,IPR006119,IPR038109,PF07508, SSF53041,IPR011109,PTHR30461,Coil,cd00338, PF00239
MAYRKITDIKDTIGMRAVFYARVSTAEEEQLNAIELQIEENRGCIKDHGWKLVGEYIDRSKSGTMVKGRDDYQRLYEDLYEDLFDIVVIKDQERLQRNTLDWYLFINRVVQTGKLLFMYMDGKFYSPDDALITGVRAIIAEEFSRNLSKKLHNYHDHRIEKARQGQEIALQGSGNVYGWDKKDGKYYINPEQAKVRRLMCEGIMARKGSTLIAKELNEAGYRNTVGKPWKPMDIPKFVYDCKNVGTMIINKERHDFESKQTIKLPKEEWVYVENALPPIVTQEEWDLICKIHEERVIATGSDKRGKKTSGYSFSGKLVCGICGAPYWRKQRVSKDEYWVCSTKQTKGRKTRKRDSTMGKAGEINPLGCDNENISYNSLMEIMEVVSERLQANTDTIKQDMINWLTKLKKQLLEANGGHTEADLQRELSRKSKLLDAYLDGILNKQEYQKKAEELDERIIQLKAETEKNKANSGDIAEIDKVLANIDEEVARYVDGNEKLKVEYLLEHLEQVQIFPDKVIVIVPILSEGIVVEKTQYVSREKW

SEQ ID NO: 2593 - protein, 542 aa, Unknown
  Description of Unknown: Integrase B2594 sequence
  PTHR30461:SF3,cd00338,SM00857,G3DSA:1.10.10.2600,IPR036162, PF13408,IPR025827,PS51737,G3DSA:3.40.50.1390,IPR006119, IPR038109,PF07508,SSF53041,IPR011109,PTHR30461, Coil,PF00239
MMMENRMMTGNRVDCLYRVSTDKQVDYNDKSQADIPMQRRECHRFCEKMGWTIVHEEQEDGVSGHKVRAENRDKLQIIKERAKQGKFDILLVFMFDRIGRIADETPFVVEWFVKNGIRVWSTQEGEQRFDNHTDKLTNYIRFWQADGESEKTSIRTKTALGQLVEDGGFKGGLAPYGYDLVKSGRFNKRKHEVFELAVNEAEAAVVRIIFDKYVHEGFGAQRIATYLNNLGYRARTGKMWHHASIRGIICNLTYTGVLRSGESRSQTLPHLQIIEQELFEAAQHIRTSRANSAEQERRVPLNTRGQSLLAGNVFCGHCGSRLALTTNGKAYPCKEDAHRIVKRVRYICYGKTRKQTECDGQTGYTAHILDGIIDKVVRQIFERMKAIPKSEIVNIRYREKMEERKALLKSAKSDYAKAAAELDTLRAEVIKSLRGESAFSQDLLGSLISDCETKCLEVQHTMEAAQAAYDEGQAMLDALNAQYDDIISWADMYDSASTESKKMIVSCLIRRVEVYRDYRLHIDFNIDFEQFSAGLDISAIAA

SEQ ID NO: 2594 - protein, 542 aa, Unknown
  Description of Unknown: Integrase B2595 sequence
  PTHR30461:SF3,IPR036162,PS51737,IPR011109,PTHR30461, PS00397,PF00239,G3DSA:1.10.10.2600,IPR006119,SSF53041, cd00338,SM00857,IPR025827,IPR038109,PS51736, IPR006118,PF13408,G3DSA:3.40.50.1390,PF07508,Coil
MFNFKNNDEIIAVYCRVSSDEQSEKGTIENQKEYAEKYVRLNMLNVYDYYMDDGVTGTLPLQKRPEGKRLLEDAKAGKFNLVLFFKLDRLGRSVRVILNAVYDLMELNVDVRSMTEAFDTTTPSGRFTLNTFAGIAELERDTILTRMRMGTIRHAKLGKWLGGPVPYGYTLGNGYLEISHTKIPGLAYSEADIVKLIFEKTVYEKMSAEAIADYLNNLSVPTKYKILNRKLITSGYWYPSRILSMLHNTVYYGVHIFGQMSKHQKPEIIKQTNPAIVDIDLWDAAQKQLTSNKLLAARCRKNDYLLSGLIKCGLCGRTYIGTGYAGSKKEKVLYYVCNDKNRYHPDKNQKICQSQNLRADWIESIVWNDCLSYIMQPDKLYLENKTQSLTDPKDELHALEQAAVKLERERSSILDLFRKKIITENDLKNQLDKIAKEQDKLNRAISDKKALISKIDKINNNMIKMVDLLKSFQKYISDNITFTDKRKIVEALVENIIVYTDYDNGQRDIPIVTIAINYVFKNEKNPLKRNYQPSSKQNIHGF

SEQ ID NO: 2595 - protein, 542 aa, Unknown
  Description of Unknown: Integrase B2596 sequence
  PTHR30461:SF3,SM00857,G3DSA:1.10.10.2600,IPR036162,PF13408, IPR025827,G3DSA:3.40.50.1390,PS51737,IPR006119,IPR038109, PF07508,SSF53041,IPR011109,PF00239,PTHR30461, PS51736,Coil,cd00338
MKKQPTGGNRLVAYYRYSGGSHQTEQSIEGQRRDCETYARIHGMVILHEYIDRHISGKTDDRPEFQQMIADAGKGMFDYVICWKTDRIARSRYDSIIYKKKLRDNGVELLYAAEANVEGSGGIIVEGLMEALAEYYSAELAEKVRRGMRESALKGKAIGSSRPLGLTVDKDKKYIIDPAGAAAVRYIFEQYAAGAASSAIVAHLNEQGLCTSRGNPFNKSSVVRIIQNEVYRGVYVSPKFDVRIEGAVPAIIDDDLWERAQKMFIRNRQSRSPRNDRADYILSGKLFCGECGTAMKGVSGHSSNGEVYFYYNCPCKDCHRRNIPKDELEGLVIRTVCNDVLQPDVMDHIADSVIEAQTAELNQPNPEKEALQHELADVQRKAKNLLAALENGTAGAMLTNRLAELEQQSDTLSYQLSSLESEPKFPVFSKEEVLYLLEQFLIAPSEKTKAYRRRLIDTFVSKIEVSNTELTIYFNISEEDCGKMKKAPQSNQPEGCSTEKQMVHLLLPQSNFSIFILPTYFYIAIPIFQARKSISVESVTNL

SEQ ID NO: 2596 - protein, 542 aa, Unknown
  Description of Unknown: Integrase B2597 sequence
  PTHR30461:SF3,SM00857,G3DSA:1.10.10.2600,IPR036162,PF13408, PS51737,IPR025827,G3DSA:3.40.50.1390,IPR006119,IPR038109, PF07508,IPR011109,SSF53041,PF00239,PTHR30461, PS51736,Coil,cd00338
MKKFPIDLSCLTEEEISQFQEDPYTLYNGDQEVALYLRYSSTGQSDQSIEGQLRDCRAFCKANHYRIVAIYVDRATTARKDVEKRVHLMEMVADSAKQNWEYVIVWKLDRFARNRNDSAIMKMRLRKNGVKVLSATEHLTDSPESIILESVLEGMAEFFSAELSQKVTRGMRESALKCHSVGGHIPLGYKVENHKLVVDPDTAHIVQEAFSLYANGESVADICRKFNSAGYKTAKNTEFNRSSFKAMFRNTRYIGTYTYKDIVIENGIPAIIDKELFETVQRRLSKTATAPARGKAKVDYLLSGKLFCGHCGASMNGESGAGRHGKVYHYYSCYTKKRKLGCDKRPLKKDYIEGIVARDALNLLTDQLIDEIADMAIRQSEQDLINDTHIPQLTAQLSEVEKSITNITAAIEKGIASETLMNRLVQLEHEKKTLNKEIKAEEKFVYQIDRDQIVFWLSQFKYGNIEDEDFRRRLIDLLVNSVTVWDEPDGYKITTAYNLTSCKTKTFRVEKNPAAEEATGFDFGESECTKKPHQFGYFKRNA

SEQ ID NO: 2597 - protein, 542 aa, Unknown
  Description of Unknown: Integrase B2598 sequence
  PTHR30461:SF3,SM00857,G3DSA:1.10.10.2600,IPR036162,PF13408, PS51737,IPR025827,G3DSA:3.40.50.1390,IPR006119,IPR038109, PF07508,IPR011109,SSF53041,PTHR30461,Coil, PS51736,cd00338,PF00239
MPEALNAVIYARYSSDRQTEQSIEGQLRECYAFAKANDIAVIDTYIDRAISGKTDNRPAFQKMIEDSAKRQFQAVIVYRLDRFTRNRYDSAIYKARLKKNGVKVLSAMENLNGSPESIIMESLLEGMAEYYSVELSQKITRGMRENALKGKALGGQRVLGYKVNSDCYFEIDETTAPVVVDIFKLYSSGKTVKEICDILNARGVKTARGGAFNKNSLHTILTNKKYIGIYKTKYGEIVGGIPAIIDKELFEMVALRMEQNKKAPARAKAEINYLLSTKLFCGKCRSAMVGESGTSKTGKKYYYYACVKKKREKACDKSNVKKDWIEDLVIQRTVTDILKDDVIEKIADRLVELQKAEAAESGTMLYLQNSLAEIQVSIKNIMTAIEKGIITESTKTRLTELEDEKRNVEIEIAKESIARRIISREQIIYWISSFKDGDITSEKYRQQLIDTFVHAVFVYDDKIVITYNYSGENNTATISDLDLSSPPKEIRRNTVSAVFLYNRPTVFVPVPHRQRRHHEKETNRKRVRLCCQHAVWLVLRRR

SEQ ID NO: 2598 - protein, 542 aa, Unknown
  Description of Unknown: Integrase B2599 sequence
  PTHR30461:SF3,cd00338,SM00857,G3DSA:1.10.10.2600,IPR036162, PF13408,IPR025827,PS51737,G3DSA:3.40.50.1390,IPR006119, IPR038109,PF07508,SSF53041,IPR011109,PTHR30461, PS51736,Coil,PF00239
MYEDIKTACLYVRFSSHNQTEQSIEGQTRVCQEFCQRHNIKIVEIYADRATSASKNTEKRVSFLKMIKDSEKGLFDAVVVYKLDRFARSRYDSATYKYRLKKNGVQLISATENITNSPEGIILESVLEGMAEFYSAELSQKINRGMRESAYKHNSIGGALPLGYKTVDKKLVIDEKTAPIVREAFTMYAEGHSVAEICRIFNARGYKTSKGTEFGKNSFSKIFRNERYIGTYTYHDYRAEDAIPAIIDRDLWDRVQLRLKKVKNSPGRNKAKRVYLLSGKLFCGHCGESMNGNCNGNKYAFYECYGKKSKYNGCQKRNLRKEYIERLVAQDALSLLTDENIEHLATVACERNDYEIETGSPIPVIRDRIHQTEVSINNLTKAIETGATPDALVKRMVELEREKKDLSAQLKKEEELVVPLEKEQVIFWLEKFKDGDIEDEEFCRLLIDLFVNSVTVWDEDDDMLKVTIAYNLTSLPTKTYRLTKDGTLSDFTGNAPGSQGCAPGRLRLQGLCQAPGSPQSSGWCPRCRRCRHIPPSRWAPQQ

SEQ ID NO: 2599 - protein, 542 aa, Unknown
  Description of Unknown: Integrase B2600 sequence
  PTHR30461:SF3,SM00857,G3DSA:1.10.10.2600,IPR036162,PF13408, IPR025827,PS51737,G3DSA:3.40.50.1390,IPR006119,IPR038109, PF07508,IPR011109,SSF53041,PF00239,PTHR30461, PS51736,Coil,cd00338
MKKFPIDLSCLTEEEISQFQEDPYTLYNGDQDVALYLRYSSTGQSDQSIEGQLRDCRTFCKANHYRIVAIYVDRATTARKDVEKRVHLMEMVADSAKQNWEYVIVWKLDRFARNRNDSAIMKMRLRKNGVKVLSATEHLTDSPESIILESVLEGMAEFFSAELSQKVTRGMRESALKCHSVGGHIPLGYKVENHKLVVDPDTAHIVQEAFSLYANGESVADICRKFNSAGYKTAKNTEFNRSSFKAMFRNTRYIGTYTYKDIVIENGIPAIIDKELFETVQRRLSKTATAPARGKAKVDYLLSGKLFCGHCGASMNGESGAGRHGKVYHYYSCYTKKRKLGCDKRPLKKDYIEGIVARDALNLLTDQLIDEIADMAIRQSEQDLINDTHIPQLTAQLSEVEKSITNITAAIEKGIASETLMNRLVQLEHEKKTLNKEIKAEEKFVYRIDRDQIVFWLSQFKYGNIEDEDFRRRLIDLLVNSVTVWDEPDGYKITTAYNLTSCKTKTFRVEKNPAAEEATGFDFGESECTKKPHQSGYFKRNA

SEQ ID NO: 2600 - protein, 542 aa, Unknown
  Description of Unknown: Integrase B2601 sequence
  PTHR30461:SF3,SM00857,G3DSA:1.10.10.2600,IPR036162,PF13408, IPR025827,G3DSA:3.40.50.1390,PS51737,IPR006119,IPR038109, PF07508,IPR011109,SSF53041,PTHR30461,Coil, PS51736,cd00338,PF00239
MKITAPARSARAVSLEAFVDNLNLANVVIYARYSSAGQNDQSIDGQLAKCREYAQQRGYRVVGEYCDRALSGRYAETRPEFQRLISDSAKHAFDFVLVWKLDRFSRDRYDSAIYKKKLRANGVRVLSVTEGVGDSSESVLLEAILEAMAEEYSRQLAQNVRRGMRQNAEKGLSLGGLAPLGYRVVNKQYEINEDEARIVRFIHEQYADGAGQKQIVADCARLGYRNQRGNPLTLASVKRILANERYAGRYDYLGEIVIEDAFPAIVSKDLKKRVRDRLKANARAPGHAKAKVEYLLHGKLFCGECGAPMIGECGRGRHGATYYYYTCAARKKQHTCKKRNERKDELEASIVDYIGSCVLTDSWIDGAAERVVAEYQKSYDASGIKPLEKQIRDADKEIDQLVDALISATAEAARRRINERIETAEARKQALEADLASLRIASRVQIKKEDIVVWLNQFRTGDRSDLEYRKKVIDLFVNAIYLYDDSFKLFLNVADSAQVTYADALALAPPSVSDFGASGVPDMHLSEHIIFVNGVIGMIVQR

SEQ ID NO: 2601 - protein, 542 aa, Unknown
  Description of Unknown: Integrase B2602 sequence
  PTHR30461:SF3,SM00857,G3DSA:1.10.10.2600,IPR036162,PF13408, IPR025827,G3DSA:3.40.50.1390,PS51737,IPR006119,IPR038109, PF07508,SSF53041,IPR011109,PF00239,PTHR30461, Coil,cd00338
MMMENRMMTGNRVDCLYRVSTDKQVDYNDKSQADIPMQRRECHRFCEKMGWTIVHEEQEDGVSGHKVRAENRDKLQIIKERAKQGKFDILLVFMFDRIGRIADETPFVVEWFVKNGIRVWSTQEGEQRFDNHTDKLTNYIRFWQADGESEKTSIRTKTALGQLVEDGGFKGGLAPYGYDLVKSGRFNKRKHEVFELAINEAEAAVVRIIFDKYVHEGFGAQRIATYLNNLGYRARTGKMWHHASIRGIICNLTYTGVLRSGESRSQTLPHLQIITPELFEAAQHIRTSRANSAEQERRVPLNTRGQSLLAGNVFCGHCGSRLALTTNGKAYPCKENAHRIVKRVRYICYGKTRKQTECDGQTGYTAHILDGIIDKVVRQIFERMKAIPKSEIVNIRYREKMEERKTLLKSAKSDYAKAAAELDTLRAEVIKSLRGESAFSQDLLGSLISDCETKCLEVQHTMEAAQAAYDEGQAMLDALNAQYDDIISWADMYDSASTESKKMIVSCLIRRVEVYRDYRLHIDFNIDFEQFSAGLDISAIAA

SEQ ID NO: 2602 - protein, 542 aa, Unknown
  Description of Unknown: Integrase B2603 sequence
  PTHR30461:SF3,SM00857,G3DSA:1.10.10.2600,IPR036162,PF13408, PS51737,G3DSA:3.40.50.1390,IPR025827,IPR006119,IPR038109, PF07508,IPR011109,SSF53041,PTHR30461,Coil, PS51736,cd00338,PF00239
MKKFPIDLSCLTEEEISQFQEDPYTLYNGDQDVALYLRYSSTGQSDQSIEGQLRDCRTFCKANHYRIVAIYVDRATTARKDVEKRVHLMEMISDSAMQNWEYVIVWKLDRFARNRNDSAIMKMRLRKNGVKVLSATEHLTDSPESIILESVLEGMAEFFSAELSQKVTRGMRESALKCHSVGGHIPLGYKVENHKLVVDPDTAHIVQEAFSLYANGESVAAICRKFNSAGYKTAKNTEFNRSSFKAMFRNTRYIGTYTYKDIVIENGIPAIIDKELFETVQRRLSKTATAPARGKAKVDYLLSGKLFCGHCGASMNGESGAGRHGKVYHYYSCYTKKRKLGCDKRPLKKDYIEGIVARDALNLLTNQLIDEIADMAIRQSEQDLINDTHIPQLTAQLSEVEKSITNITAAIEKGIASETLMNRLVQLEHEKKTINKEIKAEEKFVYRIDRDQIVFWLSQFKYGNIEDENFRRRLIDLLVNSVTVWDEPDGYKITTAYNLTSCKTKTFRVEKNPAAEEATGFDFGESECTIKPHQSGYFKLNA

SEQ ID NO: 2603 - protein, 542 aa, Unknown
  Description of Unknown: Integrase B2604 sequence
  SM00857,G3DSA:1.10.10.2600,IPR036162,PF13408,PS51737, G3DSA:3.40.50.1390,IPR025827,IPR006119,IPR038109,PF07508, IPR011109,SSF53041,PF00239,PTHR30461,PS51736, Coil,cd00338
MVQEKLRAVFYARVSTEEERQLNALEKQVAECKDAVLQKGWKLVDQYVDEGKSGTQIKRRDEYRRLFEDLENDKFDIVVIKSQDRLQRNTLDWYIWIDRLTTHGKRLYMYLEDTFYSPDNALISGIKAILAEEYSRELSKKINNSYKRRIEAAKNGEKISIVNNSRSLGYDKVNGELVINEKEAEVVRMIFNMYASGEGLRAISNTLYDMGYRNRSGNEIDPSTISRMLSSEKYKGVYVINQRHYDFDTKKTVLNPKSEWVHIPGAVPAIVEPELWDRVQEIKGSKVQSIKNEKRGRNCGKSIFSGKIYCAKCGAKYWRSLENGYVKFKCSSYSKYGKIPGKGCDNKSFSENALYSILQSLSEQIVEVNTAEVRKSLLNWLESLRERLRASQGDDTIKEEIRKQTARKEKLTDAYMDGIISKEDYSKRYKELEKTLEDLKDKLLTLEVNEDLQSIEEVIQNIDKEMEEYLQTQSFNESRVEFLNQHLTKVTVNKDSFLLEFDLIGGAILTGKDFYLFVDNPRWYSIQTDKRNSVDVGIKIAA

SEQ ID NO: 2604 - protein, 542 aa, Unknown
  Description of Unknown: Integrase B2605 sequence
  PTHR30461:SF3,SM00857,G3DSA:1.10.10.2600,IPR036162,PF13408, IPR025827,PS51737,G3DSA:3.40.50.1390,IPR006119,IPR038109, PF07508,IPR011109,SSF53041,PTHR30461,Coil, PS51736,cd00338,PF00239
MKITAPARSAGAVSLEAFVDNLNLANVVIYARYSSAGQNDQSIDGQLAKCREYAQQRGYRVVGEYCDRALSGRYAETRPEFQRLISDSAKHAFDFVLVWKLDRFSRDRYDSAIYKKKLRANGVRVLSVTEGVGDSSESVLLEAILEAMAEEYSRQLAQNVRRGMRQNAEKGLSLGGLAPLGYRVVNKQYEINEDEARIVRFIHEQYADGAGQKQIVADCARLGYRNQRGNPLTLASVKRILANERYAGRYDYLGEIVIEDAFPAIVSKDLKKRVRDRLKANAKAPGHAKAKVEYLLHGKLFCGECGAPMIGECGRGRHGATYYYYTCAARKKQHTCKKRNERKDELEASIVDYIGSCVLTDSWIDSAAERVVSEYQKSYDASGIKPLEKQIRDADKEIDQLVDALISATAEAARRRINERIETAEARKQALEADLASLRIASRVQIRKEDIVVWLNQFRTGDRSDLEYRKKVIDLFVNAIYLYDDSFKLFLNVADSSQVTYADALALAPPSVSDFGASGVPDMHLSEHIIFINGVIGMIVQR

SEQ ID NO: 2605 - protein, 542 aa, Unknown
  Description of Unknown: Integrase B2606 sequence
  SM00857,G3DSA:1.10.10.2600,IPR036162,PF13408,IPR025827, PS51737,G3DSA:3.40.50.1390,IPR006119,IPR038109,PF07508, IPR011109,SSF53041,PF00239,PTHR30461,PS51736, Coil,cd00338
MVQEKLRAVFYARVSTEEERQLNALEKQVAECKDAVLQKGWKLVDQYVDEGKSGTQIKRRDEYRRLFEDLENDKFDIVVIKSQDRLQRNTLDWYIWIDRLTTHGKRLYMYLEDTFYSPDNALISGIKAILAEEYSRELSKKINNSYKRRIEAAKNGEKISIVNNSRSLGYDKVNGELVINEKEADVVRMIFNMYASGEGLRAISNTLYDMGYRNRSGNEIDPTTISRMLSSEKYKGVYVINQRHYDFDTKKTVLNPKSEWVHIPGAVPAIVEPELWDRVQEIKGSKVQSIKNEKRGRNCGKSIFSGKIYCAKCGAKYWRSLENGYVKFKCSSYSKYGKIPGKGCDNKSFSENALYSILQSLSEQIVEVNTAEVRKSLLNWLESLRERLRASQGDDTIKEEIRKQTARKEKLTDAYMDGIISKEDYSKRYKELEKTLEDLKDKLLTLEVNEDLQSIEEVIQNIDKEMEEYLQTQSFNESRVEFLNQHLTKVTVNKDSFLLEFDLIGGAILTGKDFYLFVDNPRWYSIQTDKRNSVDVGIKIAA

SEQ ID NO: 2606 - protein, 542 aa, Unknown
  Description of Unknown: Integrase B2607 sequence
  PTHR30461:SF3,SM00857,G3DSA:1.10.10.2600,IPR036162,PF13408, PS51737,IPR025827,G3DSA:3.40.50.1390,IPR006119,IPR038109, PF07508,IPR011109,SSF53041,PTHR30461,Coil, PS51736,cd00338,PF00239
MPEALNAVIYARYSSDRQTEQSIEGQLRECYAFAKANDIAVIDTYIDRAISGKTDNRPAFQKMIEDSAKRQFQAVIVYRLDRFTRNRYDSAIYKARLKKNGVKVLSAMENLNGSPESIIMESLLEGMAEYYSVELSQKITRGMRENALKGKALGGQRVLGYKVNSDCYFEIDETTAPVVVDIFKLYSSGKTVKEICDILNARGVKTARGGAFNKNSLHTILTNKKYIGIYKTKYGEIVGGIPAIIDKELFEMVALRMEQNKKAPARAKAEINYLLSTKLFCGKCRSAMVGESGTSKTGKKYYYYACVKKKREKACDKSNVKKDWIEDLVIQRTVTDILKDDVIEKIADRLVELQKAEAAESGTMLYLQNSLAEIQVSIKNIMTAIEKGIITESTKTRLTELEDEKRNVEIEIAKESIARRIISREQIIYWISSFKDGNITSEKYRQQLIDTFVHAVFVYDDKIVITYNYSGENNTATISDLDLSSPPITRILLLRCSCYFFRRGSNRTVLRSRISSVRWTVGKSACVSAHGSAPSDPLRLHQ

SEQ ID NO: 2607 - protein, 542 aa, Unknown
  Description of Unknown: Integrase B2608 sequence
  PTHR30461:SF3,IPR036162,PS51737,IPR011109,PTHR30461, PF00239,G3DSA:1.10.10.2600,IPR006119,SSF53041,cd00338, SM00857,IPR025827,IPR038109,PS51736,mobidb-lite, PF13408,G3DSA:3.40.50.1390,PF07508,Coil
MLAGVSIPHSLHMGNRPEGSVIMPRKKTTAADAPRLVAYYRYSGGSRQTKQSIEGQRRDCEAYARAHGMTILREYVDRHISGKTDDRPAFQQLVADSAAHIFDAVICWKTDRLARNRYDSAVYKKKLRDNGVEILYAAESNISGAEGIIIEGLMEALAEYYSAELAEKARRGMRESALKGKALGSSRPLGLTVDADKHYIIEPTGAEAVRYIFEQYAAGLSSSSIVERLNAMGLRTSHGGPFNKSSINRIIQNEMYRGVYVSKKFDVRIEGAIPAIIDNDLWERAQKMFERNRQSRTPHASRADYILSGKLYCGECGCLMKGVCGRSSGNGQMYHYYACPGRSIGRACTRKNIPQDELEAMVVNAVADLLLEPALLEQIADAIVELQQAEAARPDPEKQALEKSLSDVRNKIQNILSAIENGTSSAALSARLADLEQQESTLSYQLSSLDAKKPLTFTRDQILFLLQQFRVSPSERTKAYCRRLVDTFVDHIELTNTELILYFNLSDETVDKNKKAPRSNPSEESSTEKRLVRVARIELTAS

SEQ ID NO: 2608 - protein, 542 aa, Unknown
  Description of Unknown: Integrase B2609 sequence
  PTHR30461:SF3,SM00857,G3DSA:1.10.10.2600,IPR036162,PF13408, PS51737,G3DSA:3.40.50.1390,IPR025827,IPR006119,IPR038109, PF07508,SSF53041,IPR011109,PTHR30461,Coil, PS51736,cd00338,PF00239
MRLTHGAYILARFSTDNQEVDSIDVQVQKCREWCAREHLPVLDVFADEATSGMKNTRPEYSRMMRQLAEGGADTVVIYDQSRMFRKLTAWFQFREQVACYGVRVVAVTQPIIGGDLRDPMTFLSEGSMALMNQMWVLQTRQKVIEKMRYMAEQGKHTGGKPPLGYDVEDERLVINEDEADTVREIFRQYADGKSYREIIKWLNDSGKRTKRGGCFGTNSLHDLLKNEKYIGNIVYGRSERRPDGTRNSHSFSIRTMRMENAVPPIINRETWERVQKKMEDNRRVQAGRPPKAREYPLKGKVFCRECKSAMTIVSSKKTYYYYACSGKKRTGQCDNPQIGAGELENIVADAIREILGNPGNIENIISIIREEKNEIINVATQRMQILLARRMEINRQLEAGTNAILAGLHSQTLKTKMQELEEELAEIDQQMTTLKHSADGTQIPEDRLRALLNAAGDDVNALLSLVMRVEVGKDKIVVWTLLDADPNGHFDFSEDGINIDLQPVDRGDENSGCSLTGTMNFHNFFIAGGLLRFSIPRKKRWG

SEQ ID NO: 2609 - protein, 542 aa, Unknown
  Description of Unknown: Integrase B2610 sequence
  PTHR30461:SF3,SM00857,G3DSA:1.10.10.2600,IPR036162,PF13408, PS51737,G3DSA:3.40.50.1390,IPR025827,IPR006119,IPR038109, PF07508,IPR011109,SSF53041,PF00239,PTHR30461, PS51736,Coil,cd00338
MKKFPIDLSCLTEEEISQFQEDPYTLYNGDQNVAIYLRYSSTGQSDQSIEGQLRDCRTFCKANHYRIVAIYVDRATTARKDVEKRVHLMEMISDSAKQNWEYVIVWKLDRFARNRNDSAIMKMRLRKNGVKVLSATEHLTDSPESIILESVLEGMAEFFSAELSQKVTRGMRESALKCHSIGGHIPLGYKVENHKLVVDPDTAHIVQEAFSLYANGESVADICRKFNSAGYKTAKNTEFNRSSFKAMFRNTRYIGTYTYKDIVIENGIPAIIDKELFETVQRRLSKTATAPARGKAKVDYLLSGKLFCGHCGASMNGESGAGRHGKVYHYYSCYTKKRKLGCDKRPLKKNYIEGIVARDALNLLTDQLIDEIADMAIRQSEQDLINDTHIPQLTAQLTEVEKSITNITAAIEKGIASETLMNRLVQLEHEKKTLNKEIKAEEKFVYRIDRDQIVFWLSQFKYGNIEDEDFRRRLIDLLVNSVTVWDEPDGYKITTAYNLTSCKTKTFRVEKNPAAEEATGFDFGESECTKKPHQSGYFKRNA

SEQ ID NO: 2610 - protein, 542 aa, Unknown
  Description of Unknown: Integrase B2611 sequence
  SM00857,G3DSA:1.10.10.2600,IPR036162,PF13408,PS51737, IPR025827,G3DSA:3.40.50.1390,IPR006119,IPR038109,PF07508, IPR011109,SSF53041,PF00239,PTHR30461,PS51736, Coil,cd00338
MVQEKLRAVFYARVSTEEERQLNALEKQVAECKDAVLQKGWKLVDQYVDEGKSGTQIKRRDEYRRLFEDLENDKFDIVVIKSQDRLQRNTLDWYIWIDRLTTHGKRLYMYLEDTFYSPDNALISGIKAILAEEYSRELSKKINNSYKRRIEAAKNGEKISIVNNSRSLGYDKVNGELVINEKEADVVRMIFNMYASGEGLRAISNTLYDMGYRNRSGNEIDPTTISRMLSSEKYKGVYVINQRHYDFDTKKTVLNPKSEWVHIPGAVPAIVEPELWDRVQEIKGSKVQSIKNEKRGRNCGKSIFSGKIYCAKCGAKYWRSLENGYVKFKCSSYSKYGKIPGKGCDNKSFSENALYSILQSLSEQIVEVNTAEVRKSLLNWLESLRERLRASQGDDTIKEEIRKQTARKEKLTDAYMDGIISKEDYSKRYKELEKTLEDLKDKLLTLEVNEDLQSIEEVIQNIDKEMEEYLQTQSFNESRVEFLNQHLTKVTVNKDSFLLEFDLIGGAILTGKDFYLFVDNPRWKSNTRYVCPFRWGDAAELL

SEQ ID NO: 2611 - protein, 542 aa, Unknown
  Description of Unknown: Integrase B2612 sequence
  PTHR30461:SF3,cd00338,SM00857,G3DSA:1.10.10.2600,IPR036162, PF13408,IPR025827,PS51737,G3DSA:3.40.50.1390,IPR006119, IPR038109,PF07508,IPR011109,SSF53041,PTHR30461, PS51736,Coil,PF00239
MRLTHGAYILARFSTDNQEVDSIDVQVQKCREWCAREHLPVLDVFADEATSGMKNTRPEYSRMMRQLAEGGADTVVIYDQSRMFRKLTAWFQFREQVACYGVRVVAVTQPIIGGDLRDPMTFLSEGSMALMNQMWVLQTRQKVIEKMRYMAEQGKHTGGKPPLGYDVKDKRLVINEDEADTVREIFRQYADGKSYREIIKWLNDSGKRTKRGGCFGTNSLHDLLKNEKYIGNIVYGRSERRPDGTRNSHSFSIRTMRMENAVPSIIDRETWERVQKKMEDNRRVQAGRPPKAREYPLKGKVFCRECKSAMTIVSSKKTYYYYACSGKKRTGQCDNPQIGAGELENIVADAIREILGNPGNIENIISIIREEKNEIINVATQRMRILLARRMEINRQLEAGTNAILAGLHSQTLKTKMQELEEELSEIDQQMTTLKHSADGTQIPEERLRALLNAAGDDVNALLSLVMRVEVGKDRVVVWTLLDADPNGHFDFSEDGINIDLQPIDRGDENSGCPLTGTTNLHNFSIAGGLLKFSIPRKKRWG

SEQ ID NO: 2612 - protein, 542 aa, Unknown
  Description of Unknown: Integrase B2613 sequence
  PTHR30461:SF3,SM00857,G3DSA:1.10.10.2600,IPR036162,PF13408, IPR025827,G3DSA:3.40.50.1390,PS51737,IPR006119,IPR038109, PF07508,SSF53041,IPR011109,PTHR30461,Coil, PS51736,cd00338,PF00239
MRLTHGAYILARFSTDNQEVDSIDVQVQKCREWCAREHLPVLDVFADEATSGMKNTRPEYSRMMRQLAEGGADTVVIYDQSRMFRKLTAWFQFREQVACYGVRVVAVTQPIIGGDLRDPMTFLSEGSMALMNQMWVLQTRQKVIEKMRYMAEQGKHTGGKPPLGYDVKDERLVINEDEADTVREIFRQYADGKSYREIIKWLNDSGKRTKRGGCFGTNSLHDLLKNEKYIGNIVYGRSERRPDGTRNSHSFSIRTMRMENAVPSIVDRETWERVQKKMEDNRRVQAGRPPKAREYPLKGKVFCRECKSAMTIVSSKKTYYYYACSGKKRTGQCDNPQIGAGELENIVADAIREILGNPGNIENIISIIREEKNEIINVATQRMQIFLARRMEINRQLEAGTNAILAGLHSQTLKTKMQELEEELAEIDQQMTTLKHSADGTQIPEERLRALLNAAGDDVNALLSLVMRVEVGKDRIVVWTLLDADPNGHFDFSEDGINIDLQPIDRGDENSGCPLTGTTNFHNFSIVGGLLKFSIPRKKRWG

SEQ ID NO: 2613 - protein, 542 aa, Unknown
  Description of Unknown: Integrase B2614 sequence
  PTHR30461:SF3,cd00338,SM00857,G3DSA:1.10.10.2600,IPR036162, PF13408,PS51737,G3DSA:3.40.50.1390,IPR025827,IPR006119, IPR038109,PF07508,SSF53041,IPR011109,PTHR30461, PS51736,Coil,PF00239
MAERVYCLYRVSTSKQVDHDDQNQADIPMQRKACHDFADKMGWIIVGEEKETGVSGYKVSADDRDKLQLIKKYAEQGKFDILLVFMFDRLGRKSDETPFVVEWFAKKGVRVWSVKEGEQRFESHTDRLTNYIRFWQADGESQKTSMRTKTALGQMVEEGRFRGGNAPYGYRLEKSGILNKRKHEVYMLVIDEDEARVVRMMFDLCVSSGYGRWRLANFLNDHGIKNRKGQNWHDASVGGILHNPLYKGILRSGETYAGPFDELQIIAPDHFDLAQKLMLERTNERKEHRTVPLNTTGQSLLSGNIFCGHCGGRLVLTTNGKTVRRADGTAVYKKRIRYVCYNKTRRRQECTGQTGYTMHIVDGIVTEVLHQVFNKMQGASGDMIVGSAVQKQMAMIRSELQRARAENTKANKEYESLKAEVLKAIQGKSALPQDVLSEMLEDARQKVLSSSERITELTAELNDGNSKIEEMKAEFNQIVSWSKIFDDSPMEVKKMICGYIIKKVSVCKDYDIKIEFNINVEQFLNGIDGVSECDTSELSIAQ

SEQ ID NO: 2614 - protein, 542 aa, Unknown
  Description of Unknown: Integrase B2615 sequence
  PTHR30461:SF3,IPR036162,PS51737,IPR011109,PTHR30461, PF00239,G3DSA:1.10.10.2600,IPR006119,SSF53041,cd00338, SM00857,IPR025827,IPR038109,PS51736,mobidb-lite, PF13408,G3DSA:3.40.50.1390,PF07508,Coil
MRKKSNLNAATRAVIYARYSSANQRDCSIEQQVAKCRELAARLGLTVIDVYEDRAISGKTDRRPNFQRMMKDADLRQFDVVLAWKSNRMGRNMLQAMTNEERLRDNGIRTVYAEEDFDDTAAGRFALRNMMNVNQFYSENMAEDITRGLMDNAAKCLSNGSLPLGYKPGDDRHVVLDEAEAAIVQEIFTRVSCYEPFIDIARDLNRRGIKTKKGAEWGRSSFHTICRNERYRGIYIYRDVRVEGGMPRIISDELFYKVQEVLKVKKNPQGRRKRSGYEEYLLTGKLYCGHCGSPMTGIAGTSKTGAMHYYYTCQKRRTDHSCDKKAVRRDQIERAVGVAIQQQLLTDENIQMMADKLMEYNARTETKHRLQGLQDQLNANKTATANILKAIEMGIITDATKARLLELEKEQAQLLVKIDTAKAEMVPIGRNDFVKLLYIYKEGEPTDKKYLAALFDNFLVRVDLYDDHLKITFDPTGGRQPIDMPIGAEDSPESPGDSSESSDFEASSQDAEKFVLALHNCTKASVLAAFERLLRTLAFFIQ

SEQ ID NO: 2615 - protein, 542 aa, Unknown
  Description of Unknown: Integrase B2616 sequence
  PTHR30461:SF3,SM00857,G3DSA:1.10.10.2600,IPR036162,PF13408, PS51737,G3DSA:3.40.50.1390,IPR025827,IPR006119,IPR038109, PF07508,SSF53041,IPR011109,PTHR30461,Coil, PS51736,cd00338,PF00239
MPRAERIVEVIPATWNPADESVREIRKLRVAAYCRVSTELEQQQSSYDIQIEYYTRHIMQNPNWIFAGVFADDGRSATNTFRRDDFNQLMNQCMKGKVDMVITKSISRFARNTVDCISWVRKLREKNVAVYFEKENLNTLDDSTEMILTILSSQAQEESRAISTNVKWGYARKFEKGESTRQRSYGFRKAPTGEMCIVEEEAAVIRNMARWFLDGDSLERIKHRLEDAGIETTTGKRTWSTGTIYNILTNEKIMGDVLLQKTFTADYLTKRRVKNSGQQKQYYVKNHHEAIIPKTVYYKIQEEIARRSSLKKAGTRKGKTAQGVYSSKYALTGIMVCNECGAHYRRTTWAKNGKKVIVWRCINRLEHGTKRCHESPTLKEEVIQEAIMGKLHSLSIDQEEENFLNGVKEDILRAAKVVGGACTEEEIDKTIEELRDQLMDYVGMAAREHGGENWYSDRMRKLGLQISELKRRRESIREQEKIRDEYEYLDQEISRIIGETGGATGAEFDNIFIRQIVREIRVISKNKLQIQLRTGMVLDVNL

SEQ ID NO: 2616 - protein, 542 aa, Unknown
  Description of Unknown: Integrase B2617 sequence
  PTHR30461:SF3,SM00857,G3DSA:1.10.10.2600,IPR036162,PF13408, PS51737,G3DSA:3.40.50.1390,IPR025827,IPR006119,IPR038109, PF07508,SSF53041,IPR011109,PF00239,PTHR30461, PS51736,Coil,cd00338
MAERVYCLYRVSTNKQVDHDENNQADIPMQRKACHDFAAKMGWVIVGEEQETGVSGYKVSADDRDKLQLIKKYAEQGKFDILLVFMFDRLGRKSDETPFVVEWFTKKGVRVWSVQEGEQRFESHTDRLTNYIRFWQADGESQKTSMRTKTALGQMVEEGRFRGGNAPYGYRLEKSGILNKRKHEVYMLVIDEDEARVVRMMFDLCISSGYGRWRLANFLNDHGIKNRKGQNWHDASVGGILHNPLYKGILRSGETYAGPFEALQIIAPDQFDLAQKLMLERTNERKERRTVPLNTTGQSLLSGNIFCGHCGGRLVLTTNGTTTRLADGTPVHKKRIRYVCYNKTRRRQECTGQTGYTMHILDGIVTEVLHQVFDKMQGASNDMIVGSAVQKQMAMIRSELQRARAENTKANKEYESLKAEVLKAIQGKSALPQDVLTEMLEDTRQKVLSTSERITTLTEELNDGNSKIEEMKAEFNRIVSWSKIFDESPMEVKKMICGYIIKKVSVFRDYRVKIEFNINVEQFLNGIDSINECATYELPMAQ

SEQ ID NO: 2617 - protein, 542 aa, Unknown
  Description of Unknown: Integrase B2618 sequence
  cd00338,SM00857,G3DSA:1.10.10.2600,IPR036162,PF13408, IPR025827,G3DSA:3.40.50.1390,PS51737,IPR006119,IPR038109, PF07508,SSF53041,IPR011109,PTHR30461,PS51736, Coil,PF00239
MVQEKLRAVFYARVSTEEERQLNALEKQVAECKDAVLQKGWKLVDQYVDEGKSGTQIKRRDEYRRLFEDLENDKFDIVVIKSQDRLQRNTLDWYIWIDRLTTHGKKLYMYLEDTFYSPDNALISGIKAILAEEYSRELSKKINNSYKRRIEAAKNGEKISIVNNSRSLGYDKVNGELVINEKEAEVVRMIFNMYASGEGLRAISNTLYDMGYRNRSGNEIDPTTISRMLSSEKYKGVYVINQRHYDFDTKKTVLNPKSEWVHIPGAVPAIVEPELWDRVQEIKGSKVQSIKNEKRGRNCGKSIFSGKIYCAKCGAKYWRSLENGYVKFKCSSYSKYGKIPGKGCDNKSFSENALYSILQSLSEQIVEVNTAEVRKSLLNWLESLRERLRASQGDDTIKEEIRKQTARKEKLTDAYMDGIISKEDYSKRYKELEKTLEDLKDKLLTLEVNEDLQSIEEVIQNIDKEMEEYLQTQSFNESRVEFLNQHLTKVTVNKDSFLLEFDLIGGAILIGKDFYLFVNNPRWYSIQTDKRNGVDVGIKIAA

SEQ ID NO: 2618 - protein, 542 aa, Unknown
  Description of Unknown: Integrase B2619 sequence
  PTHR30461:SF3,SM00857,G3DSA:1.10.10.2600,IPR036162,PF13408, IPR025827,PS51737,G3DSA:3.40.50.1390,IPR006119,IPR038109, PF07508,IPR011109,SSF53041,PTHR30461,Coil, PS51736,cd00338,PF00239
MKITAPARSARAVSLEAFVDNLNLANVVIYARYSSAGQNDQSIDGQLAKCREYAQQRGYRVVGEYCDRALSGRYAETRPEFQRMISDSAKHAFDFVLVWKLDRFSRDRYDSAIYKKKLRANGVRVLSVTEGVGDSSESVLLEAILEAMAEEYSRQLAQNVRRGMRQNAEKGLSLGGLAPLGYRVVNKQYEINEDEARIVRFIHEQYADGAGQKQIVADCARLGYRNQRGNPLTLASVKRILANERYAGRYDYLGEIVIEDAFPAIVSKDLKKRVRDRLKANARAPGHAKAKVEYLLHGKLFCGECGAPMIGECGRGRHGATYYYYTCAARKKQHTCKKRNERKDELEASIVDYIGSCVLTDSWIDGAAERVVAEYQKSYDASGIKPLEKQIRDADKEIDQLVDALISATAEAARRRINERIETAEARKQALEADLASLRIASRVQIKKEDIVVWLNQFRTGDRSDLEYRKKVIDLFVNAIYLYDDSFKLFLNVADSAQVTYADALALAPPSVSDFGASGVPEKHLSEHIIFVNGVIGMIVQR

SEQ ID NO: 2619 - protein, 542 aa, Unknown
  Description of Unknown: Integrase B2620 sequence
  PTHR30461:SF3,SM00857,G3DSA:1.10.10.2600,IPR036162,PF13408, PS51737,G3DSA:3.40.50.1390,IPR025827,IPR006119,IPR038109, PF07508,SSF53041,IPR011109,PF00239,PTHR30461, PS51736,Coil,cd00338
MKKFPIDLSCLTEEEISQFQEDPYTLYNGDQDVALYLRYSSTGQSDQSIEGQLRDCRAFCKANHYRIVAIYVDRATTAHKDVEKRVHLMEMVADSAKQNWEYVIVWKLDRFARNRNDSAIMKMRLRKNGVKVLSATEHLTDSPESIILESVLEGMAEFFSAELSQKVTRGMRESALKCHSVGGHIPLGYKVENHKLVVDPDTAHIVQEAFSLYANGESVADICRKFNSAGYKTAKNTEFNRSSFKAMFRNTRYIGTYTYKDIVIENGIPAIIDKELFETVQRRLSKTATAPARGKAKVDYLLSGKLFCGHCGASMNGESGAGRHGKVYHYYSCYTKKRKLGCDKRPLKKDYIEGIVARDALNLLTDQLIDEIADMAIRQSEQDLINDTHIPQLTAQLSEVEKSITNITAAIEKGIASETLMNRLVQLEHEKKTLNKEIKAEEKFVYRIDRDQIVFWLSQFKYGNIEDEDFRRRLIDLLVNSVTVWDEPDGYKITTAYNLTSCKTKTFRVEKNPAAEEATGFDFGESECTKKPHQFGYFKRNA

SEQ ID NO: 2620 - protein, 542 aa, Unknown
  Description of Unknown: Integrase B2621 sequence
  PTHR30461:SF3,cd00338,SM00857,G3DSA:1.10.10.2600,IPR036162, PF13408,PS51737,G3DSA:3.40.50.1390,IPR025827,IPR006119, IPR038109,PF07508,IPR011109,SSF53041,PTHR30461, PS51736,Coil,PF00239
MKKFPIDLSCLTEEEISQFQEDPYTLYNGDQDVALYLRYSSTGQSDQSIEGQLRDCRTFCKANHYRIVAIYVDRATTARKDVEKRVHLMEMISDSAKQNWEYVIVWKLDRFARNRNDSAIMKMRLRKNGVKVLSATEHLTDSPESIILESVLEGMAEFFSAELSQKVTRGMRESALKCHSVGGHIPLGYKVENHKLVVDPDTAHIVQEAFSLYANGESVAAICRKFNSAGYKTAKNTEFNRSSFKAMFRNTRYIGTYTYKDIVIENGIPAIIDKELFETVQRRLSKTATAPARGKAKVDYLLSGKLFCGHCGSSMNGESGAGRHGKVYHYYSCYTKKRKLGCDKRPLKKDYIEGIVARDALNLLTDQLIDEIADMAIRQSEQDLINDTHIPQLTAQLSEVEKSITNITAAIEKGIASETLMNRLVQLEHEKKTINKEIKAEEKFVYRIDRDQIVFWLSQFKYGNIEDEDFRRRLIDLLVNSVTVWDEPDGYKITTAYNLTSCKIKTFRVEKNPAAEEATGFDFGESECTKKPHQSGYFKRNA

SEQ ID NO: 2621 - protein, 542 aa, Unknown
  Description of Unknown: Integrase B2622 sequence
  PTHR30461:SF3,SM00857,G3DSA:1.10.10.2600,IPR036162,PF13408, IPR025827,G3DSA:3.40.50.1390,PS51737,IPR006119,IPR038109, PF07508,IPR011109,SSF53041,PTHR30461,Coil, PS51736,cd00338,PF00239
MKITAPARSARAVSLEAFVDNLNLANVVIYARYSSAGQNDQSIDGQLAKCREYAQQRGYRVVGEYCDRALSGRYAETRPEFQRMISDSAKHAFDFVLVWKLDRFSRDRYDSAIYKKKLSANGVRVLSVTEGVGDSSESVLLEAILEAMAEEYSRQLAQNVRRGMRQNAEKGLSLGGLAPLGYRVVNKQYEINADEARIVRFIHEQYADGAGQKQIVADCARLGYRNQRGNPLTLASVKRILANERYAGRYDYLGEIVIEDAFPAIVSKELKKRVHDRLKANSKAPGHAKAKVEYLLHGKLFCGECGAPMIGECGRGRHGATYYYYTCAARKKQHTCKKRNERKDELEACIVDYIGSCVLTDSWIDGAAERVVAEYQKSYDASGIKPLEKQIRDADKEIDQLVDALISATAEAARRRINERIETAEARKQALEADLASLRIASRVQIKKEDIVVWLNQFRTGDRSDLEYRKKVIDLFVNAIYLYDDSFKLFLNVADSAQVTYADALALAPPPVSDFGASGVPDMHLSEHIIFVNGVIGMIVQR

SEQ ID NO: 2622 - protein, 542 aa, Unknown
  Description of Unknown: Integrase B2623 sequence
  PTHR30461:SF3,SM00857,G3DSA:1.10.10.2600,IPR036162,PF13408, PS51737,IPR025827,G3DSA:3.40.50.1390,IPR006119,IPR038109, PF07508,IPR011109,SSF53041,PTHR30461,Coil, PS51736,cd00338,PF00239
MKITAPARSAGAVSLEAFVDNLNLANVVIYARYSSAGQNDQSIDGQLAKCREYAQQRGYRVVGEYCDRALSGRYAETRPEFQRLIADSAKRAFDFVLVWKLDRFSRDRYDSAIYKKKLRANGVRVLSVTEGVGDSSESVLLEAILEAMAEEYSRQLAQNVRRGMRQNAEKGLSLGGLAPLGYRVVNKQYEINEDEARIVRFIHEQYADGAGQKQIVADCARLGYRNQRGNPLTLASVKRILANERYVGRYDYLGEIVIEDAFPAIVSKDLKKRVRDRLKANAKAPGHAKAKVEYLLHGKLFCGECGAPMIGECGRGRHGATYYYYTCAARKKQHTCKKRNERKDELEASIVDYIGSCVLTDSWIDGAAERVVAEYQKSYDASGIKPLEKQIRDADKEIDQLVDALISATAEAARRRINERIETAEARKQALEADLASLRIASRVQIKKEDIVVWLNQFRTGDRSDLEYRKKVIDLFVNAIYLYDDSFKLFLNVADSAQVTYADALALAPPSVSDFGASGVPDMHLSEHIIFINGVIGMIVQR

SEQ ID NO: 2623 - protein, 541 aa, Unknown
  Description of Unknown: Integrase B2624 sequence
  cd03768,PTHR30461:SF3,SM00857,G3DSA:1.10.10.2600,IPR036162, PF13408,IPR025827,G3DSA:3.40.50.1390,PS51737,IPR006119, IPR038109,PF07508,IPR011109,SSF53041,PTHR30461, PS51736,Coil,PF00239
MRIAIYSRKSKFTGKGESIGNQVEMCRDYIATNYNGEEHSIQVFEDEGFSGKNLDRPQFKKMMEIENVIPFDLIVVYRLDRISRNVGDFASLIEKLNKKNTSFVCVKEHFDTGNSMGRAMMNIAAVFAQLERETIAERIKDNMYLLAKEGHWLGGTTPLGYKSIEVTNGKRTHFELIIDESQIDLVNIIFSKYKQLGSINGVETYLFVNGYKTQKNNYWHKSNVKRILTNPIYCIADIDSLNYFTELGCNVCFTLDDCNGKKGIYPYNRFSGQKREMQSYDRWIITISEHQGILTGKEWVAIQQQLKANSKDGFGGKANERRSTSNTSLLSGVLFCSCGAYMRPKKYPSGNTFYICENKMDKKITECNNSNINADELDKIILNELFSFDIKDDVVDSQIQNLKEQIANIDNDLQKQIGRLKKQIETNKNTVNKFMNIVALSIENDTPEQVVEVYNQKINELLNQNKITQKRIDELQDTNIVQAKMNDKLNSLTDAMAYLKENVDKLTIVEKRGFVKKIVDRIVWDGNNINIFIKGISELSE

SEQ ID NO: 2624 - protein, 541 aa, Unknown
  Description of Unknown: Integrase B2625 sequence
  cd03768,PTHR30461:SF3,SM00857,G3DSA:1.10.10.2600,IPR036162, PF13408,PS51737,IPR025827,G3DSA:3.40.50.1390,IPR006119, IPR038109,PF07508,SSF53041,IPR011109,PTHR30461, PS51736,Coil,PF00239
MRIAIYSRKSKFTGKGESIGNQVEMCRDYIATNYNGEEHSIQVFEDEGFSGKNLDRPQFKKMIEIENVIPFDLIVVYRLDRISRNVGDFASLIEKLNKKNTSFVCVKEHFDTGNSMGRAMMNIAAVFAQLERETIAERIKDNMYLLAKEGHWLGGTTPLGYKSIEVTNGKRTHFELIIDESQIDLVNIIFSKYKQLGSINGVETYLFVNGYKTQKNNYWHKSNVKRILTNPIYCIADIDSLNYFTELGCNVCFTLDDCNGKKGIYPYNRFSGQKREMQSYDRWIITISEHQGILAGKEWVAIQQQLKANSKDGFGGKANERRSTSNTSLLSGVLFCSCGAYMRPKKYPSGNTFYICENKMDKKITECNNSNINADELDKIVLNELFSFDIKDGVVDSQIQNLKEQIINIDNDLQKQIGRLKKQIEANKNTVNKFMNIVALSIENDTPEQVVEVYNQKINELLNQNKITQKRIDELQDTNIVQAKMNDRLNSLTDAMAYLKENFDKLTIVEKRGFVKKIVDRIVWDGNNINIFIKGISELSE

SEQ ID NO: 2625 - protein, 541 aa, Unknown
  Description of Unknown: Integrase B2626 sequence
  PTHR30461:SF3,cd00338,SM00857,G3DSA:1.10.10.2600,IPR036162, PF13408,PS51737,G3DSA:3.40.50.1390,IPR025827,IPR006119, IPR038109,PF07508,IPR011109,SSF53041,PTHR30461, PS51736,Coil,PF00239
MQTAVIYARYSSDKQTEQSIEGQLYDCYNYAKQHDITVVREYIDRAMTGKNDDRPAFQQMLHESAMHKWDSVIVWKLDRFARNTIDSAVNRQILAKNGVKLLSVMESFGDDASGQMMTHIIEAINEYYSADLQEKTIRGMRQSAMKAQTTGHIPLGYKVVDKKLVIDDDTRIIPETVFRMYAEGERLTDIAEHLNSQGYRNRRGRPFTTNSFYNMLANEKYIGIYKYDDIVIEGGIPQMIPNEVFEAVREKLIINRKRAAKNTAKADYYLSGKLYCGHCGEPMSGLSGTGRNGVKHYYYRCNGVQKKSGCHKKLENKYLIEDEVCRAARSAFEQMDKAETAETICQMYLQTVRNEYAPDELEKELTECTKQAENVVNAIAQTGGNQLLYDKVRELEERKEQLSSALRLSQAMTDNVPSVEQITVFIDDILATDINTTEGKKSIADIMISKVYVYDDKLTVIFKDKDGKSVDIPLSAVSDSSSADCAPSALGSQAILNTNHRKGIESDICKTPARPMVSVVLCSFIFVFYVWKQGFRMLTFM

SEQ ID NO: 2626 - protein, 541 aa, Unknown
  Description of Unknown: Integrase B2627 sequence
  cd03768,PTHR30461:SF3,SM00857,G3DSA:1.10.10.2600,IPR036162, PF13408,IPR025827,G3DSA:3.40.50.1390,PS51737,IPR006119, IPR038109,PF07508,IPR011109,SSF53041,PTHR30461, PS51736,Coil,PF00239
MRIAIYSRKSKFTGKGESIGNQVEMCRDYIATNYNGEEHSIQVFEDEGFSGKNLDRPQFKKMMEIENVIPFDLIVVYRLDRISRNVGDFASLIEKLNKKNTSFVCVKEHFDTGNSMGRAMMNIAAVFAQLERETIAERIKDNMYLLAKEGHWLGGTTPLGYKSIEVTNGKRTHFELIIDESQIDLVNIIFSKYKQLGSINGVETYLFVNGYKTQKNNYWHKSNVKRILTNPIYCIADIDSLNYFTELGCNVCFTLDDCNGKKGIYPYNRFSGQKRKMQSYDRWIITISEHQGILAGKEWVAIQQQLKANSKDGFGGKANERRSTSNTSLLSGVLFCSCGAYMRPKKYPSGNTFYICENKMDKKITECNNSNINADELDKIILNELFSFDIKDGVVDSQIQNLKEQVANIDNDLQKQIGRLKKQIETNKNTVNKFMNIVALSIENDTPEQVVEVYNQKINELLNQNKITQKRIDELQDTNIVQAKMNDRLNSLTDAMAYLKENFDKLTIVEKRGFVKEIVDRIVWDGNNINIFIKGISELSE

SEQ ID NO: 2627 - protein, 541 aa, Unknown
  Description of Unknown: Integrase B2628 sequence
  PTHR30461:SF3,SM00857,G3DSA:1.10.10.2600,IPR036162,PF13408, IPR025827,G3DSA:3.40.50.1390,PS51737,IPR006119,IPR038109, PF07508,SSF53041,IPR011109,PTHR30461,Coil, PS51736,cd00338,PF00239
MEAAIDTVQQPRVVRVVRNVATAPLTAQKIREQMIDTRLPVAAYARVSTTNEEQEDSLERQKAHYTEYIGNRPEWRFVGVYDDPGVTGTRADQRKGFQKLLADCRAGKIKKILCKSISRFARNTVDALQYIRELKELGIGIYFETQNIDTMTAGGDILITILAAIAEQESRNMSENIKWAFQKKFKEGEVVLACSQFLGYDHDKDKNIVINEEQAKVVRRIYREFLSGYACSAIAKRLTEDGIPTPSGKKQWRTGVIKSILTNEKYYGSAYLGKTCKRDVLSKERVASEEVYYVENSHPAIIPKDTWDLVQLEMTRRQEYRTCSETGNGKYSSKYPFSKKLICGECGMIYRRHAQYKRGNYVRTWVCITHKRKGNDYCSQRYILEDDVVNAFQTVLKELVGDMSSIKEILEKNVVDTLGEKEDNGGEQVLLQIQSLQTEMIDINRKKRSGEIAYEAYVARVREIADQVEVLEKQQREIQVAEESRISETKRIKDILEAINGMHPIDEFDGEIFRRLIDNVIIKNKRLTFNFKVGISKTITI

SEQ ID NO: 2628 - protein, 541 aa, Unknown
  Description of Unknown: Integrase B2629 sequence
  SM00857,G3DSA:1.10.10.2600,IPR036162,PS51737,G3DSA:3.40.50.1390, IPR006119,IPR038109,PF07508,IPR011109,SSF53041, PTHR30461,Coil,PS51736,cd00338,PF00239
MPKAISYIRFSTKIQSVGDSTKRQSKYINDWLKRNPDYYLDESLRFQDLGISGFSGANAKSGAFGEFLAAVESGYIEAGSVLLVESLDRVSRQDIDTAGEQLRKILRSGVEVVTLVDNEWYTKESLKDSLSMIKAMLVMERAHEESAMKSTRLRSMWAAKRERAANGEIMSKRCAAWLRVSEDRSHFEFIHENVKAVQRVFQLRLEGLSHIKIAKKMNDEGFYTLNQHKSIKGGWSQSSVTELLSNRSVIGFKVPSKSMAVKGVSEIPNYYPSIITDEQFYAVQQLKQGSGRKPSSDLPLLTNLFKGVLRCSECGFIVVVAGVSAKRSGIYKCSMKSEGRCNSVGFSRLQTDRALVQGLLYNTNRLSLNRDNGSAIGSLQSELEQLQKQRERLIKLAMLADDTESMAKDLKALNSQIKDAENAVSEVHQREQSSQLETISHLDLTVKKDRIEAQIIIKRIVKEIRLNTAGKKCDVFLHNGLKLLNFPLDRVVDGAQWLEILPLIDGDEFDFEGFTTKPRHIALEEAPEWVKEMEEQPSQPL

SEQ ID NO: 2629 - protein, 541 aa, Unknown
  Description of Unknown: Integrase B2630 sequence
  PTHR30461:SF3,IPR036162,PS51737,IPR011109,PTHR30461, PF00239,G3DSA:1.10.10.2600,IPR006119,SSF53041,cd00338, SM00857,IPR025827,IPR038109,mobidb-lite, PS51736,PF13408,G3DSA:3.40.50.1390,PF07508,Coil
MALTYVVAYARFSSDNQREESIDAQLRAIRQYCQQHDYILLDTYVDEARSATTDDRPAFQQMIKDSASGDWSAVIVHKLDRFSRNRYDSAIYKKQLKDNGVHVESVLERLDDSPESVILESLLEGMSEYYSKNLAREVLKGKHETALQCKHNGGQPPYGLMVNKDGTYAINEYEAEAVRMIFRLTGEGYTMAEIKATLADRGFTTRSGRSFATTTINTMLHNEKYCGTYVYNRTKPQPKGGKRTNESRPDDEIIRIPHGIPAIIDNRTFEEVQVILKRRSNMGAKRARAAKEVYLLQGLIKCGNCGAAMVGSRRKDGRNKTLRITYECNGRKRKATNCKMRGINRDFVENIVINYIEQHILSDEAMERVKEKIVIELNRMAADSPSSLPSLNKELRDTEQKLDKLIEAITAGINALVIKDQIEALDKKKQQLEAQIEQLKARQQMTASFDDVALDDYIKQYRDIRSKTRPHQKEIINKFVDEVLVYDNDQDGDKIVIKTKIPESYVTIFSGDSICSLSAPLNGHYTNTYYFKGGFAVLVWL

SEQ ID NO: 2630 - protein, 541 aa, Unknown
  Description of Unknown: Integrase B2631 sequence
  PTHR30461:SF3,SM00857,G3DSA:1.10.10.2600,IPR036162,PF13408, PS51737,IPR025827,G3DSA:3.40.50.1390,IPR006119,IPR038109, PF07508,IPR011109,SSF53041,PTHR30461,Coil, PS51736,cd00338,PF00239
MKKEKAKTPENNRAAVYARYSSRKQGEQSIEGQLSEAYKYAETHGYNIIHEYIDRAKSGRTDNREAFQEMLRDTAKGTFSTIILWKLDRFGRNREEIAANKYRCKKNGVKVVYVAENVPDSPEGVILESVLEGMAEYYSLQLSQNVRRGMHANAEKCQSTGGTTPLGYAVDPATKKFVIDPNTAPTVRRIFDMYAGGTKISEIVRTLNDSGIRTARGSRFKVDSLYTVLRNVKYTGIYTYNGDVRIENGIPAIVDRATFEKVQEMLKVNKRKPSKLWDTFDYILTDKLFCGMCGSKMIGESGTSKNGTKHSYYTCVKKRRDHACKKKAVRQHYIETLVLDRIAAILDDDSLLAFIADNVYSYYVKLQNDDDMTDALKKRLREVEKAQINILRAIEAGVFNDMTKARMDELDEQKSELQAQIAEEEYAKTGLATRDTILAWLYSQREKDLNDRASQRQLIETFVNAIYVFDDRIEILFNYSRDRRSIKFEELSDLYEYGDVFVSSALSFTKKTPHCRCLFSMKSVAAKRVKQFRCEIFAPQI

SEQ ID NO: 2631 - protein, 541 aa, Unknown
  Description of Unknown: Integrase B2632 sequence
  PTHR30461:SF3,SM00857,G3DSA:1.10.10.2600,IPR036162,PF13408, PS51737,G3DSA:3.40.50.1390,IPR025827,IPR006119,IPR038109, PF07508,SSF53041,IPR011109,PTHR30461,Coil, PS51736,cd00338,PF00239
MNAVIYARFSSHSQREQSIEGQLRDCYEYAKRYDINIVGEYIDRAISGMTDDRPDFQRMIADAPKKQFERIIVWKLDRFARNRYDSALYKHKLKQYGIRVISAMENVGEGDESILLEALLEASAEYYSLDLKKKILRGQRETIAKGRWCGGPIPYGYKAVDGKLVADEKTAPIIRYVFEQYAQGVPMKEIIDELKRRGVRSSRGGELTYTTFSRALTNPVYIGNFMYKGELVPGVADALIDEDTYNKVQIIVKANAHAPAANKAKVEYLLQGKAFCGHCGSHMVGESGKSRNGDVYYYYSCAARKKAHKCRKKNEKKDFIEWYVVEQTLQYVLTPARMRDIAKAVVAEYDKEFAGSRVEEYEKAIKQYERELDKLVDALVDAPKVAHKRIYEKMETLETQKASMENELVKLRIASEIRFTEEEVRAWLRRFCTGDLFDPEFRRNIIDTFINCIYLYDDRIIIFYNIKGGKQVSFVDLAESLDNESESSGSDLNANAPASAGAHIRRWLRPPQFQETFPWHSCAPERWEPAYPTRYTPATGR

SEQ ID NO: 2632 - protein, 541 aa, Unknown
  Description of Unknown: Integrase B2633 sequence
  cd03768,SM00857,G3DSA:1.10.10.2600,IPR036162,PF13408, PS51737,G3DSA:3.40.50.1390,IPR025827,IPR006119,IPR038109, PF07508,IPR011109,SSF53041,PTHR30461,PS51736, PF00239
MEEIKCAIYTRKSTDEGLEKEFNTLEAQREAGENYVKSQKHQGWILVDEHYDDGGFSGGNMKRPALQRLFKDIELGKINMIVVYKIDRLTRSLVDFSKMVDIFDKYHCSFVSVTQNFNTSDSMGRLTLNMLLSFAQFEREIGSERVRDKTAASRKKGMWTGGTVPFGYRSVNKKLEIEPNEAEAVKFMFEMYIKYKSAMAVCKLLTEKGYRAFRRDAVLRMLKNPIYEGKIKYKHELYDGQHQAIIRQKTFEAVQYILLNKDKRERTCLFNRNEVGILRGLLICGCCHAPMTPASCQSHGVRRYYYTSTKAKYYGYHHCSNGAVPVALMDECMTKIVTPLISDINVLNGLINKICPDKSAEIYKVMRNPEKIIERMTERDKLQLMKLLIKKIIVNYDTIEINWSDLALSLLPAYLRARTQNQITIIDYPFKRNKGALTLSLPEEVAPNINYNAELITALCKAFKYQKIMNKEKQSIIELAANENIDSGYLGRLIRLTCLAPDIIKRILEGTQPTTIYLKRLLREDIPPIWQDQRIKYGFVK

SEQ ID NO: 2633 - protein, 541 aa, Unknown
  Description of Unknown: Integrase B2634 sequence
  PTHR30461:SF3,IPR036162,PS51737,IPR011109,PTHR30461, PF00239,G3DSA:1.10.10.2600,PF14287,IPR006119,SSF53041, IPR025378,SM00857,IPR025827,cd03770,IPR038109, PS51736,PF13408,G3DSA:3.40.50.1390,PF07508,Coil
MEKDKKVTALYCRLSKDDGSNSESLSIRTQKSMLMEYATRNGFGNCQYYVDDGYSGTNSDRPAFQELLDDIREGKVATVITKDQSRLGRNHIETGTYMEIFFPEHGVRYIAINDGYDSNEQSQMDIAPFRNIINEMYAKDTSRKIKSALRTRKKSGKYISSGAPFGYQKDPADHNHLVIDPNTAPVVEYIYSMAEEGLGLHRIAKRLHDEKVLKPCYYKKEMFGRFIDDEKMYDWDSAYISQVLHSPVYAGHIIYEAKPTVSMKSKKRRYIPFEERAIVPNTHEAIIPQDRWENVQRILYSRSSSFMCDKTDYDNIFKGIVRCADCGRTMLVKVEHRRKRNSVLDQTFYCCSTYRKYGAKACDSHNLEARVLHEAVFADIQAHAKAAVSNREALVKKIANQMHLRVSSDRAQHKRDLKQCKARIAEIEDLYAKLYEDVSKGLLPEKRFQMLADRYDKEQAELTEKIEQYEREGRAEHDQLDKIQDFIDEVSKYAGITELNYKILHQLIDKILVSKAEKVDGEYVQKIQIFYRFIGPLDAIE

SEQ ID NO: 2634 - protein, 541 aa, Unknown
  Description of Unknown: Integrase B2635 sequence
  PTHR30461:SF3,SM00857,G3DSA:1.10.10.2600,IPR036162,PF13408, IPR025827,G3DSA:3.40.50.1390,PS51737,IPR006119,IPR038109, PF07508,IPR011109,SSF53041,PF00239,PTHR30461, PS51736,Coil,cd00338
MAKRIPAAASDCDGMIGVIYARYSSHSQREESIEDQLRECHEFAARNNIKIIAEYTDSALTGRTDSRPDFQKMIRDSARGKFQVVVTYKVDRFARDRYDSAIYKAKLRKNGVRVLYAKETIPDGPEGIILESVLEGYAEYYSAALSQNILRGLEGNAMKCKTNGVQVLGYYTGEDGCYEIDPDYASVVLSIFQKYDAGIPQKEIIDDLNARGFRTTRGFAFNKNSVTRILRNRKYIGEYSWGDVTVPGGMPQIVPLPLFDSVQRKLDRGSRAPAHKWKVADYILTSKLFCGHCGELMVGRAGTGKSGKKYDYYACVNRTRRHGCDKKPVKKEWIEDIVVKYTKEVVLAENMIEQIADGVMDFLEREKKSNGELDALEASLKNVESSIRNMMQAIEQGIITKSTKQRLMELEEQQDQISAAIAREKMATPDIERDQIVYFLEKFKEGSLDDPDYRTKLVEAFVSSVYLWDDGRIVINYNYTGENNQLTLRQIEQELVDIDGAEGSPLDSSAPLNESEANTTRILYFRGVVSFVFNWKVFAEH

SEQ ID NO: 2635 - protein, 541 aa, Unknown
  Description of Unknown: Integrase B2636 sequence
  PTHR30461:SF3,SM00857,G3DSA:1.10.10.2600,IPR036162,PF13408, PS51737,G3DSA:3.40.50.1390,IPR025827,IPR006119,IPR038109, PF07508,IPR011109,SSF53041,PTHR30461,Coil, PS51736,cd00338,PF00239
MPFVKTGTVPPENALNAVLYCRYSSTQQTENSIDGQLRECRRFADYHGYKIIGEYIDRAKSGTSVEQRDDFLRMVGDAKKQQFAFVIVYRFDRFARNRYDSVVYKRQLAISGVRVISATEAVADGPDGAILEAMYEAMDESYSRRLSAITLRGIQEAARKGIWCSAIPFGYRTEDKRLIIDEKEAAAVREIYTQYADGKTKTEIANWLNSHGYRTHRGNPFTCNNFNTILSNPVYIGTGKCREIDVETPAILDKDLYDAVQKLLAKNAPARGRKTDKRYFALTGKLYCGLCGCAMTSDLGTSQNGTVHGYYSCSRRKTSHGVRGGKCPKKSERQDFLEWYIVRQTMAHVLTDARIAEISERLEKLSHEDQASTSIRAIEARQKEINCALDDLTNKLISTSNQLIISRINTRADELAVELAALDADLSHLRLQVDHSLTAAQIAAYLRTLRNGDPLDPDFRRRIIDSFIQRVYLFDDKILVYYNIKETAPITYDQAIDDLDGLSAQLSSGSADFGSPNKSLPEHILFVYSNNTFGAVIRIER

SEQ ID NO: 2636 - protein, 541 aa, Unknown
  Description of Unknown: Integrase B2637 sequence
  SM00857,G3DSA:1.10.10.2600,IPR036162,PF13408,IPR025827, G3DSA:3.40.50.1390,IPR006119,IPR038109,PF07508,IPR011109, SSF53041,PTHR30461,Coil,PS51736,cd00338, PF00239
MAYRKEQDTIGLRAAFYARVSTAEEEQLNAIELQIEENRNAIERHKWKKVDEYIDRSKSGTMVKGRDEYQRLFDDLYSDKFDVVVIKDQERLMRNTLDWYLFINRLVSTGKILYMYMEDRFYSPDDALITGIKAIIAEEFSRNLSKKLRNYHAGRVAKAREGKEIDLQGSGNVFGWDKKEGRYILNPEQAKIRRLMCEGIMARKGSTQIAKELNDAGYRNTVGKKWKPMDIPKFVYDCKNVGTMIINKERHDFESKKTIKLPESEWVYVKNALPPIVTEEEWALICKIHEERVIATGCNKRGKKTTGFSFSGKIYCGLCDAPYWRKQRVSKEEYWVCSTKQTKGRKTRARDAVGGKAGEFNAEGCDNENISYGALMAIMELVSERLKADTGVIKEFMIERLNGYKKRITEANRGATEADLQRELDRKDRLLDAYLDHILTKEEYQRKALALDEKIMELKREVTANRGNLEDLNEIDRVLANIDAEVAKYLDDNSQLKVEYLLEHLEKVVIYPDKAVVIIPILCEGFVVDKAQYVSREKRRR

SEQ ID NO: 2637 - protein, 541 aa, Unknown
  Description of Unknown: Integrase B2638 sequence
  SM00857,G3DSA:1.10.10.2600,IPR036162,PF13408,PS51737, G3DSA:3.40.50.1390,IPR025827,IPR006119,IPR038109,PF07508, IPR011109,SSF53041,PTHR30461,Coil,cd00338, PF00239
MAYRKITDIRDTIGMRAVFYARVSTAEEEQLNAIELQIEENRGCIKDHGWKLVGEYIDRSKSGTTVKGRDDYQRLYEDLYEDLFDIVVIKDQERLQRNTLDWYLFINRVVQTGKLLFMYMDGKFYSPDDALITGVRAIIAEEFSRNLSKKLHNYHDHRIEKARQGQEIALQGSGNVYGWDKKDGKYYINPEQAKVRRLMCEGIMARKGSTLIAKELNDAGYRNTVGKPWKPMDIPKFVYDCKNVGTMIINKERHDFESKQTIKLPKEEWVYVENALPQIVTQEEWDLICKIHEERVIATGSDRRGKKTSGYSFSGKLVCGICGAPYWRKQRVSKDEYWVCSTKQTKGRRTRKRDSTMGKAGEINPLGCDNENISYNSLMEIMGVVSERLQANTDTIKQDMINWLTKLRKQLLEANGGHTEADLQRELSRKSKLLDAYLDGILNKQEYQKKAEELDERIIQLKEETEKNKANSGDIAEIDKVLANIDEEVSRYVDGNEKLKVEYLLEHLEQVQIFPDKVIVIVPILSEGIVVEKTQYVSREK

SEQ ID NO: 2638 - protein, 541 aa, Unknown
  Description of Unknown: Integrase B2639 sequence
  cd03768,PTHR30461:SF3,SM00857,G3DSA:1.10.10.2600,IPR036162, PF13408,IPR025827,PS51737,G3DSA:3.40.50.1390,IPR006119, IPR038109,PF07508,SSF53041,IPR011109,PTHR30461, PS51736,Coil,PF00239
MRIAIYSRKSKFTGKGESIGNQVEMCRDYIATNYNGEEHSIQVFEDEGFSGKNLDRPQFKKMIEIENVIPFDLIVVYRLDRISRNVGDFASLIEKLNKKNTSFVCVKEHFDTGNSMGRAMMNIAAVFAQLERETIAERIKDNMYLLAKEGHWLGGTTPLGYKSIEVTNGKRTHFELIIDESQIDLVNIIFSKYKQLGSINGVETYLFVNGYKTQKNNYWHKSNVKRILTNPIYCIADIDSLNYFTELGCNVCFTLDDCNGKKGIYPYNRFSGQKREMQSYDRWIITISEHQGILAGKEWVAIQQQLKANSKDGFGGKANERRSTSNTSLLSGVLFCSCGAYMRPKKYPSGNTFYICENKMDKKITECNNSNINADELDKIILNELFSFDIKDGVVDSQIQNLKEQVANIDNDLQKQIGRLKKQIETNKNTVNKFMNIVALSIENDTPEQVVEVYNQKINELLNQNKITQKRIDELQDINIVQAKMNDKLNSLTDAMVYLKENFDKLTIVEKRGFVKKIVDRIVWDGKNINIFIKGISELSE

SEQ ID NO: 2639 - protein, 541 aa, Unknown
  Description of Unknown: Integrase B2640 sequence
  PTHR30461:SF3,SM00857,G3DSA:1.10.10.2600,IPR036162,PF13408, IPR025827,G3DSA:3.40.50.1390,PS51737,IPR006119,IPR038109, PF07508,IPR011109,SSF53041,PTHR30461,Coil, PS51736,cd00338,PF00239
MKLTHGAYILARFSTDNQEVDSIDVQVQKCREWCEREHLPVLDVFADEATSGMKDTRPEYSRMMRRLAEGGADTVVIYDQSRMFRKLTAWFQFREQVACYGVRVVAVTQPIIGGDLRDPMTFLSEGSMALMNQMWVLQTRQKVIAKMRYMAEQGKHTGGKPPLGYDVRDERLVVNEEEADTVRIIFGDYAAGSSYINIIRKLNGLGRLTKAGKPFGKNSLYEILKNEKYIGTLVYGKVEQRPDGQRNSHAVSDSVIRIENKIPAIIDRAIWDMVQKKMKANQKEKAGRPAKRDYPLKGKVFCRECKSAMSLEGSRGYYYYVCGKQRRTCDCDGSRIKVDLLEQLIADAMREIIGNPQNVEYIIQIVREERGKIIDTAAQQMQILFARSEEINKQLDAATNAVLAGMLSDTLMDKVHALEAERNEIDREMAKLKHSADCAAMPDGQLRTLLNSAAGDVTALLSLVMRVEVGKEEIVVWTLLDADPKGHFDFSEDGTKIDLKTDGGGAYENSGCTLASTMNFHNFFIAGGLLRFSIPRKKRRG

SEQ ID NO: 2640 - protein, 541 aa, Unknown
  Description of Unknown: Integrase B2641 sequence
  PTHR30461:SF3,SM00857,G3DSA:1.10.10.2600,IPR036162,PF13408, IPR025827,PS51737,G3DSA:3.40.50.1390,IPR006119,IPR038109, PF07508,SSF53041,IPR011109,PF00239,PTHR30461, PS51736,Coil,cd00338
MKKFPIDLSCLTEEEISQFQEDPYTLYNGDQDVALYLRYSSTGQSDQSIEGQLRDCRAFCKANHYRIVAIYVDRATTAHKDVEKRVHLMEMVADSAKQNWEYVIVWKLDRFARNRNDSAIMKMRLRKNGVKVLSATEHLTDSPESIILESVLEGMAEFFSAELSQKVTRGMRESALKCHSVGGHIPLGYKVENHKLVVDPDTAHIVQEAFSLYANGESVADICRKFNSAGYKTAKNTEFNRSSFKAMFRNTRYIGTYTYKDIVIENGIPAIIDKELFETVQRRLSKTATAPARGKAKVDYLLSGKLFCGHCGASMNGESGAGRHGKVYHYYSCYTKKRKLGCDKRPLKKDYIEGIVARDALNLLTDQLIDEIADMAIRQSEQDLINDTHIPQLTAQLSEVEKSIMNITAAIEKGIASETLMNRLVQLEHEKKTLNKEIKAEEKFVYRIDRDQIVFWLSQFKYGNIEDENFRRRLIDLLVNSVTVWDEPDGYKITTAYNLTSCKTKTFRVDKNPAAEEATGFDFGESECTMRKRQSIRLPLS

SEQ ID NO: 2641 - protein, 541 aa, Unknown
  Description of Unknown: Integrase B2642 sequence
  PTHR30461:SF3,cd00338,SM00857,G3DSA:1.10.10.2600,IPR036162, PF13408,PS51737,IPR025827,G3DSA:3.40.50.1390,IPR006119, IPR038109,PF07508,IPR011109,SSF53041,PTHR30461, mobidb-lite,Coil,PF00239
MPKKPTKHPAKPKRGKKLETEEPGVLYGRYSSHNQKDISVEQQFEKGYELAAEYGIKIIDTYADRAVSGRTDKRKDFQRMMSDAAKGKFRYVIAWKSNRMGRNMLEALINEARLQELGVRVLYVEEDFDDTAAGRFAARSMMNVNQFYSENMAEDIRRGLYDNASNCMVANGHLPYGYKRDDTLHYVIDEPKAAVIREIFTRVAAGEPFVDIMSSLNARGIKTSYNRPWGRSSFQKILSNERYRGIYIYGDVRKEDGIPRIISDELFFKVQEVITTKKNPQGRHRVNGDYLLTGKLFCGKCKSPMVGISGTGRSGKLHYYYVCQKHRTEKTCDKKNVRRDEIELQVAQAIKDYALKDDVIEWIADSTVAYNERKEAESKVGILEDQLAGTERGIKNIMSAIEQGIITETTKSRLVELESERATIKAKIAAARADIVTVSRDDIISGLEMFRDGDVHDKKYQARLFDTFLVAVYVYDDDLRLVFSFSGSKNTVQIPIESAVNAVENNEAKCSFKLCSAPPYPPQHICCGGFFCCQRSENMVS

SEQ ID NO: 2642 - protein, 541 aa, Unknown
  Description of Unknown: Integrase B2643 sequence
  cd03768,PTHR30461:SF3,SM00857,G3DSA:1.10.10.2600,IPR036162, PF13408,IPR025827,G3DSA:3.40.50.1390,PS51737,IPR006119, IPR038109,PF07508,SSF53041,IPR011109,PTHR30461, PS51736,Coil,PF00239
MRIAIYSRKSKFTGKGESIGNQVEMCRDYIATNYNGEEHSIQVFEDEGFSGKNLDRPQFKKMIEIENAIPFDLIVVYRLDRISRNVGDFASLIEKLNKKNTSFVCVKEHFDTGNSMGRAMMNIAAVFAQLERETIAERIKDNMYLLAKEGHWLGGTTPLGYKSIEVTNGKRTHFELIIDESQIDLVNIIFSKYKQLGSINGVETYLFVNGYKTQKNNYWHKSNVKRILTNPIYCIADIDSLNYFTELGCNVCFTLDDCNGKKGIYPYNRFSGQKREMQSYDRWIITISEHQGILTGKEWVAIQQQLKANSKDGFGGKANERRSTSNTSLLSGILFCSCGAYMRPKKYPSGNTFYICENKMDKKITECNNSNINADELDKIILNELFSFDIKDGVVDSQIQNLKEQVANIDNDLQKQIGRLKKQIETNKNTVNKFMNIVALSIENDTPEQVVEVYNQKINELLNQNKITQKRIDELQDTNIVQAKMNDRLNSLTDAMAYLKENFDKLTIVEKRGFVKEIVDRIVWDGNNINIFIKGISELSE

SEQ ID NO: 2643 - protein, 541 aa, Unknown
  Description of Unknown: Integrase B2644 sequence
  PTHR30461:SF3,SM00857,G3DSA:1.10.10.2600,IPR036162,PF13408, IPR025827,G3DSA:3.40.50.1390,PS51737,IPR006119,IPR038109, PF07508,SSF53041,IPR011109,PTHR30461,Coil, PS51736,cd00338,PF00239
MPFVKTGTVPPENALNAVLYCRYSSTQQTENSIDGQLRECRRFADYHGYKIIGEYIDRAKSGTSVEQRDDFLRMVGDAKKQQFAFVIVYRFDRFARNRYDSVVYKRQLAISGVRVISATEAVADGPDGAILEAMYEAMDESYSRRLSAITLRGIQEATRKGIWCSAIPYGYRTEDKRLIIDEKEAAAVREIYTQYADGKTKTEIANWLNSHGYRTHRGNPFTCNNFNTILSNPVYIGTGKCREIDVETPAILDKDLYDAVQKLLAKNAPARGRKTDKRYFALTGKLYCGLCGCAMTSDLGTSQNGTVHGYYSCSRRKTSHGVRGGKCPKKSERQDFLEWYIVRQTMAHVLTDARIAEISERLEKLSHEDQASTSIRAIEARQKEINCELDDLTDKLISTSNQLIISRINTRADELAVELAALDADLSRLRLQVDHSLTAAQIAAYLRTLRNGDPLDPDFRRRIIDSFIQRVYLFDDKILVYYNIKETAPITYDQAIDDLDGLSAQLSSGCADFGSPNESLPEHILFIYSNNAFGAVIRIDK

SEQ ID NO: 2644 - protein, 541 aa, Unknown
  Description of Unknown: Integrase B2645 sequence
  PTHR30461:SF3,SM00857,G3DSA:1.10.10.2600,IPR036162,PF13408, IPR025827,G3DSA:3.40.50.1390,PS51737,IPR006119,IPR038109, PF07508,SSF53041,IPR011109,PTHR30461,Coil, PS51736,cd00338,PF00239
MRLTHGAYILARFSTDNQEVDSIDVQVQKCREWCAREHLPVLDVFADEATSGMKNTRPEYSRMMRRLAEGGADTVVIYDQSRMFRKLTAWFQFREQVACYGVRVVAVTQPIIGGDLRDPMTFLSEGSMALMNQMWVLQTRQKVIAKMRYMAEQGKHTGGKPPLGYDVRDERLVVNEEEADTVRIIFGDYAAGSSYINIIRKLNGLGRLTKAGKPFGKNSLHEILKNEKYIGTLVYGKVEQRPDGQRNSHAVSDSVIRIENKIPAIIDRAIWDMVQKKMKANQKEKAGRPAKRDYPLKGKVFCRECKSAMSLEGSRGYYYYVCGKQRRTCDCDGSRIKVDLLEQLIADAMREIIGNPHNVEYIIQIVREERGKIIDTAAQQMQILFARSEEINKQLDAATNAVLAGMLSDTLMDKVHALEAERNEIDREMTKLKYSADCAAMPEGQLRTLLNSAVGDVSALLSLVMRVEVGKEEIVVWTLLDADPKGHFDFSEDGTKIDLKTDGGGAYENSWCTLASTMNFHNFFIAGGLLRFSIPRKKRRG

SEQ ID NO: 2645 - protein, 541 aa, Unknown
  Description of Unknown: Integrase B2646 sequence
  cd03768,PTHR30461:SF3,SM00857,G3DSA:1.10.10.2600,IPR036162, PF13408,IPR025827,G3DSA:3.40.50.1390,PS51737,IPR006119, IPR038109,PF07508,SSF53041,IPR011109,PTHR30461, PS51736,Coil,PF00239
MRIAIYSRKSKFTGKGESIGNQVEMCRDYIATNYNGEEHSIQVFEDEGFSGKNLDRPQFKKMIEIENAIPFDLIVVYRLDRISRNVGDFASLIEKLNKKNTSFVCVKEHFDTGNSMGRAMMNIAAVFAQLERETIAERIKDNMYLLAKEGHWLGGTTPLGYKSIEVTNGKRTHFELIIDESQIDLVNIIFSKYKQLGSINGVETYLFVNGYKTQKNNYWHKSNVKRILTNPIYCIADIDSLNYFTELGCNVCFTLDDCNGKKGIYPYNRFSGQKREMQSYDRWIITISEHQGILAGKEWVAIQQQLKANSKDGFGGKANERRSTSNTSLLSGVLFCSCGAYMRPKKYPSGNTFYICENKMDKKITECNNSNINADELDKIILNELFSFDIKDGVVDSQIQNLKEQVANIDNDLQKQIGRLKKQIETNKNTVNKFMNIVALSIENDTPEQVVEVYNQKINELLNQNKITQKRIDELQDTNIVQAKMNDRLNSLTDAMAYLKENFDKLTIVEKRGFVKEIVDRIVWDGNNINIFIKGISELSE

SEQ ID NO: 2646 - protein, 541 aa, Unknown
  Description of Unknown: Integrase B2647 sequence
  PTHR30461:SF3,cd00338,SM00857,G3DSA:1.10.10.2600,IPR036162, PF13408,PS51737,G3DSA:3.40.50.1390,IPR025827,IPR006119, IPR038109,PF07508,IPR011109,SSF53041,PTHR30461, PS51736,Coil,PF00239
MARKKNIAAGQNAVIYARYSSHNQREVSIEQQVRECMKHAAELGLHVVGTYEDRAISGKTDKRPNFQRMMRDAEKGKFQAVVAWKSNRIGRNMLQAMVNEAKLEDCGVKVFYAEEDFDDTAAGRFALRNMMNVNQFYSENMAEDITRGLYDNASKCMANGRQPLGYKRGEDGRVVLDEANAAVVREIFTRVAAGDLFVDIARDLNAQGIKTSKGANWNKGSFQSICQNERYRGIYIYGDVRVADGIPRIVSDDLWYRVQEAMRMKKNPVGTRHRVGAEDYLLTGKLRCGHCGSYMTGVSGTSRNGELHYYYTCQKRRTEHACDKKNIRRDVIEPAVAQAIKMYCLTDDVIAWIADRTVEYWEKHDNDLQIEALEQQLEENKKATSNMLKAIEMGIITEATRTRMVELETEQSRLSVQLNVAKEDVVKIDREQIISYLELLQQGDIHDRDFQMELFKNFLVAVYVYDDNRMKLVFSCMGDQNSVEIPLETGEDPPDGGLSPDAKMFVLTPDSSTKKALYFVGSMVLFFFIPAKRSGGAPLAM

SEQ ID NO: 2647 - protein, 541 aa, Unknown
  Description of Unknown: Integrase B2648 sequence
  cd03768,PTHR30461:SF3,SM00857,G3DSA:1.10.10.2600,IPR036162, PF13408,IPR025827,G3DSA:3.40.50.1390,PS51737,IPR006119, IPR038109,PF07508,IPR011109,SSF53041,PTHR30461, PS51736,Coil,PF00239
MRIAIYSRKSKFTGKGESIGNQIEMCRDYIATNYNGEEHFIQVFEDEGFSGKNLDRPQFKKMMEIENVIPFDLIVVYRLDRISRNVGDFASLIEKLNKKNTSFVCVKEHFDTGNSMGRAMMNIAAVFAQLERETIAERIKDNMYLLAKEGHWLGGTTPLGYKSIEVTNGKRTHFELIIDESQIDLVNIIFSKYKQLGSINGVETYLFVNGYKTQKNNYWHKSNVKRILTNPIYCIADIDSLNYFTELGCNVCFTLDDCNGKKGIYPYNRFSGQKREMQSYDRWIITISEHQGILAGKEWVAIQQQLKANSKDGFGGKANERRSTSNTSLLSGVLFCSCGAYMRPKKYPSGNTFYICENKMDKKITECNNSNINADELDKIVLNELFSFDIKDGVVDSQIQNLKEQIINIDNDLQKQIGRLKKQIEANKNTVNKFMNIVALSIENDTPEQVVEVYNQKINELLNQNKITQKRIDELQDTNIVQAKMNDRLNSLTDAMAYLKENFDKLTIVEKRGFVKKIVDRIVWDGNNINIFIKGISELSE

SEQ ID NO: 2648 - protein, 541 aa, Unknown
  Description of Unknown: Integrase B2649 sequence
  cd03768,PTHR30461:SF3,SM00857,G3DSA:1.10.10.2600,IPR036162, PF13408,PS51737,IPR025827,G3DSA:3.40.50.1390,IPR006119, IPR038109,PF07508,IPR011109,SSF53041,PTHR30461, PS51736,Coil,PF00239
MRIAIYSRKSKFTGKGESIGNQIEMCRDYIATNYNGEEHSIQVFEDEGFSGKNLDRPQFKKMMEIENVIPFDLIVVYRLDRISRNVGDFASLIEKLNKKNTSFVCVKEHFDTGNSMGRAMMNIAAVFAQLERETIAERIKDNMYLLAKEGHWLGGTTPLGYKSIEVTNGKRTHFELVIDESQIDLVNIIFSKYKQLGSINGVETYLFVNGYKTQKNNYWHKSNVKRILTNPIYCIADIDSLNYFTELGCNVCFTLDDCNGKKGIYPYNRFSGQKREMQSYDRWIVTISEHQGILAGKEWVAIQQQLKANSKDGFGGKANERRSTSNTSLLSGVLFCSCGAYMRPKKYPSGNTFYICENKMDKKITECNNSNINADELDKIILNELFSFDIKDGVVDSQIQNLKEQVANIDNDLQKQIGRLKKQIETNKNTVNKFMNIVALSIENDTPEQVVEVYNQKINELLNQNKTTQKRINELQDTNIVQAKMNDRLNSLTDAMAYLKENFDKLTIVEKRGFVKEIVDRIVWDGKNINIFIKGISELSE

SEQ ID NO: 2649 - protein, 541 aa, Unknown
  Description of Unknown: Integrase B2650 sequence
  cd03768,PTHR30461:SF3,SM00857,G3DSA:1.10.10.2600,IPR036162, PF13408,PS51737,G3DSA:3.40.50.1390,IPR025827,IPR006119, IPR038109,PF07508,IPR011109,SSF53041,PTHR30461, PS51736,Coil,PF00239
MRIAIYSRKSKFTGKGESIGNQVEMCRDYIATNYNGEEHSIQVFEDEGFSGKNLDRPQFKKMIEIENVIPFDLIVVYRLDRISRNVGDFASLIEKLNKKNTSFVCVKEHFDTGNSMGRAMMNIAAVFAQLERETIAERIKDNMYLLAKEGHWLGGTTPLGYKSIEVTNGKRTHFELIIDESQIDLVNIIFSKYKQLGSINGVETYLFVNGYKTQKNNYWHKSNVKRILTNPIYCIADIDSLNYFTELGCNVCFTLDDCNGKKGIYPYNRFSGQKREMQSYDRWIITISEHQGILAGKEWVAIQQQLKANSKDGFGGKANERRSTSNTSLLSGVLFCSCGAYMRPKKYPSGNTFYICENKMDKKITECNNSNINADELDKIVLNELFSFDIKDGVVDSQIQNLKEQIINIDNDLQKQIGRLKKQIEANKNTVNKFMNIVALSIENDTPEQVVEVYNQKINELLNQNKITQKRIDELQDTNIVQAKMNDRLNSLTDAMAYLKENFDKLTIVEKRGFVKEIVDRIVWDGNNINIFIKGISELSE

SEQ ID NO: 2650 - protein, 541 aa, Unknown
  Description of Unknown: Integrase B2651 sequence
  PTHR30461:SF3,SM00857,G3DSA:1.10.10.2600,IPR036162,PF13408, PS51737,G3DSA:3.40.50.1390,IPR025827,IPR006119,IPR038109, PF07508,IPR011109,SSF53041,PTHR30461,Coil, cd00338,PF00239
MPRKPAKHPAKPKRGKKLEIEEPGVLYGRYSSHNQKDISVEQQFEKGYELAVEYGIRIIDTYADRAVSGRTDKRRDFQRMMTDAAKGKFRYVIAWKSNRMGRNMLEALINEARLQDLGVRVLYVEEDFDDTAAGRFAARSMMNVNQFYSENMAEDIKRGLYDNAANCMVANGHLPYGYKADETLHYAIDEPKAAVIREIFTRVSCGEAFVDIMASLNARGIKTSYGRPWGRSSFQKILSNERYRGIYIYGDVRKEGGIPRIISDELYFKVQEVITTKKNPQGRHRVNGDYLLTGKLFCGHCKSPMTGVSGTGRSGNLHYYYVCQKRRTEKTCDKKNVRRDEIELQVAQAIKDYALKDDVIEWIADSTVAYNERKEAESKVGILEDQLAGTEHGIKNIMSAIEQGIITETTKSRLVELESERATIKANIAAARADIVTVSRDDIISGLEMFRDGDVHDKKYQARLFDTFLVAVYAYDDDLRLVFSFSGNKNTIQIPIESAVNAVENNEAECSFKLCSAPPKSKILLTNVNGIFNFVLFILHH

SEQ ID NO: 2651 - protein, 541 aa, Unknown
  Description of Unknown: Integrase B2652 sequence
  IPR036162,PS51737,PS01030,IPR011109,PTHR30461, PF00239,G3DSA:1.10.10.2600,IPR006119,PF14287,SSF53041, IPR025378,SM00857,IPR025827,cd03770,IPR038109, PS51736,IPR019761,PF13408,G3DSA:3.40.50.1390,PF07508,Coil
MLRQTTQQLITALYPRLSHEDELQGESNSISNQKRILETYAKQNGFSNLRWYTDDGYSGANFQRPGFQAMLADIEAGKVGTVIVKDMSRLGRNYLQVGMYTEMIFPQKGVRFIAINDGVDSAQGENDFAPLRNIFNEWLVRDTSKKIKAVKRSKGMSGKPITSKPVYGYLMDEDENFIIDEEAAPVVRQIYSLCLAGNGPTKIARMLTEQQIPTPGTLEYRRTGSTRRYHPGYECKWATNTVVHLLENREYTGCLVNFKTEKPSYKLKHSIENPPEKQAVFENHHEPIIDRETWERVQELRKQRKRPNRYDEVGLFSGILFCADCGSVMYQQRYQTDKRKQDCYICGSYKKRTADCTAHFIRTDLLTAGVLSNLRKVTSYAAKHEARFMKLLIEQNEDGDRRRNAAKKKELEAAEKRIAELSAIFKRLYEDSVTGRISDERFTELSADYEAEQKELKERAARLREELSKAQEATANAEKFMNVVRRHTTIEELTPTLLREFVEKIVVHESVALDGKRRGKLRRQEIEIYYSFVGKVELPDT

SEQ ID NO: 2652 - protein, 541 aa, Unknown
  Description of Unknown: Integrase B2653 sequence
  cd03768,PTHR30461:SF3,SM00857,G3DSA:1.10.10.2600,IPR036162, PF13408,PS51737,G3DSA:3.40.50.1390,IPR025827,IPR006119, IPR038109,PF07508,IPR011109,SSF53041,PTHR30461, PS51736,Coil,PF00239
MRIAIYSRKSKFTGKGESIGNQVEMCRDYITTNYNGEEHFIQIFEDEGFSGKNLDRPQFKKMMEIENLRPFDLIVVYRLDRISRNVGDFASLIEKLNKKNTSFVCVKEHFDTGNSMGRAMMNIAAVFAQLERETIAERIKDNMYLLAKEGHWLGGTTPLGYKSIEVTNGKRTHFELIVDESQIDLVNIIFSKYKQLGSINGVETYLFANGYKTQKNNYWHKSNVKRILTNPIYCIADIDSLNYFTELGCNVCFTLDDCNGKKGIYPYNRFSGQKREMQSYDKWIVTISEHQGILTGKEWVVIQQQLKANSKDGFGGKASERRSTSNTSLLSGILFCSCGAYMRPKKYSSGNTFYICENKMDKKITECNNSNINADELDKIVLNELFSFDIKDGVVDSQIQNLKGQIANIDNDLQKQIGRLKKQIETNKNTVNKFMNIVALSIENDTPEQVVEVYNQKINELLNQNKITQKRIDELQDTNIVQAKMNDRLNSLTDAIVYLKENFDKLTIVEKRGFIKNIVDRIVWDGKNVNIFIKGISELSE

SEQ ID NO: 2653 - protein, 541 aa, Unknown
  Description of Unknown: Integrase B2654 sequence
  cd03768,PTHR30461:SF3,SM00857,G3DSA:1.10.10.2600,IPR036162, PF13408,IPR025827,G3DSA:3.40.50.1390,PS51737,IPR006119, IPR038109,PF07508,IPR011109,SSF53041,PTHR30461, PS51736,Coil,PF00239
MRIAIYSRKSKFTGKGESIGNQVEMCRDYIATNYNGEEHSIQVFEDEGFSGKNLDRPQFKKMMEIENVIPFDLIVVYRLDRISRNVGDFASLIEKLNKKNTSFVCVKEHFDTGNSMGRAMMNIAAVFAQLERETIAERIKDNMYLLAKEGHWLGGTTPLGYKSIEVTNGKRTHFELIIDESQIDLVNIIFSKYKQLGSINGVETYLFVNGYKTQKNNYWHKSNVKRILTNPIYCIADIDSLNYFTELGCNVCFTLDDCNGKKGIYPYNRFSGQKREMQSYDRWIITISEHQGILTGKEWVAIQQQLKANSKDGFGGKANERRSTSNTSLLSGVLFCSCGAYMRPKKYPSGNTFYICENKMDKKITECNNSNINADELDKIILNELFSFDIKDGVVDSQIQNLKEQIANIDNDLQKQIGRLKKQIETNKNTVNKFMNIVALSIENDTPEQVVEVYNQKINELLNQNKITQKRIDELQDTNIVQAKMNDKLNSLTDAMVYLKENFDKLTIVEKRGFVKKIVDRIVWDGNNINIFIKGISELSE

SEQ ID NO: 2654 - protein, 541 aa, Unknown
  Description of Unknown: Integrase B2655 sequence
  cd00338,SM00857,G3DSA:1.10.10.2600,IPR036162,PF13408, IPR025827,G3DSA:3.40.50.1390,PS51737,IPR006119,IPR038109, PF07508,IPR011109,SSF53041,PTHR30461,PS51736, Coil,PF00239
MAYRRAQDTKGLRAVFYARVSTAEEEQLNAIELQIEENRNTITKHGWKKVDEYIDRSKSGTMVKGRDEYQRLYEDLLGDAFDVVVIKDQERLMRNTLDWYLFINRLVQTGKILYMYLEDKFYSPDDALITGIKAIIAEEFSRNLSKKLHNYHDGRIEKARKGLEIDLQGSGNVFGWDKVDGKYVINPEQAKVRRLMCEGIMARKGSTQIAKELNDAGYRNTVGKPWKPMDIPKFVYDCKNVGTMIINRERHDFESKQTVKLPESEWVYVKGALPPIVTEEEWALIEKIHEERVVATGCNRRGKKTSGYSFSGKLVCGVCGAPYWRKTKTSNEEYWVCSTKQQKGRKTRARDAVGGKAGEINPEGCDNENISYNALMEIMAIVSERLQADTGFIREFMLGRLDTYEKRITEANRGATEADLQREISRKDKLLDAYLDNLLTKEEYQRKALALDEHILELRREVEANKANLADLAEIQRVRENIDAEVAQYLDENEQLKVEFVLEHLSQVIIYPDKVLVIFDVFGEGVMVEKSQYVSREKRSG

SEQ ID NO: 2655 - protein, 541 aa, Unknown
  Description of Unknown: Integrase B2656 sequence
  cd03768,PTHR30461:SF3,SM00857,G3DSA:1.10.10.2600,IPR036162, PF13408,PS51737,G3DSA:3.40.50.1390,IPR025827,IPR006119, IPR038109,PF07508,IPR011109,SSF53041,PTHR30461, PS51736,Coil,PF00239
MRIAIYSRKSKFTGKGESIGNQIEMCRDYIATNYNGEEHFIQVFEDEGFSGKNLDRPQFKKMMEIENVIPFDLIVVYRLDRISRNVGDFASLIEKLNKKNTSFVCVKEHFDTGNSMGRAMMNIAAVFAQLERETIAERIKDNMYLLAKEGHWLGGTTPLGYKSIEVTNGKRTHFELIIDESQIDLVNIIFSKYKQLGSINGVETYLFANGYKTQKNNYWHKSNVKRILTNPIYCIADIDSLNYFTELGCNICFTLDDCNGKKGIYPYNRFSGQKREMQSYDRWIITISEHQGILTGKEWVAIQQQLKANSKDGFGGKANERRSTSNTSLLSGVLFCSCGAYMRPKKYPSGNTFYICENKMDKKITECNNSNINADELDKIILNELFSFDIKDGVVDSQIQNLKEQIANIDNDLQKQIGRLKKQIETNKNTVNKFMNIVALSIENDTPEQVVEVYNQKINELLNQNKITQKRIDELQDTNIVQAKMNDKLNSLTDAMAYLKENFDKLTIVEKRGFVKKIVDRIVWDGNNINIFIKGISELSE

SEQ ID NO: 2656 - protein, 541 aa, Unknown
  Description of Unknown: Integrase B2657 sequence
  cd03768,PTHR30461:SF3,SM00857,G3DSA:1.10.10.2600,IPR036162, PF13408,PS51737,G3DSA:3.40.50.1390,IPR025827,IPR006119, IPR038109,PF07508,IPR011109,SSF53041,PTHR30461, PS51736,Coil,PF00239
MEKVAIYSRKSVFTGKGESIENQIEMCKDYYNRTHNNNEVEFLIYEDEGFSGGNINRPRFKELISDAKNKKFTALVCYRLDRISRNVADFSSTLELLQDNDIDFISIKEQFDTSTPMGRAMIYIASVFAQLERETIAERVRDNMLQLARTGRWLGGQEPFGFTSEKSIYLDENFTERSLMILSPLSDELQVIKLIYDKYLEVNSITQVVNWLQDNRYKGKNGGEWGTTQVQRILSSPIYVKSNEETNNYLKNLGCNVYGDPNGNGYLSYNKTRKMIFDRDITEWIYAISKHKGIIPADKWLRVQTILEKNKCKKIKRLGTGTSNTALLTGVLKCAKCGSNMIVKQGHKSKKEAGKRYDYYVCSRKDNSKGKKCDNKNIRTDRLDNIVISQLSAYNKDTLSSDLYNLLTASKNNNTSNNKLESLRNDISIKENQISTLIKQLSSAPNESVSSYIMQEINTLSDEVKNLKLKLDNANEDKSLYKQDIKNLELIIEMLEHFDKSFELTDDIPQKRLMLQTILQKVTWNGETQEANLSILDSKKK

SEQ ID NO: 2657 - protein, 541 aa, Unknown
  Description of Unknown: Integrase B2658 sequence
  cd03768,PTHR30461:SF3,SM00857,G3DSA:1.10.10.2600,IPR036162, PF13408,IPR025827,PS51737,G3DSA:3.40.50.1390,IPR006119, IPR038109,PF07508,IPR011109,SSF53041,PTHR30461, PS51736,Coil,PF00239
MRIAIYSRKSKFTGKGESIGNQVEMCRDYIATNYNGEEHSIQVFEDEGFSGKNLDRPQFKKMIEIENVIPFDLIVVYRLDRISRNVGDFASLIEKLNKKNTSFVCVKEHFDTGNSMGRAMMNIAAVFAQLERETIAERIKDNMYLLAKEGHWLGGTTPLGYKSIEVTNGKRTHFELIIDESQIDLVNIIFSKYKQLGSINGVETYLFVNGYKTQKNNYWHKSNVKRILTNPIYCIADIDSLNYFTELGCNVCFTLDDCNGKKGIYPYNRFSGQKREMQSYDRWIITISEHQGILAGKEWVAIQQQLKANSKDGFGGKANERRSTSNTSLLSGVLFCSCGAYMRPKKYPSGNTFYICENKMDKKITECNNSNINADELDKIILNELFSFDIKDGVVDSQIQNLKEQVANIDNDLQKQIGRLKKQIETNKNTVNKFMNIVALSIENDTPEQVVEVYNQKINELLNQNKIAQKRIDELQDTNIVQAKMSDRLNSLTDAMAYLKENFDKLTIVEKRGFVKEIVDRIVWDGKNINIFIKGISELSE

SEQ ID NO: 2658 - protein, 541 aa, Unknown
  Description of Unknown: Integrase B2659 sequence
  PTHR30461:SF3,SM00857,G3DSA:1.10.10.2600,IPR036162,PF13408, IPR025827,PS51737,G3DSA:3.40.50.1390,IPR006119,IPR038109, PF07508,IPR011109,SSF53041,PF00239,PTHR30461, PS51736,Coil,cd00338
MKAKKEKKITRIEPVRTTQSLEKTQIKRVCAYCRVSTDSEDQRHSFDSQVAYYNRMIGERNNWIFSGIYADEDRSGTKMNGRDEFQKMMQNCRRRQHDYIITKSVTRFARNTVDSIQAIRELKALGIGVYFEKERVDTLSEKSEQLLTILSSIAQGESENTSTNVRWSVVRRFQNGTFIISEPAYGYCKDPDGNLIIEPKEAAVVRRIFEAYLGGMGSYAIARSLQEERIPTSRKSNGWQEGSVKEILKNPVYEGDLLLQKTCTTEGVPFRKKRNHGELPQYLIRDNHEPIISREEAEAVRKLCAYRKEQQCVENTEVYQNRYAFSSRIRCGVCGSTFRRQKIYIGKPYEKVQWCCHKHIQDRKVCGQKAIREDDIQCLFTRMWNRLAGNYEEILIPLLAGLKAVPRDPKQEKEIGELSHQIEELRKQSHMLRQVLVDGNIGSAVFIERRNQLDSELETAIHRRQLLEEDQFFEQEIMQTEYLLTVFRSRPARMEDYDEEAFLMIIDHVTVYPEKRVQFCLKNGLELEESLEEGDMADGRN

SEQ ID NO: 2659 - protein, 541 aa, Unknown
  Description of Unknown: Integrase B2660 sequence
  cd03768,PTHR30461:SF3,SM00857,G3DSA:1.10.10.2600,IPR036162, PF13408,PS51737,IPR025827,G3DSA:3.40.50.1390,IPR006119, IPR038109,PF07508,IPR011109,SSF53041,PTHR30461, PS51736,Coil,PF00239
MRIAIYSRKSKFTGKGESIGNQVEICRDYITTNYNDEEHFIQVFEDEGFSGKNLDRPQFKKMMEIENLRPFDLIVVYRLDRISRNVGDFASLIEKLNKKNTSFVCVKEHFDTGNSMGRAMMNIAAVFAQLERETIAERIKDNMYLLAKEGHWLGGTTPLGYKSIEVTNGKRTHFELIIDESQIDLVNIIFSKYKQLGSINGVETYLFANGYKTQKNNYWHKSNVKRILTNPIYCIADIDSLNYFTELGCNVCFTLDDCNGTKGIYPYNRFSGQKREMQSYDKWIVTISEHQGILTGKEWVAIQQQLKANSKDGFGGKASERRSTSNTSLLSGVLFCSCGAYMRPKKYPSGNTFYICENKMDKKITECNNSNINADELDKIVLNELFSFDIKDGVVDSQIQNLKEQIANIDNDLQKQIGRLKKQIETNKNTVNKFMNIVALSIENDTPEQVVEVYNQKINELLNQNKITQKRIDELQDTNIVQAKMNDRLNSLTDAILYLKENFDKLTIVEKRGFIKNIVDRIVWDGKNVNIFIKGISELSE

SEQ ID NO: 2660 - protein, 541 aa, Unknown
  Description of Unknown: Integrase B2661 sequence
  PTHR30461:SF3,IPR036162,PS51737,IPR011109,PTHR30461, PS00397,PF00239,G3DSA:1.10.10.2600,IPR006119,SSF53041, SM00857,IPR025827,IPR038109,PS51736,cd03768, IPR006118,PF13408,G3DSA:3.40.50.1390,PF07508,Coil
MGKIADKLKQIRVAIYVRVSTHYQIDKDSLPVQKEELIAYAKYVLNADSYEIFEDAGFSAKNTDRPGFQQMMSRIREGEFSHVLVWKLDRISRNLLDFAAMYDELKRLGVTFVSKNEQFDTSSAMGEAMLKIILVFAELERKMTAERVIAVMISRAGNGQWNGGRIPFGYNYDKNAETFSVNETEAAVVLKMFDLYEETHSLLQVAKALNASGSRHRSGKEWTPTTVSIILKSPFYTGAYRYNYYDMSKRNSRQDVKPEGEWVVVEDHHPAIIDPVRWKNVVELLERNRRGWQSAGKTYTRKNIHVFAGLLTCGVCGSIMSATSNARAHKDGYRPSNYACMSHRKNNGCTNKYITDTKIGPFVLNYISNLIRAKDSFGKTTSPETLQKKLLRGDMFKDIVRIKEPGLMELYNLYRSQLPGVKYASKVAERSGSSDTASEKDILLSERRRLERALSRLKSLYLYSEEDMSERDYVIEKNRLTESLDKVNERLDKLNDGLSSQFSISDEELLAKASYFIMSQKLLDRRFVDYRRLLKETDPES

SEQ ID NO: 2661 - protein, 541 aa, Unknown
  Description of Unknown: Integrase B2662 sequence
  cd03768,PTHR30461:SF3,SM00857,G3DSA:1.10.10.2600,IPR036162, PF13408,IPR025827,G3DSA:3.40.50.1390,PS51737,IPR006119, IPR038109,PF07508,SSF53041,IPR011109,PTHR30461, PS51736,Coil,PF00239
MRIAIYSRKSKFTGKGESIGNQIEMCRDYIATNYNGEEHSIQVFEDEGFSGKNLDRPQFKKMMEIENVIPFDLIVVYRLDRISRNVGDFASLIEKLNKKNTSFVCVKEHFDTGNSMGRAMMNIAAVFAQLERETIAERIKDNMYLLAKEGHWLGGTTPLGYKSIEVTNGKRTHFELIIDESQIDLVNIIFSKYKQLGSINGVETYLFANGYKTQKNNYWHKSNVKRILTNPIYCIADIDSLNYFTELGCNVCFTLDDCNGKKGIYPYNRFSGQKREMQSYNRWIITISEHQGILAGKEWVAIQQQLKANSKDGFGGKANERRSTSNTSLLSGVLFCSCGAYMRPKKYPSGNTFYICENKMDKKITECNNSNINADELDKIILNELFSFDIKDGVVDSQIQNLKEQVANIDNDLQKQIGRLKKQIEANKNTVNKFMNIVALSIENDTPEQVVEVYNQKINELLNQNKITQKRIDELQDTNIVQAKMNDRLNSLTDAMAYLKENFDKLTIVEKRGFVKEIVDRIVWDGNNINIFIKGISELSE

SEQ ID NO: 2662 - protein, 541 aa, Unknown
  Description of Unknown: Integrase B2663 sequence
  cd03768,PTHR30461:SF3,SM00857,G3DSA:1.10.10.2600,IPR036162, PF13408,PS51737,G3DSA:3.40.50.1390,IPR025827,IPR006119, IPR038109,PF07508,IPR011109,SSF53041,PTHR30461, PS51736,Coil,PF00239
MRIAIYSRKSKFTGKGESIGNQIEMCRDYIATNYNGEEHSIQVFEDEGFSGKNLDRPQFKKMMEIENVIPFDLIVVYRLDRISRNVGDFASLIEKLNKKNTSFVCVKEHFDTGNSMGRAMMNIAAVFAQLERETIAERIKDNMYLLAKEGHWLGGTTPLGYKSIEVTNGKRTHFELIIDESQIDLVNIIFSKYKQLGSINGVETYLFVNGYKTQKNNYWHKSNVKRILTNPIYCIADIDSLNYFTELGCNVCFTLDDCNGKKGIYPYNRFSGQKREMQSYDRWIITISEHQGILTGKEWVAIQQQLKANSKDGFGGKANERRSTSNTSLLSGILFCSCGAYMRPKKYPSGNTFYICENKMDKKITECNNSNINADELDKIVLNELFSFDIKDGVVDSQIQNLKEQITNIDNDLQKQIGRLKKQIETNKNMVNKFMNIVALSIENNTPEQVVEVYNQKINELLNQNKITQKRIDELQDTNIIQAKMNDRLNSLTDAMAYLKENFNKLTIVEKRGFVKEIVDRIVWDGNNINIFIKGISELSE

SEQ ID NO: 2663 - protein, 541 aa, Unknown
  Description of Unknown: Integrase B2664 sequence
  cd03768,PTHR30461:SF3,SM00857,G3DSA:1.10.10.2600,IPR036162, PF13408,IPR025827,PS51737,G3DSA:3.40.50.1390,IPR006119, IPR038109,PF07508,SSF53041,IPR011109,PTHR30461, PS51736,Coil,PF00239
MRIAIYSRKSKFTGKGESIGNQVEMCRDYIATNYNGEEHSIQVFEDEGFSGKNLDRPQFKKMIEIENVIPFDLIVVYRLDRISRNVGDFASLIEKLNKKNTSFVCVKEHFDTGNSMGRAMMNIAAVFAQLERETIAERIKDNMYLLAKEGHWLGGTTPLGYKSIEVTNGKRTHFELIIDESQIDLVNIIFSKYKQLGSINGVETYLFVNGYKTQKNNYWHKSNVKRILTNPIYCIADIDSLNYFTELGCNVCFTLDDCNGKKGIYPYNRFSGQKREMQSYDRWIITISEHQGILAGKEWVAIQQQLKANSKDGFGGKVNERRSTNNTSLLSGVLFCSCGAYMRPKKYPSGNTFYICENKMDKKITECNNSNINADELDKIILNELFSFDIKDGVVDSQIQNLKEQVANIDNDLQKQIGRLKKQIETNKNTVNKFMNIVALSIENDTPEQVVEVYNQKINELLNQNKITQKRIDELQDTNIVQAKMNDRLNSLTDAMAYLKENFDKLTIVEKRGFVKEIVDRIVWDGNNINIFIKGISELSE

SEQ ID NO: 2664 - protein, 541 aa, Unknown
  Description of Unknown: Integrase B2665 sequence
  PTHR30461:SF3,SM00857,G3DSA:1.10.10.2600,IPR036162,PF13408, IPR025827,G3DSA:3.40.50.1390,PS51737,IPR006119,IPR038109, PF07508,IPR011109,SSF53041,PF00239,PTHR30461, PS51736,Coil,cd00338
MNVYRTREILKTCSIFDLKLKVAFYARVSTESEDQQVSIHHQDEYYRNFIAQNRNWVFVGAYIDNGISGIRTEKRDEFQRMMADAKAGKIDMIVTKEITRFARNTLDSIKYTRELLMYGVCVWFQNDNINTIDEDSELRLTIMSGIAQDESRKLSNRIKFGHAQSIKNGVVLGSRIYGYIKKDGKLTIDPKTAPMIKEIFEKYSTGEWSTSAIEKYLYKKGYRNYKGGKLSRDNIKKIIKNPKYKGYYCGGKVKIVDMFTKKQEFLPEDEWTMYKDDGNHVPQIVDESVWDKANVIMQTRSDAIKSHRTSFKQNNLFTGYIFCGNDGAPYWMKQHTIRGREDARWVCSYRIKNGAQSCNSFGIRERELRVMLADLINKSGDIQTAIEKYISLVEKNIDFSNDGAEISRLKNMILQIEKKKDKLLDLNLDGIITNSEYIEKSEKFKDEIESINNKLSELESKEEASKDFHLKLKEIGMILNDLQGVGPEDITKTVLGEFLDKILINPKGPQECEILFFLKTGDVKKKSITERDKPGCSEYFF

SEQ ID NO: 2665 - protein, 541 aa, Unknown
  Description of Unknown: Integrase B2666 sequence
  cd03768,PTHR30461:SF3,SM00857,G3DSA:1.10.10.2600,IPR036162, PF13408,IPR025827,G3DSA:3.40.50.1390,PS51737,IPR006119, IPR038109,PF07508,SSF53041,IPR011109,PTHR30461, PS51736,Coil,PF00239
MRIAIYSRKSKFTGKGESIGNQIEMCRDYIATNYNGEEHSIQVFEDEGFSGKNLDRPQFKKMMEIENVIPFDLIVVYRLDRISRNVGDFASLIEKLNKKNTSFVCVKEHFDTGNSMGRAMMNIAAVFAQLERETIAERIKDNMYLLAKEGHWLGGTTPLGYKSIEVTNGKRTHFELIIDESQIDLVNIIFSKYKQLGSINGVETYLFANGYKTQKNNYWHKSNVKRILTNPIYCIADIDSLNYFTELGCNVCFTLDDCNGKKGIYPYNRFSGQKREMQSYNRWIITISEHQGILAGKEWVAIQQQLKANSKDGFGGKANERRSTSNTSLLSGVLFCSCGAYMRPKKYPSGNTFYICENKMDKKITECNNSNINADELDKIILNELFSFDIKDGVVDSQIQNLKEQVANIDNDLQKQIGRLKKQIEANKNTVNKFMNIVALSIKNDTPEQVVEVYNQKINELLNQNKITQKRIDELQDTNIVQAKMNDRLNSLTDAMAYLKENFDKLTIVEKRGFVKEIVDRIVWDGNNINIFIKGISELSE

SEQ ID NO: 2666 - protein, 541 aa, Unknown
  Description of Unknown: Integrase B2667 sequence
  cd00338,SM00857,G3DSA:1.10.10.2600,IPR036162,PF13408, PS51737,G3DSA:3.40.50.1390,IPR025827,IPR006119,IPR038109, PF07508,IPR011109,SSF53041,PTHR30461,PS51736, Coil,PF00239
MYNLLCKGENLGMKFTSTWRISDPLAQYIVYLRKSRKDMEAEALGQTDTLKRHRAALLSLSESRGLNVVEICEEVVTGDSIAVRPEVQKVLQLVETGSYAGVLVMEVERLARGDTIDQGIIAQTFKYSNTKIVTPNKVYDPNNEMDEEYFEFGLFMSRREYNTIKRRLSRGKEASLREGKWISGKTPFGWLREKLPNDKGYKLIPHPEQAPILRQIYDWYTGEGCTRIGSYAIASRLNALGVKTNSGNSWTTSAILELLRNPANAGWIKSGGRPETKRIVDGSVVVSRPRTRQEDLKLYKGLHDALISQAQYDKAVSLSYSVVAPRGKGAWKTVTSLAGLVRCDQCGRVMVRRASSGDRRPSFMCPTQGCPTVSSWYSEVEEALLDALRDWLRELEVGEADTNDDHSLLDALSASINADQKQLSKLEAQEARAYELVETGVYTPEVFLQRSQALAADKQVIVSRIEENQRAQDEITRAKQARARLAPAVRHVLEAYPLAATPQDKNDLLKTVLQKVLYHKRSKSYSKAGSDMCLTLYPLTD

SEQ ID NO: 2667 - protein, 541 aa, Unknown
  Description of Unknown: Integrase B2668 sequence
  PTHR30461:SF3,cd00338,SM00857,G3DSA:1.10.10.2600,IPR036162, PF13408,PS51737,G3DSA:3.40.50.1390,IPR025827,IPR006119, IPR038109,PF07508,IPR011109,SSF53041,PTHR30461, PS51736,Coil,PF00239
MAKRIPAAASDCDGMIGVIYARYSSHSQREESIEDQLRECHEFAARNNIKIIAEYTDSALTGRTDSRPDFQKMIRDSARGKFRVVVTYKVDRFARDRYDSAIYKAKLRKNGVRVLYAKETIPDGPEGIILESVLEGYAEYYSAALSQNILRGLEGNAMKCKTNGVQVLGYYTGEDGCYEIDPDYASVVLSIFQKYDAGVPQKEIIDDLNARGFRTTRGFAFNKNSVTRILRNRKYIGEYSWGDVTVPGGMPQIVPLPLFDSVQRKLDRGSRAPAHKWKVADYILTSKLFCGHCGELMVGRAGTGKSGKKYDYYACVNRTRRHGCDKKPVKKEWIEDIVVKYTKEVVLAEDMIEQIADGVMDFLEREKKSNGELDALEASLKNVESSIRNMMQAIEQGIITKSTKQRLMELEEQRDQISAAIAREKIATPDIERDQIVYFLEKFKEGSLDDPDYRTKLVEAFVSSVYLWDDGRIVINYNYTGENNQLTLRQIEQELVDMDGAEGSPLDSSAPLNESEANTTRILYFRGVVSFVFNWKVFAEH

SEQ ID NO: 2668 - protein, 541 aa, Unknown
  Description of Unknown: Integrase B2669 sequence
  PTHR30461:SF3,cd00338,SM00857,G3DSA:1.10.10.2600,IPR036162, PF13408,PS51737,G3DSA:3.40.50.1390,IPR025827,IPR006119, IPR038109,PF07508,SSF53041,IPR011109,PTHR30461, PS51736,Coil,PF00239
MEKVAIYSRKSIFTGKGDSIENQIEMCQDYYRKTHNNKDFEFIIYEDEGFSGGNINRPRFQDLLKDVKNKKFKALICYRLDRISRNVADFSSTLELLQDNDIDFISIKEQFDTSTPMGRAMIYIASVFAQLERETIAERVRDNMLQLAKTGRWLGGQEPFGFTSEKMVYLDENFTERSLMILSPLEEELDVIKKIYLKYLDLQSITQVVNWLQDNKYKGKNGGEWGTTQVQRILASPLYVKSSDKTHNYIKSLGINVFGEANGNGYLTYNKTRKMIFDRDINEWIYTTSKHSGIIDDDKWLMVQNILDKNKNKKIKRLGTGLNNTALLTGILKCSKCGSNMIVKQGHKSKTEEGKRYDYYVCSKKDNSRGKKCDNKNIRTDRLDKIVISQLSAYNKESLYLSLSKLLKESKDTNNINNKLISIKSEIQEKETQISNLIKQLSSAPNETVSTYIMQEVNKLSSDINKLKSDLKTIKEDKETYNYDLENLNLILNMLDEFDKNFEITENISQKRLMLQTLLNNITWDGENLEAKLTMFGDKKK

SEQ ID NO: 2669 - protein, 541 aa, Unknown
  Description of Unknown: Integrase B2670 sequence
  PTHR30461:SF3,SM00857,G3DSA:1.10.10.2600,IPR036162,PF13408, PS51737,G3DSA:3.40.50.1390,IPR025827,IPR006119,IPR038109, PF07508,IPR011109,SSF53041,PTHR30461,Coil, PS51736,cd00338,PF00239
MSESTLKKAVFYGRYSSHLQHETSIEAQRDIVTRYALNNGYEIIAEYIDRAKSGTTTARRDRFNQMILDSRNGEFQYVITSKIDRFARNVKDFYISENKLDENGVKYISATEYYDDSTMSGIIIKALGVAAADGYSKNLANELVKGKMVNAKRAKHNGGIAPLGYDVELSTGTLKINEEEAKAVRLIFDMYVSGNSYGDICHKLNELGYTTKKQRKFGKNSLYDILHNEKYMGVYVFNKRAGKKNSHARKPDNEIVRIENGVPAIISKAVFDKAAKLMEYNKRNSGANTAKHNYMLSGLVRCGHCGCMMSGCAKKNGKGIVTHVYRCGHKPGEKCENHEINSDKLDEFVITMVKKYLLCKDNIPVLLNILRELSAKRITGISDDISEYSRRLKDIKTKQENLLNALETGGQIESVIDRLKKLEQDKSTVESKISELEQKKSVSVTEEQLNKALNILPAFIMSGRTPECRLFIRNIVEQVIVSKDNAAVTLRVTAVSCMRNRKDRKHILSSGIDPKIYQEDKHHERKQKCRAVCKIQLRYAA

SEQ ID NO: 2670 - protein, 541 aa, Unknown
  Description of Unknown: Integrase B2671 sequence
  cd03768,PTHR30461:SF3,SM00857,G3DSA:1.10.10.2600,IPR036162, PF13408,IPR025827,G3DSA:3.40.50.1390,PS51737,IPR006119, IPR038109,PF07508,IPR011109,SSF53041,PTHR30461, PS51736,Coil,PF00239
MRIAIYSRKSKFTGKGESIGNQIEMCRDYIATNYNGEEHFIQVFEDEGFSGKNLDRPQFKKMMEIENVIPFDLIVVYRLDRISRNVGDFASLIEKLNKKNTSFVCVKEHFDTGNSMGRAMMNIAAVFAQLERETIAERIKDNMYLLAKEGHWLGGTTPLGYKSIEVTNGKRTHFELIIDESQIDLVNIIFSKYKQLGSINGVETYLFVNGYKTQKNNYWHKSNVKRILTNPIYCIADIDSLNYFTELGCNVCFTLDDCNGKKGIYPYNRFSGQKREMQSYDRWIITISEHQGILTGKEWVAIQQQLKANSKDGFGGKANERRSTSNTSLLSGILFCSCGAYMRPKKYPSGNTFYICENKMDKKITECNNSNINADELDKIVLNELFSFDIKDGVVDSQIQNLKEQITNIDNDLQKQIGRLKKQIETNKNTVNKFMNIVALSIENNTPEQVVEVYNQKINELLNQNKITQKRIDELQDTNIIQAKMNDRLNSLTDAMAYLKENFDKLTIVEKRGFVKEIVDRIVWDGNNINIFIKGISELSE

SEQ ID NO: 2671 - protein, 541 aa, Unknown
  Description of Unknown: Integrase B2672 sequence
  cd03768,PTHR30461:SF3,SM00857,G3DSA:1.10.10.2600,IPR036162, PF13408,IPR025827,G3DSA:3.40.50.1390,PS51737,IPR006119, IPR038109,PF07508,IPR011109,SSF53041,PTHR30461, PS51736,Coil,PF00239
MRIAIYSRKSKFTGKGESIGNQIEMCRDYIATNYNGEEHFIQVFEDEGFSGKNLDRPQFKKMMEIENVIPFDLIVVYRLDRISRNVGDFASLIEKLNKKNTSFVCVKEHFDTGNSMGRAMMNIAAVFAQLERETIAERIKDNMYLLAKEGHWLGGTTPLGYKSIEVTNGKRTHFELIIDESQIDLVNIIFSKYKQLGSINGVETYLFVNGYKTQKNNYWHKSNVKRILTNPIYCIADIDSLNYFTELGCNVCFTLDDCNGKKGIYPYNRFSGQKREMQSYDRWIITISEHQGILTGKEWVAIQQQLKANSKDGFGGKANERRSTSNTSLLSGILFCSCGAYMRPKKYPSGNTFYICENKMDKKITECNNSNINADELDKIVLNELFSFDIKDGVVDSQIQNLKEQITNIDNDLQKQIGRLKKQIETNKNMVNKFMNIVALSIENNTPEQVVEVYNQKINELLNQNKITQKRIDELQDTNIIQAKMNDRLNSLTDAMAYLKENFDKLTIVEKRGFVKEIVDRIVWDGNNINIFIKGISELSE

SEQ ID NO: 2672 - protein, 541 aa, Unknown
  Description of Unknown: Integrase B2673 sequence
  PTHR30461:SF3,cd00338,SM00857,G3DSA:1.10.10.2600,IPR036162, PF13408,PS51737,G3DSA:3.40.50.1390,IPR025827,IPR006119, IPR038109,PF07508,IPR011109,SSF53041,PTHR30461, Coil,PF00239
MMENRMMTGNRVDCLYRVSTDKQVDYNDKSQADIPMQRRECHRFCEKMGWTIVHEEQEDGVSGHKVRAENRDKLQIIKERAKQGKFDILLVFMFDRIGRIADETPFVVEWFVKNGIRVWSTQEGEQRFDNHTDKLTNYIRFWQADGESEKTSIRTKTALGQLVEDGGFKGGLAPYGYDLVKSGRFNKRKHEVFELAINEAEAAVVRIIFDKYVHEGFGAQRIATYLNNLGYRARTGKMWHHASIRGIICNLTYTGVLRSGESRSQTLPHLQIITPELFEAAQHIRTSRANSAEQERRVPLNTRGQSLLAGNVFCGHCGSRLALTTNGKAYPCKEDAHRIVKRVRYICYGKTRKQTECDGQTGYTAHILDGIIDKVVRQIFERMKAIPKSEIVNIRYREKMEERKALLKSAKSDYAKAAAELDTLRAEVIKSLRGESAFPQDLLSSLISDCETKCLEVQHTMEAAQAAYDEGQAMLDALNAQYDDIISWADMYDSASMESKKMIVSCLIRRVEVYRDYRLHIDFNIDFEQFSAGLDISAIAA

SEQ ID NO: 2673 - protein, 541 aa, Unknown
  Description of Unknown: Integrase B2674 sequence
  SM00857,IPR036162,PF13408,IPR025827,G3DSA:3.40.50.1390, IPR006119,SSF53041,PTHR30461,Coil,PS51736, cd00338,PF00239
MEKKRAAIYARFSSHNQRSESIEIQVENSTRYCQENGLDVVRIYTDYAKTGRNTDRAEFQRMMDDARLGLFDYVVIYKVTRIMRNRDEMALARIMLRKAGVEILYAGEEIASGSSGVLQLGMLEVLAEWESAIDSERIRDGIQKNAQRCMANGRTLYGWDIVEGRYRVNDREAAWLRKMKNKLFSGATMAEVVRSVDAMRTRQGKKVNQDTATKLLLREQNGGTYCYAGVRVEGGMPALWPKHEQDMIISMLKSRHKPHRRVDTAEEWPLSGKLWCACCDSTLTGTSGTSATGKTYAYYKCNKCGRTFRRDVLEDAIVDVVCEAVKRPEIRGNIAALMADWSKDNAEETPLESERIKGEIRRIDAAFENIWQAIESGIAPPGGKDRVQELTERKNELEAEYHMAKAHESLEPDYEEIRQWLDEIAQNLTPQEILKMFIRAAEIEGDVVKLFFAFDYYGNDFTPPKYRHELFSNENSSCNSPMVEARRIELRSILNCPQGATGLVSDRASERIGSQTNVAAPSRFGLSRGHTDYVPRGIPLK

SEQ ID NO: 2674 - protein, 541 aa, Unknown
  Description of Unknown: Integrase B2675 sequence
  SM00857,G3DSA:1.10.10.2600,IPR036162,PS51737, G3DSA:3.40.50.1390,IPR006119,IPR038109,PF07508, IPR011109,SSF53041,PTHR30461,Coil, PS51736,cd00338,PF00239
MPKAISYIRFSTKIQSVGDSTKRQSKYINDWLKRNPDYYLDESLRFQDLGISGFSGANAKSGAFGEFLAAVESGYIEAGSVLLVESLDRVSRQDIDTAGEQLRKILRSGVEVVTLVDNEWYTKESLKDSLSMIKAMLVMERAHEESAMKSTRLRSMWAAKRERAANGEIMSKRCAAWLKVSDDRSHFEFIPENVKAVQRVFQLRLEGLSHIKIAKQMNDEGFSTLNQFKSVTGGWSQSSVTELLSNRSVIGFKVPSKSMAVKGVSEIPNYYPSIITDEQFYAVQQLKQGSGRKPSSDLPLLTNLFKGVLRCSECGFIVVVAGVSAKRSGIYKCSMKSEGRCNSVGFSRLQTDRALVQGLLYNTNRLALNRDNGSAIGTLQSELEQLQKQRERLIKLAMLADDTESMAKDLKALNSQIKDAEKAVSEVHQREQSSQLETISHLDLTVKKDRIEAQIIIKRIVKEIRLNTAGKKCDVFLHNGLKLLNFPLDRVVDGAQWLEVLPLIDGDEFDFEGFTTKPRHLVLEEAPEWVKEIEAQPNQPL

SEQ ID NO: 2675 - protein, 541 aa, Unknown
  Description of Unknown: Integrase B2676 sequence
  PTHR30461:SF3,SM00857,G3DSA:1.10.10.2600,IPR036162,PF13408, IPR025827,G3DSA:3.40.50.1390,PS51737,IPR006119,IPR038109, PF07508,SSF53041,IPR011109,PF00239,PTHR30461, PS51736,Coil,cd00338
MKKQPTGGNRLVAYYRYSGGSHQTEQSIEGQRRDCETYARIHGMVILHEYIDRHISGKTDDRPEFQQMIADAGKGMFDYVICWKTDRIARSRYDSIIYKKKLRDNGVELLYAAEANVEGSGGIIVEGLMEALAEYYSAELAEKVRRGMRESALKGKAIGSSRPLGLTVDKDKKYIIDPAGAAAVRYIFEQYAAGAASSAIVAHLNEQGLCTSRGNPFNKSSVVRIIQNEVYRGVYVSPKFDVRIEGAVPAIIDDDLWERAQKMFIRNRQSRSPRNDRADYILSGKLFCGECGTAMKGVSGHSSNGEVYFYYNCPCKDCHRRNIPKDELEGLVIRTVCNDVLQPDVMDRIADSVIEAQTAELNQPNPEKEALQHELADVQRKAKNLLSALENGTAGAMLTNRLAELEQQADTLSYQLSSLESEPKYPVFSKEEVLYLLEQFLIAPSEKTKAYRRLIDTFVSKIEVSNTELTIYFNIAEEDCGKMKKAPQSNQPEGCSTEKQMVHLLLPQSNFSIFILPTYFYIAIPIFQARKSISVESVTDL

SEQ ID NO: 2676 - protein, 541 aa, Unknown
  Description of Unknown: Integrase B2677 sequence
  cd03768,PTHR30461:SF3,SM00857,G3DSA:1.10.10.2600,IPR036162, PF13408,PS51737,G3DSA:3.40.50.1390,IPR025827,IPR006119, IPR038109,PF07508,IPR011109,SSF53041,PTHR30461, PS51736,Coil,PF00239
MRIAIYSRKSKFTGKGESIGNQVEMCRDYIATNYNGEEHSIQVFEDEGFSGKNLDRPQLKKMIEIENVIPFDLIVVYRLDRISRNVGDFASLIEKLNKKNTSFVCVKEHFDTGNSMGRAMMNIAAVFAQLERETIAERIKDNMYLLAKEGHWLGGTTPLGYKSIEVTNGKMTHFELIIDESQIDLVNIIFSKYKQLGSINGVETYLFVNGYKTQKNNYWHKSNVKRILTNPIYCIADIDSLNYFTELGCNVCFTLDDCNGKKGIYPYNRFSGQKREMQSYDRWIITISEHQGILAGKEWVAIQQQLKANSKDGFGGKANERRSTSNTSLLSGVLFCSCGAYMRPKKYPSGNTFYICENKMDKKITECNNSNINADELDKIILNELFSFDIKDGVVDSQIQNLKEQVANIDNDLQKQIGRLKKQIETNKNTVNKFMNIVALSIENDTPEQVVEVYNQKINELLNQNKITQKRIDELQDINIVQAKMNDKLNSLTDAMVYLKENFDKLTIVEKRGFVKKIVDRIVWDGKNINIFIKGISELSE

SEQ ID NO: 2677 - protein, 541 aa, Unknown
  Description of Unknown: Integrase B2678 sequence
  PTHR30461:SF3,IPR036162,PS51737,IPR011109,PTHR30461, PF00239,G3DSA:1.10.10.2600,IPR006119,PF14287,SSF53041, IPR025378,SM00857,IPR025827,cd03770,IPR038109, PS51736,PF13408,G3DSA:3.40.50.1390,PF07508,Coil
MEKDKKVTALYCRLSKDDGSNSESLSIRTQKSMLMEYATRNGFGNCQYYVDDGYSGTNSDRPAFQELLDDIREGKVATVITKDQSRLGRNHIETGTYMEIFFPEHGVRYIAINDGYDSNEQSQMDIAPFRNIINEMYAKDTSRKIKSALRTRKKSGKYISSGAPFGYQKDPADHNHLVIDPNTAPVVEYIYSMAEEGLGLHRIAKRLHDEKVLKPCYYKKEMFGRFIDDEKMYDWDSAYISQVLHSPVYAGHIIYEAKPTVSMKSKKRRYIPFEERAIVPNTHEAIIPQDRWENVQRILYSRSSSFMCDKTDYDNIFKGIVRCADCGRTMLVKVEHRRKRNSVLDQTFYCCSTYRKYGAKACDSHNLEARVLHEAVFADIQAHAKAAVSNREALVKKIANQMHLRVSSDRAQHKRDLKQCKARIAEIEDLYAKLYEDVSKGLLPEKRFQMLADRYDKEQAELTEKIEQYEREGRAEHDQLDKIQDFIDEVSKYAGITELNYKILHQLIDKILVSRAEKVDGEYVQKIQIFYRFIGPLDAIE

SEQ ID NO: 2678 - protein, 541 aa, Unknown
  Description of Unknown: Integrase B2679 sequence
  cd03768,PTHR30461:SF3,SM00857,G3DSA:1.10.10.2600,IPR036162, PF13408,IPR025827,G3DSA:3.40.50.1390,PS51737,IPR006119, IPR038109,PF07508,IPR011109,SSF53041,PTHR30461, PS51736,Coil,PF00239
MRIAIYSRKSKFTGKGESIGNQIEMCRDYIATNYNGEEHFIQVFEDEGFSGKNLDRPQFKKMMEIENVIPFDLIVVYRLDRISRNVGDFASLIEKLNKKNTSFVCVKEHFDTGNSMGRAMMNIAAVFAQLERETIAERIKDNMYLLAKEGHWLGGTTPLGYKSIEVTNGKRTHFELIIDESQIDLVNIIFSKYKQLGSINGIETYLFVNGYKTQKNNYWHKSNVKRILTNPIYCIADIDSLNYFTELGCNVCFTLDDCNGKKGIYPYNRFSGQKREMQSYDRWIITISEHQGILTGKEWVAIQQQLKANSKDGFGGKANERRSTSNTSLLSGILFCSCGAYMRPKKYPSGNTFYICENKMDKKITECNNSNINADELDKIVLNELFSFDIKDGVVDSQIQNLKEQITNIDNDLQKQIGRLKKQIETNKNTVNKFMNIVALSIENNTPEQVVEVYNQKINELLNQNKITQKRIDELQDTNIIQAKMNDRLNSLTDAMAYLKENFDKLTIVEKRGFVKEIVDRIVWDGNNINIFIKGISELSE

SEQ ID NO: 2679 - protein, 541 aa, Unknown
  Description of Unknown: Integrase B2680 sequence
  PTHR30461:SF3,SM00857,G3DSA:1.10.10.2600,IPR036162,PF13408, PS51737,G3DSA:3.40.50.1390,IPR025827,IPR006119,IPR038109, PF07508,IPR011109,SSF53041,PF00239,PTHR30461, PS51736,Coil,cd00338
MTDEKPRVIIIPPKPELQQTAAVTKQLRVAAYCRVSTKEEEQASSYEAQCEYYTDKIMSNKEWTMAGIFADEGITGTSTKKRTEFLRMIRQCKQKKIDLILTKSIQRFARNTLDCINYTRILRQLGIGVLFEKENINSLPADSEFMITMYGAMAQSESESISGNIRRGRQMHAKVGTLKIPCHWLYGYKKDAGGKFCIIPEQAEVVREIYERYKNGASLRNLKDWLEENQIKTVLGTADWSISVIKGILTNEKYCGDVLLQKTFCTDVISKKIVKNVGQMAQYYMPDHHEAIVSREQYNAVKAEMARRSALRSPSKEAVTGRSCYTSKYALSDRLFCGECGTLYRRKTRNVKGNIYHEWRCISRLEYGKKYCHESPTLREIPLQNAILAAINSAMSVKTALVDQIKNVVSLELLPVQGQTMSLVDIERRLAQLDEQFQRLLAEAIDAENKEACNAQFAEILAEQTALKKQKETILQGSADADRVSTRMKQAEQAIENTAQTITEWNENAVRQIVERVTVLSADEILVRIKSGAEIKQRLER

SEQ ID NO: 2680 - protein, 541 aa, Unknown
  Description of Unknown: Integrase B2681 sequence
  cd03768,PTHR30461:SF3,SM00857,G3DSA:1.10.10.2600,IPR036162, PF13408,IPR025827,PS51737,G3DSA:3.40.50.1390,IPR006119, IPR038109,PF07508,IPR011109,SSF53041,PTHR30461, PS51736,Coil,PF00239
MRIAIYSRKSKFTGKGESIGNQVEMCRDYIATNYNGEEHSIQVFEDEGFSGKNLDRPQFKKMIEIENVIPFDLIVVYRLDRISRNVGDFASLIEKLNKKNTSFVCVKEHFDTGNSMGRAMMNIAAVFAQLERETIAERIKDNMYLLAKEGHWLGGTTPLGYKSIEVTNGKRTHFELIIDESQIDLVNIIFSKYKQLGSINGVETYLFVNGYKTQKNNYWHKSNVKRILTNPIYCIADIDSLNYFTELGCNVCFTLDDCNGKKGIYPYNRFSGQKREIQSYDRWIITISEHQGILAGKEWVAIQQQLKANSKDGFGGKANERRSTSNTSLLSGVLFCSCGAYMRPKKYPSGNTFYICENKMDKKITECNNSNINADELDKIILNELFSFDIKDGVVDSQIQNLKEQVANIDNDLQKQIGRLKKQIETNKNTVNKFMNIVALSIENDTPEQVVEVYNQKINELLNQNKITQKRIDELQDTNIVQAKMNDKLNSLTDAMVYLKENFDKLTIVEKRGFVKKIVDRIVWDGNNINIFIKGISELSE

SEQ ID NO: 2681 - protein, 541 aa, Unknown
  Description of Unknown: Integrase B2682 sequence
  PTHR30461:SF3,cd00338,SM00857,G3DSA:1.10.10.2600,IPR036162, PF13408,PS51737,IPR025827,G3DSA:3.40.50.1390,IPR006119, IPR038109,PF07508,IPR011109,SSF53041,PTHR30461, PS51736,Coil,PF00239
MPFVKTGTVPPENALNAVLYCRYSSTQQTENSIDGQLRECRRFADYHGYKIIGEYIDRAKSGTSVEQRDDFLRMVGDAKKQQFAFVIVYRFDRFARNRYDSVVYKRQLAISGVRVISATEAVADGPDGAILEAMYEAMDESYSRRLSAITLRGIQEATRKGIWCSAIPFGYRTEDKRLTIDEKEAAAVREIYTQYADGRTKTEIANWLNSHGYRTHRGNPFTCNNFNTVLSNPVYIGTGKCREIDVETPAILDKDLYDAVQKLLAKNAPARGRKTDKRYFALTGKLYCGLCGCAMTSDLGTSQNGTVHGYYSCSRRKTSHGVRGGKCPKKSERQDFLEWYIVRQTMSHVLTDARITEISERLEKLSHEDQASTSIRAIEARQKEINCELDDLTDKLISTSNQLIISRINTRADELAVELTALEADLSHLRLQVDHSLTAQQIAAYLRSLRTGDPLDPDFRRHIIDSFIQRVYLFDDKILVYYNIKETAPITYDQAIDDLDGLSAQLSSGCADFGSPNESLPEHILFIYSNNAFGAVIRIEK

SEQ ID NO: 2682 - protein, 541 aa, Unknown
  Description of Unknown: Integrase B2683 sequence
  SM00857,G3DSA:1.10.10.2600,IPR036162,PF13408,PS51737, G3DSA:3.40.50.1390,IPR025827,IPR006119,IPR038109,PF07508, IPR011109,SSF53041,PTHR30461,Coil,PS51736, cd00338,PF00239
MAKPEVSELAVVYARYSSHSQGEQSIEGQLSNARDYAAAHGYTIVHEYVDRAKSGRTDNRAEFQQMLKDTAKRQFSVIILWKVDRFGRNREEIAINKMKCRKNGVRVEYVAETIPDSPEGVILESVLEGFAEYYSLQLSQNIRRGRAESAEKCQSLGGNRPLGYKTGPDKKFVIDENTAPTVKMIFTMYADGKTVTEIVDKLNEMGLRTLRGGPFTKNSLHSILKNKKYIGVYEYQGREIKDGVPRIIEDDVFNKVQEMLKINKRAPAKTWSRADYILTDKLFCGKCGALMFGESGTSKTGAKHNYYICSNKKRFRSCDKKAVRQADIEDAVLNATHELLQDDELLDYIVDRTWEYYLAQDNSQEELRNLQRQLAQTDTAISNLIRAIEAGILTEETKKRMDELTQQKADLKASIADREIARGFHLQKSHIAFYLRSLRDADWSDKEAQKRLIQTFVNAVFVYDDHITLTYNFSGDKSTITLRDMQRFEDGEEFGCRASRSTMMWRQKMSPAKSPNISGFFAAQTAIFLCTKTQMQNRRFP

SEQ ID NO: 2683 - protein, 541 aa, Unknown
  Description of Unknown: Integrase B2684 sequence
  cd03768,PTHR30461:SF3,SM00857,G3DSA:1.10.10.2600,IPR036162, PF13408,IPR025827,PS51737,G3DSA:3.40.50.1390,IPR006119, IPR038109,PF07508,IPR011109,SSF53041,PTHR30461, PS51736,Coil,PF00239
MRIAIYSRKSKFTGKGESIGNQVEMCRDYIATNYNGEEHSIQVFEDEGFSGKNLDRPQFKKMIEIENVIPFDLIVVYRLDRISRNVGDFASLIEKLNKKNTSFVCVKEHFDTGNSMGRAMMNIAAVFAQLERETIAERIKDNMYLLAKEGHWLGGTTPLGYKSIEVTNGKRTHFELIIDESQIDLVNIIFSKYKQLGSINGVETYLFVNGYKTQKNNYWHKSNVKRILTNPIYCIADIDSLNYFTELGCNVCFTLDDCNGKKGIYPYNRFSGQKREMQSYDRWIITISEHQGILAGKEWVAIQQQLKANSKDGFGGKANERRSTSNTSLLSGVLFCSCGAYMRPKKYPSGNTFYICENKMDKKITECNNSNINADELDKIILNELFSFDIKDGVVDSQIQNLKEQVANIDNDLQKQIGRLKKQIETNKNTVNKFMNIVALSIENDTPEQVVEVYNQKINELLNQNKITQKRIDELQDINIVQAKMNDKLNSLTDAMVYLKENFDKLTIVEKRGFVKKIVDRIVWDGNNINIFIKGISELSE

SEQ ID NO: 2684 - protein, 541 aa, Unknown
  Description of Unknown: Integrase B2685 sequence
  PTHR30461:SF3,cd00338,SM00857,G3DSA:1.10.10.2600,IPR036162, PF13408,PS51737,G3DSA:3.40.50.1390,IPR025827,IPR006119, IPR038109,PF07508,SSF53041,IPR011109,PTHR30461, PS51736,Coil,PF00239
MKFPIDLSTLTKEEISQFEEDPFTLYNGDHNVTLYLRYSSSGQSDQSIEGQLRDCRAFCKANHYRIVAIYIDRATTARKDVEKRIHLMEMIADSAKQNWDYVVVWKLDRFSRNRNDSAIMKMRLRKNGVKVLSATEHLSDNPESILLESVLEGMAEFFSAELSQKVTRGMRESALKCHSVGGHVPLGYKIKDHKLVVDPDTAHIVQEAFALYANGVSVAEIARKFNAAGYKTAKNTEFNRSSFKVMFQNVRYIGTYTYKDIRIENGVPAIIDRELFDAVQRRLSKTATAPARGKAKVDYLLSGKLFCGHCGASMNGESGVGRSGKTYHYYSCYTKKRRLGCEKRPLRKDYIEEIVARSAFELLTDQLIDEIADMAIKQSEQDMVNETRIPQLTEQLSEIEKSIANITTAIEKGIASETLMNRLVQLEHEKKTINKEIKSEEKYVYRIDRDQIVFWLSQFKYGNIEDESFRRRLIDLLVNSVTVWDEPDGYKITTAYNLTSCKTKTFRVEKSPATENVTGFGFGESECTTKEASEPDASFLL

SEQ ID NO: 2685 - protein, 541 aa, Unknown
  Description of Unknown: Integrase B2686 sequence
  cd00338,SM00857,G3DSA:1.10.10.2600,IPR036162,PF13408, PS51737,IPR025827,G3DSA:3.40.50.1390,IPR006119,IPR038109, PF07508,IPR011109,SSF53041,PTHR30461,PS51736, Coil,PF00239
MYNLLCKGENLGMKFTSTWRISDPLAQYIVYLRKSRKDMEAEALGQTDTLKRHRAALLSLAESSGLNVVEICEEVVTGDSIAVRPEVQKVLQLVETGSYAGVLVMEVERLARGDTIDQGIIAQTFKYSNTKIVTPNKVYDPNNEMDEEYFEFGLFMSRREYNTIKRRLSRGKEASLREGKWISGKTPFGWLREKLPNDKGYKLIPHPEQAPILRQIYDWYTGEGCTRIGSYAIASRLNTLGIKTNSGNSWTTSAILELLRNPANAGWIKSGGRPETKRIVDGSVVVSRPRTRQEDLKLYKGLHDALISQAQYDKAVSLSYSVVAPRGKGAWKTVTSLAGLVRCDQCGRVMVRRASSGDRRPSFMCPTQGCPTVSSWYSEVEEALLDALRDWLRELEVGEADTNDDHSLLDALSASINADQKQLAKLEAQEARAYELVETGVYTPEVFLQRSQALAADKQVIVSRVEENQRAQDEITRAKQARARLAPAVRHVLEAYPLAATPQDKNDLLKTVLQKVLYHKRSKSYSKAGSDMCLTLYPLTD

SEQ ID NO: 2686 - protein, 541 aa, Unknown
  Description of Unknown: Integrase B2687 sequence
  cd03768,PTHR30461:SF3,SM00857,G3DSA:1.10.10.2600,IPR036162, PF13408,IPR025827,G3DSA:3.40.50.1390,PS51737,IPR006119, IPR038109,PF07508,IPR011109,SSF53041,PTHR30461, PS51736,Coil,PF00239
MRIAIYSRKSKFTGKGESIGNQIEMCRDYIATNYNGEEHFIQVFEDEGFSGKNLDRPQFKKMMEIENVIPFDLIVVYRLDRISRNVGDFASLIEKLNKKNTSFVCVKEHFDTGNSMGRAMMNIAAVFAQLERETIAERIKDNMYLLAKEGHWLGGTTPLGYKSIEVTNGKRTHFELIIDESQIDLVNIIFSKYKQLGSINGVETYLFVNGYKTQKNNYWHKSNVKRILTNPIYCIADIDSLNYFTELGCNVCFTLDDCNGKKGIYPYNRFSGQKREMQSYDRWIITISEHQGILAGKEWVAIQQQLKANSKDGFGGKANERRSTSNTSLLSGVLFCSCGAYMRPKKYPSGNTFYICENKMDKKITECNNSNINADELDKIILNELFSFDIKDGVVDSQIQNLKEQVANIDNDLQKQIGRLKKQIETNKNTVNKFMNIVALSIENDTPEQVVEVYNQKINELLNQNKITQKRIDELQDTNIVQAKMNDRLNSLTDAMAYLKENFDKLTIVEKRGFVKEIVDRIVWDGNNINIFIKGISELSE

SEQ ID NO: 2687 - protein, 541 aa, Unknown
  Description of Unknown: Integrase B2688 sequence
  PTHR30461:SF3,SM00857,G3DSA:1.10.10.2600,IPR036162,PF13408, IPR025827,PS51737,G3DSA:3.40.50.1390,IPR006119,IPR038109, PF07508,SSF53041,IPR011109,PTHR30461,Coil, PS51736,cd00338,PF00239
MSTENYVNKKPKITVIPAKPRQEIVGRQSVNGEKTKLRVAAYARVSTDHEEQESSYEAQVKHFTEYITQREDWQLAGIYADPGLSGKNIKRPQFQKLMRDCEQGKIDRIITKSVSRFARNTLDCVKCVRKLKEKGIGVYFEKENLDTLQEGSEFVLTIMASLAEEESRSISNNIRWSVKKKFENGKLLMSTAHFLGYEMENGVLKIIPEQAMIVRRIYAEFLDGYSLKEICEGLERDGILSPSGKTKWHATTVASILTNEKYKGDCHLQKTYLPDFLSPRRIKNEGQADSYYVEDSHAAIISKEMFDMVQQERMNRKNLRSGSATGKGKFSGKYAFSGMIICGECGETYRRHQQYSGDKKYYIWVCKTHENTGKGNCPAKPIKEKTLEEAFVRALNRLMENSQEILDEVRLAAETEITDSCEAAVEEVQKQIEEAQNALATLLQKRSVGLITPEEYEAQSKKLKNDIDMLNFRKEATLTEQSTMQLAEYRTAAVVDLLTNGTMLQEFDKVIFKSLVKRITVLNRQEIEIEFECGIKVKETL

SEQ ID NO: 2688 - protein, 541 aa, Unknown
  Description of Unknown: Integrase B2689 sequence
  PTHR30461:SF3,IPR036162,PS51737,IPR011109,PTHR30461, PS00397,PF00239,G3DSA:1.10.10.2600,IPR006119,SSF53041, cd00338,SM00857,IPR025827,IPR038109,PS51736, IPR006118,PF13408,G3DSA:3.40.50.1390,PF07508,Coil
MFVTNELKTYAAYLRVSTDDQKDRQTIESQIEFVNKYCDLHQINLFKIYKDDGITGTLPLYERPAGSQLMQDAKNGLFNTLLVYKLDRLGRATRVILNAIHDLESYGVKLKSMTEPFDTGDASGRFLLTILAGVADLERSNILERMWHGANRAARSGKWLGGIVPYGYIKNEDKELIINEAPLSGLDISEADVIRLIYKLTVDEKMTTIKIADHLNALGIPPSYVARSSPDTGRRKINTAGIWRPGRVLNMLKSTTYKGIHQYGKRTKKNREIIEREVPAIVSEEIWDQAQQIIKGNFLFCRKNAKHSYLLRGLIKCGNCGHTYHGSTYNDGLTFYCCNGRTSWKQKGKEKCIGKYINLNYLDDLVWNDCLNFINDPELALKEIAAQNNNRPDKSLTENERLLMNSKLNEKEQEKERILDLFRKNLINMQDVENQLDKIAIDIDTIKSRLNDLNKKDNLSNIFSEKESTLTLLSSFKEKITDDITFETKQEITKCLVRQVLVTTNPDNVKEADIKITYHFSFIPDIATRVVHRTDRDSSLQ

SEQ ID NO: 2689 - protein, 541 aa, Unknown
  Description of Unknown: Integrase B2690 sequence
  PTHR30461:SF3,IPR036162,PS51737,IPR011109,PTHR30461, PS00028,PS00397,PF00239,G3DSA:1.10.10.2600,IPR006119, SSF53041,IPR013087,cd00338,SM00857,IPR025827,IPR038109 ,PS51736,IPR006118,PF13408,G3DSA:3.40.50.1390,PF07508,Coil
MAKHAITIPQNPKAALYIRVSTDMQADKDSLPLQESDLRKLADLNGIKDIEVFCDAGFSGKNLNRPAFRSMMDRIRAREFSHLYVWKLDRISRNLLDFLELYDELKCYGVAFASKNESFDTQSPGGEAMLKILLIFAELERKTIAERVTAVMLGRANENKWNGGRVPFGYMPGPVTTDANGKKCKSWPVPDPIEAPIVRAIFELYLREKALKKVAAALNTAGYRSRKGTLWSDTTVRCILKNHFYKGEYVYNRQNPNAGRREDFYRSENDWVVVTGQHEAIVPEETWRRCNEMLSKNRSWLAPIGSLVSAQDKYIFGGLLQCAECGYTMNSKDRTRIHDHTHSSYYYCTGRWKAPAVCTGEHSGYASDRVLLPQILKLIARIIEACANAIKFASAEQLVSYLLNDNLIPGATGIEEAQRIYMIVRAHVKHIYGIEQANQYNPNALLVEQSQKEKEKQERALSRLKRAYLFDDGDMSEAEYFEQKAAIEGTIAKLEKQIKSLSGNDIGADEAYLAQLSKLIMIKKLQDTNDMYPVFWTPLKI

SEQ ID NO: 2690 - protein, 541 aa, Unknown
  Description of Unknown: Integrase B2691 sequence
  cd00338,SM00857,G3DSA:1.10.10.2600,IPR036162,PF13408, IPR025827,G3DSA:3.40.50.1390,PS51737,IPR006119,IPR038109, PF07508,IPR011109,SSF53041,PTHR30461,PS51736, Coil,PF00239
MYNLLCKGENLGMKFTSTWRISDPLAQYIVYLRKSRKDMEAEALGQTDTLKRHRAALLSLAESSGLNVVEICEEVVTGDSIAVRPEVQKVLQLVETGSYAGVLVMEVERLARGDTIDQGIIAQTFKYSNTKIVTPNKVYDPNNEMDEEYFEFGLFMSRREYNTIKRRLSRGKEASLREGKWISGKTPFGWLREKLPNDKGYKLIPHPEQAPILQQIYDWYTGEGCARIGSSAIATRLNNLGVKTNSGNAWTASAVLDTLRNPANAGWIKSGGRPETKRIVDGSVVVSRPRTPQEDLNLYKGLHDGLISQEQYDKAVALSYSSGSPRGKGAWQTMTSLAGLVRCDQCGRVMVRRPSSGGRRDAFMCPSPDCPTVSAWYEDVEDAVLDALRGWLHELEVGEAERSDKHSLLDALAASISADQKQLAKLEAQEARAYEFVETGVYTPEIFLQRSQALAADKQVIISRIEENQLAQDEITRAKQARTRLAPAVRHVLETYPLAATPQDKNDLLKTVLQKVLYHKQSKSYSKAGSDMRVTLYPLTD

SEQ ID NO: 2691 - protein, 541 aa, Unknown
  Description of Unknown: Integrase B2692 sequence
  cd03768,PTHR30461:SF3,SM00857,G3DSA:1.10.10.2600,IPR036162, PF13408,IPR025827,G3DSA:3.40.50.1390,PS51737,IPR006119, IPR038109,PF07508,IPR011109,SSF53041,PTHR30461, PS51736,Coil,PF00239
MRIAIYSRKSKFTGKGESIGNQVEMCRDYIATNYNGEEHSIQVFEDEGFSGKNLDRPQFKKMMEIENVIPFDLIVVYRLDRISRNVGDFASLIEKLNKKNTSFVCVKEHFDTGNSMGRAMMNIAAVFAQLERETIAERIKDNMYLLAKEGHWLGGTTPLGYKSIEVTNGKRTHFELIIDESQIDLVNIIFSKYKQLGSINGVETYLFVNGYKTQKNNYWHKSNVKRILTNPIYCIADIDSLNYFTELGCNVCFTLDDCNGKKGIYPYNRFSGQKREMQSYDRWIITISEHQGILAGKEWVAIQQQLKANSKDGFGGKANERRSTSNTSLLSGVLFCSCGAYMRPKKYPSGNTFYICENKMDKKITECNNSNINADELDKIILNELFSFDIKDGVVDSQIQNLKEQVANIDNDLQKQIGRLKKQIETNKNTVNKFMNIVALSIENDTPEQVVEVYNQKINELLNQNKITQKRIDELQDTNIVQVKMNDRLNSLTDAMAYLKENFDKLTIVEKRGFVKEIVDRIVWDGNNINIFIKGISELSE

SEQ ID NO: 2692 - protein, 541 aa, Unknown
  Description of Unknown: Integrase B2693 sequence
  cd03768,PTHR30461:SF3,SM00857,G3DSA:1.10.10.2600,IPR036162, PF13408,IPR025827,G3DSA:3.40.50.1390,PS51737,IPR006119, IPR038109,PF07508,IPR011109,SSF53041,PTHR30461, PS51736,Coil,PF00239
MRIAIYSRKSKFTGKGESIGNQIEMCRDYIATNYNGEEHFIQVFEDEGFSGKNLDRPQFKKMMEIENVIPFDLIVVYRLDRISRNVGDFASLIEKLNKKNTSFVCVKEHFDTGNSMGRAMMNIAAVFAQLERETIAERIKDNMYLLAKEGHWLGGTTPLGYKSIEVTNGKRTHFELIIDESQIDLVNIIFSKYKQLGSINGVETYLFVNGYKTQKNNYWHKSNVKRILTNPIYCIADIDSLNYFTELGCNVCFTLDDCNGKKGIYPYNRFSGQKREMQSYDRWIITISEHQGILAGKEWVAIQQQLKANSKDGFGGKANERRSTSNTSLLSGVLFCSCGAYMRPKKYPSGNTFYICENKMDKKITECNNSNINADELDKIILNELFSFDIKDGVVDSQIQNLKEQIANIDNDLQKQIGRLKKQIETNKNTVNKFMNIVALSIENDTPEQVVEVYNQKINELLNQNKITQKRIDELQDTNIVQAKMNDKLNSLTDAMAYLKENFDKLTIVEKRGFVKKIVDRIVWDGNNINIFIKGISELSE

SEQ ID NO: 2693 - protein, 541 aa, Unknown
  Description of Unknown: Integrase B2694 sequence
  PTHR30461:SF3,SM00857,G3DSA:1.10.10.2600,IPR036162,PF13408, PS51737,G3DSA:3.40.50.1390,IPR025827,IPR006119,IPR038109, PF07508,IPR011109,SSF53041,PTHR30461,Coil, PS51736,cd00338,PF00239
MEAAIDTVQQPRVVRVVRNVATAPLTAQKIREQMIDTRLPVAAYARVSTTNEEQEDSLERQKTHYTEYIGNRPEWRFVGVYDDPGITGTRADQRKGFQKLLADCRAGKIKKVLCKSISRFARNTVDALQYIRELKELGIGVYFETQNIDTMTAGGDILITILAAIAEQESRNMSENIKWAFQKKFKEGEVVLACSQFLGYDHDKDKNIVINEEQAKVVRRIYREFLSGYACSAIAKRLTEDGIPTPSGKKQWRTGVIKSILTNEKYYGSAYLGKTCKRDVLSKERVASEEVYYVENSHPAIIPKDTWDLVQLEVTRRQEYRTCSETGNGKYSSKYPFSKKLICGECGMMYRRHAQYKRGNYVRTWVCITHKRKGNDYCSQRYILEDDVANAFQTVLKELVGDMSSIKEILEKNVVDTLGEKEDNGGVQVLLQIQSLQTEMIDINRKKRSGEIAYEAYVARAREIADQVEVLEKQQREIQAAEESRISETKRVKDILEAINGMHQMDEFDGEIFRRLIDNVIIKDKRLTFNFKVGISKTITI

SEQ ID NO: 2694 - protein, 541 aa, Unknown
  Description of Unknown: Integrase B2695 sequence
  PTHR30461:SF3,SM00857,G3DSA:1.10.10.2600,IPR036162,PF13408, PS51737,G3DSA:3.40.50.1390,IPR025827,IPR006119,IPR038109, PF07508,IPR011109,SSF53041,PTHR30461,Coil, PS51736,cd00338,PF00239
MKLTHGAYILARFSTDNQEVDSIDVQVQKCREWCAREHLPVLDVFADEATSGMKDTRPEYSRMMRQLAEGGADTVVIYDQSRMFRKLTAWFQFREQVACYGVRVVAVTQPIIGGDLRDPMTFLSEGSMALMNQMWVLQTRQKVIAKMRYMAEQGKHTGGKPPLGYDVRDERLVVNEEEADTVRIIFGDYAAGASYINIIRKLNDLGRLTKTGKPFGKNSLHEILKNEKYIGTLVYGKVEQRPDGQRNSHAVSDSVIRIENKIPAIIDRVTWDEVQKKMKSNKKEKAGRPAKRDYPLKGKVFCRECKSAMSLEGSRGYYYYVCGKQRRTCDCDGSRIKVDLLEQLIADAMREIIGNPQNVEYIIQIVREERGKIINTAAQQMQILFARSEKINKQLDAATNAVLAGMHSETLMDKVHELEAEKNEIDREMAKLKHSADCAAMPEEQLRALLNDAGGDVSALLSLVMRVEVGKDEIVVWTLLDADPKGHFDFSEDGTKIDLKMDSGGTHGNSGCTLASTKNYYNFSIAGGLLRFSIPRKKRRG

SEQ ID NO: 2695 - protein, 541 aa, Unknown
  Description of Unknown: Integrase B2696 sequence
  PTHR30461:SF3,SM00857,G3DSA:1.10.10.2600,IPR036162,PF13408, PS51737,G3DSA:3.40.50.1390,IPR025827,IPR006119,IPR038109, PF07508,SSF53041,IPR011109,PTHR30461,Coil, PS51736,cd00338,PF00239
MSESTLKKAVFYGRYSSHLQHETSIEAQRDIVTRYALNNGYEIISEYIDRAKSGTTTARRDRFNQMILDSRNGEFQYVITSKIDRFARNVKDFYISENKLDENGVKYISATEHYDDSTMSGIIIKALGVAAADGYSKNLANELVKGKMVNAKRAKHNGGIAPLGYDVELSTGTLKINEEEAKAVRLIFDMYVSGNSYGDICYKLNELGYTTKKQRKFGKNSLYDILHNEKYMGVYVFNKRAGKKNSHARKPDNEIVRIENGVPAIISKEVFDKAAKLMEYNKRNSGANTAKHNYMLSGLVRCGHCGCMMSGCAKKNGKGIVTHVYRCGHKPGEKCENHEINSDKLDEFVITMVKKYLLCKDNIPVLLNILRELSAKRITGISDDISEYSRRLKDIKTKQENLLNALETGGQMESVIDRLKKLEQDKSTVESKISELEQKKSVSVTEEQLNKALNILPAFIMSGRTPECRLFIRNIVEQVIVSKDNAAVTLRVTAVFCMRNRKDRKHILSSGIDPKKYQEDKNHERKQECRTVCKIQLRYAA

SEQ ID NO: 2696 - protein, 541 aa, Unknown
  Description of Unknown: Integrase B2697 sequence
  PTHR30461:SF3,cd00338,SM00857,G3DSA:1.10.10.2600,IPR036162, PF13408,PS51737,G3DSA:3.40.50.1390,IPR025827,IPR006119, IPR038109,PF07508,IPR011109,SSF53041,PTHR30461, PS51736,Coil,PF00239
MAKKKKPAGGNAIIYARYSSHNQRDVSIEQQIEACRKHAAELGLTITDTYEDRAISGRTDNRPAFQRMMRDAEDGKFQYVLAWKSNRMGRNMMQAMVNESRLMDCGVKVFYAEEDFDDSAAGRFALRSMMNVNQFYSDNLAEDVRRGLMDNASKCMANGRQPLGYKRGEDGKVVVDEPAAAIVREIYTRIASGEMFMDIARDLNRRGIKTQSGSEWNKSSFKVLCRNERYRGIYIYGDTRIEGGIPPIVDDVLWYKVQEVLKVKKSKNRHHCPSDEDYLLTGKLRCGKCGGYMIGMSGRSKTGDVHHYYACQNRRVGHTCDKKNIRRDVVEPAVAQAIKQYCLTDDAIEWITDQTIAYWEDEDRKLQIDSIENDLSAVQSSISNVMKAIEMGVITETTRDRLIELERQQTDLKSKLALAKEEIVHVDRKDLISSLLAFRHGNVHDRAYQEKLFNAFLIAVYVYDDDHLKLVFNSFGKDDTVNIALDLGENDDNSGLSDVSKSSPILSNGQPKDIRTVRMSFFVHRESQKERYSKRCIALFG

SEQ ID NO: 2697 - protein, 541 aa, Unknown
  Description of Unknown: Integrase B2698 sequence
  PTHR30461:SF3,SM00857,G3DSA:1.10.10.2600,IPR036162,PF13408, IPR025827,G3DSA:3.40.50.1390,PS51737,IPR006119,IPR038109, PF07508,IPR011109,SSF53041,PF00239,PTHR30461, PS51736,Coil,cd00338
MKTMKFPIDLSMLTEEEIDQFRQDPSTLFEGDTDVSLYLRFSSERQREQSIEGQLRDCRTFCKLNSYRITAIYVDRATTARKDVEKRVHFQEMIRDSEKKPWEYVVVWKLDRFARNRTDSALFKFRLRKNGVKVISATENISEKPEGIILEAVLEGMAEFYSADLSQKITRGMRESALKCHSIGGHVPLGYKIEDHKLVINPATAHIVREAFELYANGETVADICRMFNTKGYRTAKGVEFNRNSFKSMFRNKRYIGVYTYKDIEMEGGVPAIIDKELFETVSRRLSKNAEAPARGKAKVDYLLAGKLFCGHCGGSMNGESGTSKTGAVHNYYTCYTRKRKHACEKKPLKKEWIEYIVAQDAMELLTDDTIQELADMAISQTEQDLRENTRIPELTERMKETESGIANITNAIEKGIASDALMNRLVELEKEKKNLLRLLAEEEKYVCKIERSQIVYWLTEFKGGRIEDERYRRIIIDLMVNSVTVWDEPDGFRITTAYNLTSCQSKTFRIDPSSEKGFGFEGSKSTTSEQALYRLLRLIL

SEQ ID NO: 2698 - protein, 541 aa, Unknown
  Description of Unknown: Integrase B2699 sequence
  PTHR30461:SF3,cd00338,SM00857,G3DSA:1.10.10.2600,IPR036162, PF13408,IPR025827,PS51737,G3DSA:3.40.50.1390,IPR006119, IPR038109,PF07508,IPR011109,SSF53041,PTHR30461, Coil,PF00239
MMENRMMTGNRVDCLYRVSTDKQVDYNDKSQADIPMQRRECHRFCEKMGWTIVHEEQEDGVSGHKVRAENRDKLQIIKERAKQGKFDILLVFMFDRIGRIADETPFVVEWFVKNGIRVWSTQEGEQRFDNHTDKLTNYIRFWQADGESEKTSIRTKTALGQLVEDGGFKGGLAPYGYDLVKSGRFNKRKHEVFELAVNEAEAAVVRIIFDKYVHEGFGAQRIATYLNNLGYRARTGKMWHHASIRGIICNLTYTGVLRSGESRSQTLPHLQIITPELFEAAQHIRTSRANSAEQERRVPLNTRGQSLLAGNVFCGHCGSRLALTTNGKAYPCKEDAHRIVKRVRYICYGKTRKQTECDGQTGYTAHILDGIIDKVVRQIFERMKAIPKSEIVNIRYREKMEERKALLKSAKSDYAKAAAELDTLRAEVIKSLRGESAFSQDLLGSLISDCETKCLEVQHTMEAAQAAYDEGQAMLDALNAQYDDIISWADMYDSASTESKKMIVSCLIRRVEVYRDYRLHIDFNIDFEQFSAGLDISAIAA

SEQ ID NO: 2699 - protein, 540 aa, Unknown
  Description of Unknown: Integrase B2700 sequence
  PTHR30461:SF3,SM00857,G3DSA:1.10.10.2600,IPR036162,PF13408, IPR025827,PS51737,G3DSA:3.40.50.1390,IPR006119,IPR038109, PF07508,IPR011109,SSF53041,PTHR30461,Coil, PS51736,cd00338,PF00239
MPRKKKLQEVGGLRLVAYYRYSGGSGQTEQSIEGQRRDCEAYAKLHGMTIQHEYIDRHISGKTDDRVSFQQMIRDSDKGAFDMVICWKTDRFARNRYDSAVYKKRLRDNGVEIIYAAESNISGAEGIIIEGLMESLAEYYSAELAEKMRRGMRESALKCQAINRCRPLGFTTDAGKKFIIDERTAPAVRFIFEHYAAGESAAYIVEQLNEKGYRTSQGNEFNKSSINRIIQNEMYRGVYISKAYDVRIEGGVPAIVDDELWRRAQAMAKLNKQKRAKYSSKADYFLSGKLYCGECGCLMKGISGHSSTNGEVYRYYACSNPKCKKHNVPKEELEGKVIQAIIDNLLQPEAMEALAEAMVAVQETDADKPNAEREAIQQELADVRRRSKNILDAIENGTANPHLTARLDELTERENTLRFQLSTLTDEKPLRFTKEEYLFLLEQFLIDPAERNEDYGRRVVHTFVTSMEVSDSKLLIYFNISEENADKNKNASPSELQKESSTVKRLVHLTHQQTNFRLYVSPMRFFIDGPFVLSKKLFTA

SEQ ID NO: 2700 - protein, 540 aa, Unknown
  Description of Unknown: Integrase B2701 sequence
  PTHR30461:SF3,IPR036162,PS51737,IPR011109,PTHR30461, PF00239,G3DSA:1.10.10.2600,IPR006119,PF14287,SSF53041, IPR025378,SM00857,IPR025827,cd03770,IPR038109, PS51736,PF13408,G3DSA:3.40.50.1390,PF07508,Coil
MKRPCTMTNNNAALYMRLSRDDESYGDSVSIETQRTLLRSYAKEHGLNVVDEYIDDGWSGTNFDRPSFQRMMRDVENGIVNCIVTKDLSRFGREHVMMGYYLDFLFPEKHVRYIAIAEGEDTEKGLSDFVPFKNLFNEWYAKDTSRKVKAAFRAKFAAGQCVSSCAPIGYKKDPTNKNRLIPDEDTRWIIEKIFDLATHGNGAFSIAKRLKEENVPTSGWLNYQKSGAFANIYANAPEEKRYMWTPGQVKKILTDEVYIGNSVHNRQSTVSFKNKKRILNPKEKWYRVENTHEAVIPKDVFFQAQEQIASRRRRQKTGDTQIFAGLIKCADCGCSLAYGSKPQGNERYGYYRCGKYAQGSHQCTMHYIRYDVLYAYVLSRLQYWSSLARCDEAKFATRISLAAEFGKNAKTKRQSEELNRLKKRNEELDILFAKLYEDRVCGRITERNFDMISAKYQAEQASLDEKIIHLQDAIRAKEQSASNAQNWFDLIKKYRSPTELTAELLNALIEKIVVHEAVKQNDGTREQEVEIFYRFIGKID

SEQ ID NO: 2701 - protein, 540 aa, Unknown
  Description of Unknown: Integrase B2702 sequence
  PTHR30461:SF3,cd00338,SM00857,G3DSA:1.10.10.2600,IPR036162, PF13408,IPR025827,G3DSA:3.40.50.1390,PS51737,IPR006119, IPR038109,PF07508,SSF53041,IPR011109,PTHR30461, PS51736,Coil,PF00239
MATATRRVVRTMPQMFIDVADNQSERLQVAAYARVSTEKEEQEDSFERQVEHYKQLIYSKPDWQFVDVYADPGISGTRAEKRPDFLRMIEDCRAGKIKKVLVKSISRFARNTVDALQYIRELKDLGISVYFESENIDTLTPGGEVLLTILAAMAEQESRTISSNIKWAWQRKFQKGDIILNTGLMLGYRKIGKDDEGHDVYEINEEEAEIVRRIYREFIAGYSITQIAKRLQAEGVKTKLGRESWRHNVIESILTNEKYTGNALLGKTFKPDVLTKYRQKNDGKKAPIYYVEGSHPAIIEKGLFDLAQQEMQRRRDANDNKVGGGRYSSRYPFSGMLVCGICGSKLRRQVRTMGSGKRTASWGCCNRINNGRAVCDSHHVNEDVLEAAYLTAMRRLVDSAEEVVEAVRDGAELALEPENKAAMDRIDEETIQLQEAALALHKAKQRMEIGSVEYASRVKEYSERMKELEAERNELQGTAAKYAEVRLWLDTFIEQTMQSDTLTTVDGTTMKMLVDRIHVRNDGVVVEFKCGVAIEQEYVK

SEQ ID NO: 2702 - protein, 540 aa, Unknown
  Description of Unknown: Integrase B2703 sequence
  PTHR30461:SF3,SM00857,G3DSA:1.10.10.2600,IPR036162,PF13408, PS51737,IPR025827,G3DSA:3.40.50.1390,IPR006119,IPR038109, PF07508,IPR011109,SSF53041,PF00239,PTHR30461, PS51736,Coil,cd00338
MRVVLYMRYSSDRQTEQSIEGQNRVCTAFCEQQGYEIVDRYIDRATSAFKDTDKRTEFQRMIRDSEKQLWEGIVVYKLDRFARNRYDSATYKARLKKNGVRVISATENISDNPEGVILEAVLEGMAEFYSKELSQKITRGMFESANKCHSIGGHIPLGYKIENKKLVIDEAGAAIVREAFDLYANGATVAEICETFNTKGYRTAKNAEFNKNSFRSMFKNERYIGIYKYKDLRIEGGVPAIVDKDTFAIVQKKLSKNAEAPSRGKAKIDYLLSQKLFCGHCGSLMTGESGTGKGGTTYFYYTCGKRKREHTCDKKPLKKDFIERAVVEDALTLLTPETIDELADIAVNESIREMEENSIIPALKDQLHDTERSINNLVKMVEKGVESDTIADRLKELEKEKRAIEKRLVVAQDDYVLLEKDHIVWWLSEFCNGDIEDEEFRRHIIDLLVNSVTVWDEPDGWYKITSVYNLTSNKTKTFRCSDLSGQAPPSSCTKKDAAAKSLEVSTVSPHRYTMCHGGTAGTGKSKTQTHAFEFASCFFT

SEQ ID NO: 2703 - protein, 540 aa, Unknown
  Description of Unknown: Integrase B2704 sequence
  PTHR30461:SF3,SM00857,G3DSA:1.10.10.2600,IPR036162,PF13408, IPR025827,PS51737,G3DSA:3.40.50.1390,IPR006119,IPR038109, PF07508,IPR011109,SSF53041,PF00239,PTHR30461, PS51736,Coil,cd00338
MARKKNIAAGLDAVIYARYSSHNQREVSIEQQIAECTKHAAALGLRIVGTYEDRAISGKTDNRPRFQQMMRDAEKGKFQAVVAWKSNRIGRNMLQAMVNEAKLDDYGVKVFYAEEDFDDTAAGRFALRNMMNVNQFYSENMAEDITRGLYDNANKCMANGRQPLGYKRGADGKVMLDEPAAAVVREIFTRVAAGDLFVDIARDLNAKGIKTSKGAAWNKGSFQSICQNERYKGIYIYGNVRIVDGIPRIVSDELWYKVQEAMRVKKNPVGTRHRVGAEDYLLTGKLRCGHCGSYMTGVSGTSRNGELHYYYTCQKRRTEHACNKKNVRRDVIEPAIAQAIKMYCLTDDVIEWMADQTVQYWKKHDNDLQIEALEQQLAENKKATSNMLKAIEMGIITEATRSRMVELETENSKLTAQLSAAKRDVVKINREDLIDELHVLRSKDVHDREVQAELFKDFLVAAYIYDDNRLKLVFSFMGKDNSVEIPLETEEDPPDGEDSPDAKMFVLTPDCSTNEEQNEHEVTIQMVGNVFVLFCEIPSV

SEQ ID NO: 2704 - protein, 540 aa, Unknown
  Description of Unknown: Integrase B2705 sequence
  PTHR30461:SF3,SM00857,G3DSA:1.10.10.2600,IPR036162,PF13408, IPR025827,G3DSA:3.40.50.1390,PS51737,IPR006119,IPR038109, PF07508,SSF53041,IPR011109,PF00239,PTHR30461, PS51736,Coil,cd00338
MQRQVVKREVQVIQPTLRTGLMHSTLAPAIKQRVAAYARVSTEHEEQQSSYEAQVDYYTRKIKERSDWSFVEVYTDKGITGTNTKKREGFNRMVKDALDGKIDLILTKSVSRFARNTVDTLTTIRKLKERGVAVYFEEQSINTLDGKGELLITIMSSIAQEESRSISDNVTWGQRKRFADGKVSVGYKQFLGFEKGEDGLPKVVEEEAKVVRFIYRSFMMGKTGTHIAKMLTEAGIPTPGGKKEWQSSTIMSILQNEKYKGAALLQKAFTVDFLEKRMKINEGEVPQYYIEHSHEAIIDPLEHDRVQMEISRRKALDRHYSSAHLFSSRVICGECSGFFGRKVWHSNDVYKTYIWQCNEKYRKGLKCKTPHFREDELKQRFVDAFNQRAEIKEETLAACQLGIETICALDELDSQIRSVKDEISVLVEMSRQLIDENAHSAQDQDDCQRRHSALVAKYEDADTRLKALESERSRRIDMRKSIEWFMESFRQQDGLLTEFDEGLFFSVTDVMTVYDDERVAVRFRDGVEIETFAHSQEHMA

SEQ ID NO: 2705 - protein, 540 aa, Unknown
  Description of Unknown: Integrase B2706 sequence
  SM00857,G3DSA:1.10.10.2600,IPR036162,PF13408,PS51737, IPR025827,G3DSA:3.40.50.1390,IPR006119,IPR038109,PF07508, IPR011109,SSF53041,PF00239,PTHR30461,PS51736, Coil,cd00338
MARKKKQASGDAVIYARYSSHNQRDVSIEQQIEACRKYAASLGLKITVTYEDRAISGRTDNRPAFQRMMNDAEDGKFCYVLAWKSNRMGRNMMQAMVNEARLVDCGVKVYYAEEDFDDSAAGRFALRSMMNVNQFYSDNLAEDVRRGLMDNASKCIANGKQPFGYKRGSDGKVVLDEPAAAVVREVFTRVASGETNTSIARDLNRRGIKTGSNGEWNKCSFHGLCTNERYRGIYIYGETRIEGGVPRIIDDRLWHKVQEAIRMRNRRKNGRHRPGEDDYLLTGKLRCGHCGGYMIGMSGTSKTGTIHHYYACQNRRVGRTCDKKNIRRDIIEPAVAQAIKQYCLTDDVIEWIADKTIEYWEDEDRKLQITSLENELADIKSSISNVMKAIEQGVITSTTRDRLIELEAQQSDLSAKLNSAKEDLVHVDRKNLISSLLLFRNGDVYDRQYQEDLFNTFLVAAYVYDDGNRLKLVFNCFGDSNTVDLDLCSDENNDNSSISNEANCGNLFAQALKQSTRLKPSEEVQVAFLFISFRTTAARP

SEQ ID NO: 2706 - protein, 540 aa, Unknown
  Description of Unknown: Integrase B2707 sequence
  PTHR30461:SF3,cd00338,SM00857,G3DSA:1.10.10.2600,IPR036162, PF13408,PS51737,IPR025827,G3DSA:3.40.50.1390,IPR006119, IPR038109,PF07508,IPR011109,SSF53041,PTHR30461, PS51736,Coil,PF00239
MKKAVAYARFSSDMQREESIDAQVRAIKYFASQYGYDLAHVYADRAQSGRSDARVEFKRMIADSSSGAFDTVIVHKLDRFSRSSSDAIYYERILNHNGVQLVSVIERLDSSPEGQLMKMVILGMNQMYSQNLAREVMKGLKENAYQCRHTGGIPPLGYDVVDGKYVINELEAQAVRMIFQMYAAGAGYGEIIQAMYENGFKTKRGNRFGKNSLYDLLRNEKYTGVYIFNKSASADIRGKYNRHAMKPADEIIRVENGIPQIVDKNLFWQVQKKMNDNKHKNARHKAKVSYLLSGKLFCGHCGRAMTGEMHRYREREYGYYVCSSQKNKKGCNKKSVRKEWIEQAVVDDINNILFKPERLQSIAENIYKASHSEKPDERLVELKKQVTEIDRKIGNLTRVLADGLDSDSVRAAVVELENERRTLSAKIYELDLVPDAQRMSVAEIKNSISKMADFSKMDDSGKKRFIELFVQRIYLYDSDDGFRIRTVLSVTNPVDSLDISDFPDFSNITGSVPSPPFISENNIRYFPLGIVCLDSKRPFH

SEQ ID NO: 2707 - protein, 540 aa, Unknown
  Description of Unknown: Integrase B2708 sequence
  PTHR30461:SF3,IPR036162,PS51737,IPR011109,PTHR30461, PF00239,G3DSA:1.10.10.2600,PF14287,IPR006119,SSF53041, IPR025378,SM00857,IPR025827,cd03770,IPR038109, PF13408,G3DSA:3.40.50.1390,PF07508,Coil
MKQPYNTTIYNTALYMRLSRDDENYGDSVSIETQRTILQQYAKEQGLHVVGEYVDDGWSGTNFERPDFQRMMDDVDAGKVNCIVTKDLSRFGREHVMMDYYLEFLFPEKRVRYIAVAENEDTEKGLSDFVPFKNLFNEWFAKDTSRKVKAAFKAKFATGQRIGAYAPIGYRKHPEIKNKLIIDEETRWIVEKIFDLAIHGRGAASITRILIMEKVPTPGFINFQRDGTFANIYAGAPEKKSYAWTIAQVKSIMKDETYIGHTIHYRETNISFKNKRRVRKPQSEWVRVENTQEPIISEQVFRQVQEQIANRRRKCKDGTTQIFSGLVKCADCGWSLSYGENRQNSKPYGHYHCSKYGQGTRQCSMHYIRYDVLYAYVLSRLQYWSGLVQHDEERLLKRLLNATDKGQAAARKKQAAELKKAEKRKAEVDTLFARMYEDWAAGRITEYNFSMLSGKYQSEQAELDEKIERLQSAIATESQNAADAEKWIALMKECVNPTELTAELLNTLIEKIVVHEAVKGEDGSREQEVEIFYRFIGKID

SEQ ID NO: 2708 - protein, 540 aa, Unknown
  Description of Unknown: Integrase B2709 sequence
  PTHR30461:SF3,IPR036162,PS51737,IPR011109,PTHR30461, PF00239,G3DSA:1.10.10.2600,IPR006119,PF14287,SSF53041, IPR025378,SM00857,IPR025827,cd03770,IPR038109, PS51736,PF13408,G3DSA:3.40.50.1390,PF07508,Coil
MKQPNNTMIYNTALYLRLSRDDELQGESGSIQTQRMMLRQYAEEHGLTVVGEYIDDGWSGTNFDRPGFQRMIDDIEEGKINCVVTKDLSRLGRNYILTGQYTEIYFPSKGVRYIAVNDNVDTLNGESELAPFLNILNEMHARQTSKKVKAAMRTRFANGAHYGAYAPLGYIKDPDKSGHLLVDPETKWIIEKIFDLAVHGHGAASITHILVDEKVPTPGWLNFQRYGTFANIYAGASEEKSYAWTVAQVKSILKEETYIGHSVHNKQSNISFKNKKKVRKPQEEWYRVENTHEAIISADVFRQVQEQIAHRRRKQKDGTTQIFSGLVKCADCGWSMAYGMNKQNKKPYGYYHCSKNGQGLHQCSMHYIRYDVLYTYILARVQYWSQQAQQDGDKLLQRLLNASDKERNTAKKKQTAELKKATKRKAEVDNLFAKMYEDWSVGRITEYNFNMLSEKYQAEQHELDEKIQELQAELDAAVQTAVDAEKWIELMKKYVNPTQLTAELLNALIEKILIHEAVKHEDGTREQEVEIFYRFIGKVE

SEQ ID NO: 2709 - protein, 540 aa, Unknown
  Description of Unknown: Integrase B2710 sequence
  cd00338,SM00857,G3DSA:1.10.10.2600,IPR036162,PS51737, G3DSA:3.40.50.1390,IPR006119,IPR038109,PF07508,IPR011109, SSF53041,PTHR30461,PS51736,Coil,PF00239
MQNYPPLSSAEEYCMYLRKSRVDIEAEAHGEGETLARHEKLLLEVARRDRLNVTQIYREVVSGETIASRPVIQHVLQEVEQGRWAGVLVVEVERLARGDTIDQGIMAQTFKYSGTKIVTPLKVYDPNNEYDEEYFEFGLFMSRREYKTINRRLQRGRLAAAKEGKWVSGVAPYGYEKIRVPNDKGWTLRPVEAEADIVRFIFRLYTSGEEGESGEVKKLGTYSLAVRLDRMGVTPPGGAPCWSSTTIQSILENPVYIGKIRWNVHKTKKRVIGSSVRVEHYTAPEEEQVFVEGLHPAIVDEAVFLAAQELISRKGPPPVQSANTVTNPLAGVLVCGKCGRSIVLRPNAYGGLLMCPNRACNNVGSKYDIVEERLLQALSQWLEDYRLEWSDRPPSEEQALMELKAKSIRKAQSEVETLQRQLERTHDLLEQGVYDTEMFLSRSRSITGRINAAQDSIASLTSELAEEEARSASRRNIIPKVEKLLEVYSVLPSAQAKNDMLKGVLEKVEYTKLHRSGRNGPFDNFELLLYPKLPPSGLRE

SEQ ID NO: 2710 - protein, 540 aa, Unknown
  Description of Unknown: Integrase B2711 sequence
  PTHR30461:SF3,IPR036162,PS51737,IPR011109,PTHR30461, PF00239,G3DSA:1.10.10.2600,IPR006119,SSF53041,cd00338, SM00857,IPR025827,IPR038109,mobidb-lite, PS51736,PF13408,G3DSA:3.40.50.1390,PF07508,Coil
MKKRINTNSAARAVIYARYSSANQRDCSIEQQVEKCRELAAREGVTVIEIYADRAISGKTDRRPNFQRMMKDADLRQFDVVLAWKSNRMGRNMLQAMMNGEQLRSNGIRTIYAEEDFDDTAAGRFALRNMMNVNQFYSENMAEDISRGLMDNASKCLSNGSLPLGYKTGKDQKVVLDEAEAAIVQEIFTRVSCYEPFIDIARDLNRRGIKTKKGAEWGRSSFHTICRNERYRGIYIYRDIRVEGGMPRIVSDELFYKVQEVLKVKKNPQGRRKRSGYEEYLLTGKLYCGHCGSPMTGIAGTSKTGAMHYYYTCQKRRTDHSCDKKAVRRDQIEKAVAIAIQQQLLTDENIQMMADETMAYNARTEIKYRLQSLQQQLYSNETSTANIMKAIEMGIITDTTKARLLALEQEHGQLLAKIDTAKAEMVPINREDFVSLLDIYRTGDVNNKKYLAALFDTFLVRVDLYDDHFKITFDPTGGKMPVDIPIGAEDSPESPGDSPESSDFEASPQDAEKFVLALHNRTKILEHLFGDFFVLVICLG

SEQ ID NO: 2711 - protein, 540 aa, Unknown
  Description of Unknown: Integrase B2712 sequence
  PTHR30461:SF3,SM00857,G3DSA:1.10.10.2600,IPR036162,PF13408, IPR025827,PS51737,G3DSA:3.40.50.1390,IPR006119,IPR038109, PF07508,IPR011109,SSF53041,PTHR30461,Coil, PS51736,cd00338,PF00239
MPRKKKLQEVGGLRLVAYYRYSGGSGQTEQSIEGQRRDCEAYAKLHGMTIQHEYIDRHISGKTDDRVSFQQMIRDSDKGAFDMVICWKTDRFARNRYDSAVYKKRLRDNGVEIIYAAESNISGAEGIIIEGLMESLAEYYSAELAEKMRRGMRESALKCQAINRCRPLGFTTDAGKKFIIDERTAPAVRFIFEHYAAGESAAYIVEQLNEKGYRTSQGNEFNKSSINRIIQNEMYRGVYISKAYDVRIEGGVPAIVDDELWRRAQAMAKLNKQKRAKYSAKADYFLSGKLYCGECGCLMKGISGHSSTNGEVYRYYACSNPKCKKHNVPKEELEGKVIQAIIDNLLQPEAMEALAEAMVAVQETDADKPNAEREAIQQELADVRRRSKNILDAIENGTANPHLTARLDELTERENTLRFQLSTLTDEKPLRFTKEEYLFLLEQFLIDPAERNEDYGRRVVHTFVTSMEVSDSKLLIYFNISEENADKNKNASPSELQKESSTVKRLVHLTHQQTNFRLYVSPMRFFIDGPFVLSKKLFTA

SEQ ID NO: 2712 - protein, 540 aa, Unknown
  Description of Unknown: Integrase B2713 sequence
  PTHR30461:SF3,IPR036162,PS51737,IPR011109,PTHR30461, PF00239,G3DSA:1.10.10.2600,IPR006119,PF14287,SSF53041, IPR025378,SM00857,IPR025827,cd03770,IPR038109, PF13408,G3DSA:3.40.50.1390,PF07508,Coil
MKQPYNTTIYNTALYMRLSRDDELQGESGSIQTQRMMLRQYAAEHSLNVIDEYIDDGWSGTNFDRPDFQRMIDDIEDGKINCVVTKDLSRLGRNYILTGQYTEIYFPSKGVRYIAVNDNVDTINGENELAPFLNILNEMHARQTSKKVKAAMRTRFANGAHYGAYAPLGYVKDPDKKGHLLIDPETRWIIEKIFDLAVHGRGAASITRILVEEKVPTPGWLNFQRYGTFANIYAGAPEEKAYAWTIAQVKSILKEETYIGHSVHNKQTNISFKNKKKVRKPKEEWYRVENTHEAIISEDVFRQVQEQICNRRRRQKNGTTQIFSGLVKCADCGWSLAYGMNSQNKNPYAHYHCSKYGQGLHQCSMHYIRYDVLYAYVLSRLQYWSVLAQQDGDKLLKRLLNASDKERNTARKRQTAELKKAEKRKAEVDTLFAKMYEDWSAGRITEYNFNMLSEKYQGEQRELDAKIERLHEAMEVAAQTAVDAEKWIGLMKQYVNPTELTAELLNTLIEKILVHEAVKSEDGSREQEVEIFYRFIGKIE

SEQ ID NO: 2713 - protein, 540 aa, Unknown
  Description of Unknown: Integrase B2714 sequence
  PTHR30461:SF3,SM00857,G3DSA:1.10.10.2600,IPR036162,PF13408, IPR025827,PS51737,G3DSA:3.40.50.1390,IPR006119,IPR038109, PF07508,IPR011109,SSF53041,PF00239,PTHR30461, PS51736,Coil,cd00338
MKKFPIDLSCLTEEEISQFQEDPYTLYNGDQDVALYLRYSSTGQSDQSIEGQLRDCRTFCKANHYRIVAIYVDRATTARKDVEKRVHLMEMVADSAKQNWEYVIVWKLDRFARNRNDSAIMKMRLRKNGVKVLSATEHLTDSPESIILESVLEGMAEFFSAELSQKVTRGMRESALKCHSVGGHIPLGYKVENHKLVVDPDTAHIVQEAFSLYANGESVADICRKFNSAGYKTAKNTEFNRSSFKAMFRNTRYIGTYTYKDIVIENGIPAIIDKELFETVQRRLSKTATAPARGKAKVDYLLSGKLFCGHCGASMNGESGAGRHGKVYHYYSCYTKKRKLGCDKRPLKKDYIEGIVARDALNLLTDQLIDEIADMAIRQSEQDLINDTHIPQLTAQLSEVEKSITNITTAIEKGIASETLMNRLVQLEHEKKTLNKEIKAEEKFVYRIDRDQIVFWLSQFKYGNIEDEDFRRRLIDLLVNSVTVWDEPDGYKITTAYNLTSCKTKTFRVEKNPAAEEATGFDFRESECTMTSVLIAFEKL

SEQ ID NO: 2714 - protein, 540 aa, Unknown
  Description of Unknown: Integrase B2715 sequence
  PTHR30461:SF3,IPR036162,PS51737,IPR011109,PTHR30461, PF00239,G3DSA:1.10.10.2600,IPR006119,SSF53041,cd00338, SM00857,IPR025827,IPR038109,PS51736,mobidb-lite, PF13408,G3DSA:3.40.50.1390,PF07508,Coil
MRKKANIAPEARAVIYARYSSANQRDCSIEQQVAKCRELAARLGLAVIEVYEDRAISGKTDRRPSFQRMMKDADRGIFDIVLAWKSNRMGRNMLQAMTNEERLRDNGIRTIYAEEDFDDTAAGRFALRNMMNVNQFYVENMAEDISRGLMDNASKCLSNGSLPLGYKPGEDHKVVLDEAEAAVVQEIFTRVACYEPFIDIARDLNRRGIKTKKGAEWGRSSFHTICRNERYRGIYIYRDVRVEGGIPRIISDELFYKVQEVLKVKKNPQGRRKRSGYEEYLLTGKLYCGHCGSPMTGIAGTSKTGAMHYYYTCQKRRTEHSCDKKAVRRDQIEKAVAVAIQQQLLDDETILWMVDQTMAYNAKTEIEYRLQGLQDQLNANKTATANLLKAIEMGIITDTTKARLLELEQEQGCLLAKIDAAKSEMVPIEREDLIAILTRYRKGSLDDKKYLAALFDTFLVRVDLYDDHLKITFDPTGGKTPVDIPIGVEDSPESPGDSPDSADFSAPSQDAEKVRFDSSQLHQNPRTFVRGFFVLVICLG

SEQ ID NO: 2715 - protein, 540 aa, Unknown
  Description of Unknown: Integrase B2716 sequence
  cd00338,SM00857,G3DSA:1.10.10.2600,IPR036162,PF13408, IPR025827,PS51737,G3DSA:3.40.50.1390,IPR006119,IPR038109, PF07508,IPR011109,SSF53041,PTHR30461,PS51736, Coil,PF00239
MNEEKPRVIIIPAKPELAQEAAVKRQLRVAAYCRVSTEEEEQASSYEAQCQYYTDKIMSNKEWTIAGIFADEGISGTSTKKRTEFLRMIRQCRQKKIDLILTKSIQRFARNTLDCINYTRILRQLGIGVLFEKENINSLPPDSEFMITMYGAMAQSESESISGNVKWGKKRAMEAGKVSIAYKNLYAYEKGADGKPAPIPAQAEIVRELYTRYLAGASLRELKDWLEHGKQPTVAGGTAWSITAVKGILTNEKYCGDVLLQKTFSTDVISKKVVKNTGQLPKYLIQNHHEGIVTREQFQAVQAELARRSALRSDSKQAATGRSCYTSKYALSDRLVCGECGKLYRRKTRNIKGNIYHEWRCISRLDYGKRYCHDSPTLREIPLQNAILAAINEAMSEKPVLLDHIKSAMSLELLPVQGQTMSLADIDRRLTQLDAQFQALLAEAIDAEDKESCNAKFAEILAEQTKLKTQKEAILQSSTDAERTCARLVQAEQALENAVPTVTEWSEGTARQLVERVTVLSANEVLVQLKGGKEIHKRLE

SEQ ID NO: 2716 - protein, 540 aa, Unknown
  Description of Unknown: Integrase B2717 sequence
  PTHR30461:SF3,SM00857,G3DSA:1.10.10.2600,IPR036162,PF13408, IPR025827,PS51737,G3DSA:3.40.50.1390,IPR006119,IPR038109, PF07508,IPR011109,SSF53041,PF00239,PTHR30461, PS51736,Coil,cd00338
MKKFPIDLSCLTEEEISQFQEDPYTLYNGDQDVALYLRYSSTGQSDQSIEGQLRDCRAFCKANHYRIVAIYVDRATTAHKDVEKRVHLMEMVADSAKQNWEYVIVWKLDRFARNRNDSAIMKMRLRKNGVKVLSATEHLTDSPESIILESVLEGMAEFFSAELSQKVTRGMRESALKCHSVGGHIPLGYKVENHKLVVNPDTAHIVQEAFSLYANGESVADICRKFNSAGYKTAKNTEFNRSSFKAMFRNTRYIGTYTYKDIVIENGIPAIIDKELFETVQRRLSKTATAPARGKAKVDYLLSGKLFCGHCGASMNGESGAGRHGKVYHYYSCYTKKRKLGCDKRPLKKDYIEGIVARDALNLLTDQLIDEIADMAIRQSEQDLINDTHIPQLTAQLSEVEKSIMNITAAIEKGIASETLMNRLVQLEHEKKTLNKEIKAEEKFVYRIDRDQIVFWLSQFKYGNIEDEDFRRRLIDLLVNSVTVWDEPDGYKITTAYNLTSCKTKTFRVEKNPAAEEATGFDFGESECTMTSVLIAFEKL

SEQ ID NO: 2717 - protein, 540 aa, Unknown
  Description of Unknown: Integrase B2718 sequence
  PTHR30461:SF3,SM00857,G3DSA:1.10.10.2600,IPR036162,PF13408, IPR025827,PS51737,G3DSA:3.40.50.1390,IPR006119,IPR038109, PF07508,IPR011109,SSF53041,PF00239,PTHR30461, PS51736,Coil,cd00338
MARKKNTAAGLDAVIYARYSSHNQREVSIEQQIAECTKHAAALGLRIVGTYEDRAISGKTDNRPRFQQMMRDAEKGKFQAVVAWKSNRIGRNMLQAMVNEAKLDDYGVKVFYAEEDFDDTAAGRFALRNMMNVNQFYSENMAEDITRGLYDNANKCMANGRQPLGYKRGVDGKVMLDEPAAAVVREIFTRVAAGDLFVDIARDLNEKGIKTSKGAVWNKGSFQSICQNERYKGIYIYGNVRIVDGIPRIVSDELWYKVQEAMRVKKNPVGTRHRVGAEDYLLTGKLRCGHCGSYMTGVSGTSRNGELHYYYTCQKRRTEHACNKKNVRRDVIEPAIAQAIKMYCLTDDVIEWMADQTVQYWEKHDNDLQIEALEQQLAENKKATSNMLKAIEMGIITEATRSRMVELETENSKLTAQLSAAKRDVVKINREDLIDELHILRGKDIHDREVQAELFKDFLVAAYIYDDNRLKLVFSFMGKDNSIEIPLETGEDPPDGEDSPDAKMFVLTPDCSTNEEQNEHEVTIQMVGNVFVLFCEIPSV

SEQ ID NO: 2718 - protein, 540 aa, Unknown
  Description of Unknown: Integrase B2719 sequence
  PTHR30461:SF3,SM00857,G3DSA:1.10.10.2600,IPR036162,PF13408, IPR025827,G3DSA:3.40.50.1390,PS51737,IPR006119,IPR038109, PF07508,SSF53041,IPR011109,PTHR30461,Coil, PS51736,cd00338,PF00239
MENSASVKPKIRLIPAKQRQELVGRATPNGELAKLRIAPYARVSTDHEEQESSYEAQVKHFKQLIESHTDWELVDIYADPGLSGKNIKRPNFQRLMNDCECGKVDMIITKSVSRFARNTLDCVKTVRKLKEMGIKVYFEKENLDTMQESSEFVLTIMASLAEEESRSISNNIRWSVKKRFENGEVILNTAHFLGYTKDENGTLKIVPEQAITVRRIYGEFLDGYSLKEIADGLMRDGILSPSGKSRWHPTTIKSILQNEKYMGDSHLQKTYLPDFLSPRRIKNEGQADSYYVEDSHAAIISKEMFDLVQQEFKGRNELRSSNRTGHGKYSGKYAFSGMIVCGECGETYRRHQQYNAYKKYYIWVCKRHENKGKDYCSAKPISESALERAFIRALNGLIENREKILDKLQKAVVGQISDSCEDDIAQIDKEIQGLQNGIVDLLMDKNKGRLTDKQYERETQLLKFQIDELNLKKEEILNEQGKIQLAEYRAEVVTDLLKTEKILDEFDKTIFKSLVHKIKVIGDKEIEIEFECGIKVTEKL

SEQ ID NO: 2719 - protein, 540 aa, Unknown
  Description of Unknown: Integrase B2720 sequence
  PTHR30461:SF3,cd00338,SM00857,G3DSA:1.10.10.2600,IPR036162, PF13408,IPR025827,G3DSA:3.40.50.1390,PS51737,IPR006119, IPR038109,PF07508,IPR011109,SSF53041,PTHR30461, PS51736,Coil,PF00239
MAKRLHGALICARYSTDIQNPDSIEVQVAKCTEWCHTHNIPVLGVYADEATSGMKDTRPRYAAMMRDLRDGVGDMVVIYDQSRMFRKMTSWFSFRDQLTQMGVDVVSVTQPMIGKDLRDPTNFLTEGSMALFNQIWALQSRQKVMEKMRFMAKNGQHTGGKPALGYEVVDGRLAICEAEAKIVRRIFEEYGSGKSYREIVAGLNADGIKTKRGSAFGANSLHDLLKNEKYIGTLVYGQRPYREDGTRNTHAAAADSIRIENAIPAIIDKELFAKVQDKMAANKRQQGGRPPTKRDYPLKGKVFCAECKSAMTISTSQKIYDYYKCSGKKRRHDCDGVNISVDVLERTVANAVRQVLGSPKNVERLITILRDQSGEIQAQAVDALRQLIAREREISRKLDNATDAILGGLSSPTLLARVKDLEQEKTEIDRQMRELKATVDASAIPETRLREIIDEISGDNPAGNAALLAIVCRVEVAKDAITIWTMLDTHPDGTFDWREEGVLITPGTTSGVPNRTNTNPTEVFFICGVFGICVPRFSRW

SEQ ID NO: 2720 - protein, 540 aa, Unknown
  Description of Unknown: Integrase B2721 sequence
  PTHR30461:SF3,cd00338,SM00857,G3DSA:1.10.10.2600,IPR036162, PF13408,IPR025827,PS51737,G3DSA:3.40.50.1390,IPR006119, IPR038109,PF07508,IPR011109,SSF53041,PTHR30461, PS51736,Coil,PF00239
MENFASTKPKIRVIPAKTRQELVSTSVGKRQEKLRVAAYARVSTEHEEQESSYEAQVKHFTKLIAERQDWEMVKIYADPGLSGKNIKRPEFLKLMKAREDGLVDKIITKSVSRFARNTIDCVESVRKLRNMGIGVYFEKENLDTLHENSEFVLTIMASLAEEESRSMSNNIRWSVRKKFEQGKVILNTARFLGYKREKNSNILEIVPEEAITVRRIYREFLAGASLKDIADALERDSIPSPSGQSKWHVSTIRSILTNEKYQGDCHLQKTYLPDFLSPRRVENVGQADSWYVEDSHAAIITREQFTLVQEEFKRRKSLRASTETGNGKFSGKYAFSGMIVCGECGETYRRHQQYNQYKVYPTWACKVHENTGAKHCTAKPIKEKALEDAVVRAINKLLDNKEQFLTELKATVLEVMLDDSNDPIVRIDTEIAELQNDITVALEHMQKAEITVEEYKTLVDGYKRKIDVLNLDKEEIIFENGEMQLLEYRIAEVEDLLGNGRILEEFDKNVFKGLVQRIIVLSQKEIQIDFKCGITVKETL

SEQ ID NO: 2721 - protein, 540 aa, Unknown
  Description of Unknown: Integrase B2722 sequence
  PTHR30461:SF3,SM00857,G3DSA:1.10.10.2600,IPR036162,PF13408, IPR025827,G3DSA:3.40.50.1390,PS51737,IPR006119,IPR038109, PF07508,IPR011109,SSF53041,PTHR30461,Coil, PS51736,cd00338,PF00239
MLIKRLGGGDSLSSVDKIAVVYARYSSHGQTEQSIEGQIAAAQKYAEQHGYTIIHVYADRAMTGRNDDREQFQKMLSDTAMHQFGVILLWKIDRFGRNREEIAFNRYRCKKNGVRVERVAEDVPDGPEGVILDSVLEGMAEYYSLQLAQNVRRGQRESAKKSMSIGGNKMLGYIVNPETKRYESDPKTALYVTEIFKRYANGETISEIVTWLNAQGIRTTRGSEFTVNSLHRLLKNEKYTGVYIFHDIRNEGGMPALTDRATFDKVQEMLKVNRRAPVRVWSKTEYLLTDKLFCGHCGAMMVGESGHGRNGTKHSYYTCLNRKKKKSCDKKPVRQDVIEPLVLRAIGKLLENPATLENIADQVWAAYERSDTSGDTIKALDKQIADVDRALSNVMKAIEMGIINEMTKTRMDELTNQKQALSQSRAEAGLTGGFKLTRDMILFFLQEMAALDMADRDSQKRLIKTFVNAIYLYDDHFDIAFNYTDNGKVVVRMQEINDAVRGEVFGCCAQSPTIVRASEPLITIVVGCSVFVFTVKMPEA

SEQ ID NO: 2722 - protein, 540 aa, Unknown
  Description of Unknown: Integrase B2723 sequence
  PTHR30461:SF3,IPR036162,PS51737,IPR011109,PTHR30461, PF00239,G3DSA:1.10.10.2600,IPR006119,SSF53041,cd00338, SM00857,IPR025827,IPR038109,mobidb-lite,PS51736, PF13408,G3DSA:3.40.50.1390,PF07508,Coil
MRKKSNLNAATRAVIYARYSSANQRDCSIEQQVAKCRELAARLGLTVIDVYEDRAISGKTDRRPNFQRMMKDADLRQFDVVLAWKSNRMGRNMLQAMTNEERLRDNGIRTVYAEEDFDDTAAGRFALRNMMNVNQFYSENMAEDITRGLMDNAAKCLSNGSLPLGYKPGDDRHVVLDEAEAAIVQEIFTRVSCYEPFIDIARDLNRRGIKTKKGSEWGRSSFHTICRNERYRGIYIYRDVRIEGGMPRIVSDELFYKVQEVLKVKKNPQGRRKRSGYEEYLLTGKLFCGHCGSPMTGIAGTSKTGAMHYYYTCQKRRTDHSCDKKAVRRDQIERAVGVAIQQQLLTDENIQMMADKLMEYNARTETKYRLQGLQDQLNANKTATANILKAIEMGIITDATKARLLELEKEQGQLLVKIDEAKAEMVPISRNDFVKLLYIYKEGEPTDKKYLAALFDNFLVRVDLYDDHLKITFDPTGGRQPIDMPIGAEESPESPGDSSESSDFEASSQDAEKFVLALHNCTKILERLFGDFFVLVICLG

SEQ ID NO: 2723 - protein, 540 aa, Unknown
  Description of Unknown: Integrase B2724 sequence
  PTHR30461:SF3,IPR036162,PS51737,IPR011109,PTHR30461, PF00239,G3DSA:1.10.10.2600,IPR006119,PF14287,SSF53041, IPR025378,SM00857,IPR025827,cd03770,IPR038109, PS51736,PF13408,G3DSA:3.40.50.1390,PF07508,Coil
MKQPYNTTVYNTALYLRLSRDDELQGESGSIQTQRMMLRQYAAEHGLTVVDEYIDDGWSGTNFDRPSFQRMIDDIEDGKINCVVTKDLSRLGRNYILTGQYTEIYFPSKGVRYIAINDNVDTLNGESELAPFLNILNEMHARQTSKKVKAAMRTRFANGAHYGAYAPLGYIKDPDKTGHLLVDTETRWIIEKIFDLAVHGRGAASITRILVEAKVPTPGWLNFQRYGTFANIYAGAPEEKAYAWTIAQVKSILKEETYIGHSVHNKQSNISFKNKKKVRKPKEEWYRVENTHEAIISEDVFRQVQEQIASRRRRQKDGTTQIFSGLVKCADCGWSLAYGENKQNKTPYGYYHCSKNGQGLRQCSMHYIRYDVLYAYVLSRLQYWSQQAQQDEDKLLKRLLNASDKERSSAREKQASELKKAEKRKAEVDGLFAKMYEDWAAGRITEYNFNMLSEKYQGEQKELDEKIQQLHEAMEAVAQTAVDAEKWVGLMRQYVNPTELTAELLNTLIEKIFVHEAVKGEDGSREQEVEIFYRFIGKID

SEQ ID NO: 2724 - protein, 540 aa, Unknown
  Description of Unknown: Integrase B2725 sequence
  PTHR30461:SF3,IPR036162,PS51737,IPR011109,PTHR30461, PF00239,G3DSA:1.10.10.2600,IPR006119,PF14287,SSF53041, IPR025378,SM00857,IPR025827,cd03770,IPR038109, PS51736,PF13408,G3DSA:3.40.50.1390,PF07508,Coil
MKQPYNTTIYNTALYLRLSRDDELQGESGSIQTQRMMLRQYAAEHGLTVVDEYIDDGWSGTNFERPSFQRMIDDIEDGKINCVVTKDLSRLGRNYILTGQYTEIYFPSKGVRYIAINDNVDTINGESELAPFLNILNEMHARQTSKKVKAAMHTRFANGAHYGAYAPLGYVKDPDKKGHLLIDPETRWIVEKIFDLAVHGRGAASITRILVEEKVPTPGWLNYERYGTFANIYAGAPAEKAYAWTIAQVKSILKEETYIGHSVHNKQSNISFKNKKKVRKPQEEWYRVENTHEAIISEEVFQKVQELIASRRRRQKNGTTQIFSGLVKCADCGWSLAYGVNSQNKNPYAHYHCSKYGQGLRQCSMHYIRYDVLYAYVLARLQYWSMMVQKDEDKLLKRLLNASDRERNSAKKKQAAELKKAEKRKAEVDGLFAKMYEDWSAGRITEYNFNMLSEKYQNEQKELETKIRQLHETMEAAVQTAADAEKWIALMKQYVNPVELTAELLNTLIEKITVHEAVKGEDGSREQEVEIYYRFIGKID

SEQ ID NO: 2725 - protein, 540 aa, Unknown
  Description of Unknown: Integrase B2726 sequence
  PTHR30461:SF3,IPR036162,PS51737,IPR011109,PTHR30461, PF00239,G3DSA:1.10.10.2600,IPR006119,SSF53041,cd00338, SM00857,IPR025827,IPR038109,mobidb-lite,PS51736, PF13408,G3DSA:3.40.50.1390,PF07508,Coil
MRKKSNLNAATRAVIYARYSSANQRDCSIEQQVAKCRELAARLGLTVIDVYEDRAISGKTDRRPNFQRMMKDADLRQFDVVLAWKSNRMGRNMLQAMTNEERLRDNGIRTVYAEEDFDDTAAGRFALRNMMNVNQFYSENMAEDITRGLMDNAAKCLSNGSLPLGYKPGDDRHVVLDETEASIVQEIFTRVSCYEPFIDIARDLNRRGIKTKKGSEWGRSSFHTICRNERYRGIYIYRDVRIEGGMPRIVSDELFYKVQEVLKVKKNPQGRRKRSGYEEYLLTGKLFCGHCGSPMTGIAGTSKTGAMHYYYTCQKRRTDHSCDKKAVRRDQIERAVGVAIQQQLLTDENIQMMADKLMEYNARTETKYRLQGLQDQLNANKTATANILKAIEMGIITDATKARLLELEKEQGQLLVKIDEAKAEMVPISRNDFVKLLYIYKEGEPTDKKYLAALFDNFLVRVDLYDDHLKITFDPTGGRQPIDMPIGAEESPESPGDSSESSDFEASSQDAEKFVLALHNCTKILERLFGDFFVLVICLG

SEQ ID NO: 2726 - protein, 540 aa, Unknown
  Description of Unknown: Integrase B2727 sequence
  PTHR30461:SF3,cd00338,SM00857,G3DSA:1.10.10.2600,IPR036162, PF13408,IPR025827,G3DSA:3.40.50.1390,PS51737,IPR006119, IPR038109,PF07508,IPR011109,SSF53041,PTHR30461, PS51736,Coil,PF00239
MKKAVAYARFSSDMQREESIDAQVRAIKYFANQYGYDLAHVYADRAQSGRSDARVEFKQMISDSASGAFDAVIVHKLDRFSRSSSDAIFYERILNHNGVQLVSVIERLDSSPEGQLMKMVILGMNQMYSQNLAREVMKGLKENAYQCRHTGGTPPLGYDVIDGKYVINEFEAQAVRMIFQMYAAGSGYGEIIRAMYENGFKTKRGNRFGKNSLYDLLRNEKYTGVYIFNKSASADIRGKYNRHALKPADEIIRVEDGIPQIVDKNLFWQVQKKMNDNKHKNARHKAKVSYLLSGKLYCGHCGHAMTGEMHRYRDREYGYYVCPSQKNKKGCNKKSVRKEWIEQAVVDDINNILFKPERLQSIAENIYNASHSGKPDERLVELKKQVTEIDRKIGNLTRVLADGLDSDSVRAAVVELENERRTLSAKIYELDLVPDAQRMSVAEIKNSISKMADFSKMDDSGKKRFIELFVQRIYLYDSDDGFRIRTVLSVTNPVDSLDISDFPDFSNKTGSVPSPPVVSENNIQYFPLGIVCLDSKRPFH

SEQ ID NO: 2727 - protein, 540 aa, Unknown
  Description of Unknown: Integrase B2728 sequence
  cd03768,SM00857,G3DSA:1.10.10.2600,IPR036162,PF13408, PS51737,G3DSA:3.40.50.1390,IPR025827,IPR006119,IPR038109, PF07508,IPR011109,SSF53041,PTHR30461,PS51736, PF00239
MEEVKCAIYTRKSTDEGLEKEFNTLEAQREAGENYIKSQKHQGWVLVEEHYDDGGFSGGNMKRPALQRLLDDIKCGKINMIVVYKIDRLTRSLVDFSKMVDIFDKYHCSFVSVTQNFNTSDSMGRLTLNMLLSFAQFEREIGSERVRDKTAASRKKGMWTGGVVPYGYRSINKKLEIEPQEADVVKFMFEMYLKYKSVMSVCKLLTENGYRDFRRDALLRMLKNPTYMGKIKYKDELYDGQHKAIISPKIFESVQYILKNKEKSERTCLFNKNEVGILRGLLTCGCCHSPMTPASCQSHGVRRFYYTSTKAKYYGYHHCSNGAVPVQLMDECILKIVTPLISDITVLNGLINKISTDKSAEIYKAMRHPEKIIEKMVERDKLQLMKLLIKGIVVNYDTIEITWSKVALSLLTSNLLAQTQDHTTIIDYPFKRNKGALILSLPEDIAQNVNYSTELIMALCKAFKYQKIISTGKQSILELAAQENIDSGYLGRLIRLTCLAPDIIKRILAGTQPAELYLQRLIREDIPPIWAEQRKLYGVI

SEQ ID NO: 2728 - protein, 540 aa, Unknown
  Description of Unknown: Integrase B2729 sequence
  SM00857,G3DSA:1.10.10.2600,IPR036162,PF13408,IPR025827, G3DSA:3.40.50.1390,PS51737,IPR006119,IPR038109,PF07508, IPR011109,SSF53041,PF00239,PTHR30461,PS51736, Coil,cd00338
MKKFPIDLSCLTEEEISQFQEDPYTLYNGDQDVALYLRYSSTGQSDQSIEGQLRDCRTFCKANHYRIVAIYVDRATTARKDVEKRVHLMEMVADSAKRNWEYVIVWKLDRFARNRNDSAIMKMRLRKNGVKVLSATEHLTDSPESIILESVLEGMAEFFSAELSQKVTRGMRESALKCHSVGGHIPLGYKVENHKLVVDPDTAHIVQEAFSLYANGESVADICRKFNSAGYKTAKNTEFNRSSFKAMFRNTRYIGTYTYKDIVIENGIPAIIDKELFETVQRRLSKTATAPARGKAKVDYLLSGKLFCGHCGASMNGESGAGRHGKVYHYYSCYTKKRKLGCDKRPLKKDYIEGIVARDALNLLTDQLIDEIADMAIRQSEQDLINDTHIPQLTTQLSEVEKSITNITAAIEKGIVSETLMNRLVQLEHEKKTLNKEIKAEEKFVYRIDRDQIVFWLSQFKYGNVEDEDFRRRLIDLLVNSVTVWDELDGYKITTAYNLTSCKAKTFRVEKNPAAEEATGFDFGESKCTMTSVLIAFEKL

SEQ ID NO: 2729 - protein, 540 aa, Unknown
  Description of Unknown: Integrase B2730 sequence
  cd00338,SM00857,G3DSA:1.10.10.2600,IPR036162,PS51737, G3DSA:3.40.50.1390,IPR006119,IPR038109,PF07508,SSF53041, IPR011109,PTHR30461,PS51736,Coil,PF00239
MRNYPPLSSAEEYCMYLRKSRVDIEAEAHGEGETLARHEKLLLEVARRDKLNVTQIYREVVSGETIASRPVMQHLLQEVEQGRWAGVLVVEVERLARGDTIDQGIMAQTFKYSGTKIVTPLKVYDPNNEYDEEYFEFGLFMSRREYKTINRRLQRGRLAAAKEGKWVSGVAPYGYEKIRVPNDKGWTLRPVEAEADIVRFIFRLYTSGEEGESGEVKKLGTYSLAVRLDRMGVTPPGGAPCWSSTTIQSILENPVYIGKIRWNVHKTKKRVIGSSVRVEHYTAPEEEQVFVEGLHPAIVDEAVFLAAQELISRKGPPPVQAANTVTNPLAGVLVCGKCGRSIVLRPNAYGGLLMCPNRACNNVGSKYDIVEERLLQALSQWLDDYRLEWSDRPPSEEQALMELKAKSIRKAQSEVETLQRQLERTHDLLEQGVYDTEMFLSRSRSITGRINAAQDSIASLTSELAEEEARSASRQNIVPKVEKLLEVYSALPSAQAKNDMLKGVLEKVEYTKLHRSGRNGPFDNFELLLYPKLPPSGLGE

SEQ ID NO: 2730 - protein, 540 aa, Unknown
  Description of Unknown: Integrase B2731 sequence
  PTHR30461:SF3,SM00857,G3DSA:1.10.10.2600,IPR036162,PF13408, PS51737,IPR025827,G3DSA:3.40.50.1390,IPR006119,IPR038109, PF07508,IPR011109,SSF53041,PF00239, PTHR30461,PS51736,Coil,cd00338
MKKFPIDLSCLTEEEISQFQEDPYTLYNGDQDVALYLRYSSTGQSDQSIEGQLRDCRAFCKANHYRIVAIYVDRATTAHKDVEKRVHLMEMVADSAKQNWEYVIVWKLDRFARNRNDSAIMKMRLRKNGVKVLSATEHLTDSPESIILESVLEGMAEFFSAELSQKVTRGMRESALKCHSVGGHIPLGYKVENHKLVVDPDTAHIVQEAFSLYANGESVADICRKFNSAGYKTAKNTEFNRSSFKAMFRNTRYIGTYTYKDIVIENGIPAIIDKELFETVQRRLSKTAAAPARGKAKVDYLLSGKLFCGHCGASMNGESGAGRHGKVYHYYSCYTKKRKLGCDKRPLKKDYIEGIVARDALNLLTDQLIDEIADMAIRQSEQDLINDTHIPQLTAQLSEVEKSIMNITAAIEKGIASETLMNRLVQLEHEKKTLNKEIKAEEKFVYRIDRDQIVFWLSQFKYGNIEDENFRRRLIDLLVNSVTVWDEPDGYKITTAYNLTSCKTKTFRVDKNPAAEEATGFDFGESECTMTSVLIAFEKL

SEQ ID NO: 2731 - protein, 540 aa, Unknown
  Description of Unknown: Integrase B2732 sequence
  SM00857,G3DSA:1.10.10.2600,IPR036162,PF13408,PS51737, G3DSA:3.40.50.1390,IPR025827,IPR006119,IPR038109,PF07508, IPR011109,SSF53041,PTHR30461,Coil,PS51736, cd00338,PF00239
MVKNRAAIYARFSSHNQRSESIEIQVENSRAFCEREGLQVVHEYFDYAQTGRNIDRAEFQRMMNDARHGLFDYVVIYKVTRIMRNRDEMSLARIMLRKAGVEILYAGEDISSGSSGVLQLGMLEVLAEYESALDSERIRDGIQKNAQRCMANGRTLYGWDIVEGRYVINEREASVLRRMKNMLFAGSSVADIVRAVSAERSKRGAKFNQDTVTKLLKRVQNAGVYKYAGHEVPDGMPAIWSQVEQDMIDNILGDRHKPRRKINSTLEFPLSGKLYCAKCGAPMAGTSGTSCTGATYHYYKCRKCRRTVRRDLVEDVVCDMTLQAVAREDVRRRIASGMVAFQAEQPKEQSRSYAIKKELKRIDRTFERIWQAIEDGIAPPGGRERTEELKQRKSELEAELRIAEREEAFNIGVDELMLWLDDAAENLTPEVILGTFVRFAEIDGKTLNVYFAFDHYGDDFRPKQKKAEPCPEGHSSTNSLLVEARRIELRSILNCPQGATGLVSDRASERIGSQTNVAAPSRFGLSRGHTDYVPRGIPLK

SEQ ID NO: 2732 - protein, 540 aa, Unknown
  Description of Unknown: Integrase B2733 sequence
  PTHR30461:SF3,SM00857,G3DSA:1.10.10.2600,IPR036162,PF13408, IPR025827,G3DSA:3.40.50.1390,PS51737,IPR006119,IPR038109, PF07508,IPR011109,SSF53041,PTHR30461,Coil, PS51736,cd00338,PF00239
MNIYYVREKLRNCSIYDIELNVAYYARVSTEKVEQQASIKHQEEHFEELIHSNNRWKFAGSYIDDGISGMHADKREEFQRMLRDAKLGKIDMIITKEISRFARNTLDSIQYTRELLSYGVCVWFQNDGINTIDDDSEFRLTIMAGVAQDEIRKLSSRVKFGHAQSIKNGVVLGHRMYGYSNNQGKLELIPEEADMVRMIFEDYASGISTPRIEKKLWDMGYRSLKGGKINRDVIKNIIRNPKYKGYYCGGKVKVVDMFTKKQEFLPQSEWIMFKDDGSRVPQIIDETTWEKANAYLRERGEAIKSRRTSFKNENIFTGKLFCANDGAPYWMKQHYIRGKEDVRWVCSYKIKNGAASCDSFGLAESELKEVIADLINESSENIDNILKEYFEILQSTIKNIPDNKSEISRLEKQIETLKQKREKILEYNLDGKISDDEFISRNKEYVKQIKQTESHIRELQNIKSPEPVEIQLSAIKEQLEKFKGVTPKDINRQIVNELFEKITVEPLAATCATLTFQLRSGSLEKWGFPLRCSDDMILTI

SEQ ID NO: 2733 - protein, 540 aa, Unknown
  Description of Unknown: Integrase B2734 sequence
  PTHR30461:SF3,SM00857,G3DSA:1.10.10.2600,IPR036162,PF13408, PS51737,IPR025827,G3DSA:3.40.50.1390,IPR006119,IPR038109, PF07508,IPR011109,SSF53041,PF00239,PTHR30461, PS51736,Coil,cd00338
MRVVLYMRYSSDRQTEQSIEGQNRVCTAFCEQQGYEIVDRYIDRATSAFKDTDKRTEFQRMIRDSEKQLWEGIVVYKLDRFARNRYDSATYKARLKKNGVRVISATENISDNPEGVILEAVLEGMAEFYSKELSQKITRGMFESANKCHSIGGHIPLGYKIENKKLVIDEAGAAIVREAFDLYANGATVAEICETFNTKGYRTAKNAEFNKNSFRSMFKNERYIGIYKYKDLRIEGGVPAIVDKDTFAIVQKKLSKNAEAPSRGKAKIDYLLSQKLFCGHCGSLMTGESGTGKGGTTYFYYTCGKRKREHTCDKKPLKKDFIERAVVEDALTLLTPETIDELADIAVNESIREMEENSIIPALKDQLHDTERSINNLVKMVEKGVESDTIADRLKELEKEKRAIEKRLVVAQDDYVLLEKDHIVWWLSEFCNGDIEDEEFRRHIIDLLVNSVTVWDEPDGWYKITSVYNLTSNKTKTFRCSDLSGQAPPSSCTKKDAAAKSLEVSTVSPHRYTMCHGGTAGTGKSKTQAHAFEFASCFFT

SEQ ID NO: 2734 - protein, 540 aa, Unknown
  Description of Unknown: Integrase B2735 sequence
  PTHR30461:SF3,SM00857,G3DSA:1.10.10.2600,IPR036162,PF13408, IPR025827,G3DSA:3.40.50.1390,PS51737,IPR006119,IPR038109, PF07508,IPR011109,SSF53041,PF00239,PTHR30461, PS51736,Coil,cd00338
MARKKNIAAGLDAVIYARYSSHNQREVSIEQQIAECTKHAAALGLRIVGTYEDRAISGKTDNRPRFQQMMRDAEKGKFQAVVAWKSNRIGRNMLQAMVNEAKLDDYGVKVFYAEEDFDDTAAGRFALRNMMNVNQFYSENMAEDITRGLYDNANKCMANGRKPLGYKRGADGKVMLDEPAAAVVREIFNRVAAGDLFVDIARDLNAKGIKTSKGATWNKGSFQSICQNERYKGIYIYGNVRIVDGIPRIVSDELWYKVQEAMRMKKNPVGTRHRVGAEDYLLTGKLRCGHCGSYMTGVSGTSRNGELHYYYTCQKRRTEHACNKKNVRRDVIEPAIAQAIKMYCLTDDVIEWVANRTVEYWEKHDNDLHIEALEQQLEENKKATSNMLKAIEMGIITDATRSRMIELETEQSKLAVQLNAAKADVVKIDRDDLIDELQIFRDMDVNNRSVQAELFKDFLVAAYIYDDNRLKLVFSFMGKDNSVEIPLETGEDPPDGGDSPDAKMFVLTPDCSTNEEQNEHEVTIQMVGNVFVLFCEIPSV

SEQ ID NO: 2735 - protein, 540 aa, Unknown
  Description of Unknown: Integrase B2736 sequence
  PTHR30461:SF3,SM00857,G3DSA:1.10.10.2600,IPR036162,PF13408, IPR025827,G3DSA:3.40.50.1390,PS51737,IPR006119,IPR038109, PF07508,SSF53041,IPR011109,PTHR30461,Coil, PS51736,cd00338,PF00239
MLFSLNKGGDSLSSVDKIAVVYARYSSHGQTEQSIEGQIAAAQKYAEQHGYTIIHIYADRAMTGRNDDREQFQKMLSDTAMHQFGVILLWKIDRFGRNREEIAFNRYRCKKNGVRVERVAEDVPDGPEGVILDSVLEGMAEYYSLQLAQNVRRGQRESAKKSMSIGGNKMLGYIVNPETKRYESDPKTAPYVTEIFKRYANGETISEIVAWLNAQGVRTTRGSEFTVNSLHRLLKNEKYTGVYIFHDIRNEGGMPALTDRATFDKVQEMLKVNRRAPARVWSKTEYLLTDKLFCGHCGAMMVGESGHGRNGIKHSYYTCLNRKKKKSCDKKPVRQDVIEPLVLRAIGKLLENPATLENIADQVWAAYERSDTSGDAIKALDKQIADVDRALSNVMKAIEMGIINEMTKTRMDELTNQKQALSQSRAEAGLTGGFKLTRDMILFFLQEMAALDVADCDSQKRLIKTFVNAIYLYDDHFDIAFNYTDNGNVVVRMQEINDAASGELFGCCAQSPTNVQASEPLITIVVSCSVFVFSVKMPEA

SEQ ID NO: 2736 - protein, 540 aa, Unknown
  Description of Unknown: Integrase B2737 sequence
  PTHR30461:SF3,SM00857,G3DSA:1.10.10.2600,IPR036162,PF13408, PS51737,IPR025827,G3DSA:3.40.50.1390,IPR006119,IPR038109, PF07508,IPR011109,SSF53041,PF00239,PTHR30461, PS51736,Coil,cd00338
MDNVVIYARYSSDKQTEQSIEGQLRYCYQYAEQHDYRVVGEYIDRAISGTSDRRPQFQQMISDAEKKQFKYVLVWKLDRFARNRYDSAIYKTKLKKSGVKVLSVTEGIGDGDESIILEAVLEAMAETYSRQLSQNVKRGMHESALKGLSTGGTVPYGYKLRDGRLVIDEPAAKNVKFIFEQYAAGVGKKAIADALNAKGCKTATGRDFSVVSLAHIFKNKKYIGIYHYNDEIEIEGGCPAIVDKALFDRCTLRAEQNRRAPAKGKGEVDYLLTGKLFCGLCGSPMVGDSGKGKTGAVYYYYTCANRKKNGGVKACPKKREDKGFIEWYVVEQTLKYVLDPERIALIAERVVAAYNKDFSADAVADLERQLAAAGREMDKLADSLINAASPRLVESINKKAEQLDAQIAELENELSKLRICAAARLTVEQVTAWLKSFCNGDPLDLEFRRRIIDVLVNAVYLYDDKVFIFFNVKNGKQISYIDFCADFADDPPEGESSTFNACGSPKAAFRGCFFLCVFIAEVLFTAAILCKFRQITVYIY

SEQ ID NO: 2737 - protein, 540 aa, Unknown
  Description of Unknown: Integrase B2738 sequence
  PTHR30461:SF3,cd00338,SM00857,G3DSA:1.10.10.2600,IPR036162, PF13408,PS51737,G3DSA:3.40.50.1390,IPR025827,IPR006119, IPR038109,PF07508,IPR011109,SSF53041,PTHR30461, PS51736,Coil,PF00239
MSVDIKWNVPQKGKEGDLAAVYARYSSHSQGEQSIEGQLAEAQKYAAAHGYTIVHEYVDRAKSGRTDNREEFQRMLKDTAKKQFNVIILWKVDRFGRNREEIAINKMKCRKNGVRVEYVAETIPNTPEGVILESVLEGFAEYYSLQLSQNIRRGIAESAEKCQVTGGNRPLGYKTGPDKKFEIDEDTAPTVRLIFKMYADGATVTEIVAKLNELGLRTLRGGKFTHNSLHTILKNEKYIGIYNNHGKHIEGGVPRLIDDELFYKVQEMLKVNKRAPAKTWARADYLLADKAFCGKCGAPMFGESGTSKTGARHNYYICSHKKRFKTCDKKAVRQADVEDLVIKATCDLLADTELLDFIIENTWQYYLAQDNSQEELRNLTRQLEQTDLAIKNLIRAIEAGILTDETKSRMDELTTQKAELKAAIADRELARGFHLQREHIAFYLYDLRNADRTDREVQKRLIQTFVNSVFVFDDCVKLTFNFSGNKSVVTLKMLQAAEAGEVFGRYASCSTKSDRVLDTIPVKNPIVLSCLCFSLCLLAF

SEQ ID NO: 2738 - protein, 540 aa, Unknown
  Description of Unknown: Integrase B2739 sequence
  PTHR30461:SF3,SM00857,G3DSA:1.10.10.2600,IPR036162,PF13408, PS51737,G3DSA:3.40.50.1390,IPR025827,IPR006119,IPR038109, PF07508,IPR011109,SSF53041,PF00239,PTHR30461, PS51736,Coil,cd00338
MARKKNIAAGLDAVIYARYSSHNQREVSIEQQIAECTKHAAALGLRIVGTYEDRAISGKTDNRPRFQQMMRDAEKGKFQAVVAWKSNRIGRNMLQAMVNEAKLDDYGVKVFYAEEDFDDTAAGRFALRNMMNVNQFYSENMAEDITRGLYDNANKCMANGRQPLGYKRGADGKVMLDEPAAAVVREIFTRVAAGDLFVDIARDLNAKGIKTSKGAAWNKGSFQSICQNERYKGIYIYGNVRIVDGIPRIVSDELWYKVQEAMRMKKNPVGTRHRVGAEDYLLTGKLRCGHCGSYMTGVSGTSRNGELHYYYTCQKRRTEHACSKKNVRRDVIEPAIAQAIKMYCLTDDVIEWMADQTVQYWEKHDNDLQIEALEQQLAENKKATSNMLKAIEMGIITEATRSRMVELETENSKLTAQLSAAKRDVVKINREDLIDELHILRSKDIHDREVQAELFKDFLVAAYIYDDNRLKLVFSFMGKDNSVEIPLETGEDPPDGGDSPDAKMFVLTPDCSTNEEQNEHEVTIQMVGNVFVLFCEIPSV

SEQ ID NO: 2739 - protein, 540 aa, Unknown
  Description of Unknown: Integrase B2740 sequence
  PTHR30461:SF3,IPR036162,PS51737,IPR011109,PTHR30461, PF00239,G3DSA:1.10.10.2600,PF14287,IPR006119,SSF53041, IPR025378,SM00857,IPR025827,cd03770,IPR038109, PS51736,PF13408,G3DSA:3.40.50.1390,PF07508,Coil
MKQPYNTTTYLTALYLRLSRDDELQGESGSIQTQRMMLRQYAAEHGLTVMDEYIDDGWSGTNFDRPGFQRMIDDIEDGKINCVVTKDLSRLGRNYILTGQYTEIYFPSKGVRYIAINDNVDTLNGESELAPFLNILNEMHARQTSKKVKAAMHTRFANGAHYGAYAPLGYIKDPDKTGHLIVDEENRWIIEKIFDMAAHGIGAGKITRLLIEEKVPTAGWINFQRDGTFAHIYAGAPEEKAYAWTIAQVKSILKEESYIGHSIHNKQSTISFKNKKKIRKPKDEWFRVENTHEAIISEELFRQVQEQIASRRRPTKDGKTQLFAGLVKCADCGWSLAYGVNKQNSVPYAFYHCSKNGQGLHQCSMHYIRYDVLYAYVLSRLQYWSQLAQKSEEKLLKHVLNASDKQRNSAKKKQTSELSKAEKRKAEVNGLFAKMYEDWSSGRITEYNFNMLSEKYQKEQEKLDKRIQELRTEIDAAARTEADAEKWVALVKQYVNITELDAGLLNSLIEKILVHEAVKKEDGTREQLVEIHYRFIGKID

SEQ ID NO: 2740 - protein, 540 aa, Unknown
  Description of Unknown: Integrase B2741 sequence
  cd00338,SM00857,G3DSA:1.10.10.2600,IPR036162,PF13408, IPR025827,G3DSA:3.40.50.1390,PS51737,IPR006119,IPR038109, PF07508,SSF53041,IPR011109,PTHR30461,PS51736, Coil,PF00239
MVKNRAAIYARFSSHNQRSESIEIQVENSRAYCEREGLQVVREYCDYAQTGRNIDRAEFQRMMSDARHGLFDYVVIYKVTRIMRNRDEMSLARIMLRKAGVEILYAGEDISSGSSGVLQLGMLEVLAEYESALDSERIRDGIQKNAERCMANGRTLYGWDIVEGRYVINEREASVLRRMKNMLFAGSSVADIVRAVSAERSKRGAKFNQDTVTKLLKRVQNAGVYKYAGHEVPDGMPAIWSQVEQDMIDNILGDRHKPRRKINSTLEFPLSGKLYCAKCGAPMAGTSGTSCTGATYHYYKCRKCRRTVRRDLVEDVVCDMTLQAVAREDVRQRIASGMVAFQAEQPKEQSRSYAIKKELKRIDRTFERIWQAIEDGIAPPGGRERTEELKQRKSELEAELRIAEREEAFNIGVDELMLWLDDAAENLTPEVILGTFVRFVEIDGKTLNVYFAFDHYGDDFRPKQKKAEPCTEGHSSTNSPMVEARRIELRSILYYPSGSTSLSHYRNSEPVGQRANVRVPSRFDLYRSHTVHVLRCSPLK

SEQ ID NO: 2741 - protein, 539 aa, Unknown
  Description of Unknown: Integrase B2742 sequence
  PTHR30461:SF3,cd00338,SM00857,G3DSA:1.10.10.2600,IPR036162, PF13408,IPR025827,PS51737,G3DSA:3.40.50.1390,IPR006119, IPR038109,PF07508,IPR011109,SSF53041,PTHR30461, PS51736,Coil,PF00239
MSIPQRIVQERPVIYRPTNTASGIHKENVTYYARVSTQNDEQEDSYERQKAHFEEKIHSNPNWNYVEGYADWGISGTKAESRKEFMRMIDDCRAGKINRVLVKSISRFGRNTVDTLTYIRELRELGISVFFETQNIDTMTAGGDVLITILAAMAEQESRTMSTNIKWAFQKRFKDGRVLINFKQSLGYDKVVNVDENGHKEEEYVIVESEAEIVRMIYREYLSGKTIRQIADQLNELGIRTKRGYEWKPSGIEGILTNYKYTGNAILGMTYKPDVLSKSRLKNEGQSPSYHVENSHPAIITKEMFDMVQAEIQRRKNIRSTVNTGKGKYSSKYVLSGLLVCGDCGAKFRRFGRSLKSGEFIPTWVCVTHQKNPNDCKMKPIKEQDILDAFKRAVQRLVGDFSEIVQVVKETAEEELKSQQTSNLTAIEDELVEQRKAVLELFKKKRAGEISPTEYDRKYAEYSARIIELESAADTAKSEELQKQLTQSRLERVYELLDNIGTDYTDEGVMRTLIDCIKVEGKHDIEFQFKCGVDIHETI

SEQ ID NO: 2742 - protein, 539 aa, Unknown
  Description of Unknown: Integrase B2743 sequence
  PTHR30461:SF3,SM00857,G3DSA:1.10.10.2600,IPR036162,PF13408, PS51737,G3DSA:3.40.50.1390,IPR025827,IPR006119,IPR038109, PF07508,IPR011109,SSF53041,PF00239,PTHR30461, PS51736,Coil,cd00338
MQKRRTKYANSQGDNAVIYARYSSHNQKDTSIEQQIEVCTKYARDNGYRITNIYADRAISGKTDARPQFRLMMQDAREHKFDVVISWKSSRLGRDMLDAMTNDIILRNLGIKCFYTEENFDDTAAGRFALRNMMNVNQFYIENMAEDILRGMRDNAKKCRVNNGSPPLGYRRGADGKYEIVPDEAETVREIFTKVLAGMAFVDIANELNARGIKTKKGAPWGRSSFSRLLSNERYIGTYKWSDIVIENGMPAIIDREVFEMAQKKIKGERPLRRRHNENGDYLLTGKLFCGKCDSPMTGMSGTSKSGAKHHYYACYSARKDGSCDKKAVKRDWVEKTVALFIKEHVLRDEVIEWMVDQYMVYQKATFESQRIMEMRNQLKDVQSQLDNLVDAIARGIYTDSTKDKLLKLEADKKEIEQDIRLATYNLKEYDREHVRCYFLSFKEGSVESKDYLKRLFDQFVTKIYLYDDEIRIAFSGTKDDSPVSFKIIDEAEELAVSSVRLSSASSHQCKIIRTLDQSVRGSDFLFLSRILKLSFGIE

SEQ ID NO: 2743 - protein, 539 aa, Unknown
  Description of Unknown: Integrase B2744 sequence
  PTHR30461:SF3,cd00338,SM00857,G3DSA:1.10.10.2600,IPR036162, PF13408,IPR025827,G3DSA:3.40.50.1390,PS51737,IPR006119, IPR038109,PF07508,SSF53041,IPR011109,PTHR30461,PS5173 6,Coil,PF00239
MKKKQTGARHGRAAIYARYSSHNQREASIEQQVKACRELAVRLGLDVVETYEDKAISGKSDRRPSFQRLLRDAEKGYFDCVLAWKSNRMGRNMLQAMTNEARLKDWGVRTFYAEEDFDDTAAGRFALRNMMNVNQFYSENMAEDITRGMMDNASKCLSNGALPLGYKAGENGRIVLDKAQAAVVQEIYTRVACREPFVDIAADLNRRGIKTKRGGPWTKSSFYTICRNERYRGIYIYDDVRVEGGVPRIVSDGLFYRVQEVLKVKKTPQSARHHTGAEDYLLTGKLFCGKCGRPMTGVSGTSRSGEMHYYYTCQKRRREHACDKKNVIREQIEKSVAQAIKQYMLTDEMIQHMADATMAYNARQEKDLHLQDLQGQLAAVKTSAANLLKAIEMGVITETTKARMVELEQEQGRLNAQIENARAELVPITRDNFVSLLHIYRDGDINDSKYLASLFETFLVRVDLYDDHFLIWFNPLGQKPPADIPITSIENGDVDEFFDECRRKNVFDWGGKWSTKQEKSEPVSDWRRVRIFRFLRVRQ

SEQ ID NO: 2744 - protein, 539 aa, Unknown
  Description of Unknown: Integrase B2745 sequence
  PTHR30461:SF3,SM00857,G3DSA:1.10.10.2600,IPR036162,PF13408, IPR025827,G3DSA:3.40.50.1390,PS51737,IPR006119,IPR038109, PF07508,SSF53041,IPR011109,PTHR30461,cd00338, PF00239
MPTSKNTARKYAAGGSSDNSCGVEPLRAVIYARYSSSGQREESIEGQLRDCYEFAKKHGIIVIGEYIDKAMTGRVDRRPDFQRMMKDSEKGRFNCVLLWKMDRFARNRYDSAMYKYKLKKNGIRIFYAKETIPDGPEGIILESVMEGYAEYYSENLAQNVKRGNYDSALELKTLGKTCLGLKTGPDGRYMIDQAEAAIVRRIFEEYAEGERAKDIYERLNSEGYRTSRGGKFNKNSLRRILSNKKYIGVYEYEDIYVENGIPAIITDRDLFEKVQKMLKINHDAPARGKAQNFLLTTKLFCGLCGSPMIGDGGTSHTGKAYAYYSCTKRKRGRSCKKESVPKDWIEDLVVGELVKIVHNDELIEQIADRVMEYQKREKDQSGLHALEIRQKENEKAISNMLAAIEAGIITPSTKTRLMELEADRADIEKGIAHELLAEPEFERDQIIYFLERFRSGDINDEAYRIMLVDTFLNSVYLYDDDHLVLVMNYSGENCKVDLKLVEGAVSGDGCKGSAFAPSSALEALTGMVSAFCVSAYYIR

SEQ ID NO: 2745 - protein, 539 aa, Unknown
  Description of Unknown: Integrase B2746 sequence
  PTHR30461:SF3,cd00338,SM00857,G3DSA:1.10.10.2600,IPR036162, PS51737,G3DSA:3.40.50.1390,IPR006119,IPR038109,PF07508, SSF53041,IPR011109,PTHR30461,mobidb-lite,Coil, PF00239
MKKAVILTRVSTKEQEEGHSLAAQNTRLIEYCKRKNLEVIKSFEIIESSTRGGRKKFREAIDFCLSQNETVALIADAVDRVQRSFKDSVLLDDLVRKEKIELHFYRENMVIGAGASASDIMRWDFSVMGAKSYVLQLSENVKRSLDYKLRNGERAGVAPVGYVNYRNEDGKNSIRPDEIDAPKVQRIFNLFALGGTSAHELTRYADKIGLRSRMGRKLQVTGILSILRNPFYYGEMLAKGKLHVHVYQPLISKETFDACQRVLERSRSKPFKHGEKPFTYRGLIHCANTDKICPIDIKKQQFPYVVCWAADGQRRVYIPLKDIDEQICYILNSIEIPAGIIEQIRVHLAASKKQEVAFRNAETGRLKQELTRIENRIDALFNMRLDGEIDKETYNDKNDRLQLERHRVEEKINAHKKADNSFNDTVLNLMEIARSSATIFKLSDNVEKKRLLLSFLFDRLELNEGRIGYKLRYPFNEFQNTAELCEPAENQGVAGENGRVLPFPENEAIEPKKDNKNKGLPEKTSLCSGWLGNLDSNQD

SEQ ID NO: 2746 - protein, 539 aa, Unknown
  Description of Unknown: Integrase B2747 sequence
  SM00857,G3DSA:1.10.10.2600,IPR036162,PS51737,G3DSA:3.40.50.1390, IPR006119,IPR038109,PF07508,IPR011109,SSF53041, PF00239,PTHR30461,PS51736,Coil,cd00338
MPTLSLGKHIIDIGSDSMTTFDMNNVTSKALDMDVYAIYLRKSRADLEAEKLGEGETLARHRKMLEELAARKGFYIGEIYTELESGESIAGRPKIQKLLEDCYKGKYKGILIVEVTRLSRGNQGDAQTIMDCLKYSNMNNGVLVVTPTKTYDVAHSQEDEEYMEFELFMSRREYKMIHKRMDRGRRQAVVEGNYMGAYRPYGYNIVKTKTKRTLVPNEIEAPYIKKIFEWSVKDGLSTHDIAKRLTAMGAPTYRGDTEWTKDSVKTYLTNPVYMGKVRWNNRMRIKTMVNGELKITRPRYHSDQYMLYDGKHMKDALVDEETFREAQKKFYKDRTRSGLRLKNPLAGLVYCKKCGKSMHLQPYDKTRSDRIVHKSNTSGCRVKSAIASDVVAAVTHALRTYVDDFEVKIENSPDIDENDIQKQIDALVKEMRKIEKKKSKLFDSWENDDITNNEFVERKAIHNQRLETLEKQIEDLEYTIPEKEEYEEKLILVSEALMTIQDDRLDAATKNESLKQIISRIEFSRENDVEFILDIDLHQ

SEQ ID NO: 2747 - protein, 539 aa, Unknown
  Description of Unknown: Integrase B2748 sequence
  PTHR30461:SF3,SM00857,G3DSA:1.10.10.2600,IPR036162,PF13408, IPR025827,G3DSA:3.40.50.1390,PS51737,IPR006119,IPR038109, PF07508,SSF53041,IPR011109,PTHR30461, PS51736,cd00338,PF00239
MARAAKQDSNSEIINGVIYARYSEGPNQTEASIEGQVRECKEYAKRNGIRIINVYSDSKHTGTNDNRAEFQKMLRDSRRGGFSVVVVWKIDRFGRNRAEMAQNKALLKLQGVKVVSAKEYIPDSPEGIILESVLEGMAEYYSANLSQNIKRGMKENALHCKSNGSGKSLGYIVDKDGYFEIEPNEATIVKTIFQKYDEGMKIADIWREIVASGAKTKRGKDFTQYGISRVLSNRAYIGEYRYGDIVTPGGMPRIIDDDLFNRVQERRALSKKTPASRRSNSDVDFLLTGKVFCGHCKGTMRGMSGTSKTGRKFYYYACHDKIFKHNKCTKKNVKKEWLETEVTRITRDDILNKETIEFIADRVVEIQRQEQEDKSMLRYYEQQLRDTQSAINNIMKAIEAGIITSSTKSRLFELEEQKSIIEGEIEREKIITPVIEKEQVIFSLERFFGGDINNKEYQRNIIDMFVNKVILYDNKIIITYNISSQNEISVDVVEQAAFAALDECSSKLSLAPPAGACPCTQFRFTLCKAVFLLPLINFI

SEQ ID NO: 2748 - protein, 539 aa, Unknown
  Description of Unknown: Integrase B2749 sequence
  PTHR30461:SF3,cd00338,SM00857,G3DSA:1.10.10.2600,IPR036162, PF13408,IPR025827,G3DSA:3.40.50.1390,PS51737,IPR006119, IPR038109,PF07508,IPR011109,SSF53041,PTHR30461, PS51736,Coil,PF00239
MSIPQRIVQERPVIYRPTNTASGIHKENVTYYARVSTQNDEQEDSYERQKAHFEEKIHSNPNWNYVEGYADWGISGTKAESRKEFMRMIEDCRAGKINRVLVKSISRFGRNTVDTLTYIRELRELGISVFFETQNIDTMTAGGDVLITILAAMAEQESRTMSTNIKWAFKKRFKDGRVLINFKQSLGYDKVVNVDENGHKEEEYVIVESEAEIVRMIYREYLSGKTIRQIADQLNELGIRTKRGYEWKPNSIEGVLTNYKYTGNAILGMTYKPDVLSKSRLKNEGQSPSFHVENSHPAIITKEMYDMVQAEIQRRKNIRSTVNTGKGKYSSKYVLSGLLVCGDCGAKFRRFGRSLKSGEFIPTWVCVTHQKNPNECKMKPIKEQDILDAFKRAVQRLVGDFSEIVQVVRETAEEELKSQQASNLTAIEDELVEQRKAVLELFKKKRAGEISPTEYDRKYAEYSARIIELESAADTAKSEELQKQLTQSRLERVYELLDNIGTDYTDEGVMRALIDCIKVEGKHDIEFQFKCGVDIHETI

SEQ ID NO: 2749 - protein, 539 aa, Unknown
  Description of Unknown: Integrase B2750 sequence
  SM00857,G3DSA:1.10.10.2600,IPR036162,PS51737,G3DSA:3.40.50.1390, IPR006119,IPR038109,PF07508,IPR011109,SSF53041, PF00239,PTHR30461,PS51736,Coil,cd00338
MPTLSLGKYIIDIGSDSMTTFDMNNVASKALDMDVYAIYLRKSRADLEAEKLGEGETLARHRKMLEELAARKGFYIGEIYTELESGESIAGRPKIQKLLEDCYKGKYKGILIVEVTRLSRGNQGDAQTIMDCLKYSNMNNGVLVVTPTKTYDVAHSQEDEEYMEFELFMSRREYKMIHKRMDRGRRQAVVEGNYMGAYRPYGYNIVKTKTKRTLVPNEIEAPYIKKIFEWSVKDGLSTHDIAKRLTAMGAPTYRGDTEWTKDSVKTYLTNPVYMGKVRWNNRMRIKTMVNGELKITRPRYHSDQYMLYDGKHMKDALVDEETFREAQKKFYKDRTRSGLQLKNPLAGLVYCKKCGKSMHLQPYDKTRSDRIVHKSNASGCRVKSAIASDVVAAVTHALRTYVDDFEVKIENSPDVDENDIQKQIDALVKEMRKIEKKKSKLFDSWENDDITNNEFVERKTIHNQRLETLEKQIEDLEYTIPEKEEYEEKLILVSEALMTIQDDQLDAATKNESLKQIISRIEFSRENDVEFILDIDLHQ

SEQ ID NO: 2750 - protein, 539 aa, Unknown
  Description of Unknown: Integrase B2751 sequence
  PTHR30461:SF3,IPR036162,PS51737,IPR011109,PTHR30461, PF00239,G3DSA:1.10.10.2600,IPR006119,SSF53041,cd00338, SM00857,IPR025827,IPR038109,PS51736, mobidb-lite,PF13408,G3DSA:3.40.50.1390,PF07508,Coil
MARKNKSAGSDQRLVAYYRYSGGSGQTEQSIEGQRRDCMAWAKAHGLTICHEYIDRHISGKTDNRAQFQRMMQDSDKGAFDSLICWKTDRLARNRYDSAIYKSRLRKNGVKIYYAAESSVDGPEGIILEGLMESLAEYYSAELSQKLRRGIRESALKCKCLGGYRALGLTSDKDHNYVIDESQAPAVRYIFEQYAAGRTAAEIVADLNAKGVRTATGGAFNKNSILRIVTNEQYIGTYISRAHNVRVENAIPAIIDRELWDKAQAMVQRNKAGRGVKSKAANYMLSGKLYCQMCGGTMKGICGTGKHGDKHYYYACSNHTTHSCAKRNVEKSFLEDLIVSATAEHILAPGKLEQIADRVVQVQEAEQHIENPEKEMLEAELLECTKKQDNILRAIEDGTGSARLSSRLRELEEQEAALRYRIESIEEPPAAPIYSRDQLLFMLEQFRRTADEQDETYKQRLVNTFVHDIYLSDDSAFVQFNISAQENEKSTTLESVVLSLNGGGPDGENPDKSRLPAGFDRVSLGGADGSRTRVRKEIG

SEQ ID NO: 2751 - protein, 539 aa, Unknown
  Description of Unknown: Integrase B2752 sequence
  cd03768,PTHR30461:SF3,SM00857,G3DSA:1.10.10.2600,IPR036162, PF13408,PS51737,G3DSA:3.40.50.1390,IPR025827,IPR006119, IPR038109,PF07508,IPR011109,SSF53041,PTHR30461, PS51736,Coil,PF00239
MNIAIYSRKSKFTGKGESIGNQIEMCQDYIKLHYPNEQHIISVFEDEGFSGKNLNRPQFKKMISIEKSNPFDLIIVYRLDRISRNVGDFANLIEELNNFNTAFICIKEQFDTSTPMGRAMMNIAAVFAQLERETIAERIKDNMYMLAKEGHWTGGTTPLGYKSVKNDYISGSKSKSYYTLEIDENQIDMVYTIFKKYKEIGSINGLETYLFENNIKTQKNNYWDKSNVKRVLQNPTYCIADSDSYEYFNKLGANVLFTPDECNGKDGILTYNRYAGAKKRALLDVNKWVITKSSHQGILTGKEWVEIQNLLESNSTNCFGGKPVTRRTVNSNSILSGLLFCSKCGAYMRPKIYHSGNMFYRCENKDKGKCSNANVNGNKLEKAVIEEVFKFNVDNSLINTKFKQIQTNIDKNSDNITIKTAELEKRKNQTQIAIQNLIKSMSMGVSATVIPIINNQIEELTKQINEYDKQISDIQNNVLKQNDIERKFKETEDAIIFLKNNFNTLTVIEKRNYLKKCISKITWNGENENIDIYIDFDNE

SEQ ID NO: 2752 - protein, 539 aa, Unknown
  Description of Unknown: Integrase B2753 sequence
  PTHR30461:SF3,SM00857,G3DSA:1.10.10.2600,IPR036162,PF13408, PS51737,G3DSA:3.40.50.1390,IPR025827,IPR006119,IPR038109, PF07508,SSF53041,IPR011109,PF00239,PTHR30461, PS51736,Coil,cd00338
MKKTKNSVQRAVIYARYSCSNQTEQSIEGQLADCEKFAEKYNYYIVDTYIDRAMSATTDRRPQFQQMIADSATGGFDVIIVWKLDRFARNRYDSAVNKQKLNSNGVKVVSVMEHIEDTPEGALMESVLEGFAEYFSKDLSQKVSRGMRETALKFKATGLIPYGYKKTSDNICVPDEHTAPVVKKIFEMYAGGMINKDICDWLNSHGYRTSNGNLFKNQYLRKILNRRRYTGSYTYGDLELHDENQRIISDELFDRVQIQLQAKKRTGRIAREQYILVGKLFCGYCRNPIRGESGRNHQNRIYTYYKCSVNKTGGKCPKTTVQRDIIENSTIKFILNNFLNDEIINSVVDTIQASETAENNSAELITLRTQIEDTDRKINNLLTAIENGVFTPSTKQRLNDLENVKEKLKYELIVKQSEKNNFNATAFKRFLKNIDVDDFKTTEQRQKLINLVLYREYLWNDKVLYIFNLTPSKPNDSVDIDSYVDALLASTGSTGSTSPTDGVPQVAISELLFGYFFVMGFFPFHKHFALSCFALYIYR

SEQ ID NO: 2753 - protein, 539 aa, Unknown
  Description of Unknown: Integrase B2754 sequence
  SM00857,G3DSA:1.10.10.2600,IPR036162,PS51737,G3DSA:3.40.50.1390, IPR006119,IPR038109,PF07508,IPR011109,SSF53041, PF00239,PTHR30461,PS51736,Coil,cd00338
MPTLFLGKYIIDIGSDSMTTFDMNNVTSKALDMDVYAIYLRKSRADLEAEKLGEGETLARHRKMLEELAARKGFYIGEIYTELESGESIAGRPKIQKLLEDCYKGKYKGILIVEVTRLSRGNQGDAQTIMDCLKYSNMNNGVLVVTPTKTYDVAHSQEDEEYMEFELFMSRREYKMIHKRMDRGRRQAVVEGNYMGAYRPYGYNIVKTKTKRTLVPNEIEAPYIKKIFEWSVKDGLSTHDIAKRLTAMGAPTYRGDTEWTKDSVKTYLTNPVYMGKVRWNNRMRIKTMVNGELKITRPRYHSDQYMLYDGKHMKDALVDEETFREAQKKFYKDRTRSGLRLKNPLAGLVYCKKCGKSMHLQPYDKTRSDRIVHKSNASGCRVKSAIASDVVAAVTHALRTYVDDFEVKIENSPDIDENDIQKQIDALVKEMHKIEKKKSKLFDSWENDDITNNEFVERKAIPNQRLETLEKQIEDLEYTIPEKEEYEEKLILVSEALMTIQDDRLDAATKNESLKQIISRIEFSRENDVEFILDIDLHQ

SEQ ID NO: 2754 - protein, 539 aa, Unknown
  Description of Unknown: Integrase B2755 sequence
  PTHR30461:SF3,SM00857,G3DSA:1.10.10.2600,IPR036162,PF13408, IPR025827,G3DSA:3.40.50.1390,PS51737,IPR006119,IPR038109, PF07508,IPR011109,SSF53041,PF00239, PTHR30461,PS51736,Coil,cd00338
MKKTKNPVQRAVIYARYSCSNQTEQSIEGQLADCEKFAEKYNYYIVDTYIDRAMSATTDRRPQFQQMIADSATGGFDVIIVWKLDRFARNRYDSAVNKQKLNANGVKVISVMEHIEDTPEGALMESVLEGFAEYFSKDLSQKVSRGMRETALKFKATGLIPYGYKKTSDNICVPDEHTAPVVKKIFEMYAGGMINKDICDWLNSHGYRTSNGNLFRNQYLRKILNRRRYTGSYTYGDLELHDENQRIISDELFDRVQIQLQAKKRTGRIAREQYILVGKLFCGYCRNPIRGESGRNHQNRIYTYYKCSVNKTGGKCPKTTVQRDIIENNTIKFILNNFLNDEIINSVVDTIQASETAENNSAELITLRTQIEDTDRKINNLLTAIENGVFTPSTKQRLNDLENVKEKLKYELIVKQSEKNNFNATAFKRFLKNIDVDDFKTTEQRQKLINLVLYREYLWNDKVLYIFNLTPSKPNDSVDIDSYVDALLTSTGSTGSTSPTDGVPQVAISELLFGYFFVMGFFPFHKHFALSCFALYIYR

SEQ ID NO: 2755 - protein, 539 aa, Unknown
  Description of Unknown: Integrase B2756 sequence
  SM00857,G3DSA:1.10.10.2600,IPR036162,PS51737,G3DSA:3.40.50.1390, IPR006119,IPR038109,PF07508,SSF53041,IPR011109, PF00239,PTHR30461,PS51736,Coil,cd00338
MRNYPPLSSAEEYCIYLRKSRVDIEAEAHGEGETLARHEKLLLEVARRDKLNVTQIYREVVSGETIAARPVIQHVLQEVEQGRWAGVLVVEVERLARGDTIDQGIMAQTFKYSGTKIVTPLKVYDPNNEYDEEYFEFGLFMSRREYKTINRRLQRGRLASAKEGKWVSGIAPYGYEKVRVPNDKGWTLRPVEAEADIVRFIFRLYTSGEEGESGEVKKVGTYSLALRLDKMGVTPPGGAPCWSSTTIQSILENPVYIGKIRWNVHKTKKRIINNAIRVEHYTAPAEEQVFVDGLHPAIVDEAVFLAAQDIISQKGPPPVQAANTVSNPLAGLLVCGKCGRSIVLRPSAYGGMLMCPNRACDNVGSKYAIVEERLLQALSQWLDDYRLEWSDRPPSEEQSLIDLKGKSIRKAQAEVETLQKQLERTHDLLEQGVYDTETFLSRSRSITERINAANENIATLSAELVEDEARAASRKNIIPKVEKLLEVYSALPSAQAKNEMLKEVIEKAEYTKLQRSGRNGPFDNFDLLLYPKLPPSIVE

SEQ ID NO: 2756 - protein, 539 aa, Unknown
  Description of Unknown: Integrase B2757 sequence
  PTHR30461:SF3,cd00338,SM00857,G3DSA:1.10.10.2600,IPR036162, PF13408,PS51737,G3DSA:3.40.50.1390,IPR025827,IPR006119, IPR038109,PF07508,IPR011109,SSF53041, PTHR30461,PS51736,Coil,PF00239
MCAKKKPAMLEPDMQDAVIYTRYSSHNQRDCSIEQQVADCEIFARQNNLRVVKVYADRHLSGTTDNRPQFQQMLKDAAHGHWAYVICWKIDRFARNRYDSATYKFRLKKAGVRVLYAKESIPDGPEGILLESVLEGSAEYYSAALAQNIRRGMKYNAEQCKVNSGSIPFGYCKGPDGRFAIHEANAEVVREIFRKAAAGMPFVDIANDLNSRGLKTSRGGRWNKGSFRLLMNEAYIGVYHFSDTRIEGGMPALIDQGTFWAANERLKTNSSVRGRHQDGGDYLLTGKLKCAHCGSYMIGFSGTGKSGELHYYYGCQKRRRERACKKANVPREWIERVVVKAALDYVLRPDVMEWIADAVMEYQEREAASTQLAALTAELEENQKVTDNVMKAIEAGIITSTTKQRLLDLEAKAQDLKRAIELEKLSHVRLERDQVLFWLDRFRGGSLQSQEFRRKVIDAFVSVVYLSDDHLRIAFNYSGGGSNAEADFDLVMDAEAAAGELSKKFAQGHVTSTKCESGEPPTIYFVGAFFVLTMPLPER

SEQ ID NO: 2757 - protein, 539 aa, Unknown
  Description of Unknown: Integrase B2758 sequence
  PTHR30461:SF3,SM00857,G3DSA:1.10.10.2600,IPR036162,PF13408, IPR025827,PS51737,G3DSA:3.40.50.1390,IPR006119,IPR038109, PF07508,IPR011109,SSF53041,PTHR30461,PS51736, cd00338,PF00239
MARAAKQASNSEIIDGVIYARYSEGPNQTEASIEGQVRECKEYAKRNGIRIINVYSDSKHTGTNDNRAEFQKMLRDSRRGGFSVVVVWKIDRFGRNRAEMAQNKALLKLQGVKVVSAKEYIPDSPEGIILESVLEGMAEYYSANLSQNIKRGMKENALHCKSNGSGKSLGYIVDKDGYFEIEPNEATIVKTIYQKYDEGMKIADIWREIVASGAKTKRGKDFTQYGISRVLSNRAYIGEYRYGDIVTPGGMPRIIDDDLFNRVQERRALSKKAPASRRSNSDVDFLLTGKVFCGHCKGTMRGMSGTSKTGRKFYYYACHDKIFKHNKCTKKNVKKEWLETEVTRITRDDILNKETIEFIADRVVEIQRQEQEDKSMLRYYEQQLRDTQSAINNIMKAIEAGIITSSTKSRLFELEEQKSIIEGEIEREKIITPVIEKEQVIFSLERFFGGDINNKEYQRNIIDMFVNKVILYDNKIIITYNISSQNEISVDVVEQAAFAALDECSSKLSLAPPAGACPCTQFRFTLCKAVFLLPLINFI

SEQ ID NO: 2758 - protein, 539 aa, Unknown
  Description of Unknown: Integrase B2759 sequence
  PTHR30461:SF3,IPR036162,PS51737,IPR011109,PTHR30461, PF00239,G3DSA:1.10.10.2600,IPR006119,PF14287,SSF53041, IPR025378,SM00857,IPR025827,cd03770,IPR038109, PF13408,G3DSA:3.40.50.1390,PF07508,Coil
MYQSNNHSTYAALYTRFSRDEPDGESNSIANQKKLLLNYAHSRGIVNTKFFVDDGFTGTNFNRPDFKAMIAECESKKISTIIVKDMSRLGRNYLMVGYYTEIYFPENNIHFIAINDDVDSVKGDNEFTPFRNIMNEWYVKDTSKKVKSVIHNKGMSGERICNNVIYGYKHNPDNPKEWIVDEEAAQNVRTIFQLFLNGKGTSQIAKYLHSEKILVPSVYAREHGKISARATPADPCLWDSKTIREMLKRQEYVGDTVNFKTKKVSYKSKKKIYLDKSEYVIFPDTQEPIIDRDTYERVQKIMESRKKVPIVREPDPLGGYIFCADCGSRMYITRSTVFPKKNCYHCGRYKRSSELCSSHYIRECVINQLILNELQKVFSIVKNDRERFLNVAIQSYANRTSYDVKKLRKDKQLCEQRIQELDILIKKIFEQSVLGTLSKERLATLAAGYESEQSEIKNKLSAISKEIEITDSKQLNADRFIAIVDKYTNIDSLTPEIMSEFIDKVLVHKPIYDGNNKRHQTIEIYFNGIGAFDYDSCNS

SEQ ID NO: 2759 - protein, 539 aa, Unknown
  Description of Unknown: Integrase B2760 sequence
  PTHR30461:SF3,SM00857,G3DSA:1.10.10.2600,IPR036162,PS51737, G3DSA:3.40.50.1390,IPR006119,IPR038109,PF07508,IPR011109, SSF53041,PTHR30461,Coil,cd00338,PF00239
MENVKRVYCLYRVSTVGQVEKDDIPMQKQFCREFVNCHSGWHIENEFYEKGISGYKVSAKDRDAVQEIQRDAVQGKFDVLLVYMFDRLGRRDDETPFVVEWFVRNGIEVWSAVEGQQRFDNHVDKLLNYIRYWQASGESIKTSVRVKTRMEQLTQDGLFTGGSIPYGYRLEKRGRINKRNREVCDLTVDDDAAKIVQLIFYKYVHEGYGAQRLCRYLTELGIRKADGRNFPNTTINRIIKNPIYVGQLHNGDATSERIPELQIIDQDTFDAAQQLMAARATHHADTPLNMKGQSLLVGNIFCGHCGNRLTLATSGRKAIQKDGTVRREIRCRYQCHYNLRHPGECDGQSGYGVTKLDGIVEKIIRHQFAQIKMASQDDVIAQQHEKAVELARARCNMAEMQLSEKRRELEDYQKEIIKVIRGESRLNVDLLNELIDKTQTDVEALPQTAEAARQELESRTADMETEQQEYDKLKTWADLYDNCNFAAKKMIVSQFIKSIHVYRDYTLEVEFNVSFEQFQQLQAACSGGANERTNVCIKA

SEQ ID NO: 2760 - protein, 539 aa, Unknown
  Description of Unknown: Integrase B2761 sequence
  PTHR30461:SF3,cd00338,SM00857,G3DSA:1.10.10.2600,IPR036162, PF13408,IPR025827,G3DSA:3.40.50.1390,PS51737,IPR006119, IPR038109,PF07508,IPR011109,SSF53041, PTHR30461,PS51736,Coil,PF00239
MKKKQTGARHGRAAIYARYSSHNQREASIEQQVKACRELAVRLGLDVVETYEDKAISGKSDRRPSFQRLLRDAEKGYFDCMLAWKSNRMGRNMLQAMTNEARLKDWGVRTFYAEEDFDDTAAGRFALRNMMNVNQFYSENMAEDITRGMMDNASKCLSNGALPLGYKAGENGRIVLDKAQAAVVQEIYTRVACREPFVDIAADLNRRGIKTKRGGPWTKSSFYTICRNERYRGIYIYDDVRVEGGVPRIVSDGLFYRVQEVLKVKKTPQSARHHTGAEDYLLTGKLFCGKCGRPMTGVSGTSRSGEMHYYYTCQKRRREHACDKKNVIREQIEKSVAQAIKQYMLTDEMIQHMADATMAYNARQEKDLHLQDLQGQLAAVKTSAANLLKAIEMGVITETTKARMVELEQEQGRLNAQIENARAELVPITRDNFVSLLHIYRDGDINDSKYLASLFETFLVRVDLYDDHFLIWFNPLGQKPPADIPITSIENGDVDEFFDECRRKNVFDWGGKWSTKQEKSEPVSDWRRVRIFRFLRVRQ

SEQ ID NO: 2761 - protein, 539 aa, Unknown
  Description of Unknown: Integrase B2762 sequence
  PTHR30461:SF3,IPR036162,PS51737,IPR011109,PTHR30461, PF00239,G3DSA:1.10.10.2600,IPR006119,SSF53041,cd00338, SM00857,IPR025827,IPR038109,mobidb-lite,PS51736, PF13408,G3DSA:3.40.50.1390,PF07508,Coil
MAKKKKPAGGNAIIYARYSSHNQRDVSIEQQIEACRKHAAELGLTITDTYEDRAISGRTDNRPAFQRMMRDAEDGKFQYVLAWKSNRMGRNMMQAMVNESRLMDCGVKVFYAEEDFDDSAAGRFALRSMMNVNQFYSDNLAEDVRRGLMDNASKCMANGRQPLGYKRGEGGKVVVDEPAAAIVREIYTRIASGEMFMDIARDLNRRGIKTQSGSEWNKSSFKVLCRNERYRGIYIYGDTRIEGGIPPIVDDVLWYKVQEVLKVKKSKNRHHCPSDEDYLLTGKLRCGKCGGYMIGMSGRSKTGDVHHYYACQNRRVGHTCDKKNIRRDVVEPAVAQAIKQYCLTDDAIEWITDQTIAYWEDEDRKLQIDSIENDLSAVQSSISNVMKAIEMGVITETTRDRLIELERQQTDLKSKLALAKEEIVHVDRKDLISSLLAFRHGNVHDRAYQEKLFNAFLIAVYVYDDDHLKLVFNSFGKDDTVNIALDLGENDDNSGLSDVSKSSPILSNGQPKENEANTVSIKMVGSVFVLFCPLPKIRK

SEQ ID NO: 2762 - protein, 539 aa, Unknown
  Description of Unknown: Integrase B2763 sequence
  PTHR30461:SF3,SM00857,G3DSA:1.10.10.2600,IPR036162,PF13408, IPR025827,G3DSA:3.40.50.1390,PS51737,IPR006119,IPR038109, PF07508,IPR011109,SSF53041,PTHR30461,PS51736, cd00338,PF00239
MARAAKQDNNSEIIDGVIYARYSEGPNQTEASIEGQVRECKEYAKRNGIRIINVYSDSKHTGTNDNRAEFQKMLRDSRRGGFSVVVVWKIDRFGRNRAEMAQNKALLKLQGVKVVSAKEYIPDSPEGIILESVLEGMAEYYSANLSQNIKRGMKENALHCKSNGSGKSLGYIVDKDGYFEIEPNEATIVKTIFQKYDEGMKIADIWREIVASGAKTKRGKDFTQYGISRVLNNRAYIGEYRYGDIVTPGGMPRIIDDDLFNRVQERRALRKKAPASRRSNSDVDFLLTGKVFCGHCKGTMRGMSGTSKTGRKFYYYACHDKIFKHNKCTKKNVKKEWLETEVTRITRDDILNKETIEFIADRVVEIQRQEQEDKSMLHYYEQQLRDTQSAINNIMKAIEAGIITSSTKSRLFELEEQKSIIEGEIEREKIITPVIEKEQVIFSLERFFGGDINNKEYQRNIIDMFVNKVILYDNKIIITYNISSQNEISVDVVEQAAFAALDECSSKLSLPPPAGACPCTQFRFTLCKAVFLLPLINFI

SEQ ID NO: 2763 - protein, 539 aa, Unknown
  Description of Unknown: Integrase B2764 sequence
  cd03768,PTHR30461:SF3,SM00857,G3DSA:1.10.10.2600,IPR036162, PF13408,IPR025827,G3DSA:3.40.50.1390,PS51737,IPR006119, IPR038109,PF07508,SSF53041,IPR011109,PTHR30461, PS51736,Coil,PF00239
MKAAIYSRKSMFTGKGDSVENQVQMCKDYGNRLNIDEYIIYEDEGYSGGNINRPKFQELLQDVKEKKFDVLICYRLDRISRNVADFSSTLELLQDNNISFVSIKEQFDTSTPMGKAMVYIASVFAQLERETIAERVRDNMLELAKSGRWLGGQTPLGFESEKISYFDAEMKERTMYKLSPEPKELELVKLIYNKYLETGSIHLTLKYLLSSNIKGKNGGEFASMSVNDILRNPAYVKSNEMVLDYLENKGMNVCGTANGNGILIYNKRNSKYKKKDISEWIAAVSKHKGIISANTWLEVQKTLDKNSKKDTPRQGTSKKALLSGVLKCSRCGAPMRVAYGRKRKDGTSIYYYTCTMKAHSGKTRCNNPNVRGDYLEKNIITELKNLNSEVVIKELEKCKKQLAATTENSIIKNVSKEIEEKKKEMDSLLSQLSKVESPVASEFIISKVDSLGTEIKDLEISLTKTTDKKKENSNIELNIEIVLQALNEFNDFFNSVESLKNDELTIQRKRYLLERAVDEITIDGETKKIGIDLWGSKKK

SEQ ID NO: 2764 - protein, 539 aa, Unknown
  Description of Unknown: Integrase B2765 sequence
  PTHR30461:SF3,cd00338,SM00857,G3DSA:1.10.10.2600,IPR036162, PF13408,PS51737,G3DSA:3.40.50.1390,IPR025827,IPR006119, IPR038109,PF07508,IPR011109,SSF53041,PTHR30461, PS51736,Coil,PF00239
METIINNQPKVVRVVRKVSSTQITAQTIREQLTDTRLPVAAYARVSTTNEEQEDSLERQRAHYTEYIGNRPEWRFVGVYDDPGVTGTRVDQRKGFQRLLNDCRAGKIKKILCKSISRFARNTVDALKYIRELKELGIGIYFETQNIDTMTAGGDILITILAAIAEQESRNMSENIKWAFQKKFKEGELMLVCSQFLGYDRDKDKNIVINEEQAKIVRRIYREFLSGYSCATIAKNLTEDGIQTVTGKKQWRASGIRNILTNEKYFGGAYLGKTCKKDVLSKERVVSDEVYYVENSHPAIIPKDTWDLVQLELERRKDYRSCTETGNGRYSSKYPFSKKLICGECGMVFRRHAQYKKGEYVRTWVCITHKIKGNEYCSQRYILEDDIERCFQRVINEFVGDMSQIKEILKENVTSTLSEKDDNRGEQILLRMQALQAEMIDINRKKRAGEIAYELYIAKAQEIADEVEKLEREQKEIQSTENDRLAETKRLKDILEVINEMHPTDEFDGEMFRRLIDNVIVKGNQLTFNFKVGIVKTATI

SEQ ID NO: 2765 - protein, 539 aa, Unknown
  Description of Unknown: Integrase B2766 sequence
  PTHR30461:SF3,IPR036162,PS51737,IPR011109,PTHR30461, PS00397,PF00239,G3DSA:1.10.10.2600,IPR006119,SSF53041, cd00338,SM00857,IPR025827,IPR038109,PS51736, IPR006118,PF13408,G3DSA:3.40.50.1390,PF07508,Coil
MAVAVYCRVSSEDQAERGTIEIQKDFAAKYVNLYNLDVFDYYCDDGVTGTLPLEMRPEGKRLLEDAANHKFNTVIFHKLDRLGRKVRVILNAVHDLDEFGVSIKSMTEPFETETPTGKFLLTTLAGIAELDRDTILARMWSGAQLAAKQGRWLGGVVPYGYQIVGKRLVISDEPIPGFRISEEDVIEIIYRMAGKEKASCPEIADYLNSLKIPTKYQVDKLNNNSTTASAMLWHPSRIAHIIRSTTYKGVHQYGKKTTHKGSKLITRSVPAIVSEELWEKANNVLTSNRLFSRRNSQIEYLLRGMIRCGNCGYAYVGRPNKRDNTKFYICVGKSKWNYKYYQKERCIGKSLHADWLDDIVWEKCLEFLKNPEMIYKEKTPLHDDSQPVSNVSYELQQIKIRLKGMSGEREKLLDLYRKEIITEADLKKQIDKLYKEETNLNKKLSTLNDNLPKQELKRSKDSVVALLQDFAKTIQNVDVKELPFELKRSVVKMLIDKVIIYTEKAPDKSYPEVKIDINWRFDAPPFKIDYIENYTVKLL

SEQ ID NO: 2766 - protein, 539 aa, Unknown
  Description of Unknown: Integrase B2767 sequence
  PTHR30461:SF3,cd00338,SM00857,G3DSA:1.10.10.2600,IPR036162, PF13408,IPR025827,G3DSA:3.40.50.1390,PS51737,IPR006119, IPR038109,PF07508,SSF53041,IPR011109,PTHR30461, PS51736,Coil,PF00239
MSIPQRIVQERPVIYRPTNTASSIHKENVTYYARVSTQNDEQEDSYERQKAHFEEKIHSNPNWNYVEGYADWGISGTKAESRKEFMRMIEDCRAGKINRVLVKSISRFGRNTVDTLTYIRELRELGISVFFETQNIDTMTAGGDVLITILAAMAEQESRTMSTNIKWAFQKRFKDGRVLINFKQSLGYDKVVNVDENGYKEEEYVIVESEAETVRMIYREYLSGKTIRQIADQLNELGIKTKRGYEWKPNSIEGVLTNYKYTGNAILGMTYKPDVLSKSRLKNEGQSPSFHVENSHPAIITKEMYDMVQAEIQRRKNIRSTVNTGKGKYSSKYVLSGLLVCGDCGAKFRRFGRSLKSGEFIPTWVCVTHQKNPNDCKMKPIKEQDILDAFKRAVQRLVGDFSEIVKVVRETAEEELKRQQTSNLTAIEDELVEQRKAVLELFKKKRAGEISPTEYDRKYAEYSARIIELESAADTAKSEELQKQLTQSRLERVYELLDNIGTDYTDEGVMRALIDCIKVEGKHDIEFQFKCGVDIHETI

SEQ ID NO: 2767 - protein, 539 aa, Unknown
  Description of Unknown: Integrase B2768 sequence
  PTHR30461:SF3,SM00857,G3DSA:1.10.10.2600,IPR036162,PF13408, IPR025827,G3DSA:3.40.50.1390,PS51737,IPR006119,IPR038109, PF07508,IPR011109,SSF53041,PF00239,PTHR30461, PS51736,Coil,cd00338
MTAVIYARYSSDNQREESIEGQIRECTAYAEKNDITIVKHYIDRAISAKTDNRPQFQQMIKDSDKKLFDIVLVWKLDRFARNRYDSARYKTQLKKNGVKLMSATEIISEGPEGIILESVLEGYAEYYSADLAEKVVRGQTENILKGRCNGGRGTFGYTLDSERKFHIDPLASPFVLESFTKYRDGLTMKEIRDWLNENGIKNPVGGEFTYNSVEHMLKNRRYIGELKFRDVVVPDAIPPIVPLELFDDVQEKIAKNKKAPARRKAEDDYLLTTKLHCGCCGALMFGESGTSRTGEVHRYYKCATAKKKKGCKKKTVRKQWLEDLVVNQTMQLVRDDAAMESIIAKVMELQDRENTNLPLYEKQLRDAESGIQNMLNAIQAGILTSSTKERLEQLEETKRELEARIAEEKLAKPKIKEEFIRFWLMRFRKLDMSLKDQRQALVDTFINSIYLYDDKVLITFNYKEGTQTITFEEAAQAASKENGSDLDCFTAPDIERQIVRFGVLSLCRKAAAHFLHTVCTFARIGGFSAQGLHSLLSFA

SEQ ID NO: 2768 - protein, 539 aa, Unknown
  Description of Unknown: Integrase B2769 sequence
  PTHR30461:SF3,SM00857,G3DSA:1.10.10.2600,IPR036162,PS51737, G3DSA:3.40.50.1390,IPR006119,IPR038109,PF07508,IPR011109, SSF53041,PF00239,PTHR30461,Coil,cd00338
MENVKRVYCLYRVSTVGQVEKDDIPMQKQFCREFVNCHPGWHIENEFYEKGISGYKVSAKDRDAVQEIQRDAVQGKFDVLLVYMFDRLGRRDDETPFVVEWFVRNGIEVWSAVEGQQRFDNHVDKLLNYIRYWQASGESIKTSVRVKTRMEQLTQDGLFTGGSIPYGYRLEKRGRINKRNREVCDLTVDDDAAKIVQLIFYKYVHEGYGAQRLCRYLTELGIRKADGRNFPNTTINRIIKNPIYVGQLHNGDATSERIPELQIIDQDTFDAAQQLMAARATHHADTPLNMKGQSLLVGNIFCGHCGNRLTLTTSGRKAIQKDGTVRREIRCRYQCHYNLRHPGECDGQSGYGVTKLDGIVEKIIRHQFAQIKMASQDDVIAQQHEKAVELARARCNMAEMQLSEKRRELEDYQKEIIKVIRGESRLNVDLLNELIDKAQTDVEALSQTAEAARQELESRTADMETEQQEYDKLKTWADLYDNCSFAAKKVIVSQFIKSVRVYRDYTLEVEFNVSFEQFQQLQAACSGGANERTNVCIEA

SEQ ID NO: 2769 - protein, 539 aa, Unknown
  Description of Unknown: Integrase B2770 sequence
  PTHR30461:SF3,SM00857,G3DSA:1.10.10.2600,IPR036162,PF13408, IPR025827,G3DSA:3.40.50.1390,PS51737,IPR006119,IPR038109, PF07508,SSF53041,IPR011109,PF00239, PTHR30461,PS51736,Coil,cd00338
MKKTKNSVQRAVIYARYSCSNQTEQSIEGQLADCEKFAEKYNYYIVDTYIDRAMSATTDRRPQFQQMIADSATGGFDVIIVWKLDRFARNRYDSAVNKQKLNSNGVKVVSVMEHIEDTPEGALMESVLEGFAEYFSKDLSQKVSRGMRETALKFKATGLIPYGYKKTSDNICVPDEHTAPVVKKIFEMYSGGMINKDICDWLNSHGYRTSNGNLFKNQYLRKILNRRRYTGSYTYGDLELHDENQRIISDELFDRVQIQLQAKKRTGRIAREQYVLVGKLFCGYCRNPIRGESGRNHQNRIYTYYKCSVNKTGGKCPKTTVQRDIIENNTIKFILKNFLNDEIINSIVDTIQASETAENNSAELIALRTQIEDTDRKINNLLSAIENGIFTPSTKQRLNDLENAKEKLKYELIVKQSEKNNFNATAFKRFLKNIDVDDFKTTEQRQKLINLVLYREYLWNDKVLYIFNLTPSKPNDSVDIDSYVDALLASTGSTGSTSPTDGVPQVAISELLFGYFFVMGFFPFHKHFALSFFALYIYR

SEQ ID NO: 2770 - protein, 539 aa, Unknown
  Description of Unknown: Integrase B2771 sequence
  PTHR30461:SF3,cd00338,SM00857,G3DSA:1.10.10.2600,IPR036162, PF13408,PS51737,IPR025827,G3DSA:3.40.50.1390,IPR006119, IPR038109,PF07508,IPR011109,SSF53041,PTHR30461, PS51736,Coil,PF00239
METIINNQPKVVRVVRKVSSTQITAQTIREQLTDTRLPVAAYARVSTTNEEQEDSLERQRAHYTEYIGNRPEWRFVGVYDDPGVTGTRVDQRKGFQRLLNDCRAGKIKKILCKSISRFARNTVDALKYIRELKELGIGIYFETQNIDTMTAGGDILITILAAIAEQESRNMSENIKWAFQKKFKEGELMLVCSQFLGYDRDKDKNIVINEEQAKIVRRIYREFLSGYSCATIAKNLTEDGIQTVTGKKQWRASGIRNILTNEKYFGGAYLGKTCKKDVLSKERVASDEVYYVENSHPAIIPKDTWDLVQLELERRKDYRSCTETGNGRYSSKYPFSKKLICGECGMVFRRHAQYKKGEYVRTWVCITHKIKGNEYCSQHYILEDDIERCFQRVINEFVGDMSQIKEILKENVTSTLSEKDDNRGEQILLRMQALQAEMININRKKRAGEIAYELYIAKAQEIADEVEKLEREQKEIQSTENDRLAETKRLKDILEVINEMHPTDEFDGEMYRRLIDNVIVKGNQLTFNFKVGIVKTATI

SEQ ID NO: 2771 - protein, 539 aa, Unknown
  Description of Unknown: Integrase B2772 sequence
  PTHR30461:SF3,SM00857,G3DSA:1.10.10.2600,IPR036162,PF13408, IPR025827,PS51737,G3DSA:3.40.50.1390,IPR006119,IPR038109, PF07508,IPR011109,SSF53041,PTHR30461,PS51736, cd00338,PF00239
MARAAKQDGNSEIIDGVIYARYSEGPNQTEASIEGQVRECKEYAKRNGIRIINVYSDSKHTGTNDNRAEFQKMLRDSRRGGFSVVVVWKIDRFGRNRAEMAQNKALLKLQGVKVVSAKEYIPDSPEGIILESVLEGMAEYYSANLSQNIKRGMKENALHCKSNGSGKSLGYIVDKDGYFEIEPNEATIVKTIFQKYDEGMKIADIWREIVASGAKTKRGKDFTQYGISRVLSNRAYIGEYRYGDIVTPGGMPRIIDDDLFNRVQERRALSKKAPASRRSNSDVDFLLTGKVFCGHCKGTMRGMSGTSKTGRKFYYYACHDKIFKHNKCTKKNVKKEWLETEVTRITRDDILNKETIEFIADRVVEIQRQEQEDKSMLHYYEQQLRDTQSAINNIMKAIEAGIITSSTKSRLFELEEQKSIIEGEIEREKIITPVIEKEQVIFSLERFFGGDINNKEYQRNIIDMFVNKVILYDDKIIITYNISSQNEISVDVVEQAAFAALDECSSKLSLAPPAGACPCTQFRFTLCKAVFLLPLINFI

SEQ ID NO: 2772 - protein, 539 aa, Unknown
  Description of Unknown: Integrase B2773 sequence
  PTHR30461:SF3,SM00857,G3DSA:1.10.10.2600,IPR036162,PF13408, PS51737,IPR025827,G3DSA:3.40.50.1390,IPR006119,IPR038109, PF07508,IPR011109,SSF53041,PTHR30461,cd00338, PF00239
MPTGKNTARKYAAGGSSDNSCGVEPLRAVIYARYSSSGQREESIEGQLRDCYEFAKKHGIIVIGEYIDKAMTGRVDRRPDFQRMMKDSEKGRFNCVLLWKMDRFARNRYDSAMYKYKLKKNGIRIFYAKETIPDGPEGIILESVMEGYAEYYSENLAQNVKRGNYDSALELKTLGKTCLGLKTGPDGRYMIDQAEATIVRRIFEEYAEGERAKDIYERLNSEGYRTSRGGKFNKNSLRRILSNKKYIGVYEYEDIYVENGIPAIITDRDLFERVQKMLKINHDAPARGKAQNFLLTTKLFCGLCGSPMIGDGGTSHTGKAYAYYSCTKRKRGRSCKKESVPKDWIEDLVVGELVKIVHNDELIEQIADRVMEYQKREKDQSGLHALEIRQKENEKAISNMLAAIEAGIITPSTKTRLMELEADRADIEKGIAHELLAEPEFERDQIIYFLERFRSGDINDEAYRIMLVDTFLNSVYLYDDDHLVLVMNYSGENCKVDLKLVEGAVSGDGCKGSAFAPSSALIEEKEVLALRLLFFCIQV

SEQ ID NO: 2773 - protein, 539 aa, Unknown
  Description of Unknown: Integrase B2774 sequence
  PTHR30461:SF3,IPR036162,PS51737,IPR011109,PTHR30461, PF00239,G3DSA:1.10.10.2600,IPR006119,SSF53041,cd00338, SM00857,IPR025827,IPR038109,PS51736,mobidb-lite, PF13408,G3DSA:3.40.50.1390,PF07508,Coil
MPKKATKHPAKPKRGKKLEVEEPGILYGRYSSHNQKDISVEQQFEKGYELAAEYGIRIVDTYADRAVSGRTDKRRDFQRMMSDAAKGKFRYVIAWKSNRMGRNMLEALINEAKLQEMGVRVLYVEEDFDDTAAGRFAARSMMNVNQFYSENMAEDIKRGLYDNAANCMVANGHLPYGYKADDTLHYVIDEPKAAVIREIFTRVSCGEPFVDIMNSLNARGIKTSYGRDWGRSSFQKILSNERYRGIYIYGDVRKEGGIPRIISDELYFKVQEVITTKKNPQGRHRVNGDYLLTGKLFCGHCKSPMTGISGTSHSGNLHYYYVCQKRRAEKACEKKNLRRDDIELQVAKAIKRRTLDDDTINWIADSVVEYSQHQESASGIGLLEDQLKDTQRSIKNLMAAIEQGIITPTTKARLMELEKEQSDIDLKITMAKADVIPVNRDQLVGWLKKLQAGDVHDKKYQAELFDTFLIAVYVYDNPDGQDYMKVVFSYAGSKNTVEIPLDPSVIDNVENIETGAVRLSSAQVHQERVDESQLVLFVL

SEQ ID NO: 2774 - protein, 539 aa, Unknown
  Description of Unknown: Integrase B2775 sequence
  PTHR30461:SF3,SM00857,G3DSA:1.10.10.2600,IPR036162,PF13408, PS51737,IPR025827,G3DSA:3.40.50.1390,IPR006119,IPR038109, PF07508,IPR011109,SSF53041,PF00239,PTHR30461, PS51736,Coil,cd00338
MKKFPIDLSCLTEEEISQFQEDPYTLYNGDQDVALYLRYSSTGQSDQSIEGQLRDCRTFCKANHYRIVAIYVDRATTARKDVEKRVHLMEMVADSAKRNWEYVIVWKLDRFARNRNDSAIMKMRLRKNGVKVLSATEHLTDSPESIILESVLEGMAEFFSAELSQKVTRGMRESALKCHSVGGHIPLGYKVENHKLVVDPDTAHIVQEAFSLYANGESVADICRKFNSAGYKTAKNTEFNRSSFKAMFRNTRYIGTYTYKDIVIENGIPAIIDKELFETVQRRLSKTATAPARGKAKVDYLLSGKLFCGHCGASMNGESGAGRHGKVYHYYSCYTKKRKLGCDKRPLKKDYIEGIVARDALNLLTDQLIDEIADMAIRQSEQDLINDTHIPQLTAQLSEVEKSITNITTAIEKGIASETLMNRLVQLEHEKKTLNKEIKAEEKFVYRIDRDQIVFWLSQFKYGNIEDEDFRRRLIDLLVNSVTVWDEPDGYKITTAYNLTSCKAKTFRVEKNPAAEEATGFDFGESECPWRDSNPRPFA

SEQ ID NO: 2775 - protein, 539 aa, Unknown
  Description of Unknown: Integrase B2776 sequence
  PTHR30461:SF3,SM00857,G3DSA:1.10.10.2600,IPR036162,PF13408, PS51737,IPR025827,G3DSA:3.40.50.1390,IPR006119,IPR038109, PF07508,IPR011109,SSF53041,PTHR30461,PS51736, cd00338,PF00239
MAKYKQVVQEQIGVIYARYSSSGQRDESIEGQLRDCHAFAERYNIRIIEEYCDRAMTGTSDRRPEFQRMIRDSSKGQFNVVITWKNDRFARSRYDSAVYKAKLKQNGVRLLYAKESIPDGPEGIVLESVMEGFAEYYSANLSQNVRRGNYDSALKRQTLGQTVFGLRKGADKRFEIDPATGPVVQRIFKEYAAGQSAVSIYTALNEEGFRTLRGNPFNKNSIRKILQNEKYVGVYEYADIRDEHGIPAIVSRETFDRVQIMLEKHHRSPAAKKDAGGFLLTAKLFCGECGEPMTGDCGTGKSGTVYSYYICNGRRAKKCKKERVSKEWIEDVVVAALAEVVNNDEMINAFADHFIAWQATQQTGSAVADLEQRIKQIDTAIRNTMSVIDSGLITESLKTHLLELEAEKTALADALAKKRLDTVELDRETVIWFLERFRTADQSDPGWRIYIVETFLQAVYLYDDGRLLLRLNYGGKNNKVSLKAVEETVAEGEQLSSMFEFRVPRRTKLRETEHCTAFLQLYFCDGVFAALLIAKRDKV

SEQ ID NO: 2776 - protein, 539 aa, Unknown
  Description of Unknown: Integrase B2777 sequence
  PTHR30461:SF3,SM00857,G3DSA:1.10.10.2600,IPR036162,PF13408, IPR025827,G3DSA:3.40.50.1390,PS51737,IPR006119,IPR038109, PF07508,IPR011109,SSF53041,PF00239,PTHR30461, PS51736,Coil,cd00338
MAKNKKPAGGNAIIYARYSSHNQRDVSIEQQIEACRKHAAELGLTIIATYEDRAISGRTDNRPAFQRMMHDAENGKFSYVLAWKSNRMGRNMMQAMVNESRLMDCGIKVYYAEEDFDDSAAGRFALRSMMNVNQFYSDNLAEDVRRGLMDNASKCMANGKQPLGYKRGEDGKVAVDEPAAAIVREVYTRVASGELFTGIARDLNRRGIKTADKGEWNKNSFHRLCSNEKYRGIYIYGDVRIEGGIPTIIDDTLWYKVQEALRVKKLKRNGRHRPGDEDYLLTGKLRCGKCGGYMIGMSGRSKTGEIHYYYTCQNRRVGRTCDKKNIRRDVIEPAVAQAIKDYCLTDDAIEWIADKTVEYWEKADRNLQLDSIEGDLAAVQSSISNVMKAIEMGVVTETTRDRLIELEKQRTDLKSKLALAKEEVVHVDRKKLISSLLLFRNGNIHDRQYQEDLFKTFLISVYVYDDDDNGHLKIVFNAFGDNNTVDLPIDFGETDNQSGFSDGVEKFDYALHRSTRLKPSEETQVAFLFISFRTTAARP

SEQ ID NO: 2777 - protein, 539 aa, Unknown
  Description of Unknown: Integrase B2778 sequence
  PTHR30461:SF3,SM00857,G3DSA:1.10.10.2600,IPR036162,PF13408, PS51737,G3DSA:3.40.50.1390,IPR025827,IPR006119,IPR038109, PF07508,IPR011109,SSF53041,PF00239,PTHR30461, PS51736,Coil,cd00338
MQKRRTKYANSQGDNAVIYARYSSHNQKDTSIEQQIEVCTKYARDNGYRITNIYADRAISGKTDARPQFRLMMQDAREHKFDVVISWKSSRLGRDMLDAMTNDIILRNLGIKCFYTEENFDDTAAGRFALRNMMNVNQFYIENMAEDILRGMRDNAKKCRVNNGSPPLGYRRGADGKYEIVPDEAETVREIFTKVLAGMAFVDIANELNARGIKTKKGAPWGRSSFSRLLSNERYIGTYKWSDIVIENGMPAIIDREVFEMAQKKIKGERPLRRRHNENGDYLLTGKLFCGKCDSPMTGMSGTSKSGAKHHYYACYSARKDGSCDKKAVKRDWVEKTVALFIKEHVLRDEVIEWMVDQYMVYQKATFESQRIMEMRNQLKDVQSQLDNLVDAIARGIYTDSTKDKLLKLEADKKEIEQDIRLATYNLKEYDREHVRCYFLSFKEGSVESKDYLKRLFDQFVTKIYLYDDEIRIAFSGTKDDSPVSFKIIDEAEELAVSSVRLSSASSHQCKIIRTLDQSVRGSDFLFLSRTLKFSFGIE

SEQ ID NO: 2778 - protein, 539 aa, Unknown
  Description of Unknown: Integrase B2779 sequence
  PTHR30461:SF3,IPR036162,PS51737,IPR011109,PTHR30461, PS00397,PF00239,G3DSA:1.10.10.2600,IPR006119,SSF53041, cd00338,SM00857,IPR025827,IPR038109,PS51736, IPR006118,PF13408,G3DSA:3.40.50.1390,PF07508,Coil
MFNNNTNTKIAIYCRVSSDEQAERGTIDNQVTFGQHYADLHRLDIYDVYKDDGVTGTIPLQDRPEGHRLLQDAADERFTLVIFYKMDRLGRSTRVILNAVEALSQYGVGVQSMSEPFDTSTPSGRFMLTMFAGVAELDRANILDRMYQGTLRHARLGKWCGGPAPFGYKLQDGYLVVNEAPMPGHTMSEADVIRLLYDKTIEGWSTFRLAEYLNGLNIPNKYTLRGNVAAGSGKWHQSKILYILHNTLYYGERSFGKLSKHANKTIIHQQLPAIVSRETWDAAQVAIDGHNVMPKFVKRRQYLLRSLIKCGICGHTYVGTHYKRKAGDSIYYVCNSKNTRGTGNERCKAQTLRGEWIEGLVWDDCLNYIMQPDVIAVDDDCRYQQSSADIKKEIDAIAAQLRQLDQERQTVIGLCRQGIITATDLDTQLSDIAEKQNTLQQALEGMNSKNIVTKEEAEKRFKEIADILDGFRQLIQSNAELTFADKQTIIRTLVKQITVYTELPAGDTRDIPSVRVQIDYNFTLIPSKTGMLDPYRQGF

SEQ ID NO: 2779 - protein, 539 aa, Unknown
  Description of Unknown: Integrase B2780 sequence
  PTHR30461:SF3,cd00338,SM00857,G3DSA:1.10.10.2600,IPR036162, PF13408,IPR025827,G3DSA:3.40.50.1390,PS51737,IPR006119, IPR038109,PF07508,SSF53041,IPR011109,PTHR30461, PS51736,Coil,PF00239
MAKAKQKAATNDISKLAVIYARYSSHNQTEQSIEGQLAAGHRYADLKGYTVVHEYIDRAMTGRNDNRDDFQKMLSDTSKKQFGAIIVWKVDRFGRNREEITFNKYRCKKNGVRVEYVAENLPDSPEGVILESVLEGMAEYYSLQLSQNVQRGLLESAKKHQVIGGNVPLGLMMDAHKKYVPDPKTAPTVKLIFDMYAEGSTTSEIINHLNSIGMRTKAGKPFTKSSLTTVLKNEKYIGVYKYKDIIRDEGVIPPIVDKEIFYRVQELLKVNRRMPSHKWNYSDYILTDKLFCGKCGTAMVGESGFGKMGVKYSYYICAKRRKDKTCDKKPVRQEWIEEIVLQRVQGILQNEELLEFIAENTWQYYLAQDESMEKLKGLQTELDKVEKSAANLMKAIEAGIFNDMTKARMDELDDQRAVIKKAMAEIEIEKGFKLTKDHILYFLEQFKKLDYKDRDCQRRLIDVFVNSIFVYDDKLRIAFNFGGSDSTITLNEVDKADRGEGFVCCASCPAKTKSPQYTVLRAFYFCKLLITIKPLRTKS

SEQ ID NO: 2780 - protein, 539 aa, Unknown
  Description of Unknown: Integrase B2781 sequence
  PTHR30461:SF3,cd00338,SM00857,G3DSA:1.10.10.2600,IPR036162, PF13408,IPR025827,G3DSA:3.40.50.1390,PS51737,IPR006119, IPR038109,PF07508,IPR011109,SSF53041,PTHR30461, PS51736,Coil,PF00239
MSIPQRIVQERPVIYRPTNTASSIHKENVTYYARVSTQNDEQEDSYERQKAHFEEKIHSNPNWNYVEGYADWGISGTKAESRKEFMRMIEDCRAGKINRVLVKSISRFGRNTVDTLTYIRELRELGISVFFETQNIDTMTAGGDVLITILAAMAEQESRTMSTNIKWAFQKRFKDGRVLINFKQSLGYDKVVNVDENGYKEEEYVIVESEAETVRMIYREYLSGKTIRQIADQLNELGIKTKRGYEWKPNSIEGVLTNYKYTGNAILGMTYKPDVLSKSRLKNEGQSPSFHVENSHPAIITKEMYDMVQAEIQRRKNIRSTVNTGKGKYSSKYVLSGLLVCGDCGAKFRRFGRSLKSGEFIPTWVCVTHQKNPNDCKMKPIKEQDILDAFKRAVQRLVGDFSEIVKVVRETAEEELKSQQTSNLTAIEDELVEQRKAVLELFKKKRAGEISPTEYDRKYAEYSARIIELESAADTAKSEELQKQLTQSRLERVYELLDNIGTDYTDEGVMRALIDCIKVEGKHDIEFQFKCGVDIHETI

SEQ ID NO: 2781 - protein, 539 aa, Unknown
  Description of Unknown: Integrase B2782 sequence
  PTHR30461:SF3,SM00857,G3DSA:1.10.10.2600,IPR036162,PF13408, IPR025827,G3DSA:3.40.50.1390,PS51737,IPR006119,IPR038109, PF07508,IPR011109,SSF53041,PTHR30461,PS51736, cd00338,PF00239
MARAAKQDSNSEIIDGVIYARYSEGPNQTEASIEGQVRECKEYAKRNGIRIINVYSDSKHTGTNDNRAEFQKMLRDSRRGGFSVVVVWKIDRFGRNRAEMAQNKALLKLQGVKVVSAKEYIPDSPEGIILESVLEGMAEYYSANLSQNIKRGMKENALHCKSNGSGKSLGYIVDKDGYFEIEPNEATIVKTIFQKYDEGMKIADIWREIVASGAKTKRGKDFTQYGISRVLSNRAYIGEYRYGDIVTPGGMPRIIDDDLFNRVQERRALSKKAPASRRSNSDVDFLLTGKVFCGHCKGTMRGMSGTSKTGRKFYYYACHDKIFKHNKCTKKNVKKEWLETEVTRITRDDILNKETIEFIADRVVEIQRQEQEDKSMLHYYEQQLRDTQSAINNIMKAIEAGIITSSTKSRLFELEEQKSIIEGEIEKEKIITPVIEKEQVIFSLERFFGGDINNKEYQRNIIDMFVNKVILYDDKIIITYNISSQNEISVDVVEQAAFAALDECSSKLSLAPPAGACPCTQFRFTLCKAVFLLPLINFI

SEQ ID NO: 2782 - protein, 539 aa, Unknown
  Description of Unknown: Integrase B2783 sequence
  PTHR30461:SF3,cd00338,SM00857,G3DSA:1.10.10.2600,IPR036162, PF13408,IPR025827,PS51737,G3DSA:3.40.50.1390,IPR006119, IPR038109,PF07508,IPR011109,SSF53041,PTHR30461, PS51736,Coil,PF00239
MENERTMLPAVAYYRYSPGGGQTEQSIEGQRRDCLAYARSHGYVIVKEYIDRHMTGRNDKRPNFQLMMHDAELHRFDTVIAWKNDRISRNRRDALNYKEQLRRCGVQIRYAEMDIPRGPEGILMESVMDGLAEYYSAELAQKIRRGMTESAHKCYALGSTPPFGLMVQDRKYVPDPATAPYVRWIFEQYASGTLITEICSTLNAKGVRTARGHEFNKNSLRVLLRNEKYIGVYEAKGIRTEDAIPPIIPRDLFYAVQQRIPQNAHSGHKLTGPRSFPLSGIAYCAICGAPLIGICGTGKSGAVHTYYACTAHKHKRTCAKKNIRQASLEKQVYTATLDYVLQPSVIRPIAKQVEALSAADNANQEEMLAVQSQLKDTTRRINNILTAMEEGDFSKAVSARLSVLESEQTRLEGQLAALRRAKPKVTASRVEFMLEKMRQTLTDLTSDQLTALTKIFLSRVDLSDDELILTYTLIGTPSSPHPITLKDTPSATLVPFPLCSQDVLSAPPERAPGEHPEKPIPMRIVASAYGFSVYFKLAG

SEQ ID NO: 2783 - protein, 539 aa, Unknown
  Description of Unknown: Integrase B2784 sequence
  SM00857,G3DSA:1.10.10.2600,IPR036162,PF13408,IPR025827, G3DSA:3.40.50.1390,PS51737,IPR006119,IPR038109,PF07508, IPR011109,SSF53041,PF00239,PTHR30461,PS51736, Coil,cd00338
MKKIKNQVQRAVIYARYSCSNQTEQSIEGQLADCEKFAEKYNYYIVDTYIDRAMSATTDRRPQFQQMIADSATGGFDVIIVWKLDRFARNRYDSAVNKQKLNSNGVKVVSVMEHIEDTPEGALMESVLEGFAEYFSKDLSQKVSRGMRETALKFKATGLIPYGYKKTSDNICVPDEHTAPVVKKIFEMYAGGMINKDICDWLNSHGYRTSNGNLFKNQYLRKILNRRRYTGSYTYGDLELYDENQRIISDELFDRVQIQLQAKKRTGRIAREQYILVGKLFCGYCRNPIRGESGRNHQNRIYTYYKCSVNKTGGKCPKTTVQRDIIENSTIKFILNNFLNDEIINSVVDTIQASETAENNSAELITLRTQIEDTDRKINNLLTAIENGVFTPSTKQRLNDLENVKEKLKYELIVKQSEKNNFNATAFKRFLKNIDVDDFKTTEQRQKLINLVLYREYLWNDKVLYIFNLTPSKPNDSVDIDSYVDALLASTGSTGSTSPTDGVPQVAISELLFGYFFVMGFFPFHKHFALSFFALYIYR

SEQ ID NO: 2784 - protein, 539 aa, Unknown
  Description of Unknown: Integrase B2785 sequence
  cd03768,PTHR30461:SF3,SM00857,G3DSA:1.10.10.2600,IPR036162, PF13408,PS51737,G3DSA:3.40.50.1390,IPR025827,IPR006119, IPR038109,PF07508,IPR011109,SSF53041,PTHR30461, PS51736,Coil,PF00239
MNIAIYSRKSKFTGKGESIGNQIEMCQDYIKLHYPNEQHIISVFEDEGFSGKNLNRPQFQKMISIEKSNPFDLIIVYRLDRISRNVGDFANLIEELNNFNTAFICIKEQFDTSTPMGRAMMNIAAVFAQLERETIAERIKDNMYMLAKEGHWTGGTTPLGYKSVKNDYISGSKSKSYYTLEIDKSQIDMVYTIFKKYKEIGSINGLETYLFENNIKTQKNNYWDKSNVKRVLQNPTYCIADSDSYEYFNKLGANVLFTPDECNGKDGILTYNRYAGAKKRTLLDVSKWVITKSSHQGILTGKEWVDIQELLESNSTNCFGGKPVTRRTVNSNSILSGLLFCSKCGAYMRPKIYHSGNMFYRCENKDKGKCSNANVNGNKLEKAVIEEVFKFNVDNSLINTKFKQLQTNIDKNSDNITIKTAELEKRKNQTQSAIQNLIKSMSMGVSATVIPIINNQIEELTKQINEYDKQISDIQNNVLKQNDIERKFKETEDAIIFLKNNFNTLSVIEKRNYLKKCISKITWNGENENIDIYLDFDNE

SEQ ID NO: 2785 - protein, 539 aa, Unknown
  Description of Unknown: Integrase B2786 sequence
  PTHR30461:SF3,SM00857,G3DSA:1.10.10.2600,IPR036162,PF13408, IPR025827,PS51737,G3DSA:3.40.50.1390,IPR006119,IPR038109, PF07508,IPR011109,SSF53041,PF00239,PTHR30461, PS51736,Coil,cd00338
MNIIYKGVIKIRAAIYVRKSRLSEKGESINNQIELCKKYFSNLHLEDNIEFIIYQDEGFSGGNINRPEFQKLIKDVKKRRFNYLVCYKLDRISRNVADFTSTLKILEENNVNFISITEQFDTTSVMGRAMINISATFAQMERETIAERIRDNMLELSKTGRWLGGTCPLGFKSIPVVYESNGHKKKMYSLEVIDEEIEIVKLIYNMYIEKHSCSPIARYLCTNSIKGKNGGDFSRNTVLQILTNPVYCTADKKAFEYFKSKGSTIEGNANSSNGIMAYNKRKNGRKDNPMDQWIISTGGHLGVIPSDKWIQCQQILDAVRKKSNNKSGTGNKFLLSGLLKCEHCGSSMCSWSRNNPKNNKYERYYRCELKNRASKRCTCKMLNSDKAEAFVIDLLKNFNIKMLDNFKSKSNSINAASIEKEKNLLNKSLNENNKIISGLIKKIALLDDIDILKAIQSEIKNLKSDNEVIEKNINDLSIKSFIVEDETENKKAFIESLNLFKNTIDFIDDVEIKRNMIKNLVEYFTYNSDTKQIKFKIRL

SEQ ID NO: 2786 - protein, 538 aa, Unknown
  Description of Unknown: Integrase B2787 sequence
  PTHR30461:SF3,SM00857,G3DSA:1.10.10.2600,IPR036162,PF13408, PS51737,G3DSA:3.40.50.1390,IPR025827,IPR006119,IPR038109, PF07508,IPR011109,SSF53041,PTHR30461,Coil, PS51736,cd00338,PF00239
MQRNMRDTKTGNELQATRGVIYARYSSSGQREESIEGQIRECREYAKRHNIVIVGEYCDHAISGTSDKRPEFQRLIKDSAKGQFAFVITWKGDRFARNRYDSAVYKYRLQQNGVRILYAKESIPDGPEGIILESVMEGFAEYYSANLSQNVKRGMYDSALKLQTLGQYCYGLQKGADGKWEQNPTQAPIVKRIFEEYVAGRPATDIYRDLNNEGFRTWTGGLFNKNSLRRMLKNEKYCGVYQYADIRVENGIPAIVDRETFDKAQKMLKAHHEKPASKKIDGGFLLTGKLFCGHCGELMTGDGGTSKTGRVYQYYTCNNRRLKKCDKERAPKQWIEDIVVQKLVEIANDDNVIEAFADRYMEWQEKQKKSSPSSGMEERLKKIETAIKNTMSLIDSGFITDSLKSHLVELESERVSVEQGIAKEQANSPSLKRSEVVYFLKKFRDGDIDDVSWRIYLVETFLQAAYLFDDGRLLLHLNYSGDNNEITAQVAEQVVKEGADLCSDFAPPSPPSGANLNSIKVFFFEGLLVALTYAQRKS

SEQ ID NO: 2787 - protein, 538 aa, Unknown
  Description of Unknown: Integrase B2788 sequence
  PTHR30461:SF3,IPR036162,PS51737,IPR011109,PTHR30461, PF00239,G3DSA:1.10.10.2600,IPR006119,PF14287,SSF53041, IPR025378,SM00857,IPR025827,cd03770,IPR038109, PF13408,G3DSA:3.40.50.1390,PF07508,Coil
MIQSSQKITALYCRLSQEDMRQGDSDSIVNQKMILEKYAKENGFENTQVFADDGYSGVNFERPAFRRMLHLIEDRKIGIIITKDLSGLGRNYIEVGSYTEIYFPKNNVRYIAVNDNFDSMYTDGNELAPLKNLFNEWFARDTSKKIRAVKRAKAEKGERIGSRPPYGYVKDPNNKNHIIVDEETAPVVQKIFSMCVAGLGPTMIANRLKEMQILTPVMYEYRKSGTAVTALDTERPYDWNAKTVADILSREDYIGNTVNCRFTVPSYKDKRKMKRDPSEHVRFEHTHEPIIDMQTWETVQKLRQGKRRPTSIGETSKYSGLLFCADCGSKLYFNHKRADDPKSYSFNCSHYRNNAKEKCTPHRIREVVLDEILLEELRRITYTARTRERQFAEFINKKSSSENRRELNAKQREYERLSKRTTELNALFKRLYEDNVLGRINNEQFRMLSCGYTDEQKSIDAKLPELEKQIQNLQQAASDVDKFIGLAKKYTRITELTPEILHTFVSKIVIHERRERFKQNTEQQIDIYFRYIGNTAGL

SEQ ID NO: 2788 - protein, 538 aa, Unknown
  Description of Unknown: Integrase B2789 sequence
  SM00857,G3DSA:1.10.10.2600,IPR036162,PF13408,PS51737, IPR025827,G3DSA:3.40.50.1390,IPR006119,IPR038109,PF07508, IPR011109,SSF53041,PF00239,PTHR30461,PS51736, Coil,cd00338
MVKNIDEYYVYLRKSRKDRDAEMRGEGETLARHEKLLLEFASKHRLNVTRIYKEVVSGETISSRPEVKRLLHDIEDGHCAGVLVMEIERLARGDTKDQGIIAESFKYSNTKIITPMKTYDPNDEFDEEYFEFGLFMSRREYKTINRRIQRGRIASVQEGRFISSTAPYGYNKVKAPDGKGYTLEIDIARANVVRMIYEWYTTGLPDESGMRRPLGATAICRKLDSLHIKPMVNETWSKASITDILKNPTYTGRIRWSYRKEVKKIVDGSIIKTRPDNHDDYILVDGMHEAIITDETFQAAQLMFSQNRKTPLKLSTRLQNPLSGLVRCGVCGCTMTRLAPTSRTPYAALKCSNRYCSNVSSPLYLVEKKLLSFLDEWLKDYSLDWRKCSALIPSDTDLKIKEQAISSLNETLASLKEQLNKTYTFVEKGIYTTDVFLERNKALTAQITAAENDLSLLHDEYNNDLSVQQSQNEFIPKVRGIIDTYWEIDDIQTRNEMLKEIIEKVEYRKDVPNTRGKRENANFILDVYPKIPRKSPLS

SEQ ID NO: 2789 - protein, 538 aa, Unknown
  Description of Unknown: Integrase B2790 sequence
  PTHR30461:SF3,SM00857,G3DSA:1.10.10.2600,IPR036162,PF13408, IPR025827,G3DSA:3.40.50.1390,PS51737,IPR006119,IPR038109, PF07508,IPR011109,SSF53041,PTHR30461,Coil, PS51736,cd00338,PF00239
MPRKKKLQEVGGLRLVAYYRYSGGSGQTEQSIEGQRRDCEAYAKLHGMTIQHEYIDRHISGKTDDRVSFQQMIRDSDKGAFDMVICWKTDRFARNRYDSAVYKKRLRDNGVEIIYAAESNISGAEGIIIEGLMESLAEYYSAELAEKMRRGMRESALKCQAINRCRPLGFTTDAGKKFIIDERTAPAVRFIFEHYAAGESAAYIVEQLNEKGYRTSQGNEFNKSSINRIIQNEMYRGVYISKAYDVRIEGGVPAIVDDELWRRAQAMAKLNKQKRAKYSSKADYFLSGKLYCGECGCLMKGISGHSSTNGEVYRYYACSNPKCKKHNVPKEELEGKVIQAIIDNLLQPEAMEALAEAMVAVQETDADKPNAEREAIQQELADVRRRSKNILDAIENGTANPHLTARLDELTERENTLRFQLSTLTDEKPLRFTKEEYLFLLEQFLIDPAERNEDYGRRVVHTFVTSMEVSDSKLLIYFNISEENADKNKNASPSELQKESSTVKRLVQQSWTNPNFFLLSHQPSKRPQIGRLGCHPCS

SEQ ID NO: 2790 - protein, 538 aa, Unknown
  Description of Unknown: Integrase B2791 sequence
  PTHR30461:SF3,cd00338,SM00857,G3DSA:1.10.10.2600,IPR036162, PF13408,PS51737,IPR025827,G3DSA:3.40.50.1390,IPR006119, IPR038109,PF07508,IPR011109,SSF53041,PTHR30461, PS51736,Coil,PF00239
MCAKKKPAMLEPDMQDAVIYTRYSSHNQRDCSIEQQVADCEIFARQNNLRVVKVYADRHLSGTTDNRPQFQQMLKDASHGHWAYVICWKIDRFARNRYDSATYKFRLKKAGVRVLYAKESIPDGPEGILLESVLEGSAEYYSAALAQNIRRGMKYNAEQCKVNSGSIPFGYCKGPDGRFAIHEANAEVVREIFRKAAAGMPFVDIANDLNSRGLKTSRGGRWNKGSFRLLMNEAYIGVYHFSDTRIEGGMPALIDQGTFWAANERLKANSSVRGRHQDGGDYLLTGKLKCAHCGSYMIGFSGTGKNGELHYYYGCQKRRRERACKKANVPREWIERVVVKAALDYVLRPDVMEWIADAVMEYQEREAASAQLAALTAELEENQKATDNVMKAIEAGIITSTTKQRLLDLEAKAQDLKRAIELEKLSHVRLERDQVLFWLDRFRGGSLQSQEFRRKVIDAFVSVVYLSDDHLRIAFNYSGGSNAEADFDLVMDAEAAAGELSKKFAQGHVASTKCESGEPPTIYFVGAFFVLTMPLPER

SEQ ID NO: 2791 - protein, 538 aa, Unknown
  Description of Unknown: Integrase B2792 sequence
  PTHR30461:SF3,cd00338,SM00857,G3DSA:1.10.10.2600,IPR036162, PS51737,G3DSA:3.40.50.1390,IPR006119,IPR038109,PF07508, IPR011109,SSF53041,PTHR30461,PS51736,Coil, PF00239
MKENILRVAAYARVSTDKEDQTNSLLSQRSYFADYITHHEGWKLSEVYYDEGISGTQIKKRSGFKKMIQDALNGEVDLIITKEVARFARNTVDTLSYTRKLKSAGVGVIFTIDNIDTRDADGELRLTIMASIAQEESRKTSERVKWGQKRQMEKGVVFGRDLLGYTVQNGQLHINEEEVPIVQAIFHKYTNEGKGTWTIANELLVEGMRPKRIALWSNVVILRVLRNEKYVGDLCQKKTYTPDYLTHSKKYNRGEEEMVYLKEHHEPIIDRDLWNRTQEELKRRSPSEEQKSKHSNRYWCSGKIHCAECGCRYVSRTKKLMSGDVYKAWRCYAAANHGTKKQDADGNEIGCNNSSINDRSLKTCMNYCITLVQGERDSLKKEILKEISQLQKTTAKKLDSKKIKKKIDNLEMKKRKAIDLMLDGLISKEDLQSQTEWYNEELEKLNIQLSDALQKDKSDSRQVNHMEKYIKALDEIMELDGDSEDVYKEVLDHMEIHKGNIVDVWLKSIPIGIRLKVKATGKGEYFKTEILETSFIEK

SEQ ID NO: 2792 - protein, 538 aa, Unknown
  Description of Unknown: Integrase B2793 sequence
  PTHR30461:SF3,SM00857,G3DSA:1.10.10.2600,IPR036162,PF13408, PS51737,G3DSA:3.40.50.1390,IPR025827,IPR006119,IPR038109, PF07508,IPR011109,SSF53041,PTHR30461,PS51736, cd00338,PF00239
MNGVIYARYSSENQREESIDGQLRECTAFAQHNDIQIVGEYIDRAFSAKTDNRPSFQKMIKDSAKGEFDVIIVWKLDRFARNRYDSAHYKNILKKNGVKVVSATEAISSGAEGIILESVLEGMAEYYSAELAEKVSRGMKENALKCKYNGGSVPLGYYIDESKHFQIDSSVAPFVVECFEHYADGMTMKQLRDELNMKGVKNSRGGKLSIDVISRMLTNRKYLGEYTFQDITIKDGIPAIVSTSLFEKVQDRLTKTKKAPSSHKADDDYILTTKLFCGKCKSFMVGESGTNAQGKKYRYYKCVNHKKHQGCDMKSIRKDLIENMTIKYIREFLNDEDLINTLIDLAYDAQHKENEQLPLLRKQLAQTEKGIKNIVDAIEQGISTKSTRERLLDLEQRKNDIEMSISKESIENPMLTKKQFKFWFDQLKKLDISKSEQRQKLVDLFVNSIIIYDDHIKFFFNYKEHTETITFDELNNCSDLPDSPRPNNKRHPLGCLFIFYIILTGLEPVAELSKFGDCKEQQIWEKQSGGLFRRIPVS

SEQ ID NO: 2793 - protein, 538 aa, Unknown
  Description of Unknown: Integrase B2794 sequence
  PTHR30461:SF3,SM00857,G3DSA:1.10.10.2600,IPR036162,PS51737, G3DSA:3.40.50.1390,IPR006119,IPR038109,PF07508,SSF53041, IPR011109,PTHR30461,Coil,PS51736,cd00338, PF00239
MKENILRVAAYARVSTDKEDQTNSLLSQRSYFADYITHHEGWQLSEVYYDEGISGTQIKKRSGFKKMIQDALNGDVDLIITKEVARFARNTVDTLSYTRKLKSAGVGVIFTIDNIDTRDADGELRLTIMASIAQEESRKTSERVKWGQKRQMEKGVVFGRDLLGYTVQNGQLHINEEEVPIVQAIFHKYTNEGKGTWTIANELLAEGMRPKRIALWSNVVILRVLRNEKYVGDLCQKKTYTPDYLTHSKKYNRGEEEMVYLKEHHEPIIDRDLWNRTQEELKRRSPSEEQKSKHSNRYWCSGKIHCAECGCRYVSRTKKLMSGDVYKAWRCYAAANHGTKKQDADGNEIGCNNSSINDRSLKTCMNYCITLVQGERDSLKKEILKEISQLQKTTAKKLDSKKIKKKIDNLEMKKRKAIDLMLDGLISKEDLQSQTEWYNEELEKLNIQLSDALQKDKSDSRQVNHMEKYIKALDEIMELDSDSEDVYKEVLDHMEIHKGNIVDVWLKSIPIGIRLKVKATGKGEYFKTEILETSFIEK

SEQ ID NO: 2794 - protein, 538 aa, Unknown
  Description of Unknown: Integrase B2795 sequence
  PTHR30461:SF3,SM00857,G3DSA:1.10.10.2600,IPR036162,PF13408, PS51737,IPR025827,G3DSA:3.40.50.1390,IPR006119,IPR038109, PF07508,IPR011109,SSF53041,PF00239,PTHR30461, PS51736,Coil,cd00338
MKAVIYARYSSDSQREESIEGQLRECAAFAEKNGITVLRHYIDRAYSAKTDNRPEFQNMIKDSGKRLFDIVIVWKLDRFARNRYDSARYKATLKKNGVKVVSATEIISEGAEGIILESVLEGYAEYYSADLSEKVVRGMTDNALKCKFNGGMMPIGYVIDAEQHFQIDPLTAPFVLEAFKRYDGGETISSIMNWLNEQGLTNTRGQKMTFNSVGHILHNRRYIGEFRYRDVIVPDGIPAIVPQDLFDRVQEKLAKNKKAPARHKAEDDYLLTTKLFCGYCGAYLCGESGTSRTGKVHHYYKCVSVKKKRTECHKKPVRKEWIEDLVVGETMKMVMDDKAIEAIVFMLMDLQERESTSLPLYEQQLQETKTGIQNLLNAIQQGVLTKSTKSRLEELEATQEDLKLKIANEQLIRPKVSAEFMTFWLHRFRKLDVRQQSHRKMLIDAFINAIFLYDDKMVITFNYKEGTTTITFDDLKTALADQKTGSDLDCSTAPLRNDLWMSDDRASATISTAKVFLRFRIANTSLVCNSVLVSRPLH

SEQ ID NO: 2795 - protein, 538 aa, Unknown
  Description of Unknown: Integrase B2796 sequence
  PTHR30461:SF3,cd00338,SM00857,G3DSA:1.10.10.2600,IPR036162, PF13408,IPR025827,PS51737,G3DSA:3.40.50.1390,IPR006119, IPR038109,PF07508,IPR011109,SSF53041,PTHR30461, PS51736,Coil,PF00239
MCAKKKPAMLEPDMQDAVIYTRYSSHNQRDCSIEQQVADCEIFARQNNLRVVKVYADRHLSGTTDNRPQFQQMLKDASHGHWAYVICWKIDRFARNRYDSATYKFRLKKAGVRVLYAKESIPDGPEGILLESVLEGSAEYYSAALAQNIRRGMKYNAEQCKVNSGSIPFGYCKGPDGRFAIHEANAEVVREIFRKAAAGMPFVDIANDLNSRGLKTSRGGRWNKGSFRLLMNEAYIGVYHFSDTRIEGGMPALIDQGTFWAANERLKANSSVRGRHQDGGDYLLTGKLKCAHCGSYMIGFSGTGKSGELHYYYGCQKRRRERACKKANVPREWIERVVVKAALDYVLRPDVMEWIADAVMEYQEREAASAQLAALTAELEENQKATDNVMKAIEAGIITSTTKQRLLDLEAKAQDLKRAIELEKLSHVRLERDQVLFWLDRFRGGSLQSQEFRRKVIDAFVSVVYLSDDHLRIAFNYSGGSNAEADFDLVMDAEAAAGELSKKFAQGHVASTKREPDEPCVFAQGRLCSTSKKSHLKT

SEQ ID NO: 2796 - protein, 538 aa, Unknown
  Description of Unknown: Integrase B2797 sequence
  PTHR30461:SF3,cd00338,SM00857,G3DSA:1.10.10.2600,IPR036162, PF13408,PS51737,G3DSA:3.40.50.1390,IPR025827,IPR006119, IPR038109,PF07508,IPR011109,SSF53041,PTHR30461, PS51736,Coil,PF00239
MCAKKKPAMLEPDMQDAVIYTRYSSHNQRDCSIEQQVADCEIFARQNNLRVVKVYADRHLSGTTDNRPQFQQMLKDASHGHWAYVICWKIDRFARNRYDSATYKFRLKKAGVRVLYAKESIPDGPEGILLESVLEGSAEYYSAALAQNIRRGMKYNAEQCKVNSGSIPFGYCKGPDGRFAIHEANAEVVREIFRKAAAGMPFVDIANDLNSRGLKTSRGGRWNKGSFRLLMNEAYIGVYHFSDTRIEGGMPALIDQGTFWAANERLKANSSVRGRHQDGGDYLLTGKLKCAHCGSYMIGFSGTGKNGELHYYYGCQKRRRERACKKANVPREWIERVVVKAALDYVLRPDVMEWIADAVMEYQEREAASAQLAALTAELEENQKATDNVMNAIEAGIITSTTKQRLLDLEAKAQDLKRAIELEKLSHVHLERDQVLFWLDRFRGGSLQSQEFRRKVIDAFVSVVYLSDDHLRIAFNYSGGSNAEAGFDLVMDAEAAAGELSKKFAQGHVASTKCESGEPPTIYFVGAFFVLTMPLPER

SEQ ID NO: 2797 - protein, 538 aa, Unknown
  Description of Unknown: Integrase B2798 sequence
  IPR036162,PS51737,IPR011109,PTHR30461,PF00239, G3DSA:1.10.10.2600,PF14287,IPR006119,SSF53041,IPR025378, SM00857,IPR025827,cd03770,IPR038109,PS51736, PF13408,G3DSA:3.40.50.1390,PF07508,Coil
MLRQATQNLITALYPRLSHEDELQGESNSISNQKRILETYAKQNGFTNLRWYTDDGFSGANFQRPGFQAMLADIEAGKVGTVIVKDMSRLGRNYLQVGFYTEMLFPQKGVRFIAVNDNVDSASEGMDNDFTPLRNLFNEWLVRDTSKKIKAVKKSKGMSGKPVTSKPVYGYVMDEDENFIIDEEAAPVVQQIYQLCLAGNGPTKIARMLTEQQIPTPGTLEYQRTGSTRRYHPGYECKWATNTVVHILENREYTGCLVNFKTEKPSYKVKHSIENPVEKQAIFENHHEPIIDKETWERVQELRKQRKRPNRYDEVGLFSGILFCADCGHVLYQQRYQNKDRKQDCYICGSYKKRTRNCTAHFIRTDLLTAGVLANLRQVTEYAAKHESRFVKLLVQQNEIGGKRKTAAAIKQLEQAQERISEISRIIKRLYEDNVNGKISDERFMELSADYEAEQAELKKRAAALQAELDKSQAATVNAEKFMGIVRKHLAFEELTPTLLREMIEKIVVHECSYDENGTRRQDIEIYYSFVGKIDLPE

SEQ ID NO: 2798 - protein, 538 aa, Unknown
  Description of Unknown: Integrase B2799 sequence
  PTHR30461:SF3,SM00857,G3DSA:1.10.10.2600,IPR036162,PF13408, IPR025827,G3DSA:3.40.50.1390,PS51737,IPR006119,IPR038109, PF07508,IPR011109,SSF53041,PF00239,PTHR30461, PS51736,Coil,cd00338
MRAALYARYSSDNQRYESITAQLRCSKEYCAQKHYDVVKIYTDEAISGTSVAGRTGFQQMILESGDGIFDVVIFHKIDRNARNEIDYYTNIDRLKKNGVRYEYSAEGIDVSTANGKLTEGIKVAVAAWYSRNLAQEVKKGQKENALKAVFNGGRPPLGYKIINQQYYIEPKEAEAVRLIFEMYIAGNGYTKISEELNRRGYLTRNGQPFAKNSLYEIIGNERYTGTYIFNRILTDEFGKRNNHKVNPDAIKIENAIPAIIDKATFHAAAEMRAKNRHSNSRCRTTENYLLTGKIFCGICGRAMNGHRMRTRSGVYTYYCCNKTRLPADVKCQQKLVKKEYIERNVCEGVLEIVMSDVYREKTISEMIEYHKNLNSTVKGQRKTLQASLKNAETKLSNLYSLIENGTLDEFDAQRISSVKTEIRELRNSLQSLPNTASIEQLNPAKLNALFAKMYEKLKEQVREGNIEVMQMIINSFIEKVVICGDKVEATIKIAPGDFVSAGTVEPHLHHSYGYTLIKCRIPRIILCKTLHLNDVVIL

SEQ ID NO: 2799 - protein, 538 aa, Unknown
  Description of Unknown: Integrase B2800 sequence
  PTHR30461:SF3,cd00338,SM00857,G3DSA:1.10.10.2600,IPR036162, PF13408,PS51737,G3DSA:3.40.50.1390,IPR025827,IPR006119, IPR038109,PF07508,IPR011109,SSF53041,PTHR30461, PS51736,Coil,PF00239
MRAKKKPAMLEPDMQDAVIYTRYSSHNQRDCSIEQQVADCEIFARQNNLRVVKVYADRHLSGTTDNRPQFQQMLKDAAHGHWAYVICWKIDRFARNRYDSATYKFRLKKAGVRVLYAKESIPDGPEGILLESVLEGSAEYYSAALAQNIRRGMKYNAEQCKVNSGSIPFGYCKGPDGRFAIHEANAEVVREIFRKAAAGMPFVDIANDLNSRGLKTSRGGRWNKGSFRLLMNEAYIGVYHFSDTRIEGGMPALIDQGTFWAANERLKANSSVRGRHQDGGDYLLTGKLKCAHCGSYMIGFSGTGKSGELHYYYGCQKRRRERACKKANVPREWIERVVVKAALDYVLRPDVMEWIADAVMEYQEREAASAQLAALTAELEENQKATDNVMKAIEAGIITSTTKQRLLDLEAKAQDLKRAIELEKLSHVRLERDQVLFWLDRFRGGSLQSQEFRRKVIDAFVSVVYLSDDHLRIAFNYSGGSNAEADFDLVMDAEAAAGELSKKFAQGHVASTKCESGEPPTIYFVGAFFVLTMPLPER

SEQ ID NO: 2800 - protein, 538 aa, Unknown
  Description of Unknown: Integrase B2801 sequence
  PTHR30461:SF3,SM00857,G3DSA:1.10.10.2600,IPR036162,PF13408, IPR025827,G3DSA:3.40.50.1390,PS51737,IPR006119,IPR038109, PF07508,IPR011109,SSF53041,PTHR30461,Coil, PS51736,cd00338,PF00239
MKKFPIDLSCLTEEEISQFQEDPYTLYNGDQDVALYLRYSSTGQSDQSIEGQLRDCRAFCKANHYRIVAIYVDRATTARKDVEKRVHLMEMVADSAKQNWEYVIVWKLDRFARNRNDSAIMKMRLRKNGVKVLSATEHLTDSPESIILESVLEGMAEFFSAELSQKVTRGMRESALKCHSVGGHIPLGYKVENHKLVVDPDTAHIVQEAFSLYANGESVADICRKFNSAGYKTAKNTEFNRSSFKAMFRNTRYIGTYTYKDIVIENGIPAIIDKELFETVQRRLSKTATAPARGKAKVDYLLSGKLFCGHCGASMNGESGAGRHGKVYHYYSCYTKKRKLGCDKRPLKKDYIEGIVARDALNLLTDQLIDEIADMAIRQSEQDLINDTHIPQLTAQLSEVEKSITNITAAIEKGIASETLMNRLVQLEHEKKTLNKEIKAEEKFVYRIDRDQIVFWLSQFKYGNIEDEDFRRRLIDLLVNSVTVWDEPDGYKITTAYNLTSCKTKTFRVEKNPAAEEATGFDFGESECTIRNHRPDRR

SEQ ID NO: 2801 - protein, 538 aa, Unknown
  Description of Unknown: Integrase B2802 sequence
  PTHR30461:SF3,SM00857,G3DSA:1.10.10.2600,IPR036162,PF13408, PS51737,IPR025827,G3DSA:3.40.50.1390,IPR006119,IPR038109, PF07508,SSF53041,IPR011109,PTHR30461,Coil, PS51736,cd00338,PF00239
MKENILRVAAYARVSTDKEDQTNSLLSQRSYFADYITHHEGWKLSEVYYDEGISGTQIKKRSGFKQMIQDALNGEVDLIITKEVARFARNTVDTLSYTRKLKSAGVGVIFTIDNIDTRDADGELRLTIMASIAQEESRKTSERVKWGQKRQMEKGVVFGRDLLGYTVQNGQLHINEEEVPIVQAIFHKYTNEGKGTWTIAKELLAEGMRPKRIALWSNVVILRVLRNEKYVGDLCQKKTYTPDYLTHSKKYNRGEEEMVYLKEHHEPIIDRDLWNRTQEELKRRSPSEEQKSKHSNRYWCSGKIRCAECGCRYVSRTKKLMSGDVYKAWRCYAAANHGTKKQDADGNEIGCNNSSINDRSLKTCMNYCITLVQGERDSLKKEILKEISQLQKATAKKVDSKKIKKKIDNLEMKKRKAIDLMLDGLISKEDLQNQTEWYNEELEKLNIQLSDALQKDKSDSRQVNNMEKYVKALDEIMEMDGSSEDVYKEVLDHIEIHKGNIVDVWLKSIPIGIRLKVKATGKGEYFKTEILETSFIEK

SEQ ID NO: 2802 - protein, 538 aa, Unknown
  Description of Unknown: Integrase B2803 sequence
  SM00857,G3DSA:1.10.10.2600,IPR036162,PF13408,PS51737, IPR025827,G3DSA:3.40.50.1390,IPR006119,IPR038109,PF07508, IPR011109,SSF53041,PF00239,PTHR30461,PS51736, Coil,cd00338
MARKKKQASGDAVIYARYSSHNQRDVSIEQQIEACRKYAASLGLKITVTYEDRAISGRTDNRPAFQRMMNDAEDGKFCYVLAWKSNRMGRNMMQAMVNEARLVDCGVKVYYAEEDFDDSAAGRFALRSMMNVNQFYSDNLAEDVRRGLMDNASKCIANGKQPFGYKRGSDGKVVLDEPAAAVVREVFTRVASGETNTSIARDLNRRGIKTGSNGEWNKCSFHGLCTNERYRGIYIYGETRIEGGVPRIIDDRLWHKVQEAIRMRNRRKNGRHRPGEDDYLLTGKLRCGHCGGYMIGMSGTSKTGTIHHYYACQNRRVGRTCDKKNIRRDIIEPAVAQAIKQYCLTDDVIEWIADKTIEYWEDEDRKLQITSLENELADIKSSISNVMKAIEQGVITSTTRDRLIELEAQQSDLSAKLNSAKEDLVHVDRKNLISSLLLFRNGDVYDRQYQEDLFNTFLVAAYVYDDGNRLKLVFNCFGDSNTVDLDLCSDENNDNSSISNEANCGNLFAQALKQSTRTKPSDEQSGGFSVLFSADFTQ

SEQ ID NO: 2803 - protein, 538 aa, Unknown
  Description of Unknown: Integrase B2804 sequence
  PTHR30461:SF3,IPR036162,PS51737,IPR011109,PTHR30461, PF00239,G3DSA:1.10.10.2600,IPR006119,PF14287,SSF53041, IPR025378,SM00857,IPR025827,cd03770,IPR038109, PS51736,PF13408,G3DSA:3.40.50.1390,PF07508,Coil
MQENYIVGIYARLSRDDERAGESVSIENQKEMLSRYVREQGWTLYDYYCDDGVSGTTFDRPGLNRLVQDATDHKINLVLCKDLSRLGRDYIEAGKYTDFVFPSLGCRFIALNDGVDTLRKNNEMLVILKNVMNDLYARDTSSKIKAVKLSTFKSGKYVGCYAPLGYRKSEADKHVLEIDPVTAPVVRHIFDLRLQGYGFRKIALQLNAEKVPAPRSFYYMAEGRENLRGETPFWNDVTVKTILRNEVYIGHMVQNKTGTVSYKNHKQVSKPESEWIKVENTHEPLIPQETWDAVQRMDNHPARGRSGKNGTIALFGGLLRCMDCGSSMRYMRDYRKKVSEKEPEYKAYVCNRYASGGKNACSSHYINQKVLTQIVMTDIRCKAMWAQNSRETLRTQLLAREQNASVERTRTLQAELNAIGKRLPELDKLIQSAYEDKVLGRIPESVCVNLLNQYEAERREKQERRKELTEQLAARLETESSVDAWLDMMQDYAQLEELDRPTLVRLIQKIEISERYPVDDHEERDIHIYYNFVGYIEA

SEQ ID NO: 2804 - protein, 538 aa, Unknown
  Description of Unknown: Integrase B2805 sequence
  PTHR30461:SF3,SM00857,G3DSA:1.10.10.2600,IPR036162,PF13408, IPR025827,PS51737,G3DSA:3.40.50.1390,IPR006119,IPR038109, PF07508,IPR011109,SSF53041,PF00239,PTHR30461, PS51736,Coil,cd00338
MKKFPIDLSCLTEEEISQFQEDPYTLYNGDQNVAIYLRYSSTGQSDQSIEGQLRDCRTFCKANHYRIVAIYVDRATTARKDVEKRVHLMEMISDSAKQNWEYVIVWKLDRFARNRNDSAIMKMRLRKNGVKVLSATEHLTDSPESIILESVLEGMAEFFSAELSQKVTRGMRESALKCHSVGGHIPLGYKVENHKLVVDPDTAHIVQEAFSLYANGESVAAICRKFNSAGYKTAKNTEFNRSSFKAMFRNTRYIGTYTYKDIVIENGIPAIIDKELFETVQRRLSKTATAPARGKAKVDYLLSGKLFCGHCGASMNGESGAGRHGKVYHYYSCYTKKRKLGCDKRPLKKDYIEGIVARDALNLLTDQLIDEIADMAIRQSEQDLINDTHIPQLTAQLSEVEKSITNITAAIEKGIASETLMNRLVQLEHEKKTLNKEIKAEEKFVYRIDRDQIVFWLSQFKYGNIEDENFRRRLIDLLVNSVTVWDEPDGYKITTAYNLTSCKTKTFRVEKNPAAEEATGFDFEESECAACCKRRQRN

SEQ ID NO: 2805 - protein, 538 aa, Unknown
  Description of Unknown: Integrase B2806 sequence
  PTHR30461:SF3,SM00857,G3DSA:1.10.10.2600,IPR036162,PF13408, IPR025827,G3DSA:3.40.50.1390,PS51737,IPR006119,IPR038109, PF07508,IPR011109,SSF53041,PTHR30461,Coil, PS51736,cd00338,PF00239
MKENILRVAAYARVSTDKEDQTNSLLSQRSYFADYITHHEGWKLSEVYYDEGISGTQIKKRSGFKKMIQDALNGEVDLIITKEVARFARNTVDTLSYTRKLKSAGVGVIFTIDNIDTRDADGELRLTIMASIAQEESRKTSERVKWGQKRQMEKGVVFGRDLLGYTVQNGQLHINEEEVPIVQAIFHKYTNEGKGTWTIAKELLTEGMRPKRIALWSNVVILRVLRNEKYVGDLCQKKTYTPDYLTHSKKYNRGEEKMVYLKEHHEPIIDRDLWNRTQEELKRRSPSEEQKSKHSNRYWCSGKIRCAECGCRYVSRTKKLMSGDVYKAWRCYAAANHGTKKQDADGNEIGCNNSSINDRSLKTCMNYCITLVQGERDSLKKEILKEISQLQKVTVKKVDSKKIKMKIDNLEMKKRKAIDLMLDGLISKEDLQNQTEWYNEELEKLNIHLSDALQKDKSDSRQVNNMEKYIKALDEIMELDGNSEDVYKEVLDHMEIHKGNIVDVWLKSIPIGIRLKVKATGKGEYFKTEILETSFIEK

SEQ ID NO: 2806 - protein, 538 aa, Unknown
  Description of Unknown: Integrase B2807 sequence
  PTHR30461:SF3,cd00338,SM00857,G3DSA:1.10.10.2600,IPR036162, PF13408,PS51737,IPR025827,G3DSA:3.40.50.1390,IPR006119, IPR038109,PF07508,IPR011109,SSF53041,PTHR30461, PS51736,Coil,PF00239
MKTAVTYARFSSARQHETSIEAQRDAMAKWCAQRSVRIVQEYADRAASGTKTEGRDDFLQMLADLKQRRVDYVLVHKYDRFARNENDQYFYMAMIEQRGAKLVAVAQEFGDGPEARFMVGVITAYNAFYSANLSAESKKGKNIIKQHGKHTGGPYPIGYDPDGQGNYVVNEVEAYFVRELYNAVITHRRLDDVVAEMRDAGLRGRYGGELKTANLARIVRNPVYMGVYQRTLSDGTLVRIENHHAAIVDQKTYEEANRIMDARANAGRNDRKIYPLSGIAYCACCGAKLLAQTTRKDANHEYTSYYCSKCHDLRRIPAQELDGAAVDYLNALFAPERRAELAKAVEDYSKRLISSATSRQPSASREIKKLQREIDSLAANLAAGVLSPDMLTMIDQQITTRRERIKILQETSATPAPVTAADIDSFFADAATLSLGMDPRYLRQVMRKYIKRVTVHTTEIEIVSTFDDWIGEKFRSGRESSDDGGADRQSVRIASNPCVFDVILTLSFVHRVPLPERYRLFHKELYNLHRNKIRRKKK

SEQ ID NO: 2807 - protein, 538 aa, Unknown
  Description of Unknown: Integrase B2808 sequence
  PTHR30461:SF3,SM00857,G3DSA:1.10.10.2600,IPR036162,PF13408, IPR025827,G3DSA:3.40.50.1390,PS51737,IPR006119,IPR038109, PF07508,SSF53041,IPR011109,PTHR30461,Coil, PS51736,cd00338,PF00239
MSTAPNVTVIPAKVQTAENRDKHHQLRVAAYCRVSTEQEEQQNSFAVQVAYYTDLINKKKEWTLAGIFADEGISGTQTKKRTEFNRMIRMCKKKKIDLIITKSISRFSRNTVDCLQYIRQLKELGIGVIFEKENINTLTMTSEFMIALYGSFAQAESESISKNVSWGKEKAYREGKVQFQYKYLLGYKKGEDGKPEIVPEEAETVRLIYTLFLDGYSMSRIKKLLENKGILTSQGKKVWNESLIRSILKNEKYAGDALLQKTFTSDCITHKIVKNHGERPMYLVTDHHEPIIDRDTYNRVQQELARRSSKRKVSDKTTTEQGKYSSKYALTELLICGKCGTPYRRTTWTSRGKKQIVWRCISRLEHGRRYCSDSPTIKEEQFHKAIIRAINNYYSCGNDVEKILKANIGNVLECHGQEEITAIKKRLKEIDKARSDLISLIATGGCDEDKLDSEFEKLYEEEQSLSERLAMLKSKNQTSAETQAKLDKIIDMIEHEKFELETFDNVLVRKLIECVKVLSKTEILVIFKGGYEVRTEIE

SEQ ID NO: 2808 - protein, 538 aa, Unknown
  Description of Unknown: Integrase B2809 sequence
  PTHR30461:SF3,SM00857,G3DSA:1.10.10.2600,IPR036162,PF13408, IPR025827,G3DSA:3.40.50.1390,PS51737,IPR006119,IPR038109, PF07508,IPR011109,SSF53041,PTHR30461,Coil, PS51736,cd00338,PF00239
MSTASNVTIIPAKVQTEINRDKYHQLRVAAYCRVSTEQEEQQNSYQVQIAYYTDLINRKKEWTLAGIFADEGISDTQTKKRTEFNRMIRMCRNKKIDLVITKSISRFARNTVDCLEYVRQLKDLGIGVIFEKENINTMTMTSEFMIALYGSFAQAESESISKNVSWGKEKAYREGKVQFQYKYLLGYKKGADGKPEIVPEEAETVKLIFNMYLDGYTLLNIADTLMAQGRRTATGKNIWSKGEVQRILKNEKYVGDALLQKSFTVDCITHKVVKNNGERPMYLVTDHHTPIVDRDTFNRVQQELARRTSKRKISDKTKTEQGKYSGKYALSELLICGHCGTPYRRRIWSKNGKKQIVWRCISRLEHGKKYCPDSPTIKEEQLHKAIIRAINNYYSCRNDIVRILKANIGSVLECQGQEEILSAEKRLREIDQARNDLVDLIASGGCDENKLDSEFAKLYSEEQQLNERLAMMKSQNKTSEETQAKLDEIMDMIEHEKFELETFDNVLIRKLIECVKVMSKTEILVIFKGGYEVKAEIE

SEQ ID NO: 2809 - protein, 538 aa, Unknown
  Description of Unknown: Integrase B2810 sequence
  PTHR30461:SF3,cd00338,SM00857,G3DSA:1.10.10.2600,IPR036162, PF13408,IPR025827,PS51737,G3DSA:3.40.50.1390,IPR006119, IPR038109,PF07508,IPR011109,SSF53041,PTHR30461, PS51736,Coil,PF00239
MCAKKKPAMLEPDMQDAVIYTRYSSHNQRDCSIEQQVADCEIFARQNNLRVVKVYADRHLSGTTDNRPQFQQMLKDASHGHWAYVICWKIDRFARNRYDSATYKFRLKKAGVRVLYAKESIPDGPEGILLESVLEGSAEYYSAALAQNIRRGMKYNAEQCKVNSGSIPFGYCKGPDGRFAIHEANAEVVREIFRKAAAGMPFVDIANDLNSRGLKTSRGGRWNKGSFRLLMNEAYIGVYHFSDTRIEGGMPALIDQGTFWAANERLKANSSVRGRHQDGGDYLLTGKLKCAHCGSYMIGFSGTGKSGELHYYYGCQKRRRERACKKANVPREWIERVVVKAALDYVLRPDVMEWIADAVMEYQEREAASAQLAALTAELEENQKATDNVMKAIEAGIITSTTKQRLLDLEAKAQDLKRAIELEKLSHVRLERDQVLFWLDRFRGGSLQSQELRRKVIDAFVSVVYLSDDHLRIAFNYSGGSNAEADFDLVMDAEAAAGELSKKFAQGYVASTKCESGEPPTIYFVGAFFVLTMPLPER

SEQ ID NO: 2810 - protein, 538 aa, Unknown
  Description of Unknown: Integrase B2811 sequence
  PTHR30461:SF3,SM00857,G3DSA:1.10.10.2600,IPR036162,PF13408, IPR025827,PS51737,G3DSA:3.40.50.1390,IPR006119,IPR038109, PF07508,IPR011109,SSF53041,PTHR30461,Coil, PS51736,cd00338,PF00239
MKAAIYSRKSKFTGKGESIENQIEMCKKYATDNNYTEISIYEDEGFSGKNTNRPEFKKMMKDAKAHKFDAIICYRLDRISRNVSDFSTLVDELKKLNIDFISIREQFDTSSPMGTAMMFISSVFAQLERETIAERIRDNMYELAKTGRWLGGTPPYGFISEPDYYLDANGKQKKMVKLSPVKSETNLVKSFFESYLKLGSLSKLQKHLIINSINTKRNVAWDVKALQLLLRNPVYVKSSELVISYLESKGATVFGEPNGNGILSYNKKDSKDKYKDISDWILSISKHEGIIDDLLWLKVQKQLDRNKDLAPRLVSNNSSGLLNNILYCKKCGGRMIQKQGHISKKTGEVLRYYVCLTKTNSSGVLCDCKNVRADKLENDIVDELLKETTDESDLIYTIENYKESLKSDIYSKKDLDSIKKQISQKQIQIDNLLEKISLNPNLYDLFEKKLEELNSELKSLKFKKFELESSNENTKLAIKEITASTEMILNFSKLWKSADFPMKKLLLNTYIDKIIYDSDTKSGRMKLFNSKKKRRSLM

SEQ ID NO: 2811 - protein, 538 aa, Unknown
  Description of Unknown: Integrase B2812 sequence
  PTHR30461:SF3,SM00857,G3DSA:1.10.10.2600,IPR036162,PF13408, PS51737,G3DSA:3.40.50.1390,IPR025827,IPR006119,IPR038109, PF07508,SSF53041,IPR011109,PTHR30461,PS51736, cd00338,PF00239
MARAAKQDNNSEIIDGVIYARYSEGPNQTEASIEGQVRECKEYAKRNGIRIINVYSDSKHTGTNDNRAEFQKMLRDSRRGGFSVVVVWKIDRFGRNRAEMAQNKALLKLQGVKVVSAKEYIPDSPEGIILESVLEGMAEYYSANLSQNIKRGMKENALHCKSNGSGKSLGYIVDKDGYFEIEPNEATIVKTIFQKYDEGMKIADIWREIVASGAKTKRGKDFTQYGISRVLSNRAYIGEYRYGDIVTPGGMPRIIDDDLFNRVQERRALSKKAPASRRSNSDVDFLLTGKVFCGHCKGTMRGMSGTSKTGRKFYYYACHDKIFKHNKCTKKNVKKEWLETEVTRITRDDILNKETIEFIADRVVEIQRQEQEDKSMLRYYEQQLRDTQSAINNIMKAIEAGIITSSTKSRLFELEEQKSIIEGEIEREKIITPVIEKEQVIFSLERFFGGDINNKEYQRNIIDMFVNKVILYDNKIIITYNISSQNEISVDVVEQAAFAALDECSSKLSLPPPNVEKTNTTNIFFVSGLFGIITTPHD

SEQ ID NO: 2812 - protein, 538 aa, Unknown
  Description of Unknown: Integrase B2813 sequence
  PTHR30461:SF3,cd00338,SM00857,G3DSA:1.10.10.2600,IPR036162, PF13408,IPR025827,G3DSA:3.40.50.1390,PS51737,IPR006119, IPR038109,PF07508,SSF53041,IPR011109,PTHR30461, PS51736,Coil,PF00239
MCAKKKPAMLEPDMQDAVIYTRYSSHNQRDCSIEQQVADCEIFARQNNLRVVKVYADRHLSGTTDNRPQFQQMLKDAAHGHWAYVICWKIDRFARNRYDSATYKFRLKKAGVRVLYAKESIPDGPEGILLESVLEGSAEYYSAALAQNIRRGMKYNAEQCKVNSGSIPFGYCKGPDGRFAIHEANAEVVREIFRKAAAGMSFVDIANDLNSRGLKTSRGGRWNKGSFRLLMNEAYIGVYHFSDTRIEGGMPALIDQGTFWAANERLKANSSVRGRHQDGGDYLLTGKLKCAHCGSYMIGFSGTGKSGELHYYYGCQKRRRERACKKANVPREWIERVVVKAALDYVLRPDVMEWIADAVMEYQEREAASAQLAALTAELEENQKATDNVMKAIEAGIITSTTKQRLLDLEAKAQDLKRAIELEKLSHVRLERDQVLFWLDCFRGGSLQSQEFRRKVIDTFVSVVYLSDDHLRIAFNYSGGSNAEADFDLVMDAEAAAGELSKKFVQGHVASTKCESGEPPTIYFVGAFFVLTMPLPER

SEQ ID NO: 2813 - protein, 538 aa, Unknown
  Description of Unknown: Integrase B2814 sequence
  PTHR30461:SF3,IPR036162,PS51737,IPR011109,PTHR30461, PF00239,G3DSA:1.10.10.2600,IPR006119,PF14287,SSF53041, IPR025378,SM00857,IPR025827,cd03770,IPR038109, PS51736,PF13408,G3DSA:3.40.50.1390,PF07508,Coil
MQENYIVGIYARLSRDDERAGESVSIENQKEMLSRYVREQGWTLYDYYCDDGVSGTTFDRPGLNRLVQDATDHKINLVLCKDLSRLGRDYIEAGKYTDFVFPSLGCRFIALNDGVDTLRKNNEMLVILKNVMNDLYARDTSSKIKAVKLSTFKSGKYVGCYAPLGYKKSEADKHVLEIDPVTASVVRHIFDLRLQGYGFRKIALQLNAEKVPAPRSFYYMAKGRESLRGETPFWNDVTVKTILRNEVYIGHMVQNKTGTVSYKNHKQVSKPESEWIKVENTHEPLISQETWDAVQRMDNHPARGRSGKSGTIALFGGLLRCMDCGSSMRYMRDYRKKVSEKEPEYKAYVCNRYASGGKNACSSHYINQKVLTQIVMTDIRCKAMWAQNSRETLRTQLLAREQNASAERTRTLQAELNAIGKRLPELDKLIQSAYEDKVLGRIPESVCVNLLNQYEAERREKQERCKELTEQLAASRETESSVDAWLDMMQDYAQLEELDRPTLVRLIQKIEISERYTVDDHEERDIHIYYNFVGYIEA

SEQ ID NO: 2814 - protein, 538 aa, Unknown
  Description of Unknown: Integrase B2815 sequence
  PTHR30461:SF3,IPR036162,PS51737,IPR011109,PTHR30461, PS00397,PF00239,G3DSA:1.10.10.2600,IPR006119,SSF53041, cd00338,SM00857,IPR025827,IPR038109,PS51736, IPR006118,PF13408,G3DSA:3.40.50.1390,PF07508,Coil
MAKKVTVIKAAKAQKHTQEERRLKVCGYARVSTGSQAQATSYTAQVEYYTEKIESNPLWEFAGVYADEGISGTNVKHRDEFQMMISDCEDGNIDLILTKSITRFARNTVECIQTIRKLKEIGVGIYFEKENINTLSEKSELFITILASVAQGESENISSNNRWAIQKRFQDGTYIISTPAYGYGKDEDGNLVIIESEAETVRWIYESYLNGMGVYVIAKALNQKGIPTIRGAEKWQDGVIQDILKNPIYEGDMLQQRTYTETRFPFVRRVNNGQRNQYLIKDSHPPIVTHEEAEAVRNLMAYRVDVLHMNKSDYTKRYLFSGRIICGECGRTFRRQKIYIGKPYEKIIWTCSGHVEDKERCCLKAIREDVLHRAFTDMWNKLYTNQGTILEPLLKELTELVAARQDSEEIRQLDKEIKDISGQSQILNQVMRKGYMDSALFMESSSKLGWQLTECRRKKTLLTRKLRRTKEIVRTEQLIQLIAEQDGLMEEFDEQLFKMTAEKIVVSKEHDITFCLYNGLKLTERGGGQDAVAHANRL

SEQ ID NO: 2815 - protein, 538 aa, Unknown
  Description of Unknown: Integrase B2816 sequence
  cd03768,PTHR30461:SF3,SM00857,G3DSA:1.10.10.2600,IPR036162, PF13408,PS51737,G3DSA:3.40.50.1390,IPR025827,IPR006119, IPR038109,PF07508,IPR011109,SSF53041,PTHR30461, PS51736,Coil,PF00239
MNIAIYSRKSKFTGKGESIENQIEMCKEYIDLHYPNEKHFISVFEDEGFSGKNLNRPQFQEMMSIENQKPFDLIVVYRLDRISRNVGDFATLVDKLNQKNTSFICIKEQFDTSTPMGRAMMNIASVFAQLERETIAERVKDNMYMLAKSGKWTGGTTPLGYKSVKVNNGDKSYFVLDFDENQIDLVKLIFNKYSEINSVNGVETYLRENGYKTQKGNEWNGSNLKRILINPIYCIADKDSIEYFTKLGSVVCFDLSDCNGENGILPYNRFAGQKRTIQSPEKWVITVSKHKGILTGKEWIRIQELIKQNSSNCFGGKPSTRRTINPKSILSGLLYCSCGAYMRPKIYPSGNMYYLCERKANTKKQECQVKNVNGDDLDKLILDEIFAYDVKERSVYNQLQALKGRINSINNELDVVISRLENKKAENAKRIKNLTYVISQSIEMGTAQEVINIYNEQINELIAENKNISIRINELLNSDFLRSEMTNNLNNISEAINYLRNNFDKLSIQNKREFMKKIIDKVIWDGNEAHIFIKGISD

SEQ ID NO: 2816 - protein, 538 aa, Unknown
  Description of Unknown: Integrase B2817 sequence
  PTHR30461:SF3,SM00857,G3DSA:1.10.10.2600,IPR036162,PF13408, PS51737,G3DSA:3.40.50.1390,IPR025827,IPR006119,IPR038109, PF07508,IPR011109,SSF53041,PF00239,PTHR30461, PS51736,Coil,cd00338
MTAVIYARYSSDNQREESIEGQIRECTAYAEKNGITIVKHYIDRAISAKTDNRPEFQQMIKDSDKKLFDIVLVWKLDRFARNRYDSARYKTQLKKNGVKLMSATEIISEGPEGIILESVLEGYAEYYSADLAEKVVRGQTENILKGRCNGGRGTFGYTLDSERKFHIDPLTSPFVLESFRKYNEGSTMKEIRDWLNENGIKNPVGGAFTYNSVEHMLKNRRYIGELKFRDVVVPDAIPPIVPLELFDDVQEKIAKNKKAPARRKAEDDYLLTTKLFCGYCGVLMFGESGTSRTGEVHRYYKCATAKKHKGCKKKTVRKQWLEDLVVNQTMQLVKDDAAMESIIAKVMELQNKENTNIPLYEKQLRDAESGIQNMLNAIQAGILTSSTKERLEQLEETKRELEARIAEEKLAKPKVTEEFIRFWLLRFRKLDMSLKDQRQALVDTFINAIYLYDDKVLITFNYKEGTQTVTFGEATEVASEGNGSDLDCFTAPENIHEMSMKNRCFVDFLLSAFIGYCAILSAFAGYFVVRIVVRKSRP

SEQ ID NO: 2817 - protein, 538 aa, Unknown
  Description of Unknown: Integrase B2818 sequence
  PTHR30461:SF3,cd00338,SM00857,G3DSA:1.10.10.2600,IPR036162, PF13408,PS51737,G3DSA:3.40.50.1390,IPR025827,IPR006119, IPR038109,PF07508,IPR011109,SSF53041,PTHR30461, PS51736,Coil,PF00239
MARKKNIAAGLDAVIYARYSSHNQREVSIEQQIAECTKHAAALGLRIVGTYEDRAISGKTDNRPRFQQMMRDAEKGKFQAVVAWKSNRIGRNMLQAMVNEAKLDDYGVKVFYAEEDFDDTAAGRFALRNMMNVNQFYSENMAEDITRGLYDNANKCMANGRQPLGYKRGADGKVMLDEPAAAVVREIFTRVATGDLFVDIARDLNAKGIKTSKGAAWNKGSFQSICQNERYKGIYIYGNVRIVDGIPRIVSDELWYRVQEAMRMKKNPVGTRHRVGAEDYLLTGKLRCGHCGSYMTGVSGTSRNGELHYYYTCQKRRTEHACNKKNVRRDVIEPAIAQAIKMYCLTDDVIEWVADRTVEYWEKHDNDLHIEALEQQLEENKKATSNMLKAIEMGIITDATRSRMIELETEQSKLAVQLNAAKADVVKIDRDDLIDELQIFRDMDVNNRSVQAELFKDFLVAAYLYDDNRLKLVFSFMGKEKNVEIPLETGEDPPDGGDSPDTKMFVFAPDCSTRNEKHYTEMCGAFLFYLPFTLRSLS

SEQ ID NO: 2818 - protein, 538 aa, Unknown
  Description of Unknown: Integrase B2819 sequence
  PTHR30461:SF3,SM00857,G3DSA:1.10.10.2600,IPR036162,PS51737, G3DSA:3.40.50.1390,IPR006119,IPR038109,PF07508,IPR011109, SSF53041,PF00239,PTHR30461,PS51736,Coil, cd00338
MSIIVCVFIYNYSTLYTERKGAVMKNDIIKDFIEWLKKENLELINNNATSIVAVYIRVSTDKQEELSPMSQLKEVYKYATSHNMQIDLDSIFLEEEGISGRKAEKREAFKEMISIAKSNSKKFNAILVWKYSRFARNQEESIVYKSMLKKNNVDVISISEPLIDGPFGSLIERIIEWMDEYYSINLSGEVIRGMTEKASKGEPQTAPPFGYDIKDNLFIPNSIEAPIVQFIYEKYGSGAMEMINIAKYLNQHHFVTKRGKRFENRTIWYILTNPVYIGKLRWTPNGKLTREEIYDNTKSIIVKGKHQPLVSEEMFNQVRERLSQQRKFSVKRQRVTSAPHHWLKGLIRCGSCGCTFVRSNSRLRCNGSCKGACECSTTLKIEDVEKLVLERLKIESKSCVKINIMKKEKKTNSEKSEIKILEKQLDLSNEKKKRIKIAFESGIDSIDEYKENKIRINNEIEELNKKIESLKNKNYNDSTIKNKIQENMNNVYNILTNADIDMKKKYDISHFLINKIVYDEENNNLTLYYNELVDALKI

SEQ ID NO: 2819 - protein, 538 aa, Unknown
  Description of Unknown: Integrase B2820 sequence
  cd00338,SM00857,G3DSA:1.10.10.2600,IPR036162,PF13408, IPR025827,G3DSA:3.40.50.1390,PS51737,IPR006119,IPR038109, PF07508,SSF53041,IPR011109,PTHR30461,PS51736, Coil,PF00239
MLASNVKVIQPRKLFNIEESARQLLRVAGYARVSTGRPEQKTSFESQQKHYKELVAKHSDWIDVGLYADEGITATSMRKRKQFLKMIQDAKEGKIDRIIVKSVSRFARNTVDCLATVEELTALGVDVFFELQNLSSLQDSKTTRMQLTMYASMAQEESETLSESVAYGIREGIKNGRYRAPKAYGYRLDENKRLVIDPEQAEVIMFIYNTFLQGYTVGQICAMLNAREIPAPRGGVWYDSTVDGILKNEKYIGDLRLEKTVSTDLKTRRRVPNINGQQFYVTNNHEGILAERMFKRVQAEIEYRQNLRGYSGSGKSAYTTKYPFSNKLFCGRCGSKYRRHSYDLKRKDENGNPKIEKVYTWVCINHKLNKKTACPQTQVKESSLEKAFIAALNTIIEDQDGFVKTVIANISEVLNTRLSEAALEGNRGRYEAKQKELQNVLANSLKSPTAENARLYERLVQELESLKLKIETEEGERSKTLMSKTRAVELEQFINSSKLFHEFDEMVFRKLVERVIVNEDSVTFKFTDFLEREVPLIE

SEQ ID NO: 2820 - protein, 538 aa, Unknown
  Description of Unknown: Integrase B2821 sequence
  PTHR30461:SF3,SM00857,G3DSA:1.10.10.2600,IPR036162,PS51737, G3DSA:3.40.50.1390,IPR006119,IPR038109,PF07508,IPR011109, SSF53041,PTHR30461,Coil,PS51736,cd00338, PF00239
MKENILRVAAYARVSTDKEDQTNSLLSQRSYFADYITHHEGWQLSEVYYDEGISGTQIKKRSGFKKMIQDALNGEVDLIITKEVARFARNTVDTLSYTRKLKSAGVGVIFTIDNIDTRDADGELRLTIMASIAQEESRKTSERVKWGQKRQMEKGVVFGRDLLGYTVQNGQLHINEEEVPIVQAIFHKYTNEGKGTWTIANELLAEGMRPKRIALWSNVVILRVLRNEKYVGDLCQKKTYTPDYLTHSKKYNRGEEEMVYLKEHHEPIIDRDLWNRTQEELKRRSPSEEQKSKHSNRYWCSGKIHCAECGCRYVSRTKKLMSGDVYKAWRCYAAANHGTKKQDADGNEIGCNNSSINDRSLKTCMNYCITLVQGERDSLKKEILKEISQLQKTTAKKLDSKKIKKKIDNLEMKKRKAIDLMLDGLISKEDLQSQTEWYNEELEKLNIQLSDALQKDKSDSRQVNHMEKYIKALDEIMELDSDSEDVYKEVLDHMEIHKGNIVDVWLKSIPIGIRLKVKATGKGEYFKTEILETSFIEK

SEQ ID NO: 2821 - protein, 538 aa, Unknown
  Description of Unknown: Integrase B2822 sequence
  PTHR30461:SF3,SM00857,G3DSA:1.10.10.2600,IPR036162,PF13408, PS51737,G3DSA:3.40.50.1390,IPR025827,IPR006119,IPR038109, PF07508,SSF53041,IPR011109,PTHR30461,Coil, PS51736,cd00338,PF00239
MSTAPNVTIIPAKIQTAENRDKYHQLKVAAYCRVSTEQEEQQNSYQVQIAYYTDLINRKKEWTLAGIFADEGISGTQTKKRTEFNRMIRMCKNKKIDLVITKSISRFARNTVDCLEYVRQLKDLGIGVIFEKENINTLTMTSEFMIALYGSFAQAESESISKNVSWGKEKAYREGKVQFQYKYLLGYKKGEDGKPEIVPEEAETVRLIYTLFLDGYSMNRIKKLLENKGILTSQGKKVWNESLIRSILKNEKYVGDALLQKTFTSDCITHKVVKNHGERPMYLVTDHHEPIIDRDTYNRVQQELARRSSKRKVSDKTVTEQGKYSSKYALTELLICGHCGTPYRRTTWAARGKKQIVWRCISRLEHGKKYCPDSPTIKEEQLHKAIIYAINNYYSCRNDIARILKTNIGSVLECQGQEEIIAVENRLKEIDQARNDLVGLIASGGCDEDKLDSEFAKLYQEEQQLSERLETLKSQNKTSQQTQDKLDKIIDMIEHENFELETFDNVLIRKLIECVKVLSKTEILVIFKGGYEVKAEIE

SEQ ID NO: 2822 - protein, 538 aa, Unknown
  Description of Unknown: Integrase B2823 sequence
  PTHR30461:SF3,cd00338,SM00857,G3DSA:1.10.10.2600,IPR036162, PF13408,PS51737,IPR025827,G3DSA:3.40.50.1390,IPR006119, IPR038109,PF07508,IPR011109,SSF53041,PTHR30461, PS51736,Coil,PF00239
MARKKNIAAGLDAVIYARYSSHNQREVSIEQQIAECTKHAAALGLRIVGTYEDRAISGKTDNRPRFQQMMRDAEKGRFQAVVAWKSNRIGRNMLQAMVNEAKLDDYGVKVFYAEEDFDDTAAGRFALRNMMNVNQFYSENMAEDITRGLYDNANKCMANGRQPLGYKRGADGKVMLDEPAAAVVREIFTRVAAGDLFVDIARDLNAKGIKTSKGAAWNKGSFQSICQNERYKGIYIYGNVRIVDGIPRIVSDELWYKVQEAMRMKKNPVGTRHRVGAEDYLLTGKLRCGHCGSYMTGISGTSRNGELHYYYTCQKRRTEHACNKKNVRRDVIEPAIAQAIKMYCLTDDVIEWMADQTVQYWEKHDNDLQIEALEQQLAENKKATSNMLKAIEMGIITEATRSRMVELETENSKLTAQLSAARRDVVKINREDLIDELHILRSKDIHDREVQAELFKDFLVAAYIYDDNRLKLVFSFMGKDNSVEIPLETGEDPPDGEDSPDAKMFVLTPDCSTRNEKHYTEMCGAFLFYLPFTLRSLS

SEQ ID NO: 2823 - protein, 538 aa, Unknown
  Description of Unknown: Integrase B2824 sequence
  PTHR30461:SF3,cd00338,SM00857,G3DSA:1.10.10.2600,IPR036162, PF13408,PS51737,G3DSA:3.40.50.1390,IPR025827,IPR006119, IPR038109,PF07508,IPR011109,SSF53041,PTHR30461, PS51736,Coil,PF00239
MCAKKKPAMLEPDMQDAVIYTRYSSHNQRDCSIEQQVADCEIFARQNNLRVVKVYADRHLSGTTDNRPQFQQMLKDASHGHWAYVICWKIDRFARNRYDSATYKFRLKKAGVRVLYAKESIPDGPEGILLESVLEGSAEYYSAALAQNIRRGMKYNAEQCKVNSGSIPFGYCKGPDGRFAIHEANAEVVREIFRKAAAGMPFVDIANDLNSRGLKTSRGGRWNKGSFRLLMNEAYIGVYHFSDTRIEGGMPALIDQGTFWAANERLKANSSVRGRHQDGGDYLLTGKLKCAHCGSYMIGFSGTGKSGELHYYYGCQKRRRERACKKANVPREWIERVVVKAALDYVLRPDVMEWIADAVMEYQEREAASAQLAALTAELEENQKATDNVMKAIEAGIITSTTKQRLLDLEAKAQDLKRAIELEKLSHVRLERDQVLFWLDRFRGGSLQSQEFRRKVIDAFVSVVYLSDDHLRIAFNYSGGSNAEADFDLVMDAEAAAGELSKKFAQGHVASTKCEPGEPPTIYFVGAFFVLTMPLPER

SEQ ID NO: 2824 - protein, 538 aa, Unknown
  Description of Unknown: Integrase B2825 sequence
  SM00857,G3DSA:1.10.10.2600,IPR036162,PF13408,IPR025827, G3DSA:3.40.50.1390,PS51737,IPR006119,IPR038109,PF07508, IPR011109,SSF53041,PTHR30461,PS51736,cd00338, PF00239
MAKYKQVVQEQIGVIYARYSSSGQRDESIEGQLRDCHAFAERYNIRIIEEYCDRAMTGTSDRRPEFQRMIRDSSKGQFNVVITWKNDRFARSRYDSAVYKAKLKQNGVRLLYAKESIPDGPEGIVLESVMEGFAEYYSANLSQNVKRGNYDSALKRQTLGQTVFGLRKGVDKRFEIDPATGPVVQRIFKEYAAGQSAVSIYTALNEEGFRTLRGNPFNKNSIRKILQNEKYVGVYEYADIRDEHGIPALVSRETFDRVQIMLEKHHRSPAAKKDAGGFLLTTKLFCGLCGEPMTGDCGTGKSGTVYSYYICNGRRAKKCKKERVSKEWIEDVVVAALAEVVNNDEMINAFADHFIAWQATQQKGSAVADLEQRIKQIDTAIRNTMSVIDSGLITESLKTHLLELESEKTALADALAKKRLDTIELDRETVIWFLERFRTADQSDPGWRIYIVETFLQAVYLYDDGRLLLRLNYGGKNNEVSLKAVEETVAEGEQLSSMFEFRVPRRTKNNLCRKAKVIFYVCGKKQHCFVENGPTLPI

SEQ ID NO: 2825 - protein, 538 aa, Unknown
  Description of Unknown: Integrase B2826 sequence
  PTHR30461:SF3,SM00857,G3DSA:1.10.10.2600,IPR036162,PF13408, PS51737,IPR025827,G3DSA:3.40.50.1390,IPR006119,IPR038109, PF07508,IPR011109,SSF53041,PTHR30461,PS51736, cd00338,PF00239
MSTAPNVTVIPAKVQTAESRDKYHQLRVAAYCRVSTELEEQQNSYQVQIAYYTDLINKKKEWTLAGIFADEGISGTQTKKRTEFNRMIRMCRNKKIDLVITKSISRFARNTVDCLEYVRQLKDLGIGVIFEKENINTLTMTSEFMIALYGSFAQAESESISKNVSWGKEKAYREGKVQFQYKHLLGYKKGADGKPEIIPEEAETVKLIYTMFLDGHSMKNIALILHVKGIHTKTGSTEWRTNTITRILQNEKYVGDALLQKTFTSDCITHKVVKNHGERPMYLVTNHHDPIIDRDTYNRVQQELARRNSKRKISDKTVTEQGKYSSKYALSELLICGHCGTPYRRTTWAARGKKQIVWRCLSRLEHGKKYCPDSPTIKEEQLHRGILRAINNYYSCRNDIVRILKANIGSVLECQGQEEILSVEKRLKEIDQARTDLVNLIASGGCDEDKLDSEFAKLYAEEQGLSERLTMLKSQNKTSEETQAKLDKIMDMIEHEKFELETFDNVLIRKLIECVKILSKTEILVIFKGGYEVRTEIE

SEQ ID NO: 2826 - protein, 538 aa, Unknown
  Description of Unknown: Integrase B2827 sequence
  PTHR30461:SF3,SM00857,G3DSA:1.10.10.2600,IPR036162,PS51737, G3DSA:3.40.50.1390,IPR006119,IPR038109,PF07508,IPR011109, SSF53041,PTHR30461,Coil,PS51736,cd00338, PF00239
MKENILRVAAYARVSTDKEDQTNSLLSQRSYFADYITHHEGWKLSEVYYDEGISGTQIKKRSGFKKMIQDALNGEVDLIITKEVARFARNTVDTLSYTRKLKSAGVGVIFTIDNIDTRDADGELRLTIMASIAQEESRKTSERVKWGQKRQMEKGVVFGRDLLGYTVQNGQLHINEEEVSIVQAIFHKYTNEGKGTWTIAKELLAEGMRPKRIALWSNVVILRVLRNEKYVGDLCQKKTYTPDYLTHSKKYNRGEEEMVYLKEHHEPIIDRDLWNRTQEELKRRSPSEEQKSKHSNRYWCSGKIHCAECGCRYVSRTKKLMSGDVYKAWRCYAAANHGTKKQDADGNEIGCNNSSINDRSLKTCMNYCITLVQGERDSLKKEILKEISQLQKATAKKVDSKKIKKKIDNLEMKKRKAIDLMLDGVISKEDLQNQTEWYNEELEKLNIQLSDALQKDKSDSRQVNNMEQYVKALDEIIELDGNSEDVYKEVLDHMEIHKGNIVDVWLKSIPIGIRLKVKATGKGEYFKTEILETSFIEK

SEQ ID NO: 2827 - protein, 538 aa, Unknown
  Description of Unknown: Integrase B2828 sequence
  PTHR30461:SF3,cd00338,SM00857,G3DSA:1.10.10.2600,IPR036162, PF13408,PS51737,G3DSA:3.40.50.1390,IPR025827,IPR006119, IPR038109,PF07508,IPR011109,SSF53041,PTHR30461, PS51736,Coil,PF00239
MCAKKKPAMLEPDMQDAVIYTRYSSHNQRDCSIEQQVADCEIFARQNNLRVVKVYADRHLSGTTDNRPQFQQMLKDAAHGHWAYVICWKIDRFARNRYDSATYKFRLKKAGVRVLYAKESIPDGPEGILLESVLEGSAEYYSAALAQNIRRGMKYNAEQCKVNSGSIPFGYCKGVDGRFAIHEANAEVVREIFRKAAAGMPFVDIANDLNSRGLKTSRGGRWNKGSFRLLMNEAYIGVYHFSDTRIEGGMPALIDQGTFWAANERLKANSSVRGRHQDGGDYLLTGKLKCAHCGSYMIGFSGTGKNGELHYYYGCQKRRRERACKKANVPREWIERVVVKAALDYVLRPDVMEWIADAVMEYQEREAASAQLAAMTAELEENQKATDNVMKAIEAGIITSTTKQRLLDLEAKAQDLKRAIELEKLSHVRLERDQVLFWLDRFRGGSLQSQEFRRKVIDAFVSVVYLSDDHLRIAFNYSGGSNAEADFDLVMDAEAAAGELSKKFAQGHVASTKCESGEPPTIYFVGAFFVLTMPLPER

SEQ ID NO: 2828 - protein, 537 aa, Unknown
  Description of Unknown: Integrase B2829 sequence
  PTHR30461:SF3,IPR036162,PS51737,IPR011109,PTHR30461, PF00239,G3DSA:1.10.10.2600,PF14287,IPR006119,SSF53041, IPR025378,SM00857,IPR025827,cd03770,IPR038109, PS51736,PF13408,G3DSA:3.40.50.1390,PF07508,Coil
MLRQTTQNLITALYPRLSHEDELQGESNSISNQKRILETYAKQNGFTNLCWYTDDGYSGANFQRPGFQAMLADIEAGKVGTVIVKDMSRLGRNYLQVGMYTEMLFPQKGVRFIAINDGVDSAMGDNDFTPLRNLFNEWMVRDTSKKIKAVKKAKGLSGKPVTSKPVYGYLMDDDENFIIDEEAAPVVKQIYQLCLAGNGPTKIARMLTEQQIPTPGTLEYQRTGSTRRYHPGYECKWATNTVVHLLENREYTGCLVNFKTEKPSYKMKHSIDNPIEKQAIFENHHEPIIDLQTWERVQELRKQRKRPNRYDDVGLFSGLLFCADCGHVMYQQRYQTDKRKQDCYICGSYKKRTADCTAHFIRTDLLTAGVLDNLRKVTAYAQKHEARFVKLLIQQNEMGGKRKLAAAAKQLEQVQSRIAELSRYIKRLYEDNVNGKISDERFMEMSADYEAEQRELKDRAAALQGELDKAQEATVNAEKFMSVVRKYLSIEELTHTLLREMVEKIVVYECEYDENEVRRQRIDIYYSFVGKIDLPEE

SEQ ID NO: 2829 - protein, 537 aa, Unknown
  Description of Unknown: Integrase B2830 sequence
  PTHR30461:SF3,SM00857,G3DSA:1.10.10.2600,IPR036162,PF13408, IPR025827,G3DSA:3.40.50.1390,PS51737,IPR006119,IPR038109, PF07508,IPR011109,SSF53041,PF00239,PTHR30461, PS51736,Coil,cd00338
MAKKKKPAGGIAVIYARYSSHNQRDVSIEQQIEACRKHAAELGLTIIATYEDRAISGRTDNRPAFQRLMHDAEKGKFSYVLAWKSNRMGRNMMQAMVNESRLMDCGIKVYYAEEDFDDSAAGRFALRSMMNVNQFYSDNLAEDVRRGLMDNANKCMVNGRQPLGYKRGKDGKVVVDEPAAAIVREVYARVASGELFTDIARDLNRRGIKTADKGEWNKNSFHRLCSNEKYRGIYIYGDVRIEGGIPTIIDDTLWYKVQEALRVKKLKRNGRHRPGDEDYLLTGKLRCGKCGGYMIGMSGRSKTGDIHYYYACQNRRVGRTCDKKNIRRDVIEPAVAQAIKEYCLTDDAIEWIADKTVEYWEKADRNLQLDSIEGDLAAVQSSISNVMKAIEMGVVTETTRDRLIELEKQRTDLKSKLALAKEEVVHVDRKKLISSLLLFRNGDIHDRQYQEDLFKTFLISVYVYDDDDNGHLKIVFNAFGDNNTVDLPIDFGETDNQSAFSDGAEKFDYSLHRSTRTKPSDEQSGGFSVLFSADFTQ

SEQ ID NO: 2830 - protein, 537 aa, Unknown
  Description of Unknown: Integrase B2831 sequence
  PTHR30461:SF3,cd00338,SM00857,G3DSA:1.10.10.2600,IPR036162, PF13408,PS51737,G3DSA:3.40.50.1390,IPR025827,IPR006119, IPR038109,PF07508,IPR011109,SSF53041,PTHR30461, PS51736,Coil,PF00239
MAKRKFNKGGEVRLVAYYRYSGGSGQTEQSIEGQRRDCETYARLHNMTIQKEYVDRHISGKTDDRAAFQQMITDSDKGAFDMVICWKTDRFARNRYDSAVYKKRLRDNGVEIVYAAESNIAGAEGIIIEGVMEALAEYYSAELAEKMRRGMRESALKGQAISRCRALGLKTDEHKRFVIDEKTAPTVRFIFEHYAAGESATSIVDKLNAKGLRTSQGNPFNKSSIPRIIQNEAYRGVYVSKSYDVRIEGAIPAIIDDELWERAQTMLKLNRQLKAKNEPKADYILSGKLYCSCGSLMRGMSGHSATGEVYRYYTCPNKNCHLRNIPKDDLEGKVMQSISDHLLQPEAMEALAEAMVEVQKADAEKPNAERVAIEQSLADVRRRSKNILDAIENGTANAQLCARLDDLSEQERTLNFQLSALEKEKPVVFTKEQYLFLLEQFLVEPSERTPEYGRRLVNTFVTSMVVSDRELVINFNVSDETVNKNKKTSQTNLQKESSSGMRLVHLAHQQANYSLYAASGYFSLVEHQFSARLWRTA

SEQ ID NO: 2831 - protein, 537 aa, Unknown
  Description of Unknown: Integrase B2832 sequence
  PTHR30461:SF3,cd00338,SM00857,G3DSA:1.10.10.2600,IPR036162, PF13408,IPR025827,G3DSA:3.40.50.1390,PS51737,IPR006119, IPR038109,PF07508,SSF53041,IPR011109,PTHR30461, PS51736,Coil,PF00239
MNVVLYMRYSSDRQTEQSIEGQKRVCMDFCERQGYNVVGEYIDRATSAYKETAKRTNFCRMIRDSSNGLWQGVVVYKLDRFARNRYDSATYKVRLKKNGVKVISATENISDSPEGVILESVLEGMAEFYSKELSQKVSRGLNESAHKCNSTGGAIPLGYKTVDKKLTVDEPSAQIVKEAFDLYAGGATISEICEKFNSQGYRTKKGTEFNKNSFKSMFRNEKYIGTYTYKDIRIEGGIPAIIDKKTFETVQKKLSANAQAPARGKARVNYLLSQKLFCGHCGANMIGESGRSKTGETYYYYSCSTRKRFHSCKKRTIRKDLIERIVAKNAMRLITPEMINTIADMAIKCNREDIESDAIIPALTADLKEINTSIKNLLKMVERGVESETLDSRLKELEKRKKDTESRLDAAKSEYLTLDKTVIVGWLSQFLSGDIEDEDFRRHLIDTLINSVTVWDEPDGGYKITTVYNLKGNTQTYRVNADGSSDMKRNSPPKKRQFSCEDCRFFLFCMFSFRFSFFDLKDNGQEKNYAETGFCHR

SEQ ID NO: 2832 - protein, 537 aa, Unknown
  Description of Unknown: Integrase B2833 sequence
  PTHR30461:SF3,cd00338,SM00857,G3DSA:1.10.10.2600,IPR036162, PF13408,PS51737,IPR025827,G3DSA:3.40.50.1390,IPR006119, IPR038109,PF07508,SSF53041,IPR011109,PTHR30461, PS51736,Coil,PF00239
MAKRKFNKGGEVRLVAYYRYSGGSGQTEQSIEGQRRDCEAYARLHNMTIQKEYVDRHISGKTDDRAAFQQMIADSDKGAFDMVICWKTDRFARNRYDSAVYKKRLRDNGVEIVYAAESNISGAEGIIIEGVMEALAEYYSAELAEKMRRGMRESALKGQAISRCRALGLKTDEHKRFVIDEKTAPTVRFIFEHYAAGESAMSIVEQLNAKGLRTSQGNPFNKSSIPRIIQNEAYRGVYISKSYDVRIEGAIPAIIDDELWERAQTMLKLNRQLKAKNEPKADYILSGKLYCSCGSLMRGMSGHSATGEVYRYYTCPNKDCHLRNIPKDDLEGKVMQSIVDHLLQPESMEALAEAMVEVQKADVEKPNAERVAIEQSLSDVRRRSKNILDAIENGTANAQLCARLDDLTEQEQTLSFQLSSLEKEKPVVFTKEQYLFLLEQFLMEPSERTPEYGRRLVNTFVTSMVVSGRELVINFNVSDETVNKNKKTSQTNLQKESSSGMRLVHLAHQQANYSLYAASGYFSLVEHQFSARLWRTA

SEQ ID NO: 2833 - protein, 537 aa, Unknown
  Description of Unknown: Integrase B2834 sequence
  PTHR30461:SF3,cd00338,SM00857,G3DSA:1.10.10.2600,IPR036162, PF13408,IPR025827,PS51737,G3DSA:3.40.50.1390,IPR006119, IPR038109,PF07508,SSF53041,IPR011109,PTHR30461, PS51736,Coil,PF00239
MAKKKKPAGGIAIIYARYSSHNQRDVSIEQQIEACRKHATELGLTIIATYEDRAISGRTDNRPAFQRLMHDAEKGKFSYVVAWKSNRMGRNMMQAMVNESRLMDCGIKVYYAEEDFDDSAAGRFALRSMMNVNQFYSDNLAEDVRRGLMDNANKCMVNGRQPLGYKRGKDGKVVVDEPAAAIVREVYARVASGELFTDIARDLNRRGIKTADKGEWNKNSFHRLCSNEKYRGIYIYGDVRIEGGIPTIIDDTLWYKVQEALRVKKLKRNGRHRPGDEDYLLTGKLRCGKCGGYMIGMSGRSKTGDIHYYYACQNRRVGRTCDKKNIRRDVIEPAVAQAIKEYCLTDDAIEWIADKTVEYWEKADRNLQLDSIEGDLAAVQSSISNVMKAIEMGVVTETTRDRLIELEKQRTDLKSKLALAKEEVVHVDRKKLISSLLLFRNGDIHDRQYQEDLFKTFLISVYVYDDDDNGHLKIVFNAFGDNNTVDLPIDFGETDNQSAFSDGAEKFDYSLHRSTRTKPSDEQSGGFSVLFSADFTQ

SEQ ID NO: 2834 - protein, 537 aa, Unknown
  Description of Unknown: Integrase B2835 sequence
  PTHR30461:SF3,SM00857,G3DSA:1.10.10.2600,IPR036162,PF13408, PS51737,G3DSA:3.40.50.1390,IPR025827,IPR006119,IPR038109, PF07508,IPR011109,SSF53041,PTHR30461,Coil, PS51736,cd00338,PF00239
MPKVTMIPATINPLTHLPKETTQKRRVAGYARVSTDSDEQFTSYEAQVDYYTKFIQSKPEWDFVKVYTDEGISGCNTKHRDGFKEMISDALAGKIDLIVTKSVSRFARKTVDSLVTIRKLKENGVECYFEKEGIYTFDGKGELLITIMSSLAQEESRSISENITWGQRKSFADGKIHLAYKHFLGYEKGEDGRPTVVEKEAVVVRLIYRLFLDGKTQAGICRHLESLGIPSPSGKEKWSKTTVTSILTNEKYKGDALLQKSFTVDFLEKKTKPNEGEVPQYYVEGSHPAIIDPDEWDHVQAEFNRRKALGNAYSGKSIFSAKLVCEDCGAFFGSKVWHSTDQYRRTIWQCNNKFKNKERCQTPTVDTETVQRLFIKAYNQMMCDRQQIVNDCEAMRRTLTDFKSLDDDVERQLEETQVIAELVKAIVKENATTAQSQETYIKKYEALTKRYDTAAAELKRLQELRASRSQKDKSMALYIRTLKKQPTVLHEWNDTIWTVMVEKAIVHRNGEITFVFYNGTKIRVGELNNRAAGLLIF

SEQ ID NO: 2835 - protein, 537 aa, Unknown
  Description of Unknown: Integrase B2836 sequence
  PTHR30461:SF3,cd00338,SM00857,G3DSA:1.10.10.2600,IPR036162, PF13408,IPR025827,G3DSA:3.40.50.1390,PS51737,IPR006119, IPR038109,PF07508,IPR011109,SSF53041,PTHR30461, PS51736,Coil,PF00239
MYEDIKTACLYVRFSSHNQTEQSIEGQTRVCRDFCKRHNIRIVEIYADRATSASKDIEKRVQFLKMIKDSERGLFDAVIVYKLDRFARSRYDSATYKYRLKRNGVQLISATENISNDPEGIILESVLEGMAEFYSAELSQKINRGMRESAYKHNSIGGAIPLGYKIEDKKLVIDPKTAPIVKEAFEKYADGETVAEICRQFNARGYKTSKGTAFGKSSFTKIFRNERYIGVYTFHDYRAEDAIPAIIDKDLWDRVQLRVGKIKNAPARNKAKVVYLLSGKIFCGHCGSKMNGNCNAGNYCYYQCYGKKNGNVDCKKKNIRKEFIERLVAQDALSLLTDEYVEQIATIACEKNQHEIELDSALPTIRDRIHQVDLSLNNLLKAIESGSAPDMLVKRMGELEKEKKDLQAQAKKESEDIIELDKAQVIYWLEQFRGGSIEDEEFCRMLIDLFVNSVTVWDEDDNTYKVTVAYNLTSLPTKTYRLNKGGTLSDFASNAPDRKSQDNGIIFFNMSICICDLWTDLLIAHLHAASGFLIHPV

SEQ ID NO: 2836 - protein, 537 aa, Unknown
  Description of Unknown: Integrase B2837 sequence
  PTHR30461:SF3,SM00857,G3DSA:1.10.10.2600,IPR036162,PF13408, PS51737,IPR025827,G3DSA:3.40.50.1390,IPR006119,IPR038109, PF07508,IPR011109,SSF53041,PF00239,PTHR30461, Coil,cd00338
MTENKNRVCCLYRVSTDKQVDFNSNHEADLPMQRKACHKFAEAKGWVIVHEEQEEGVSGHKVRAEARDKLQIIKEYARKGKFDILLVFMFDRIGRIADETPFVVEWFVRNGIRVWSTQEGEQRFDNHTDKLLNYIRFWQADGESEKTSVRTRTSLRQLVEEGHFKGGSAPYGYDLVKSGRINKRKHELYELHINEQEAEIVRLIFDKYVYEGYGAQRIATYLNNAGYRARSGKCWHPGSLRGMVGNLTYMGVLRCGDARSELMPELQIIPQEEFEAAQRIREDRSAHAAEEAEHHVPLRTRGQALLSNNVYCGHCGARLALTTSRKWRKLSDGTLDDTLRIRYTCYGKLRKQTDCTGQTGYTMHILDEIIDKMVRQIFSRLRGIPKEQLITSRYAKETAERKNHLQALQAERDKAEKDLLALKTEILAVIKGESAFPKDTLAEMIAAQEKKHTELETLCEEASAELERNAELMANVSQLYEELISYADLYDSASFEAKKMIVSQLIRRVEVYRGYQIHVDFNFDLAQYLENSDELAC

SEQ ID NO: 2837 - protein, 537 aa, Unknown
  Description of Unknown: Integrase B2838 sequence
  IPR036162,PS51737,IPR011109,PTHR30461,PF00239, G3DSA:1.10.10.2600,IPR006119,PF14287,SSF53041,IPR025378, SM00857,IPR025827,cd03770,IPR038109,PS51736, PF13408,G3DSA:3.40.50.1390,PF07508,Coil
MSDTNKITALYCRLSHEDELAGESNSISNQKDILQKYADDNGFYNTEFYIDDGYTGVDFERPAFKRMIDDVDNGRIGTIITKDLSRLGRNHLHVGLFTEEYFPRNNVRYIAINNNIDSDNPDSSAIDMAAFYNIFNEFHVKDTSRKIKASCLIKSERGQRVASRPPYGYMKEPNDHSKIIPNPETVPIVRHIFQLCAEGLGPAQIAHRLEEEQIYTPAMYEYSKSGTVISNFDTSYPYRWNPTVVANVLEDVSYIGHTCNFRFGRASYKDHRKLKLPESEHRLIENTHEPIIDINTWEIVQRLRQSKRRFTRSGEKSIFAGIIFCADCKQKLYFHRHVREKPENWKFVCSSYRKNSREQCTMHGIKESHLKEIVLHEIRNVTAFARERTDEFAEYISLKSNSAVKKELSDANKKLKKSEKRLAEVGIIFRKLYEDHVLGTIDNDQFRMLSQGYTDEQNQLKAEISDLNKAIQELKSQTANTAKFTAMAKKYTDITELTQEILHTFVSRIEVHEKRKDDNGSVTQEIDIYFTHIGIVK

SEQ ID NO: 2838 - protein, 537 aa, Unknown
  Description of Unknown: Integrase B2839 sequence
  PTHR30461:SF3,IPR036162,PS51737,IPR011109,PTHR30461, PF00239,G3DSA:1.10.10.2600,IPR006119,SSF53041,cd00338, SM00857,IPR025827,IPR038109,PS51736,mobidb-lite, PF13408,G3DSA:3.40.50.1390,PF07508,Coil
MMQQALNAVIYARYSSHNQTEQSIEGQLRDCYAFAEREGLQVIGEYIDRAITGRTDERPDFQRMIADARKQEFQRVIVWKFDRFSRDRYDSAIYKHKLKQCGVRVLSAMENVGEGDVSIILEALLEASAEQYSLDLSKKVLRGQRESRLKGTFLGGLTPIGYKLENRKLVADERTAPIVRYIFEQYTKGTSKQDIINELATRGILNRHGKPLSHSTLQTILKNKKYIGVYTHGGQDVAGGCEALIDEKTFLKVQEQLSKRKHAPAASKAVIEYLLQGKLYCGYCGFNMFGDSGRGRNGSTYRYYACRRRKKERDCKKKNEKKDFIEWYVVEQTVEYVLTPERIEYIASELVAQYKKDCGIDRIKTYEKQLDRIKAEISRLVDTLAVCPAAARQPIFDKMEQLDAEKQEVELDLSKLRISAKIQISKEHIADWLKQFCNGDALDVDFQKRIIDTFINSVYLYDDKVIIYYNIEGGKQVSYIDMIDSTEEPPFSDDAPGSSGGSDLKRPALPEYNRTKLFLPHLRLQAPRLQSPLFYLQ

SEQ ID NO: 2839 - protein, 537 aa, Unknown
  Description of Unknown: Integrase B2840 sequence
  PTHR30461:SF3,SM00857,G3DSA:1.10.10.2600,IPR036162,PF13408, PS51737,G3DSA:3.40.50.1390,IPR025827,IPR006119,IPR038109, PF07508,IPR011109,SSF53041,PF00239,PTHR30461, PS51736,Coil,cd00338
MAKRKFNKGGEVRLVAYYRYSGGSGQTEQSIEGQRRDCETYARLHNMTIQKEYVDRHISGKTDDRAAFQQMIADSDKGAFDMVICWKTDRFARNRYDSAVYKKRLRDNGVEIVYAAESNIAGAEGIIIEGVMEALAEYYSAELAEKMRRGMRESALKGQAISRCRALGLKTDEHKRFVIDEKTAPTVRFIFEHYAAGESATSIVDKLNAKGLRTSQGNPFNKSSIPRIIQNEAYRGVYVSKSYDVRIEGAIPAIIDDELWERAQTMLKLNRQLKAKNELKADYILSGKLYCSCGSLMRGMSGHSATGEVYRYYTCPNKNCHLRNIPKDDLEGKVMQSISDHLLQPEAMEALAEAMVEVQKADAEKPNAERVAIEQSLADVRRRSKNILDAIENGTANAQLCARLDDLSEQERTLNFQLSALEKEKPVVFTKEQYLFLLEQFLVEPSERTPEYGRRLVNTFVTSMVVSDRELVINFNVSDETVNKNKKTSQTNLQKESSSGMRLVHLAHQQANYSLYAASGYFSLVEHQFSARLWRTA

SEQ ID NO: 2840 - protein, 537 aa, Unknown
  Description of Unknown: Integrase B2841 sequence
  cd00338,SM00857,G3DSA:1.10.10.2600,IPR036162,PF13408, IPR025827,PS51737,G3DSA:3.40.50.1390,IPR006119,IPR038109, PF07508,IPR011109,SSF53041,PTHR30461,PS51736, Coil,PF00239
MPNAVIYARYSSHAQRDASIDQQLSVCRAFAQRGGIDVVDVYTDRALTGTNDNRPGFRRMLADAAKGGWNYVIVYALDRFSRDRYDAATSKHKLKQAGVKLLSATEPIAETPAGILMESMLEGYAEYYSRELAAKVRRGQMDNAKKCMVNGSLPLGYCKGPDGRYAVEPTEAAVVQEIFRRVGAGEPLANIIDDLNDRGLRSKKGQPWNKSSFNRMLANERYTGIYIYQDIRIPGGIPAIVTQAEFDAVQRAAISKKNPRRAVMPDAPMSRRRQDGVYLLTGKLFCGDCGSPLIGVSGTARNQSLHHYYACKGRISKTSPGCGLKNIRREDIEYEIAAAIKQTMLTPETIQAIAQATYDYQCEAYANPDLTLLEDQLQETNRALKNLMSAIEQGLFTPTTRDRLLELELQKDNLTARLAVAKSRAADLPTREEIIAALDYYANGDLTDPLYQEALIDTFLVRAYVHSDHYDIYFSPDAKTKTEFPIGFTDATKPVFALLNGSHRLPEGPPTNVIRTSPTEVVCIAGLYRFTVSRPSR

SEQ ID NO: 2841 - protein, 537 aa, Unknown
  Description of Unknown: Integrase B2842 sequence
  PTHR30461:SF3,cd00338,SM00857,G3DSA:1.10.10.2600,IPR036162, PF13408,PS51737,G3DSA:3.40.50.1390,IPR025827,IPR006119, IPR038109,PF07508,SSF53041,IPR011109,PTHR30461, PS51736,Coil,PF00239
MAKRKFNKGGEVRLVAYYRYSGGSGQTEQSIEGQRRDCEAYARLHNMTIQKEYVDRHISGKTDDRAAFQQMIADSDKGAFDMVICWKTDRFARNRYDSAVYKKRLRDNGVEIVYAAESNISGAEGIIIEGVMEALAEYYSAELAEKMRRGMRESALKGQAISRCRALGLKTDEHKRFVIDEKTAPTVRFIFEHYAAGESAMSIVEQLNAKGLRTSQGNPFNKSSIPRIIQNEAYRGVYISKSYDVRIEGAIPAIIDDELWERAQTMLKLNRQLKAKNEPKADYILSGKLYCSCGSLMRGMSGHSATGEVYRYYTCPNKDCHLRNIPKDDLEGKVMQSIVDHLLQPESMEALAEAMVEVQKADAEKPNAERVAIEQSLADVRRRSKNILDAIENGTANAQLCARLNDLTEQEQTLSFQLSSLEKEKPVAFTKEQYLFLLEQFLVEPSERTPEYGRRLVNTFVTSMVVSDRELVINFNVSDETVNKNKKASQTNLQKESSSGMRLVHLAHQQANYSLYAASGYFSLVEHQFSARLWRTA

SEQ ID NO: 2842 - protein, 537 aa, Unknown
  Description of Unknown: Integrase B2843 sequence
  PTHR30461:SF3,SM00857,G3DSA:1.10.10.2600,IPR036162,PF13408, PS51737,G3DSA:3.40.50.1390,IPR025827,IPR006119,IPR038109, PF07508,IPR011109,SSF53041,PTHR30461,Coil, PS51736,cd00338,PF00239
MARKKKVSPGNRLVAYYRYSGGSQQTEQSIEGQRRDCEAYARQHGLTIVHEYIDRHISGRGVESRLAFQQMIADSSKHLFDLVICWKTDRFARNRYDSAVYKKKLRDNGVRILYAAESSVEGPEGIILEGLMESLAEYYSAELAQKMRRGMRESALKGRAINPSRPLGLTTDEHKRFIIDEKNAPTIRFIFEHYAAGESSASIVEQLNAAGLRTSKGNAFNKCSIPRIIQNEAYHGVYICKAYDVRIDGAIPAIIDDDLWKRAQKMLTLNKQHRAPHSSHADYLLSGKLFCGCCHSLMRGISGHNCRNDVYYYYACGNKADGGTCKKKNIPKDVAENLVVNAICENILRPDTLEDLADAIAAAQQADVNQPDPERAMLEQNLADVHRKINNIIESIENGTASSRLSARLADLEQQESTLNYQLESLKEVHPPVLDRERILFLLEQFLISPNERTEDYNRRIIDTFVNRIDITDTEMLIYFNLSEASASEKQKNSQPNSCSTGNHLVHLTHPHSNNFTLYATTNSFYMLLSNLTFSRT

SEQ ID NO: 2843 - protein, 537 aa, Unknown
  Description of Unknown: Integrase B2844 sequence
  PTHR30461:SF3,IPR036162,PS51737,IPR011109,PTHR30461, PF00239,G3DSA:1.10.10.2600,IPR006119,PF14287,SSF53041, IPR025378,SM00857,IPR025827,cd03770,IPR038109, PS51736,PF13408,G3DSA:3.40.50.1390,PF07508,Coil
MSDTNKITALYCRLSHEDELAGESNSISNQKDILQKYADEHGFYNTAFYIDDGYTGVDFERPAFKRMIDDVDNGRIGTIITKDLSRLGRNHLHVGLYTEEYFPRRNVRYIAINNNIDSDNPDSSAVDMAAFYNIFNEFHVKDTSRKIKASCVIKSERGQRVASRPPYGYMKSQEDHNKILPNPETALVVKYIFQLCADGLGPAQIAHRLEEEQIYTPAMYEYSQTGNVISNFDTSYPYRWNPTAVANILEDVSYLGHTCNFRFGRASYKDHRKLKLPKSEHKLIENTHEPIIDINIWEIVQRLRQSKRRFTRSGEKSIFAGIVFCADCKQKLYFHRHAREKSENWKFICSSYRKNSREQCTMHGIKESHLKEIVLHEIRNVTAFARERTDDFAEYISRESNTAAKKELSEANKKLKKSEKRLAEVGIIFRKLYEDHVLGTIDDDQFRMLSQGYTDEQNQLKAEISDLKHTMQELQSQTANTARFAALAKKYTDITKLTQEILHTFVSRIEVHEKLKDDNGSITQEIDIYFTHIGIVK

SEQ ID NO: 2844 - protein, 537 aa, Unknown
  Description of Unknown: Integrase B2845 sequence
  cd03768,PTHR30461:SF3,SM00857,G3DSA:1.10.10.2600,IPR036162, PF13408,IPR025827,PS51737,G3DSA:3.40.50.1390,IPR006119, IPR038109,PF07508,IPR011109,SSF53041,PTHR30461, PS51736,Coil,PF00239
MKVAIYTRVSTHHQIDKDSLPLQREELINYSKYILNTNNYEVFEDAGYSGKNTDRPAFQDMIKRIKAGEFSHLLVWKIDRISRNLLDFCDMYEELKRCNCIFVSKNEQFDTSSAMGEAMLKIILVFAELERKLTGERVKSVMLDRASKGMWNGSPIPLGYKWDSKIKFPIINKEEKNTIELIFNTYLTEESTSIVRNILNANNIKTKRNGRWTTKTITDIIRNPFYIGTYRYNYRESARGKKKSEDEWVVLEDNHPPIISKEIFNKCNDIMDRNSLRSNSKFRANGKTHIFAGLIKCGSCMGNYYAKQDKPHLDGFRPSLYVCSNRYNKNNCEEKTVSEKIIYNFITSLLRNISSINSKNRIDYLEFIDLLSRNLGVKEIKCEDLFDIMINKKHGFYSFNNKNYNKSSNLDLKIKELEKYKRALKRLEELYLFDEDSMSSKDYVLKKKEIQDNINKINEEMKLENKDSEEIKLDTILLNTVLNEIILKNVDNKTAIKLLKRESLKEFFNSFIKEIYILDKKITSITFKNGLNIGFSY

SEQ ID NO: 2845 - protein, 537 aa, Unknown
  Description of Unknown: Integrase B2846 sequence
  PTHR30461:SF3,IPR036162,PS51737,IPR011109,PTHR30461, PF00239,G3DSA:1.10.10.2600,IPR006119,SSF53041,cd00338, SM00857,IPR025827,IPR038109,PS51736,mobidb-lite, PF13408,G3DSA:3.40.50.1390,PF07508,Coil
MRKKNKFPIDLSMLTDLEIQQFVDDPSTLYDGDIDVCLYLRFSSERQGEQSIEGQLRDCREYCKRNSFRIVAIYVDRAKTARQKVEKRVFFQQMVQDSAKRAWKMVVVWKLDRFSRNRTDSAIYKSRLRKNGVRVMSATESITDSPEGIILESVLEGMAEFYSAELSQKITRGMRESALKHQNVGGHVPLGYRIENKKLVINPVTAPIVLEAFTRYADGESVADICARFNDLGYKTAKGAEFNKNSFHAMFRNERYIGTYTYKDIREEGVIPAIVPQEVWERVQDRLKENSLAPARGKALVDYMLVGKLFCGHCDSMMVGESGTGKSGKKYNYYTCAGRKRKKNCRKRPLKKDWFETLVAEDTKALLTDELINELADMAIQQSEKDLQNNTIIPELEAKLSETSSGISNIISMVEKGVASETLARRLTELEKEKRDLERRLVKEKKNIVVLEKPHIVHWLKQFQSGNIDDPDFRRKLIDLLVNSVTVWDGPDDDELTITYVYNLTEGNRKTVRVKNGGNPSDARTCGGSDMALISPP

SEQ ID NO: 2846 - protein, 537 aa, Unknown
  Description of Unknown: Integrase B2847 sequence
  PTHR30461:SF3,IPR036162,PS51737,IPR011109,PTHR30461, PF00239,G3DSA:1.10.10.2600,IPR006119,PF14287,SSF53041, IPR025378,SM00857,IPR025827,cd03770,IPR038109, PS51736,PF13408,G3DSA:3.40.50.1390,PF07508,Coil
MLRQTTRNLITALYPRLSHEDELQGESNSISNQKRILETYAKQNGFSNLQWYTDDGYSGANFQRPGFQAMLADIEAGKVGTVIVKDMSRLGRNYLQVGMYTEMIFPQKGVRFIAINDGVDSAMGDNDFTPLRNLFNEWMVRDTSKKIKAVKKAKGLSGKPVTSKPVYGYLMDDDENFIIDEEAAPVVKQIYQLCLAGNGPTKIARMLTEQQIPTPGTLEYQRTGSTRRYHPGYECKWATNTVVHLLENREYTGCLVNFKTEKPSYKMKHSIDNPIEKQAIFENHHEPIIDLQTWERVQELRKQRKRPNRYDDVGLFSGLLFCADCGHVMYQQRYQTDKRKQDCYICGSYKKRTADCTAHFIRTDLLTAGVLDNLRKVTAYAQKHEARFVKLLIQQNEMGSKRKLAAAAKQLEQVQSRIAELSRYIKRLYEDNVNGKISDERFMEMSADYEAEQRELKDRAAALQGELDKAQEATVNAEKFMSVVRKYLSIEELTHTLLREMVEKIVVYECEYDENEVRRQRIDIYYSFVGKIDLPEE

SEQ ID NO: 2847 - protein, 537 aa, Unknown
  Description of Unknown: Integrase B2848 sequence
  PTHR30461:SF3,SM00857,G3DSA:1.10.10.2600,IPR036162,PF13408, IPR025827,G3DSA:3.40.50.1390,PS51737,IPR006119,IPR038109, PF07508,IPR011109,SSF53041,PF00239,PTHR30461, Coil,cd00338
MNEMNNRVCCLYRVSTDKQVDFNSNHEADLPMQRKACHKFAEAKGWVIVHEEQEEGVSGHKVRAEARDKLQIIKDYARKGKFDILLVFMFDRIGRIADETPFVVEWFVRNGIRVWSTQEGEQRFDNHTDKLLNYIRFWQADGESEKTSVRTRTSLRQLVEEGHFKGGSAPYGYDLVKSGRINKRKHELYELHINEREAAVVRIIFDKYVHEGYGPQHIATYLNGNGYRARSGKCWHPASIRGMVRNLTYTGVLRCGDAHSELLQELQIIPEQQFEAAQRIRENRSNRAAQESEYRVPLNIHGQSLLSGNAYCGHCGAKLTLTSSRKWRKLSDGTLDDTLRVRYTCYGKLRKQTGCTGQTGYTVHILDEIIDKSVRQIFSKMRGIPKEQIITRRYEREVVERKNHLQTIQVERDKAQKDLISLKAEILACIKGESVFPKETLAEMITAQEEKLRELDALYESSYAETEKTAELMDNVSKLYEELISFSDLYDSASFEAKKMIVNQLIRRVDVYRGYQLNITFNFDLTPYIEGDDTTAC

SEQ ID NO: 2848 - protein, 537 aa, Unknown
  Description of Unknown: Integrase B2849 sequence
  PTHR30461:SF3,IPR036162,PS51737,IPR011109,PTHR30461, PF00239,G3DSA:1.10.10.2600,PF14287,IPR006119,SSF53041, IPR025378,SM00857,IPR025827,cd03770,IPR038109, PS51736,PF13408,G3DSA:3.40.50.1390,PF07508,Coil
MSDTNKITALYCRLSHEDELAGESNSISNQKDILQKYADEHGFYNTAFYIDDGYTGVDFERPAFKRMIDDVDNGRIGTIITKDLSRLGRNHLHVGLYTEEYFPRRNVRYIAINNNIDSDNPDSSAVDMAAFYNIFNEFHVKDTSRKIKASCVIKSERGQRVASRPPYGYMKSQEDHNKILPNPETALVVKYIFQLCADGLGPAQIAHRLEEEQIYTPAMYEYSQTGNVISNFDTSYPYRWNPTAVANILEDVSYLGHTCNFRFGRASYKDHRKLKLPKSEHKLIENTHEPIIDINIWEIVQRLRQSKRRFTRSGEKSIFAGIVFCADCKQKLYFHRHAREKSENWKFICSSYRKNSREQCTMHGIKESHLKEIVLHEIRNVTAFARERTDDFAEYISRESNTAAKKELSEANKKLKKSEKRLAEVGIIFRKLYEDHVLGTIDDDQFRMLSQGYTDEQNQLKAEISDLKHTMQELQSQTANTARFAALAKKYTDITELTQEILHTFVSRIEVHEKLKDDNGSITQEIDIYFTHIGIVK

SEQ ID NO: 2849 - protein, 537 aa, Unknown
  Description of Unknown: Integrase B2850 sequence
  PTHR30461:SF3,SM00857,G3DSA:1.10.10.2600,IPR036162,PS51737, G3DSA:3.40.50.1390,IPR006119,IPR038109,PF07508,IPR011109, SSF53041,PTHR30461,Coil,PS51736,cd00338, PF00239
MRVVAYCRYSSEAQRDGYSIEAQTKAITEWCERQGHTILHFYIDEAESATSDDRTEFQRMVKDAASGSFEAVIVHKLDRFARNRYDSAIYKHKLKQNGVRVISMLEPLDDSPESVIMESVLEGMAEYFSKNLARETRKGKREAAGKAQFVGGKPPLGYGVDDKHRFFIIPEEAEIVKEIFKRYASGEGSASIARDLTSRGIRGRKGSPLTCTSMRFIISNPLYYGHYVWFKNTPAQEPIVVDGVVPAIISQSLFDAANARIEKRGPQRRYEDFILTGYLFPAFGSGHYVGSSSFTNYKLKDGTVKRSASEVYIIRGPIKDCPRSMKKSKTEDFIVGSVEAVLFSGATLDWVISELKARLEARAKETAPVDALNTRLRKLQEQKNKLLDLYLSGSVDKAVYSVKFGELGKAEELVKAELKRATAAVPRIQDVEELKSALLSFVHSAAADSLEYKKRLLSTFVEKVTVSNTEIVIYFKFPIPGNGDTFKCDLRNFADKVQNVLKPYNTKTPRRRYSPSLLLTLTKSMLRKNRMRFRLCL

SEQ ID NO: 2850 - protein, 537 aa, Unknown
  Description of Unknown: Integrase B2851 sequence
  PTHR30461:SF3,cd00338,SM00857,G3DSA:1.10.10.2600,IPR036162, PF13408,PS51737,IPR025827,G3DSA:3.40.50.1390,IPR006119, IPR038109,PF07508,SSF53041,IPR011109,PTHR30461, PS51736,Coil,PF00239
MAKRKFNKGGEVRLVAYYRYSGGSGQTEQSIEGQRRDCEAYARLHNMTIQKEYVDRHISGKTDDRAAFQQMIADSDKGAFDMVICWKTDRFARNRYDSAVYKKRLRDNGVEIVYAAESNISGAEGIIIEGVMEALAEYYSAELAEKMRRGMRESALKGQAISRCRALGLKTDEHKRFVIDEKTAPTVRFIFEHYAAGESAMSIVEQLNAKGLRTSQGNPFNKSSIPRIIQNEAYRGVYISKSYDVRIEGAIPAIIDDELWERAQTMLKLNRQLKAKNEPKADYILSGKLYCSCGSLMRGMSGHSATGEVYRYYTCPNKDCHLRNIPKDDLEGKVMQSIVDHLLQPESMEALAEAMVEVQKADVEKPNAERVAIEQSLSDVRRRSKNILDAIENGTANAQLCARLDDLTEQEQTLSFQLSSLEKEKPVVFTKEQYLFLLEQFLMEPSERTPEYGRRLVNTFVTSMVVSGRELVINFNVSDETVNKNKKTSQTNLQKESSSGMRLVHLAHQQANYSLYAASGYFSLVEHQFSARWWRTA

SEQ ID NO: 2851 - protein, 537 aa, Unknown
  Description of Unknown: Integrase B2852 sequence
  PTHR30461:SF3,SM00857,G3DSA:1.10.10.2600,IPR036162,PF13408, IPR025827,PS51737,G3DSA:3.40.50.1390,IPR006119,IPR038109, PF07508,IPR011109,SSF53041,PTHR30461,Coil, PS51736,cd00338,PF00239
MARKKKVSPGNRLVAYYRYSGGSQQTEQSIEGQRRDCEAYARQHGLTIVHEYIDRHISGRGVESRLAFQQMIADSSKHLFDLVICWKTDRFARNRYDSAVYKKKLRDNGVRILYAAESSVEGPEGIILEGLMESLAEYYSAELAQKMRRGMRESALKGRAINPSRPLGLTTDEHKRFIIDEKNAPTIRFIFEHYAAGESSASIVEQLNAAGLRTSKGNAFNKCSIPRIIQNEAYHGVYICKAYDVRIDGAIPAIIDDDLWKRAQKMLTLNKQHRAPHSSHADYLLSGKLFCGCCHSLMRGISGHNCRNDVYYYYACGNKADGGTCKKKNIQKDVAENLVVNAICENILRPDTLEDLADAIAAAQQADVNQPDPERAMLEQNLADVHRKINNIIESIENGTASSRLSARLADLEQQESTLNYQLESLKEVHPPVLDRERILFLLEQFLISPNERTEDYNRRIIDTFVNRIEITDTEMLIYFNLSEASASEKQKNSQPNSCSTGNHLVHLTHSHSNNFSLYATPNSFYILLSNLTFSRT

SEQ ID NO: 2852 - protein, 537 aa, Unknown
  Description of Unknown: Integrase B2853 sequence
  PTHR30461:SF3,SM00857,G3DSA:1.10.10.2600,IPR036162,PF13408, IPR025827,G3DSA:3.40.50.1390,PS51737,IPR006119,IPR038109, PF07508,IPR011109,SSF53041,PF00239,PTHR30461, PS51736,Coil,cd00338
MAKRKFNKGGEVRLVAYYRYSGGSGQTEQSIEGQRRDCETYARLHNMTIQKEYVDRHISGKTDDRAAFQQMIADSDKGAFDMVICWKTDRFARNRYDSAVYKKRLRDNGVEIVYAAESNIAGAEGIIIEGVMEALAEYYSAELAEKMRRGMRESALKGQAISRCRALGLKTDEHKRFVIDEKTAPTVRFIFEHYAAGESAMSIVEQLNAKGLRTSQGNPFNKSSIPRIIQNEAYRGVYVSKSYDVRIEGAIPAIIDNELWERAQTMLKLNRQLKAKNEPKADYILSGKLYCSCGSLMRGMSGHSATGEVYRYYTCPNKDCHLRNIPKDDLEGKVMQSIVDHLLQPESMEALAEAMVEVQKADAEKPNAERVAIEQSLADVRRRSKNILDAIENGTANAQLCARLNDLTEQEQTLSFQLSSLEKEKPVAFTKEQYLFLLEQFLVEPSERTPEYGRRLVNAFVTSMVVSDRELVINFNVSDETVNKNKKASQTNLQKESSSGMRLVHLAHQQANYSLYAASGYFSLVEHQFSARWWRTA

SEQ ID NO: 2853 - protein, 537 aa, Unknown
  Description of Unknown: Integrase B2854 sequence
  SM00857,G3DSA:1.10.10.2600,IPR036162,PS51737,G3DSA:3.40.50.1390, IPR006119,IPR038109,PF07508,SSF53041,IPR011109, PTHR30461,Coil,PS51736,cd00338,PF00239
MRNNPLSSADEYCMYLRKSRVDLEAEAHGDGETLARHEKLLLEVARRDHLNVTQIYREVVSGETIAARPVMQHLIQEVELGRWAGVLVVEVERLARGDTIDQGIVAQTFKYSGTKIITPLKVYDPNNEYDEEYFEFGLFMSRREYKTINRRLQRGRLASAKEGKWVSGVAPYGYEKIRVPNDKGWTLRPLEDEADIVRFIFRLYTAGEEAEDGSVKKVGSYSLAVRLDKMGVKPPSGSPCWNSNTIQSILQNPVYIGKIRWNVHKTRKRVINNVVRVERYLAPPDEQILVDGLHPAIVDEAVFLAAQDLMAQKGPVPVQAANTVSNPLAGILVCGKCGRHIVLRPNAYGGVLMCPNRACDNVGSKYGIVEERLLQALSQWLSDYRLEWSDRLPAEEQALIDLKGKSIRKAQQEIDTLQKQLERTHDLLEQGVYDTDTFLARSRSITERINSANESIASLSAELIEDEARAASRKLVVPKVEKLLEVYAELPSAQAKNEMLKEVIEKVEYTKLQRSGRNGPFDNFDLLLYPKLPPSLG

SEQ ID NO: 2854 - protein, 537 aa, Unknown
  Description of Unknown: Integrase B2855 sequence
  PTHR30461:SF3,cd00338,SM00857,G3DSA:1.10.10.2600,IPR036162, PF13408,PS51737,G3DSA:3.40.50.1390,IPR025827,IPR006119, IPR038109,PF07508,IPR011109,SSF53041, PTHR30461,Coil,PF00239
MTENKNRVCCLYRVSTDKQVDFNSNHEADLPMQRKACHKFAEAKGWVIVHEEQEEGVSGHKVRAEARDKLQIIKEYARKGKFDILLVFMFDRIGRIADETPFVVEWFVRNGIRVWSTQEGEQRFDNHTDKLLNYIRFWQADGESEKTSVRTRTSLRQLVEEGHFKGGSAPYGYDLVKSGRINKRKHELYELHINEQEAEIVRLIFDKYVYEGYGAQRIATYLNNAGYRARSGKCWHPGSLRGMVGNLTYMGVLRCGDARSELMPELQIIPQEEFEAAQRIREDRSAHAAEEAEHHVPLRTRGQALLSNNVYCGHCGARLALTTSRKWRKLSDGTLDDTLRIRYTCYGKLRKQTDCTGQTGYTMHILDEIIDKMVRQIFSRLRGIPKEQLITSRYAKETAERKNHLQALQAERDKAEKDLLALKTEILAVIKGESAFPKDTLAEMIAAQEKKHTELDTLCEEASAELERNAELMANVSQLYEELISYADLYDSASFEAKKMIVSQLIRRVEVYRGYQIHVDFNFDLAQYLENSDELAC

SEQ ID NO: 2855 - protein, 537 aa, Unknown
  Description of Unknown: Integrase B2856 sequence
  cd00338,SM00857,G3DSA:1.10.10.2600,IPR036162,PF13408, PS51737,G3DSA:3.40.50.1390,IPR025827,IPR006119,IPR038109, PF07508,SSF53041,IPR011109,PTHR30461,PS51736, Coil,PF00239
MPNAVIYARYSSHAQRDASIDQQLSVCRAFAQRGGIDVVDIYTDRALTGTNDNRPGFRRMLADAAKGGWNYVIVYALDRFSRDRYDAATSKHKLKQAGVKLLSATEPIAETPAGILMESMLEGYAEYYSRELAAKVRRGQMDNAKKCMVNGSLPLGYCKGPDGRYAVEPTEAAVVQEIFRRVGAGEPLANILDDLNDRGLRSKKGKPWNKSSFNRMLTNERYTGIYIYQDIRIPGGIPAIITQAEFDAVQRAAISKKNPRRAVMPDAPMSRRRQDGVYLLTGKLFCGDCGSPLIGVSGTARNQSLHHYYACKGRISKTAPGCGLKNIRREDIEYEIAAAIKQTMLTPETIRAIAQATYDYQCEAYANPDLTLLEDQLQETNRALKNLMSAIEQGLFTPTTRDRLLELELQKDNLNARLAVAKSRAADLPTRDEIVAALDYYANGDLSDPLYQEALIDTFLVRAYVHSDHYDIYFSPDAKTKTEFPIGFTDATKPTFALLNGSHSLPEGPPTNVIRTSPTEVVCIAGLYRFTVSRPSR

SEQ ID NO: 2856 - protein, 537 aa, Unknown
  Description of Unknown: Integrase B2857 sequence
  PTHR30461:SF3,SM00857,G3DSA:1.10.10.2600,IPR036162,PF13408, PS51737,IPR025827,G3DSA:3.40.50.1390,IPR006119,IPR038109, PF07508,IPR011109,SSF53041,PF00239,PTHR30461, Coil,cd00338
MTENKNRVCCLYRVSTDKQVDFNSNHEADLPMQRKACHKFAEAKGWVIVHEEQEEGVSGHKVRAEARDKLQIIKEYARKGKFDILLVFMFDRIGRIADETPFVVEWFVRNGIRVWSTQEGEQRFDNHTDKLLNYIRFWQADGESEKTSVRTRTSLRQLVEEGHFKGGSAPYGYDLVKSGRINKRKHELYELHINEQEAEIVRLIFDKYVYEGYGAQRIATYLNNAGYRARSGKCWHPGSLRGMVGNLTYMGVLRCGDARSELMPELQIIPQEEFEAAQRIREDRSAHAAEEAEHHVPLRTRGQALLSNDVYCGHCGARLALTTSRKWRKLPDGTLDDTLRIRYTCYGKLRKQTECTGQTGYTMHILDEIIDKMVREIFSRLRGIPKEQLIISRYAKETAERKNHLQALQAERDKAEKDLLALKAEILAVIKGESAFPKDTLAEMIAAQEKKHTELVSLCEEASAELDKNAELMANVSQLYEELISYADLYDSASFESKKMIVSQLVRRIDVYRGYQIHVDFNFDLAQYLENSDELAC

SEQ ID NO: 2857 - protein, 537 aa, Unknown
  Description of Unknown: Integrase B2858 sequence
  PTHR30461:SF3,cd00338,SM00857,G3DSA:1.10.10.2600,IPR036162, PF13408,PS51737,G3DSA:3.40.50.1390,IPR025827,IPR006119, IPR038109,PF07508,IPR011109,SSF53041,PTHR30461, PS51736,Coil,PF00239
MAKRKFNKGGEVRLVAYYRYSGGSGQTEQSIEGQRRDCETYARLHNMTIQKEYVDRHISGKTDDRAAFQQMITDSDKGAFDMVICWKTDRFARNRYDSAVYKKRLRDNGVEIVYAAESNIAGAEGIIIEGVMEALAEYYSAELAEKMRRGMRESALKGQAISRCRALGLKTDEHKRFVIDEKTAPTVRFIFEHYAAGESATSIVDKLNAKGLRTSQGNPFNKSSIPRIIQNEAYRGVYVSKSYDVRIEGAIPAIIDDELWERAQTMLKLNRQLKAKNEPKADYILSGKLYCSCGSLMRGMSGHSATGEVYRYYTCPNKNCHLRNIPKDDLEGKVMQSISDHLLQPEAMEALAEAMVEVQKADAEKPNAERVAIEQSLADVRRRSKNILDAIENGTANAQLCARLDDLSEQERTLNFQLSALEKEKPVVFTKEQYLFLLEQFLVEPSERTPEYGRRLVNTFVTSMVVSDRELVINFNVSDETVNKNKKTSQTNLQKESSSRMRLVHLAHQQANYSLYAASGYFSLVEHQFSARLWRTA

SEQ ID NO: 2858 - protein, 537 aa, Unknown
  Description of Unknown: Integrase B2859 sequence
  PTHR30461:SF3,cd00338,SM00857,G3DSA:1.10.10.2600,IPR036162, PF13408,PS51737,IPR025827,G3DSA:3.40.50.1390,IPR006119, IPR038109,PF07508,IPR011109,SSF53041,PTHR30461, PS51736,Coil,PF00239
MAKKKKPAGGNAIIYARYSSHNQRDVSIEQQIEACRKHAAELGLTITDTYEDRAISGRTDNRPAFQRMMRDAEDGKFQYVLAWKSNRMGRNMMQAMVNESRLMDCGVKVFYAEEDFDDSAAGRFALRSMMNVNQFYSDNLAEDVRRGLMDNASKCMANGRQPLGYKRGEGGKVVVDEPAAAIVREIYTRIASGEMFMDIARDLNRRGIKTQSGSEWNKSSFNVLCRNERYRGIYIYGDTRIEGGIPPIVDDVLWYKVQEVLKVKKSKNRHHCPSDEDYLLTGKLRCGKCGGYMIGMSGRSKTGDVHHYYACQNRRVGHTCDKKNIRRDVVEPAVAQAIKQYCLTDDAIEWITDQTIAYWEDEDRKLQIDSIENDLSAVQSSISNVMKAIEMGVITETTRDRLIELERQQTDLKSKLALAKEEIVHVDRKDLISSLLAFRHGNVHDRAYQEKLFNAFLIAVYVYDDDHLKLVFNSFGKDDTVNIALDLGENDDNSGLSDVSKSSPILSNGQPESHLIRSDGFFVLSLGAFLGRCDTKL

SEQ ID NO: 2859 - protein, 537 aa, Unknown
  Description of Unknown: Integrase B2860 sequence
  PTHR30461:SF3,IPR036162,PS51737,IPR011109,PTHR30461, PF00239,G3DSA:1.10.10.2600,IPR006119,SSF53041,cd00338, SM00857,IPR025827,IPR038109,PS51736,mobidb-lite, PF13408,G3DSA:3.40.50.1390,PF07508,Coil
MARKKKVSPGNRLVAYYRYSGGSQQTEQSIEGQRRDCEAYARQHGLTIVHEYIDRHISGRGVESRLAFQQMIADSSKHLFDLVICWKTDRFARNRYDSAVYKKKLRDNGVRILYAAESSVEGPEGIILEGLMESLAEYYSAELAQKMRRGMRESALKGRAINPSRPLGLTTDEHKRFIIDEKNAPTIRFIFEHYAAGESSASIVEQLNAAGLRTSKGNAFNKCSIPRIIQNEAYHGVYICKAYDVRIDGAIPAIIDDDLWKRAQKMLTLNKQHRAPHSSHADYLLSGKLFCGCCHNLMRGISGHNCRNDVYYYYACGNKADGGTCKKKNIPKDVAENLVVNAICENILRPDTLEDLADAIAAAQQADVNQPDPERAMLEQNLADVHRKINNIIESIENGTASSRLSARLADLEQQESTLNYQLESLKEVHPPVLDRERILFLLEQFLISPNERTEDYNRRIIDTFVNRIEITDTEMLIYFNLSEASASEKQKNSQPNSCSTGNHLVQQSWTNPNFFPPLSRRSKYPQNGRFGRHLCS

SEQ ID NO: 2860 - protein, 537 aa, Unknown
  Description of Unknown: Integrase B2861 sequence
  PTHR30461:SF3,SM00857,G3DSA:1.10.10.2600,IPR036162,PF13408, IPR025827,PS51737,G3DSA:3.40.50.1390,IPR006119,IPR038109, PF07508,IPR011109,SSF53041,PF00239,PTHR30461, PS51736,Coil,cd00338
MRVSVNLNAQKPDTTTNAVIYARYSSHGQTEQSIEGQLAKGHEYAAAQGYTVVHEYIDRAMTGRNDNREAFQKMLSDTGKHQFQVIIVWKVDRFGRNREEIAFNKHTCKKNGVRVEYVAESLPNSPEAVILESVLEGMAEYYSIQLSQNIRRGQLESAKKCQCVGGSVPLGYTLDSDKHFVIDPQTAPVVKKIFDLYAEGATISEITGQLNEQGIRTIRKQLFTKNSLTKLLKNEKYIGVYTYKDIVRVEGGVPAIVDKSTFDRVQELLKINRRAPSHTWTKVEYLLTDKLFCGHCGSPMVGESGFSHTGAKYSYYGCIKRRREKACDKKPVRQDWIEALVLDETVKLLHDDELMEYIIDRTWEYYQVTDKVQEEKAVLEAQLAEVDKAINNLVRAIEAGIFNAATKSRMDELDAQKAALTASLADLELTSGIRITRDHIEYFLLRLRDLDVKDRECQKRLVQTFVNAVFIYDDGRVKITYNYSGQSSTITLNQIASAEKGKGFVCCLPCSTSSPRFPRGVAALFCFWGKSGVNNVY

SEQ ID NO: 2861 - protein, 537 aa, Unknown
  Description of Unknown: Integrase B2862 sequence
  PTHR30461:SF3,IPR036162,PS51737,IPR011109,PTHR30461, PF00239,G3DSA:1.10.10.2600,IPR006119,PF14287,SSF53041, IPR025378,SM00857,IPR025827,cd03770,IPR038109, PF13408,G3DSA:3.40.50.1390,PF07508,Coil
MKQQIYNTALYLRLSRDDELQGESSSITTQRSMLRLYAKEHHLNVIDEYIDDGWSGTNFERPSFQRMIEDIEAGKINCVVTKDLSRLGRNYIMTGQYTELYFPSHNVRYIAIDDGVDSEKGESEIAPFKNIINEWVARDTSRKVKSAFRTKFAEGAHYGAYAPLGYKKHPDIKGKLLVDEETKWIVEKIFSLAYQGYGSAKITKILREEKVPTASWLNFTRYGTFAHIFEGKPESKRYEWTIAHVKAILKSEVYIGNSVHNMQSTVSFKSKKKVRKPENEWLRVENTHEPIIDKEVFYRVQEQIKSRRRQTKQKETPIFAGLVKCADCGWSMRFATNKANRTPYSYYSCSYYGQFGKGNCSMHYIRYDVLYQAVLERLQYWAKVVQQDEEKVLNKIQKAGNAERIREKKKKASALKKAENRQNEIDQLFAKMYEDRACEKITERNFVMLSSKYQQEQIELEQQIASLREELNKMEQDMIGAEKWIELIKEYSVPKELTAPLLNAMIEKILVHEATTNEDNERIQEIEIYYRFIGKID

SEQ ID NO: 2862 - protein, 537 aa, Unknown
  Description of Unknown: Integrase B2863 sequence
  PTHR30461:SF3,cd00338,SM00857,G3DSA:1.10.10.2600,IPR036162, PF13408,PS51737,G3DSA:3.40.50.1390,IPR025827,IPR006119, IPR038109,PF07508,IPR011109,SSF53041,PTHR30461, Coil,PF00239
MNEMNNRVCCLYRVSTDKQVDFNSNHEADLPMQRKACHKFAEAKGWVIVHEEQEEGVSGHKVRAEARDKLQIIKDYARKGKFDILLVFMFDRIGRIADETPFVVEWFVRNGIRVWSTQEGEQRFDNHTDKLLNYIRFWQADGESEKTSVRTRTSLRQLVEEGHFKGGSAPYGYDLVKSGRINKRKHELYELHINEREAAVVRIIFDKYVHEGYGPQHIATYLNGNGYRARSGKCWHPASIRGMVRNLTYTGVLRCGDAHSELLQELQIIPAQQFEAAQRIRENRSNRAAQESEYRVPLNIHGQSLLSGNAYCGHCGAKLTLTSSRKWRKLSDGTLDDTLRVRYTCYGKLRKQTGCTGQTGYTVHILDEIIDKSVRQIFSKMRGIPKEQIITRRYEREVVERKNHLQTIQVERDKAQKDLISLKAEILACIKGESVFPKETLAEMITAQEEKLRELNALYESSYAETEKTAELMDNVSKLYEELISFSDLYDSASFEAKKMIVNQLIRRVDVYRGYQLNITFNFDLTPYIEGDDAAAC

SEQ ID NO: 2863 - protein, 537 aa, Unknown
  Description of Unknown: Integrase B2864 sequence
  PTHR30461:SF3,SM00857,G3DSA:1.10.10.2600,IPR036162,PF13408, PS51737,G3DSA:3.40.50.1390,IPR025827,IPR006119,IPR038109, PF07508,IPR011109,SSF53041,PF00239,PTHR30461, PS51736,Coil,cd00338
MSVSVTLNTQKPDTTTNAVIYARYSSHGQTEQSIEGQLAKGHEYAAARGYTIVHEYIDRAITGRNDNREAFQKMLSDTGKHQFQVIIVWKVDRFGRNREEIAFNKHTCKKNGVRVEYVAESLPNSPEAVILESVLEGMAEYYSIQLSQNIRRGQLESAKKCQCVGGSVPLGYTLDSDKHFVIDPQTAPVVKKIFDLYAEGATISEITGQLNEQGIRTIRKQLFTKNSLTKLLKNEKYIGVYTYKDIVRVEGGVPAIVDKSTFDRVQELLKINRRAPSHTWTKVEYLLTDKLFCGHCGSPMVGESGFSHTGAKYSYYGCIKRRREKACDKKPVRQDWIEALVLDETVKLLHDDELMEYIIDRTWEYYQVTDKVQEEKAVLEAQLAEVDKAINNLVRAIEAGIFNAATKSRMDELDAQKAALTTSLADLELTSGIRITRDHIEYFLLRLRDLDVKDRECQKRLVQTFVNAVFVYDDGRVKITYNYSGQSSTITLNQIASAEKGKGFVCCLPCSTIAHRYEPEMLIFGDVFVLTYKTAEV

SEQ ID NO: 2864 - protein, 537 aa, Unknown
  Description of Unknown: Integrase B2865 sequence
  PTHR30461:SF3,SM00857,G3DSA:1.10.10.2600,IPR036162,PF13408, IPR025827,G3DSA:3.40.50.1390,PS51737,IPR006119,IPR038109, PF07508,SSF53041,IPR011109,PF00239,PTHR30461, PS51736,Coil,cd00338
MMERDLSLDRCQGDCVIYARYSSHNQRDVSIEQQVADCEAYARSLGLRVVKVYADRALSGMTDKRPQFQTMLRDAAHRRWAYLIVWKIDRFARNRYDSATYKFRLKRCGVRVLYAKESIPDGPEGILLESVLEGSAEYYSANLSQNIRRGMRYNAMNCKVNSGSIPFGYRKGEDGRFAVDPGEAEVVREIFRKVADGIPFVEISNDLNGRGIRTKRGGLWGRNSFHRLLTNETYVGVYRFGDVRVEDGVPPVIDRALFLAVDERLKNKKNPQGRHRENGEYMLTGKLFCGLCGAPMVGVSGTARSGALHHYYVCQKRRTERSCSKANVGRDWLERVVVQATLDYVLKPEVIEWMADAVMAYQEREANSAVLLGLRDQLSENQRATANLMKAIEAGIITLTTKGRLVELEAEASRLRDAITLEEAAQTHIERDFMVYWFEKFRGGDLEDAAFRRRVIDSFVNAVYLWDDRLRVAFNYSGKGSAVDMELVMDAEALAGPEGRFVLAPPASTNGEPGEPGTAIYFVGPVFILALPLPRRR

SEQ ID NO: 2865 - protein, 537 aa, Unknown
  Description of Unknown: Integrase B2866 sequence
  PTHR30461:SF3,SM00857,G3DSA:1.10.10.2600,IPR036162,PF13408, PS51737,G3DSA:3.40.50.1390,IPR025827,IPR006119,IPR038109, PF07508,IPR011109,SSF53041,PTHR30461,PS51736, cd00338,PF00239
MASQTRKVKRNGAQIKRAIAYARFSSNNQREESIDAQLRAIREYCEKNGIVLVDVFTDEAISGKTDNRDDFQKMVKGVLKGRYDVDAILVHKFNRFARNKYDSALYKKRLREIGVRVVSVTQKIDDTPEGELLEGFLEVIDQYYSSNLSVEVRKGLKENALKGKHAGGQVLFGFSLDSEGYYIPNENAPIVKRIFEEFAAGVPKSEICERLNKEGCRNQRNKPFNTRTLYDLLRNEKYIGVYEYTIDRTETIRLENVIKDPIIDKRLWNTVQQLNHEGSTKGRYRKQKRYYHLTGKAFCSCCGSPISGAGSKRSRNGTLNYYYKCVGKVKHKNGCDNPSLNKDWFEPRVLKSVVNAVMTGEQIKHIAKLTYQELEEMREKPLVDVNTLNKELDSIAKKQEMLTDLLLEGQIDKDMLNTKNASLNQRKFEIQEELEKRKMIVDSDNVTEEMIVQYIQEYVEYLKTTYTAEEEFMRAVLNEFVEKVEVDKENITVYILCEFSHMDGGDNEWFSGASHHLPPAKMKRRFSRKRNIRNKNS

SEQ ID NO: 2866 - protein, 537 aa, Unknown
  Description of Unknown: Integrase B2867 sequence
  PTHR30461:SF3,IPR036162,PS51737,IPR011109,PTHR30461, PF00239,G3DSA:1.10.10.2600,PF14287,IPR006119,SSF53041, IPR025378,SM00857,IPR025827,cd03770,IPR038109, PS51736,PF13408,G3DSA:3.40.50.1390,PF07508,Coil
MLRQTTQNLITALYPRLSHEDELQGESNSISNQKRILETYAKQNGFTNLCWYTDDGYSGANFQRPGFQAMLADIEAGKVGTVIVKDMSRLGRNYLQVGMYTEMLFPQKGVRFIAINDGVDSAMGDNDFTPLRNLFNEWMVRDTSKKIKAVKKAKGLSGKPVTSKPVYGYLMDDDENFIIDEEAAPVVKQIYQLCLAGNGPTKIARMLTEQQIPTPGTLEYQRTGSTRRYHPGYECKWATNTVVHLLENREYTGCLVNFKTEKPSYKMKHSVDNPIEKQAIFENHHEPIIDLQTWERVQELRKQRKRPNRYDNVGLFSGMLFCADCGHVMYQQRYQTDKRKQDCYICGSYKKRTADCTAHFIRTDLLTAGVLDNLRKVTAYAQKHEARFVKLLIQQNEMGGKRKQAAATKQLEQAQSRIAELSRYIKRLYEDNVNGKISDERFMEMSADYEAEQRELKEKAAALQGELDKAQEATVNAEKFMNVVRKYLSIEELTHTLLREMVEKIVVYECEYDENEVRRQRIDIYYSFVGKIDLPEE

SEQ ID NO: 2867 - protein, 537 aa, Unknown
  Description of Unknown: Integrase B2868 sequence
  PTHR30461:SF3,SM00857,G3DSA:1.10.10.2600,IPR036162,PF13408, IPR025827,G3DSA:3.40.50.1390,PS51737,IPR006119,IPR038109, PF07508,IPR011109,SSF53041,PF00239,PTHR30461, Coil,cd00338
MNEMNNRVCCLYRVSTDKQVDFNSNHEADLPMQRKACHKFAEAKGWVIVHEEQEEGVSGHKVRAEARDKLQIIKDYARKGKFDILLVFMFDRIGRIADETPFVVEWFVRNGIRVWSTQEGEQRFDNHTDKLLNYIRFWQADGESEKTSVRTRTSLRQLVEEGHFKGGSAPYGYDLVKSGRINKRKHELYELHINEREAAVVRIIFDKYVHEGYGPQHIATYLNGNGYRARSGKCWHPASIRGMVRNLTYTGVLRCGDAHSELLQELQIIPAQQFEAAQRIRENRSNRAAQESEYRVPLNIHGQSLLSGNAYCGHCGAKLTLTSSRKWRKLSDGTLDDTLRVRYTCYGKLRKQTGCTGQTGYTVHILDEIIDKSVRQIFSKMRGIPKEQIITRRYEREVVERKNHLQTIQVERDKAQKDLISLKAEILACIKGESVFPKETLAEMITAQEEKLRELDALYESSYAETEKTAELMDNVSKLYEELISFSDLYDSASFEAKKMIVNQLIRRVDVYRGYQLNITFNFDLTPYIEGDDAAAC

SEQ ID NO: 2868 - protein, 537 aa, Unknown
  Description of Unknown: Integrase B2869 sequence
  PTHR30461:SF3,SM00857,G3DSA:1.10.10.2600,IPR036162,PF13408, IPR025827,PS51737,G3DSA:3.40.50.1390,IPR006119,IPR038109, PF07508,IPR011109,SSF53041,PF00239,PTHR30461, PS51736,Coil,cd00338
MKKFPIDLSCLTEEEISQFQEDPYTLYNGDQDVALYLRYSSTGQSDQSIEGQLRDCRTFCKANHYRIVAIYVDRATTARKDVEKRVHLMEMVADSAKQNWEYVIVWKLDRFARNRNDSAIMKMRLRKNGVKVLSATEHLTDSPESIILESVLEGMAEFFSAELSQKVTRGMRESALKCHSVGGHIPLGYKVENHKLVVDPDTAHIVQEAFSLYANGESVADICRKFNSAGYKTAKNTEFNRSSFKAMFRNTRYIGTYTYKDIVIENGIPAIIDKELFETVQRRLSKTATAPARGKAKVDYLLSGKLFCGHCGASMNGESGAGRHGKVYHYYSCYTKKRKLGCDKRPLKKDYIEGIVARDALNLLTDQLIDEIADMAIRQSEQDLINDTHIPQLTAQLSEVEKSITNITAAIEKGIASETLMNRLVQLEHEKKTLNKEIKAEEKFVYRIDRDQIVFWLSQFKYGNIEDEDFRRRLIDLLVNSVTVWDEPDGYKITTAYNLTSCKTKTFRVEKNPAAEEATGFDFGESECTKGKVLNSL

SEQ ID NO: 2869 - protein, 537 aa, Unknown
  Description of Unknown: Integrase B2870 sequence
  IPR036162,PS51737,PS01030,IPR011109,PTHR30461, PF00239,G3DSA:1.10.10.2600,PF14287,IPR006119,SSF53041, IPR025378,SM00857,IPR025827,cd03770,IPR038109, IPR019761,PF13408,G3DSA:3.40.50.1390,PF07508,Coil
MLRQATQKTPITALYARLSKDDEQQGESLSIENQKRILETFARDNGFLNCRFFVDDGWSGANFQRPGFMEMMDCVESGEVKCVITKDLSRMGRNYLQVGMFTEITFPKKGVRFIAINDGVDSAQGENDLTPLKNLFNEWMVRDTSRKIKAVFRSKGMSGKPITSQPVYGYLKGEDGCFIIDEEAAPVVRQIYSLCLAGNGPTKIARVLTEQEIPTPGTLEYRRTGSTRRYYPDYPYKWATNTIVHILERKEYLGHTVNFKTEKISYKVKSSVENPEEKQAVFENTHEPIIDPATWERVQELRKQRKRPNRYDEVGLFSGILFCADCGSVLYQQRYENKTRKQDCYICGNYKRRVKSCTAHFIRTDLLTAGVTANLQKITAYAAKHEKQFMKLLIEQNEDGGKRRNAARKKELDAAEKRIAELSAVFKRLYEDSVTGRISDERFAELSADYEAEQRQLKERAAELQGELSKAQEATVNAGKFMNIVRKYTSFEELTPTLLREFIEKIVVHECSYDENKNRRQEIEIYYSFVGKVDLPE

SEQ ID NO: 2870 - protein, 537 aa, Unknown
  Description of Unknown: Integrase B2871 sequence
  cd00338,SM00857,G3DSA:1.10.10.2600,IPR036162,PF13408, IPR025827,G3DSA:3.40.50.1390,PS51737,IPR006119,IPR038109, PF07508,IPR011109,SSF53041,PTHR30461,PS51736, Coil,PF00239
MPNAVIYARYSSHAQRDASIDQQLSVCRAFAQRGGIDVVDVYTDRALTGTNDNRPGFRRMLADAAKGGWNYVIVYALDRFSRDRYDAATSKHKLKQAGVKLLSATEPIAETPAGILMESMLEGYAEYYSRELAAKVRRGQMDNAKKCMVNGSLPLGYCKGPDGRYAVEPTEAAVVQEIFRRVGAGEPLANIIDDLNDRGLRSKKGQLWNKSSFNRMLTNERYTGIYIYQDIRIPGGIPAIVTQAEFDAVQRAAISKKNPRRAVMPDAPMSRRRQDGVYLLTGKLFCGDCGSPLIGVSGTARNQSLHHYYACKGRISKDSPGCGLKNIRREDIEYEIAAAIKQTMLTPETIQAIAQATYDYQCEAYANPDLTLLEDQLQETNRALKNLMSAIEQGLFTPTTRDRLLELELQKDNLNSRLAVAKSRAADLPTRDEIVAALDYYANGDLTDPLYQEALIDTFLVRAYVHSDHYDIYFSPDAKTKTEFPIGFTDATKPVFALLNGSHSLPEGPPTNVIRTSPTEVVCIAGLYRFTVSRPSR

SEQ ID NO: 2871 - protein, 537 aa, Unknown
  Description of Unknown: Integrase B2872 sequence
  PTHR30461:SF3,SM00857,G3DSA:1.10.10.2600,IPR036162,PF13408, PS51737,G3DSA:3.40.50.1390,IPR025827,IPR006119,IPR038109, PF07508,SSF53041,IPR011109,PTHR30461,Coil, PS51736,cd00338,PF00239
MARRKKVSPGNRLVAYYRYSGGSQQTEQSIEGQRRDCEAYARQHGLTIVHEYIDRHISGRGVESRLAFQQMIADSSKHLFDLVICWKTDRFARNRYDSAVYKKKLRDNGVRILYAAESSVEGPEGIILEGLMESLAEYYSAELAQKMRRGMRESALKGKAINPNRPLGLTTDEHKRFIIDEKNAPTIRFIFEHYAAGESSASIVDQLNAAGLRTSKGNSFNKCSIPRIIQNEAYHGVYICKAYDIRIDGAIPAIIDDDLWKRAQKMLTLNKQHRAPHSSHADYLLSGKLFCGCCHSLMRGISGHNCRNDVYYYYACGNKVDGGTCKKKNIPKDVAENLVVNAICENILRPDTLEDLADAIAAALQADVNQPDPERAMLEQNLADVRRKINNIIESIENGTASSRLSARLADLEQQESTLNYQLESLKEVHPPVLDRERILFLLEQFLISPNERTEDYNRRIIDTFVNRIEITDTEMLIYFNLSEASASEKQKNSQPNSCSTGNHLVHLTHSHSNNFSLYATPNSFYILLSNLTFSRT

SEQ ID NO: 2872 - protein, 537 aa, Unknown
  Description of Unknown: Integrase B2873 sequence
  PTHR30461:SF3,SM00857,G3DSA:1.10.10.2600,IPR036162,PF13408, IPR025827,G3DSA:3.40.50.1390,PS51737,IPR006119,IPR038109, PF07508,SSF53041,IPR011109,PF00239,PTHR30461, PS51736,Coil,cd00338
MAKRKFNKGGEVRLVAYYRYSGGSGQTEQSIEGQRRDCETYARLHNMTIQKEYVDRHISGKTDDRAAFQQMIADSDKGAFDMVICWKTDRFARNRYDSAVYKKRLRDNGVEIVYAAESNIAGAEGIIIEGVMEALAEYYSAELAEKMRRGMRESALKGQAISRCRALGLKTDERKRFVIDEKTAPTVRFIFEHYAAGESAMSIVEQLNAKGLRTSQGNPFNKSSIPRIIQNEAYRGVYVSKSYDVRIEGAIPAIIDNELWERAQTMLKLNRQLKAKNEPKADYILSGKLYCSCGSLMRGMSGHSATGEVYRYYTCPNKDCHLRNIPKDDLEGKVIQSIVDHLLQPESMEALAEAMVEVQKADAEKPNAERVAIEQSLADVRRRSKNILDAIENGTANAQLCARLNDLTEQEQTLSFQLSSLEKEKPVAFTKEQYLFLLEQFLVEPSERTPEYGRRLVNAFVTSMVVSDRELVINFNVSDETVNKNKKASQTNLQKESSSGMRLVHLAHQQANYSLYAASGYFSLVEHQFSARLWRTA

SEQ ID NO: 2873 - protein, 537 aa, Unknown
  Description of Unknown: Integrase B2874 sequence
  PTHR30461:SF3,SM00857,G3DSA:1.10.10.2600,IPR036162,PF13408, PS51737,IPR025827,G3DSA:3.40.50.1390,IPR006119,IPR038109, PF07508,SSF53041,IPR011109,PF00239,PTHR30461, PS51736,Coil,cd00338
MAKRIPAAASDCDGMIGVIYARYSSHSQREESIEDQLRECHEFAARNNIKIIAEYTDSALTGRTDSRPDFQKMIRDSARGKFQVVVTYKVDRFARDRYDSAIYKAKLRKNGVRVLYAKETIPDGPEGIILESVLEGYAEYYSAALSQNILRGLEGNAMKCKTNGVQVLGYYTGEDGCYEIDPDYASVVLSIFQKYDAGVPQKEIIDDLNARGFRTTRGFAFNKNSVTRILRNRKYIGEYSWGDVTVPGGMPQIVPLPLFDSVQRKLDRGSRAPAHKWKVADYILTSKLFCGHCGELMVGRAGTGKSGKKYDYYACVNRTRRHGCDKKPVKKEWIEDIVVKYTKEVVLAEDMIEQIADGVMDFLEREKKSNGELDALEASLKNVESSIRNMMQAIEQGIITKSTKQRLMELEEQRDQISAAIAREKIATPDIERDQIVYFLEKFKEGSLDDPDYRTKLVEAFVSSVYLWDDGRIVINYNYTGENNQLTLRQIEQELVDMDGAEGSPLDSSAPLKLNKSNSPFDIIVYRNIFCLVYRWK

SEQ ID NO: 2874 - protein, 537 aa, Unknown
  Description of Unknown: Integrase B2875 sequence
  PTHR30461:SF3,SM00857,G3DSA:1.10.10.2600,IPR036162,PF13408, IPR025827,G3DSA:3.40.50.1390,PS51737,IPR006119,IPR038109, PF07508,IPR011109,SSF53041,PF00239,PTHR30461, Coil,cd00338
MNEMNNRVCCLYRVSTDKQVDFNSNHEADLPMQRKACHKFAEAKGWVIVHEEQEEGVSGHKVRAEARDKLQIIKDYARKGKFDILLVFMFDRIGRIADETPFVVEWFVRNGIRVWSTQEGEQRFDNHTDKLLNYIRFWQADGESEKTSVRTRTSLRQLVEEGHFKGGSAPYGYDLVKSGRINKRKHELYELHINEREAAVVRIIFDKYVHEGYGPQHIATYLNDNGYRARSGKCWHPASIRGMVRNLTYTGVLRCGDAHSELLQELQIIPAQQFEAAQRIRENRSNRAAQESEYRVPLNIHGQSLLSGNAYCGHCGAKLTLTSSRKWRKLSDGTLDDTLRVRYTCYGKLRKQTGCTGQTGYTVHILDEIIDKSVRQIFSKMRGIPKEQIITRRYEREVVERKNHLQTIQVERDKAQKDLISLKDEILACIKGESVFPKETLAEMITAQEEKLRELDALYESSYAETEKTAELMDNVSKLYEELISFSDLYDSASFEAKKMIVNQLIRRVDVYRGYQLNITFNFDLTPYIEGDDAAAC

SEQ ID NO: 2875 - protein, 537 aa, Unknown
  Description of Unknown: Integrase B2876 sequence
  PTHR30461:SF3,cd00338,SM00857,G3DSA:1.10.10.2600,IPR036162, PF13408,PS51737,G3DSA:3.40.50.1390,IPR025827,IPR006119, IPR038109,PF07508,SSF53041,IPR011109,PTHR30461, PS51736,Coil,PF00239
MAKKKKPAGGNAIIYARYSSHNQRDVSIEQQIEACRKHAAELGLTITDTYEDRAISGRTDNRPAFQRMMRDAEDGKFQYVLAWKSNRMGRNMMQAMVNESRLMDCGVKVFYAEEDFDDSAAGRFALRSMMNVNQFYSDNLAEDVRRGLMDNASKCMANGRQPLGYKRGEGGKVVVDEPAAAIVREIYTRIASGEMFMDIARDLNRRGIKTQSGSEWNKSSFKVLCRNERYRGIYIYGDTRIEGGIPPIVDDVLWYKVQEVLKVKKSKNRHHCPSDEDYLLTGKLRCGKCGGYMIGMSGRSKTGDVHHYYACQNRRVGHTCDKKNIRRDVVEPAVAQAIKQYCLTDDAIEWITDQTIAYWEDEDRKLQIDSIENDLSAVQSSISNVMKAIEMGVITETTRDRLIELERQQTDLKSKLALAKEEIVHVDRKDLISSLLAFRHGNVHDRAYQEKLFNAFLIAVYVYDDDHLKLVFNSFGKDDTVNIALDLGENDDNSGLSDVSKSSPIFSNGQPESHLIRSDGFFVLSLGAFLGRCDTKL

SEQ ID NO: 2876 - protein, 537 aa, Unknown
  Description of Unknown: Integrase B2877 sequence
  SM00857,IPR006118,G3DSA:1.10.10.2600,IPR036162,PF13408, IPR025827,G3DSA:3.40.50.1390,PS51737,IPR006119,IPR038109, PF07508,IPR011109,SSF53041,PTHR30461,PS00397, PS51736,cd00338,PF00239
MQNKQAVIYARVSSREQEREGFSIPAQLKLLKEYALKNGFQIVNEYSDAETAKKAGRTNYNAMLAFLKENPEIKTVLVEKTDRLYRNFKDYVTLEDYDLEVHLVKEGSIISKNSKSHDKFIHGIKVLMAKNYIDNLSEEISKGLHEGLEQGYWPFQPPYGYLRGAKKNLIIDKSRILFIRRAFELFATGKFSLRKLCEELFVEGYYYKAERPKITQCVLESMLKNVIYVGQMNCNGIIYQGKHPAIISREIFDKAQLAFHKVDKSKVRKNFDFLYPGIVKCGVCGYSFCGERQKKHNIYYRCSHFDRSCPNTCYISEKHLTQSFRMHLKRIGLDEDLYELVKYSLKECLGDEQEYHKTEITRITSEIEQCKEILKKMYLDQVNNVLDYNMWINLKNEYEVKLNRLSAEYQKHLYANTNFLDTGLKILDLCRKASLPATELSAEEVANIIRETYLSATAKDKRVKVVFKEPFATIENLVKLAKKEISEVGFAEFKSAIISSKDKCIKSIKKEPVGSDFNCSSCFKWWRLGDSVLLVRI

SEQ ID NO: 2877 - protein, 537 aa, Unknown
  Description of Unknown: Integrase B2878 sequence
  PTHR30461:SF3,cd00338,SM00857,G3DSA:1.10.10.2600,IPR036162, PF13408,PS51737,IPR025827,G3DSA:3.40.50.1390,IPR006119, IPR038109,PF07508,SSF53041,IPR011109,PTHR30461, PS51736,Coil,PF00239
MAKRKFNKGGEVRLVAYYRYSGGSGQTEQSIEGQRRDCEAYARLHNMTIQKEYVDRHISGKTDDRAAFQQMIADSDKGAFDMVICWKTDRFARNRYDSAVYKKRLRDNGVEIVYAAESNISGAEGIIIEGVMEALAEYYSAELAEKMRRGMRESALKGQAISRCRALGLKTDEHKRFVIDEKTAPTVRFIFEHYAAGESAMSIVEQLNAKGLRTSQGNPFNKSSIPRIIQNEAYRGVYISKSYDVRIEGAIPAIIDDELWERAQTMLKLNRQLKAKNEPKADYILSGKLYCSCGSLMRGMSGHSATGEVYRYYTCPNKDCHLRNIPKDDLEGKVMQSIVDHLLQPESMEALAEAMVEVQKADVEKPNAERVAIEQSLSDVRRRSKNILDAIENGTANAQLCARLDDLTEQEQTLSFQLSSLEKEKPVVFTKEQYLFLLEQFLMEPSERTPEYGRRLVNTFVTSMVVSGRELVINFNVSDEAVNKNKKTSQTNLQKESSSGMRLVHLAHQQANYSLYAASGYFSLVEHQFSARLWRTA

SEQ ID NO: 2878 - protein, 537 aa, Unknown
  Description of Unknown: Integrase B2879 sequence
  PTHR30461:SF3,SM00857,G3DSA:1.10.10.2600,IPR036162,PF13408, PS51737,G3DSA:3.40.50.1390,IPR025827,IPR006119,IPR038109, PF07508,SSF53041,IPR011109,PF00239,PTHR30461, PS51736,Coil,cd00338
MARKKKVSPGNRLVAYYRYSGGSQQTEQSIEGQRRDCEAYARQHGLTIVHEYIDRHISGRGVESRLAFQQMIADSSKHLFDLVICWKTDRFARNRYDSAVYKKKLRDNGVRILYAAESSVEGPEGIILEGLMESLAEYYSAELAQKMRRGMRESALKGKAINPNRPLGLTTDEHKRFIIDEKNAPTIRFIFEHYAAGESSASIVDQLNAAGLRTSKGNSFNKCSIPRIIQNEAYHGVYICKAYDVRIDGAVPAIIDDDLWKRAQKMLTLNKQHRAPHSSHADYLLSGKLFCGCCHSLMRGISGHNCRNDVYYYYACGNKADGGTCKKKNIPKDVAENLVVNAICENILRPDTLEDLADAIAAAQQADVNQPDPERAMLEQNLADVRRKINNIIESIENGTASSRLSARLADLEQQESTLNYQLESLKEVHPPVLDRERILFLLEQFLISPNERTEDYNRRIIDTFVNRIEITDTEMLIYFNLSEASASEKQKNSQPNSCSTGNHLVHLTHSHSNNFSLYATPNSFYILLSNLTFSRT

SEQ ID NO: 2879 - protein, 537 aa, Unknown
  Description of Unknown: Integrase B2880 sequence
  PTHR30461:SF3,SM00857,G3DSA:1.10.10.2600,IPR036162,PF13408, PS51737,G3DSA:3.40.50.1390,IPR025827,IPR006119,IPR038109, PF07508,IPR011109,SSF53041,PF00239,PTHR30461, Coil,cd00338
MTENKNRVCCLYRVSTDKQVDFNSNHEADLPMQRKACHKFAEAKGWVIVHEEQEEGVSGHKVRAEARDKLQIIKEYARKGKFDILLVFMFDRIGRIADETPFVVEWFVRNGIRVWSTQEGEQRFDNHTDKLLNYIRFWQADGESEKTSVRTRTSLRQLVEEGHFKGGSAPYGYDLVKSGRINKRKHELYELHINEQEAEIVRLIFDKYVYEGYGAQRIATYLNNAGYRARSGKCWHPGSLRGMVGNLTYMGVLRCGDARSELIPELHIIPQEEFEAAQRIREDRSAHAAEEAEHHVPLRTRGQALLSNNVYCGHCGARLALTTSRKWRKLSDGTLDDTLRIRYTCYGKLRKQTDCTGQTGYTMHILDEIIDKMVRQIFSRLRGIPKEQLITSRYAKETAERKNHLQALQAERDKAEKDLLALKTEILAVIKGESAFPKDTLAEMIAAQEKKHTELDTLCEEASAELERNAELMANVSQLYEELISYADLYDSASFEAKKMIVSQLIRRVEVYRGYQIHVDFNFDLAQYLENSDELAC

SEQ ID NO: 2880 - protein, 537 aa, Unknown
  Description of Unknown: Integrase B2881 sequence
  PTHR30461:SF3,IPR036162,PS51737,IPR011109,PTHR30461, PF00239,G3DSA:1.10.10.2600,IPR006119,PF14287,SSF53041, IPR025378,SM00857,IPR025827,cd03770,IPR038109, PF13408,G3DSA:3.40.50.1390,PF07508,Coil
MKQQIYNTALYLRLSRDDELQGESSSITTQRSMLRLYAKEHHLNVIDEYIDDGWSGTNFDRPSFQRMIEDIEAGKINCVVTKDLSRLGRNYIMTGQYTELYFPSHNVRYIAIDDGVDSEKGESEIAPFKNIINEWVARDTSRKVKSAFKTKFAEGAHYSAYAPLGYKKHPDIKGKLLIDDETKWIIEKIFSLAYQGYGSAKITKQLRAEKVPTASWLNFTRYGTFAHIFEGKPESKRYEWTIAHVKAILKSEVYIGNSVHNMQSTVSFKSKKKVRKPESEWFRVENTHEPIIDKEVFYRVQEQIKSRRRQTKEKATPIFAGLVKCADCGWSMRFGTNKANKTPYSYYACSYYGQFGKGNCSMHYIRYDVLYQAVLERLQYWAKAVQQDEEKVLNKIQKVGNAERIREKKKKASTLKKAENRQNEIDRLFAKMYEDRACEKITERNFVMLSSKYQKEQIELEQQITSLREELSKMEQDMIGAEKWIELIKEYSVPKELTAPLLNAMIEKILIHEATTNEDNERIQEIEIYYRFIGKVE

SEQ ID NO: 2881 - protein, 537 aa, Unknown
  Description of Unknown: Integrase B2882 sequence
  PTHR30461:SF3,SM00857,G3DSA:1.10.10.2600,IPR036162,PF13408, IPR025827,G3DSA:3.40.50.1390,PS51737,IPR006119,IPR038109, PF07508,IPR011109,SSF53041,PF00239,PTHR30461, Coil,cd00338
MNEMNNRVCCLYRVSTDKQVDFNSNHEADLPMQRKACHKFAEAKGWVIVHEEQEEGVSGHKVRAEARDKLQIIKDYARKGKFDILLVFMFDRIGRIADETPFVVEWFVRNGIRVWSTQEGEQRFDNHTDKLLNYIRFWQADGESEKTSVRTRTSLRQLVEEGHFKGGSAPYGYDLVKSGRINKRKHELYELHINEREAAVVRIIFDKYVHEGYGPQHIATYLNDNGYRARSGKCWHPASIRGMVRNLTYTGVLRCGDAHSELLQELQIIPAQQFEAAQRIRENRSNRAAQESEYRVPLNIHGQSLLSGNAYCGHCGAKLTLTSSRKWRKLSDGTLDDTLRVRYTCYGKLRKQTGCTGQTGYTVHILDEIIDKSVRQIFSKMRGIPKEQIITRRYEREVVERKNHLQTIQVERDKAQKDLISLKAEILACIKGESVFPKETLAEMITAQEEKLRELDALYESSYAETEKTAELMDNVSKLYEELISFSDLYDSASFEAKKMIVNQLIRRVDVYRGYQLNITFNFDLTPYIEGDDTTAC

SEQ ID NO: 2882 - protein, 537 aa, Unknown
  Description of Unknown: Integrase B2883 sequence
  PTHR30461:SF3,SM00857,G3DSA:1.10.10.2600,IPR036162,PF13408, IPR025827,PS51737,G3DSA:3.40.50.1390,IPR006119,IPR038109, PF07508,IPR011109,SSF53041,PTHR30461,Coil, PS51736,cd00338,PF00239
MPAVTATRVTIIPAKKDRLPINVLSSEARKLRVAAYARVSTNNEEQLTSYEAQVDYYTRYIQSKDEWQFVEVYTDEGISATNTKKRDGFNRMVADALAGKIDLIITKSISRFARNTVDTLTTVRKLKEKGIEVFFEKENIRTLDGKGELLITIMSSLAQEESRSISENVTWGQRKRFADGKVSLPYRRFLGYEKGPDGLPVIVESEAVIIRLIYRLFLYGKSPSAIATYLTDEGIPTPGGKKVWRAKVVESILTNEKYKGDALLQKKFTVDFLTKKQKVNEGEVPQYYVTNSHPAIIEPELFDLVQYELKTRKTDGRFTSCLHPFSGRIICGECGGIYGSKVWHSNTENRSLVWQCNEKYRGQHCSTPHLTEGEIKAAFLAAFNIVLGSRDEIIEAYEEVIAALTDTADLDAEQETLENESEVVLGLIQKIISENAQTAMDQEEYNRRYDAYSERFEAARKRLAEIAELRQERNAKKTRIRLFMENMNSHQELVQSFDEELWYSTVDYVTVYEDKRLVFTFRDGRQVEITAELWRAA

SEQ ID NO: 2883 - protein, 537 aa, Unknown
  Description of Unknown: Integrase B2884 sequence
  PTHR30461:SF3,SM00857,G3DSA:1.10.10.2600,IPR036162,PF13408, PS51737,IPR025827,G3DSA:3.40.50.1390,IPR006119,IPR038109, PF07508,IPR011109,SSF53041,PF00239,PTHR30461, PS51736,Coil,cd00338
MKKFPIDLSCLTEEEISQFQEDPYTLYNGDQNVAIYLRYSSTGQSDQSIEGQLRDCRTFCKANHYRIVAIYVDRATTARKDMEKRVHLMEMISDSAKQNWEYVIVWKLDRFARNRNDSAIMKMRLRKNGVKVLSATEHLTDSPESIILESVLEGMAEFFSAELSQKVTRGMRESALKCYSVGGHIPLGYKVENHKLVVDPDTAHIVQEAFSLYANGESVAAICRKFNSAGYKTAKNTEFNRSSFKAMFRNTRYIGTYTYKDIVIENGIPAIIDKELFETVQRRLSKTATAPARGKAKVDYLLSGKLFCGHCGASMNGESGAGRHGKVYHYYSCYTKKRKLGCDKRPLKKDYIEGIVARDALNLLTDQLIDEIADMAIRQSEQDLINDTHIPQLTAQLSEVEKSITNITAAIEKGIASETLMNRLVQLEHEKKTLNKEIKAEEKFVYRIDRDQIVFWLSQFKYGNIEDEDFRRRLIDLLVNSVTVWDEPDGYKITTAYNLTSCKTKTFRVEKNPAAEKVTGFDFGESECTKNRLKHIA

SEQ ID NO: 2884 - protein, 536 aa, Unknown
  Description of Unknown: Integrase B2885 sequence
  PTHR30461:SF3,IPR036162,PS51737,IPR011109,PTHR30461, PF00239,G3DSA:1.10.10.2600,IPR006119,PF14287,SSF53041, IPR025378,SM00857,IPR025827,cd03770,IPR038109, PF13408,G3DSA:3.40.50.1390,PF07508,Coil
MKQLIYRVALYMRLSRDDEDYGESVSIETQRKIITQFANEQHFIIVDEYIDDGWSGTNFDRPAFQRMMEDVESGKVNCIITKDLSRLGREHIMMDYYLEFYFPEKRIRYIAVTENEDTEKGLSDFVPFKNLFNEWFAKDTSRKVKAAFKAKFAAGDRICAYVKIGYKRHPEIKNRIVPDEETRWIPEKIFDLAYHGAGAAKITRTLIAEKVPTPSWINYQRFGTFAHVYQNASEEKRYAWTVAQVKYILKDETYIGNTVHYKQTNISFKNKKRIRKPEDEWWRIENTHEGLIPKEMFDSVQAQIATRRRMQKDHTTQIFSGLVKCADCGWSMRFGTNRQNKNPYSHYTCSKYGQVGIHCSAHYIRYDVLYAYVLSRIQYWAAQAVQDEDALLERLLQTGNAKQNAERKKIADDLKRSEKRQKELDNLFAKLYEDRIAERITERNFIMLSAKYQEEQNALDGKIDLLNGQISENSERYSNIETWVKLIKQYASPTELDSILLNALVEKITVHKAVKHEDGSREQEVEIFYKFIGKID

SEQ ID NO: 2885 - protein, 536 aa, Unknown
  Description of Unknown: Integrase B2886 sequence
  SM00857,G3DSA:1.10.10.2600,IPR036162,PF13408,PS51737, G3DSA:3.40.50.1390,IPR025827,IPR006119,IPR038109,PF07508, IPR011109,SSF53041,PF00239,PTHR30461,PS51736, Coil,cd00338
MKRVYTLYRVSTKQQVDKAKNDIPMQRIECREFAQKQGWEIVKELEEKGVSGFKVSAADRDAIQDLKEAAEKKKFDVLLVYMFDRIGRIDDETPFVVEWFCKHGIEVWSVEEGEQRFDSHVDKLTNYIRFWQASGESGKTSMRIKTRIHQLRIEGAYTGGPVPYGYCLEQKGRLNRKGQPIPDFAIEPHEAEIVREIFRKTLCDGYGSHRMAQYLNNRGLRTHGGARFHSIAIIRILRQKFYCGYIDDETSEGLQNLKIIDLDVFNQVQSILDQRAEKDTEKRQIALRTQGEAMLSGNIFCAHCGGRLNVIRYKDHYTRKDGSEYSVNQIKYACYHKSRKLCDCEGQTTYLAERVDEIVSQVIRQLFATMKGAPQQERLEATLKHQIASNRAQQKKINHELEKRRSRLGKLQEEIANALSGESIYSPEDVAQAISKIKEGISALEQQLYDLENDAFKQRRAMQMITPSYNQFKSWAEEFEQASIEQKKMIACQLFKKIEVGREYNVTFELNMTYQQFCSEWDGLATIFEQQDLIAQ

SEQ ID NO: 2886 - protein, 536 aa, Unknown
  Description of Unknown: Integrase B2887 sequence
  PTHR30461:SF3,SM00857,G3DSA:1.10.10.2600,IPR036162,PF13408, PS51737,IPR025827,G3DSA:3.40.50.1390,IPR006119,IPR038109, PF07508,SSF53041,IPR011109,PF00239,PTHR30461, PS51736,Coil,cd00338
MQRQHGAYIYARYSTENQDADSIDVQVGKCTQYCSQRGLPILGVFADEAVSGMKESRPRFDAMMAQLGMGLADTVVCYDQSRLFRKMTAWFDLREKLSVMGVAVISVTQPMVGGDLRDPTIFLTEGGMALFNQVWVFQSRQKVMEKMQHMARNGQHTGGKPPLGYQVVELGGVKKLAILPPEAETVKRIFSEYDSGRSYHDIIAGLNRDGIKTKRGNPFGTNSLHDLLKNEKYVGTLVYGASPYRADGTRNTHAKDGENVIRVEDAIPAIIDKDQFARVQARMAENKRVQGGRPATRREYPLRGKVFCGYCKSAMSVSISRKSYTYYKCGAKKRQHSCDAGNVSVDALEQTVAENVRLVLGQKGSIDKLIAVLRQQRTVIQDNALAQLKALISRREELRRKLDNAADLVLDGRGSKTLIARMTDMEREQEQLDAKMAALKRAVDASAVPEQTLRRYAQMMADGSVDNLAPYLAIVCRVEVYGDKVVIWTILDDDPTAPKDFNAPGVQITLGIPSGVPMVFVTADLLRIVATKQSTS

SEQ ID NO: 2887 - protein, 536 aa, Unknown
  Description of Unknown: Integrase B2888 sequence
  SM00857,G3DSA:1.10.10.2600,IPR036162,PF13408,PS51737, IPR025827,G3DSA:3.40.50.1390,IPR006119,IPR038109,PF07508, SSF53041,IPR011109,PTHR30461,PS51736,cd00338, PF00239
MKLTHGAYILARFSTDRQEADSIEVQVSKCREWCDRQRLPVLDVFADEAVSGMKETRPQFDRMMRLLSEGGADTVVIYDQSRMFRKMTAWFTLRERLERLGVRVVSVTQPMIGGDLRDPATFMSEGGMALMNQMWVLQTRQKVCEKMRWMAEQGKYTGGVPPLGYVVIDGRIEVCEPEAETVRIIFGDYAAGRSYREIIQRLNAEGRRTKSGGTFGSNSLHDLLKNEKYIGVLTYGRTQKRPDGSRNSHAVASTVMRMEDMIPAIVDRETWDIVQEKLMANKRKQAGRPVRVREYPLKGKVFCGECKASMSVTCSQGGYYYYACSEKKRKKTCDNMPIKVDDLERMIAEAIKNMLGNPENVDGLICILREERGKIQEQTAMRMKALFDRQAEIKKQLDAAMSAVLAGMHSQSLIDTVHALEAEQAQNDREMTTLHNQAQGTTIPEDRLRELLKVAANDIPALLSVVVRVEVGKDRIRVWTLLDAKPDGTFDFNTDWDDPEIGLIIIPGVAPPVPRIIINGGLLCFSLPRQKKNRAE

SEQ ID NO: 2888 - protein, 536 aa, Unknown
  Description of Unknown: Integrase B2889 sequence
  SM00857,G3DSA:1.10.10.2600,IPR036162,PF13408,PS51737, G3DSA:3.40.50.1390,IPR025827,IPR006119,IPR038109,PF07508, SSF53041,IPR011109,PTHR30461,PS51736,cd00338, PF00239
MKLTHGAYILARFSTDRQEADSIEVQVSKCREWCERQRLPVLDVFADEAVSGMKETRPQFDRMMRLLSEGGADTVVIYDQSRMFRKMTAWFTLRERLERLGVRVVSVTQPMIGGDLRDPATFMSEGGMALMNQMWVLQTRQKVCEKMRWMAEQGKYTGGVPPLGYVVIDGRIEVCEPEAETVRIIFGDYAAGRSYREIIQRLNAEGRRTKSGGTFGSNSLHDLLKNEKYIGVLTYGRTQKRPDGSRNSHAVASTVMRMEDMIPAIVDRETWDIVQEKLMANKRKQAGRPVRVREYPLKGKVFCGECKASMSVTCSQGGYYYYACSEKKRKKTCDNMPIKVDDLERMIAEAIKNMLGNPENVDGLICILREERGKIQEQTAIRMKALFDRQAEIKKQLDAAMSAVLAGMHSQSLIDTVHALEAEQAQNDREMTTLHNQAQGTTIPEDRLRELLKVAANDIPALLSVVVRVEVGKDRIRVWTLLDAKPDGTFDFNTDWDDPEIGLIIIPGVAPPVPRIIINGGLLCFSLPRQKKSRAE

SEQ ID NO: 2889 - protein, 536 aa, Unknown
  Description of Unknown: Integrase B2890 sequence
  PTHR30461:SF3,IPR036162,PS51737,IPR011109,PTHR30461, PF00239,G3DSA:1.10.10.2600,IPR006119,SSF53041,cd00338, SM00857,IPR025827,IPR038109,mobidb-lite,PS51736, PF13408,G3DSA:3.40.50.1390,PF07508,Coil
MPRKKKLQEVGGLRLVAYYRYSNGGQQTEQSIEGQRRDCEAYAKAHGYKIVHEYIDRHISGKSDSRPAFQQMISDSDSHLFDAVICWKTDRLARSRYDSIIYKTRLRRNGVKILYAAETVVDGPEGIIIEGLMESLAEYYSAELAQKLRRGQRESALKCIALGGNRSFGYDIGPDKHYCINEKQAPAVRYIFEQYAAGATAADIVRELTARGYRTSRGNPFNKNSICRIITNEMYLGVYKYADIRIEGGVPAMIDRELFNRCQTQLAFNRAHGGGKGAPRADYVLVGKLDCGLCGHAMKGASATGHTGSKHYYYTCTQHVEKKCPKTSIEKNYLEQVIVDGVAKYVLTPEKISQIVDCMMELQAKEQEPKGNPEKDALEAELAECRRKQNNILEAIEEGGSARLAARLRALEEQEAQLTFALGEINNAPAPPQFSREALTFMFEQFRREEDEVDEEYRRRILDTFVSSILLYEDRAEVKFNITDQKTGDFERVILPISANKKPPEDDDTTSNSEGSTALRLVEAMGVEPMSEKSSV

SEQ ID NO: 2890 - protein, 536 aa, Unknown
  Description of Unknown: Integrase B2891 sequence
  PTHR30461:SF3,IPR036162,PS51737,IPR011109,PTHR30461, PF00239,G3DSA:1.10.10.2600,IPR006119,SSF53041,cd00338, SM00857,IPR025827,IPR038109,PS51736,mobidb-lite, PF13408,G3DSA:3.40.50.1390,PF07508,Coil
MPRKKKLQEVGGLRLVAYYRYSNGGQQTEQSIEGQRRDCEAYAKAHGYKIVHEYIDRHISGKSDSRPAFQQMISDSDSHLFDAVICWKTDRLARSRYDSIIYKTRLRKNGVKILYAAETVVDGPEGIIIEGLMESLAEYYSAELAQKLRRGQRESALKCIALGGNRSFGYDIGPDKHYCINEKQAPAVRYIFEQYAAGATAADIVRELTARGYRTSRGNPFNKNSICRIITNEMYLGVYKYADIRIEGGVPAMIDRELFNRCQTQLAFNRAHGGGKGAPRADYVLVGKLDCGLCGHAMKGASATGHTGSKHYYYTCTQHVEKKCPKTSIEKNFLEQIIVDGVAKYVLTPEKISQIVDCMMELQAKEQEPKDNLEKDALEAELAECRRKQNNILEAIEEGGSARLAARLRALEEQEAQLTFALGEINNAPAPPQFSREALTFMFEQFRREEDEVDEEYRRRILDTFVSSILLYEDRAEVKFNITDQKTGDFERVILPISANKKPPEDDDITSNSEGSTALRLVEAMGVEPMSEKSSA

SEQ ID NO: 2891 - protein, 536 aa, Unknown
  Description of Unknown: Integrase B2892 sequence
  PTHR30461:SF3,IPR036162,PS51737,IPR011109,PTHR30461, PS00397,PF00239,G3DSA:1.10.10.2600,IPR006119,SSF53041, cd00338,SM00857,IPR025827,IPR038109,PS51736, IPR006118,PF13408,G3DSA:3.40.50.1390,PF07508,Coil
MLKNTKIAVYCRVSSDEQAERGTIDNQVTFAQQYADLHRLDIYDIYKDDGVTGTIPLQDRPEGHRLLQDAADERFTLVIFYKMDRLGRSTRVILNAVEALSQYGVGVQSMSEPFDTATPSGRFMLTMFAGVAELDRANILDRMYQGTLRHARLGKWCGGPAPFGYRLQDGYLVISEEPMPGQQLSEADVIRMLYNKTIEGWSALRLAQHLNALSIPNKYTLRGNVAAGSGKWHQSKILYILHNTLYYGERNFGKLSNNNNKNIIPQQVPAIVSRETWDAAQAAVEQHSIMPKFIKRRSYLLRGLIRCGICGHTYVGTCYKRKAGYSIYYVCNAKNTRGVTPEPCKGQTLRGEWIEDLVWQDCLKYIQQPDVIAVDADCHPQQSADDIKKEIAAITAQLKQLDQERQTVIGLCRQGIITAADLDGQLSDITAKQNTLQQTLEGLNSQNIVTKEDAEKRVKEIADILDGFRQQLQSGGELSFDAKQGIIRTLVKQITVHTELQAGTERDIPSVRVQIDYNFTLLPSKAGMLDPYRHGF

SEQ ID NO: 2892 - protein, 536 aa, Unknown
  Description of Unknown: Integrase B2893 sequence
  PTHR30461:SF3,IPR036162,PS51737,IPR011109,PTHR30461, PF00239,G3DSA:1.10.10.2600,IPR006119,SSF53041,cd00338, SM00857,IPR025827,IPR038109,PS51736,mobidb-lite, PF13408,G3DSA:3.40.50.1390,PF07508,Coil
MPRKKKLQEVGGLRLVAYYRYSNGGQQTEQSIEGQRRDCEAYAKAHGYKIVHEYIDRHISGKSDSRPAFQQMISDSDSHLFDAVICWKTDRLARSRYDSIIYKTRLRRNGVKILYAAETVVDGPEGIIIEGLMESLAEYYSAELAQKLRRGQRESALKCIALGGNRSFGYDIGPDKHYCINEKQAPAVRYIFEQYAAGATAADIVRELTARGYRTSRGNPFNKNSICRIITNEMYLGVYKYADIRIEGGVPAMIDRELFNRCQTQLAFNRAHGGGKGAPRADYVLVGKLDCGLCGHAMKGASATGHTGSKHYYYTCTQHVEKKCPKTSIEKNYLEQVIVDGVAKYVLTPEKISQIVDCMMELQAKEQEPKGNPEKDALEAELAECRRKQNNILEAIEEGGSARLAARLRALEEQEAQLTFALGEINNAPAPPQFSREALTFMFEQFRREEDEVDEEYRRRILDTFVSSILLYEDRAEVKFNITDQKTGDFERVILPISANKKPPEDDDIPSNSEGSTALRLVEAMGVEPMSEKSSA

SEQ ID NO: 2893 - protein, 536 aa, Unknown
  Description of Unknown: Integrase B2894 sequence
  PTHR30461:SF3,IPR036162,PS51737,IPR011109,PTHR30461, PF00239,G3DSA:1.10.10.2600,IPR006119,SSF53041,cd00338, SM00857,IPR025827,IPR038109,PS51736,mobidb-lite, PF13408,G3DSA:3.40.50.1390,PF07508,Coil
MPRKKKLQEVGGLRLVAYYRYSNGGQQTEQSIEGQRRDCEAYAKAHGYKIVHEYIDRHISGKSDSRPAFQQMISDSDSHLFDAVICWKTDRLARSRYDSIIYKTRLRRNGVKILYAAETVVDGPEGIIIEGLMESLAEYYSAELAQKLRRGQRESALKCIALGGNRSFGYDIGPDKHYCINEKQAPAVRYIFEQYAAGATAADIVRELTARGYRTSRGNPFNKNSICRIITNEMYLGVYKYADIRIEGGVPAMIDRELFNRCQTQLAFNRAHGGGKGAPRADYVLVGKLDCGLCGHAMKGASATGHTGSKHYYYTCTQHVEKKCPKTSIEKNYLEQVIVDGVAKYVLTPEKISQIVDCMMELQAKEQEPKGNPEKDALEAELAECRRKQNNILEAIEEGGSARLAARLRTLEEQEAQLTFALGEINNAPTPPQFSREALTFMFEQFRREEDEVDEEYRRRILDTFVSSILLYEDRAEVKFNITDQKTGDFERVILPISANKKPPEDDDIPSNSEGSTALRLVEAMGVEPMSEKSSA

SEQ ID NO: 2894 - protein, 536 aa, Unknown
  Description of Unknown: Integrase B2895 sequence
  PTHR30461:SF3,IPR036162,PS51737,IPR011109,PTHR30461, PF00239,G3DSA:1.10.10.2600,IPR006119,SSF53041,cd00338, SM00857,IPR025827,IPR038109,PS51736,mobidb-lite, PF13408,G3DSA:3.40.50.1390,PF07508,Coil
MPRKKKLQEVGGLRLVAYYRYSNGGQQTEQSIEGQRRDCEAYAKAHGYKIVHEYIDRHISGKSDSRPAFQQMISDSDSHLFDAVICWKTDRLARSRYDSIIYKTRLRKNGVKILYAAETVVDGPEGIIIEGLMESLAEYYSAELAQKLRRGQRESALKCIALGGNRSFGYDIGPDKHYCINEKQAPAVRYIFEQYAAGATAADIVRELTARGYRTSRGNPFNKNSICRIITNEMYLGVYKYADIRIEGGVPAMIDRELFNRCQTQLSFNRAHGGGKGAPRADYVLVGKLDCGLCGHAMKGASATGHTGSKHYYYTCTQHVEKKCPKTSIEKNYLEQIIVDGVAKYVLTPEKISQIVDCMMELQAKEQEPKGNPEKDALEAELAECRRKQNNILEAIEEGGSARLAARLRTLEEQEAQLTFALGEINNAPTPPQFSREALTFMFEQFRREEDEVDEEYRRRILDTFVSSILLYEDRAEVKFNITDQKTGDFERVILPISANKKPPEDDDITSNSEGSTALRLVEAMGVEPMSEKSSA

SEQ ID NO: 2895 - protein, 536 aa, Unknown
  Description of Unknown: Integrase B2896 sequence
  PTHR30461:SF3,SM00857,G3DSA:1.10.10.2600,IPR036162,PF13408, PS51737,G3DSA:3.40.50.1390,IPR025827,IPR006119,IPR038109, PF07508,IPR011109,SSF53041,PTHR30461,Coil, PS51736,cd00338,PF00239
MSTAVVYARYSSHSQRDASIDQQLATCRAFAQRGGIDIVDVYTDRALTGTNDNRPGFKKMIADAAKGRWNYVLVYALDRFSRDRYDSAVNKKRLRDCGVKVISATEPITEDPVGSLMESMLEGYAEYYSRELSAKVRRGHADNAKKGIVNGPLPLGYRRGTDGRPEIDPDRAEIVREIYRRAGRGEPLVRIAEDLNARGIRTKTGGPWGKSSFNTLLSNERYTGLYIYQDTRIPGGIPAIISPEDFAAVQHRLGGKKNPRRPVLPDAPPSRRRGADIYLLTGKLFCAGCGAPLVGVSGKARDGSLRHYYACRGRIREGRQCNLKNIRREDIEADIAAAIKQQILNEPTIQAISEAAYTYQLSLCESADLTILRQQLADTTKALKNIMAAIEQGIFTASTKTRLQELEADQQSLTARITAAEAAVENIPTKSEIAATLKYYATGDLADPLYREALIDTFLVRAYVHPDHYDIYFSTDAKSAVSFPLDLKTATLSESELLNGSYRVPGLGPDQTIRTVTQHIILICGMFRITFNRPSH

SEQ ID NO: 2896 - protein, 536 aa, Unknown
  Description of Unknown: Integrase B2897 sequence
  PTHR30461:SF3,IPR036162,PS51737,IPR011109,PTHR30461, PS00397,PF00239,G3DSA:1.10.10.2600,IPR006119,SSF53041, cd00338,SM00857,IPR025827,IPR038109,PS51736, IPR006118,PF13408,G3DSA:3.40.50.1390,PF07508,Coil
MFKNTKIAVYCRVSSDEQAERGTIDNQITFAQQYADLHHLDIYDVYKDDGITGTIPLQDRPEGHRLLQDAADERFTLVVFYKMDRLGRSTRVILNAVEALSQYGVGVQSMSEPFDTATPSGRFMLTMFAGVAELDRANILDRMYQGTLRHARLGKWCGGPAPFGYRLQDGYLVISEEPMPGQQLSEADIIRMLYSKTIEGWSALRLAQHLNALGVPNKYTLRGNVAAGSGKWHQSKILYILHNTLYYGERSFGKLSKNNNKNIIPQQVPAIVSKETWDAAQAAVEQHSIMPKFVKRRRYLLRGLIRCGICGHTYVGTYYKRKAGNSIYYVCNAKNTRGVTPEPCKGQTLRGEWIESLVWEDCLRYIKQPDVIAVDEDCRYLQSAGDIKKEIDAATAQLKQLDQERQTVIGLCRQGIITAADLDGQLSEITAKQNTLQQTLEGLNSQSIVTKEDAEKRIKEIADILDGFRQQLQSGGELSFDAKQGIIRTLVKQIIVHTELQPGAERDIPTVRVCIDYNFTLLSAKTAMLDPYRQGF

SEQ ID NO: 2897 - protein, 536 aa, Unknown
  Description of Unknown: Integrase B2898 sequence
  SM00857,G3DSA:1.10.10.2600,IPR036162,PF13408,PS51737, G3DSA:3.40.50.1390,IPR025827,IPR006119,IPR038109,PF07508, SSF53041,IPR011109,PTHR30461,PS51736,cd00338, PF00239
MKLTHGAYILARFSTDRQEADSIEVQVSKCREWCERQRLPVLDVFADEAVSGMKETRPQFDRMMRLLSEGGADTVVIYDQSRMFRKMTAWFTLRERLERLGVRVVSVTQPMIGGDLRDPATFMSEGGMALMNQMWVLQTRQKVCEKMRWMAEQGKYTGGVPPLGYVVIDGRIEVCEPEAETVRIIFGDYAAGRSYREIIQRLNAEGRRTKSGGTFGSNSLHDLLKNEKYIGVLTYGRTQKRPDGSRNSHAVASTVMRMEDMIPAIVDRETWDTVQEKLMANKRKQAGRPVRVREYPLKGKVFCGECKASMSVTCSQGGYYYYACSEKKRKKTCDNMPIKVDDLERMIAEAIKNMLGNPENVDGLICILREERGKIQEQTAIRMKALFDRQAEIKKQLDAAMSAVLAGMHSQSLIDTVHALEAEQAQNDREMTTLHNQAQGTTIPEDRLRELLKVAANDIPALLSVVVRVEVGKDRIRVWTLLDAKPDGTFDFNTDWDDPEIGLIIIPGVAPPVPRIIINGGLLCFSLPRQKKNRAE

SEQ ID NO: 2898 - protein, 536 aa, Unknown
  Description of Unknown: Integrase B2899 sequence
  PTHR30461:SF3,IPR036162,PS51737,IPR011109,PTHR30461, PF00239,G3DSA:1.10.10.2600,PF14287,IPR006119,SSF53041, IPR025378,SM00857,IPR025827,cd03770,IPR038109, PF13408,G3DSA:3.40.50.1390,PF07508,Coil
MKQLIYRVALYMRLSRDDEDYGESVSIETQRKIITQFANEQHFIIVDEYIDDGWSGTNFDRPAFQRMMEDVESGKVNCIITKDLSRLGREHIMMDYYLEFYFPEKRIRYIAVTENEDTEKGLSDFVPFKNLFNEWFAKDTSRKVKAAFKAKFAAGDRICAYVKIGYKRHPEIKNRIVPDEETRWIPEKIFDLAYHGAGAAKITRTLIAEKVPTPSWINYQRFGTFAHVYQNASEEKRYAWTVAQVKYILKDETYIGNTVHYKQTNISFKNKKRIRKPEDEWWRIENTHEGLIPKEMFDSVQAQIATRRRMQKDHTTQIFSGLVKCADCGWSMRFGTNRQNKNPYSHYTCSKYGQVGIHCSAHYIRYDVLYAYVLSRIQYWAAQAVQDEDALLERLLQTGNAKQNAERKKIADDLRRAEKRQKELDNLFAKLYEDRIAERITERNFIMLSAKYQEEQNALDGKIDLLNGQISENSERYSNIETWVKLIKQYASPTELDSILLNALVEKITVHEAVKHEDGSREQEVEIFYKFIGKID

SEQ ID NO: 2899 - protein, 536 aa, Unknown
  Description of Unknown: Integrase B2900 sequence
  PTHR30461:SF3,SM00857,G3DSA:1.10.10.2600,IPR036162,PF13408, IPR025827,PS51737,G3DSA:3.40.50.1390,IPR006119,IPR038109, PF07508,SSF53041,IPR011109,PF00239,PTHR30461, PS51736,Coil,cd00338
MQRQHGAYIYARYSTENQDADSIDVQVGKCTQYCSQRGLPILGVFADEAVSGMKESRPRFDAMMAQLGMGLADTVVCYDQSRLFRKMTAWFDLREKLSVMGVAVISVTQPMVGGDLRDPTIFLTEGGMALFNQVWVFQSRQKVMEKMQHMARNGQHTGGKPPLGYQVVELGGVKKLAILPPEAETVKRIFAEYDSGRSYHDIIAGLNRDGIKTKRGNQFGTNSLHDLLKNEKYIGTLVYGASPYRADGTRNTHAKDGENVIRVEDAIPAIIDKDQFARVQARMAENKRVQGGRPATRREYPLKGKVFCGYCKSAMSVSISRKSYTYYKCGAKKRQHSCDAGNVSVDALEQTVAENVRLVLGQKGSIDKLIAVLRQQRTVIQDNALAQLKTLISRREELRRKLDNAADLVLDGRGSKTLIARMTDMEREQEQLDAKMTALKRAVDASAVPEQTLRRYAQMMADGSVDNLAPYLAIVCRVEVYGDKVVIWTILDDDPTAPKDFNAPGVQITLGIPSGVPMVFVTADLLRIVATKQSTS

SEQ ID NO: 2900 - protein, 536 aa, Unknown
  Description of Unknown: Integrase B2901 sequence
  PTHR30461:SF3,cd00338,SM00857,G3DSA:1.10.10.2600,IPR036162, PF13408,PS51737,G3DSA:3.40.50.1390,IPR025827,IPR006119, IPR038109,PF07508,IPR011109,SSF53041,PTHR30461, PS51736,Coil,PF00239
MQKLKVAAYARVSTDKDDQTNSLDNQRNYFTNYIINHENWKLVDVYFDEGISGTQTEKRVGFNRMIEDAKNKEIDLIITKEVSRFARNTVDTLSYTRKLKEYGVGVVFTLDNIDTRETDGEFRLTIMASIAQEESRKTSERVRWGQRRQMEKGVVFGRDLLGYTVRHGVLAINQEEVPVVKAIFHKYTNEGKGTHVIARELIEEGMRPKRIALWSNTIILKVLRNEKYVGDLLQKKTYTPDFLTHAKKYNHGEEEMVYLQNHHEPIIDRDLWNRTQEELKRRSGSIEQRSKHSNRYWCSGKLRCAECGSRFVSRTKKLKDGTQYKAWRCHAAAIYGSIKKDADGKLVGCSNSAINERSLRTCMNYCISLVQSEKNSIKKEILSEIKELQKSAEKKTDTKKIQKKVDQLEAKKRKAIDLMLDGLISETDLKSQTEWYNEEIKQLNQQLLDSEQENKVKSRQANAMNEYISALDEIMDMDSDNELVYKEVLDHIDVHKGYILDIWLKCIPFAIRLKIKSSGKGEYFKTEIIETSFIEK

SEQ ID NO: 2901 - protein, 536 aa, Unknown
  Description of Unknown: Integrase B2902 sequence
  PTHR30461:SF3,IPR036162,PS51737,IPR011109,PTHR30461, PF00239,G3DSA:1.10.10.2600,PF14287,IPR006119,SSF53041, IPR025378,SM00857,IPR025827,cd03770,IPR038109, PF13408,G3DSA:3.40.50.1390,PF07508,Coil
MKQLIYRVALYMRLSRDDEDYGESVSIETQRKIITQFANEQHFIIVDEYIDDGWSGTNFDRPAFQRMMEDVESGKVNCIITKDLSRLGREHIMMDYYLEFYFPEKRIRYIAVTENEDTEKGLSDFVPFKNLFNEWFAKDTSRKVKAAFKAKFAAGDRICAYVKIGYKRHPEIKNRIVPDEETRWIPEKIFDLAYHGAGAAKITRTLIAEKVPTPSWINYQRFGTFAHVYQNASEEKRYAWTVAQVKYILKDETYIGNTVHYKQTNISFKNKKRIRKPEDEWWRIENTHEGLIPKEMFDSVQAQIATRRRMQKDHTTQIFSGLVKCADCGWSMRFGTNRQNKNPYSHYTCSKYGQVGIHCSAHYIRYDVLYAYVLSRIQYWAAQAVQDEDALLERLLQTGNAKQNAERKKIADDLKRAEKRQKELDNLFAKLYEDRIAERITERNFIMLSAKYQEEQNALDGKIDLLNGQISENSERYSNIETWVKLIKQYASPTKLDSILLNALVEKITVHEAVKHEDGSREQEVEIFYKFVGKID

SEQ ID NO: 2902 - protein, 536 aa, Unknown
  Description of Unknown: Integrase B2903 sequence
  PTHR30461:SF3,cd00338,SM00857,G3DSA:1.10.10.2600,IPR036162, PF13408,PS51737,G3DSA:3.40.50.1390,IPR025827,IPR006119, IPR038109,PF07508,SSF53041,IPR011109,PTHR30461, PS51736,Coil,PF00239
MNVVIYARFSSHSQTEQSIEGQLKVCYEYAKDNDYIVVGEYIDRAQTGKNDNRVEFQKMLSDSDKHTFEGVLVYQLDRFARNRYDSAINKSKLKKNGVRVISAKENIADDPSGILVEGVLESMAEYYSAELSQKIHRGMEINAEKCLSNGSNPGLGFKVDSDRRFYVDNDEAAIVREIYERYAAGETKAEIIRDLQRRKIKTSLGKEFSNNSLSRLLCNKRYIGVYLYKDQETPGGMPRILDDDLFYRVQALMNKNKSAPARTHGEGEYLLTTKLFCGYCKEMMVGYGGTGKLGRQYHYYNCKNARKKKCKKKIVSKQLIEDRVVAECLKLLTDENIAFIAKMVAEECNKSPDNISVKELRKAIQETDTAIENLWRGIELGQSVEMLTERINQRKAEKAELEEQLAIEQNKKICLTELQIHAFLDYVCDMPADDVNKRRAIINIFVHSIYLYDDNFTLIINASKKPLSIDNIPLDDIEAAFGGDTYTSAECSSMKTSAPPKRKIRICGFFFLPIIFPLFTFTRFHTFFVIHERISR

SEQ ID NO: 2903 - protein, 536 aa, Unknown
  Description of Unknown: Integrase B2904 sequence
  PTHR30461:SF3,IPR036162,PS51737,IPR011109,PTHR30461, PS00397,PF00239,G3DSA:1.10.10.2600,IPR006119,SSF53041, cd00338,SM00857,IPR025827,IPR038109,PS51736, IPR006118,PF13408,G3DSA:3.40.50.1390,PF07508,Coil
MLKNTKIAVYCRVSSDEQAERGTIDNQVTFARQYADLHHLAIYDVYKDDGVTGTIPLQDRPEGHRLLQDAADERFTLVVFYKMDRLGRSTRVILNAVEALSQYGVGVQSMSEPFDTATPSGRFMLTMFAGVAELDRANILDRMYQGTLRHARLGKWCGGPAPFGYKLEDGYLVISEEPMPGQQLSEADVIRILYSKTIEGWSALRLAQHLNALGIPNKYKLRGNVAAGSGKWHQSKILYILHNTLYYGERSFGKMSKSSNKNIIPQQVPAIVSRETWDAAQAAVEQHSIMPKFIKRRSYLLRGLIRCGLCGHTYVGTYYKRKAGNSIYYVCNAKNTRGVTPEPCKGQTLRGEWIESLVWEDCLRYIKQPDVIAVDEDCRYLQSADDIKKEIDAATAQLKQLDQERQTVIGLCRQGIITAADLDGQLSEITAKQNTLQQTLEGLNSQSIVTKEDAEKRIKEIADILDGFRQQLQSGGELSFDAKQGIIRTLVKQITVHTELQPGAERDIPTVRVCIDYNFTLLSAKTAMLDPYRHGF

SEQ ID NO: 2904 - protein, 536 aa, Unknown
  Description of Unknown: Integrase B2905 sequence
  PTHR30461:SF3,IPR036162,PS51737,IPR011109,PTHR30461, PF00239,G3DSA:1.10.10.2600,IPR006119,SSF53041,cd00338, SM00857,IPR025827,IPR038109,PS51736,mobidb-lite, PF13408,G3DSA:3.40.50.1390,PF07508,Coil
MPRKKKLQEVGGLRLVAYYRYSNGGQQTEQSIEGQRRDCEAYAKAHGYKIVHEYIDRHISGKSDSRPAFQQMISDSDSHLFDAVICWKTDRLARSRYDSIIYKTRLRKNGVKILYAAETVVDGPEGIIIEGLMESLAEYYSAELAQKLRRGQRESALKCIALGGNRSFGYDIGPDKHYCINEKQAPAVRYIFEQYAAGATAADIVRELTARGYRTSRGNPFNKNSICRIITNEMYLGVYKYADIRIEGGVPAMIDRELFNRCQTQLAFNRAHGGGKGAPRADYVLVGKLDCGLCGHAMKGASATGHTGSKHYYYTCTQHVEKKCPKTSIEKNYLEQIIVDGVAKYVLTPEKISQIVDCMMELQAKEQEPKGNPEKNALEAELAECRRKQNNILEAIEEGGSARLAARLRALEEQEAQLTFALGEINNAPAPPQFSREALTFMFEQFRREEDEVDEEYRRRILDTFVSSILLYEDRAEVKFNITDQKTGDFERVILPISANKKPPEDDDITSNSEGSTALRLVEAMGVEPMSEKSSV

SEQ ID NO: 2905 - protein, 536 aa, Unknown
  Description of Unknown: Integrase B2906 sequence
  PTHR30461:SF3,IPR036162,PS51737,IPR011109,PTHR30461, PF00239,G3DSA:1.10.10.2600,IPR006119,PF14287,SSF53041, IPR025378,SM00857,IPR025827,cd03770,IPR038109, PF13408,G3DSA:3.40.50.1390,PF07508,Coil
MKQLIYRVALYMRLSRDDEDYGESVSIETQRKIITQFANEQHFIIVDEYIDDGWTGTNFDRPAFQRMMEDVESGKVNCIITKDLSRLGREHIMMDYYLEFYFPEKRIRYIAVTENEDTEKGLSDFVPFKNLFNEWFAKDTSRKVKAAFKAKFAAGDRICAYVKIGYKRHPEIKNRIVPDEETRWIPEKIFDLAYHGAGAAKITRTLIAEKVPTPSWINYQRFGTFAHVYQNASEEKRYAWTVAQVKYILKDETYIGNTVHYKQTNISFKNKKRIRKPEDEWWRIENTHDGLIPKEMFASVQEQIATRRRMQKDHTTQIFSGLVKCADCGWSMRFGTNRQNKNPYSHYTCSKYGQVGIHCSAHYIRYDVLYAYVLSRIQYWAAQAVQGEDALLERLLQTGNAKQNAERKKIADDLKRAEKRQKELDNLFAKLYEDRIAERITERNFIMLSAKYQEEQNALDGKIDLLNGQISENSERYSNIETWVKLIKQYASPTELDSILLNALVEKIAVHEAIKHEDGSREQEVEIFYKFVGKID

SEQ ID NO: 2906 - protein, 536 aa, Unknown
  Description of Unknown: Integrase B2907 sequence
  PTHR30461:SF3,IPR036162,PS51737,IPR011109,PTHR30461, PF00239,G3DSA:1.10.10.2600,IPR006119,SSF53041,cd00338, SM00857,IPR025827,IPR038109,PS51736,mobidb-lite, PF13408,G3DSA:3.40.50.1390,PF07508,Coil
MPRKKKLQEVGGLRLVAYYRYSNGGQQTEQSIEGQRRDCEAYAKAHGYKIVHEYIDRHISGKSDSRPAFQQMISDSDSHLFDAVICWKTDRLARSRYDSIIYKTRLRRNGVKILYAAETVVDGPEGIIIEGLMESLAEYYSAELAQKLRRGQRESALKCIALGGNRSFGYDIGPDKHYCINEKQAPAVRYIFEQYAAGATAADIVRELTARGYRTSRGNPFNKNSICRIITNEMYLGVYKYADIRIEGGVPAMIDRELFNRCQTQLAFNRAHGGGKGAPRADYVLVGKLDCGLCGHAMKGASATGHTGSKHYYYTCTQHVEKKCPKTSIEKNYLEQIIVDGVAKYVLTPEKISQIVDCMMELQAKEQEPKGNPERDALEAELAECRRKQNNILEAIEEGGSARLAARLRALEEQEAQLTFALGEINNAPTPPQFSREALTFMFEQFRREEDEVDEEYRRRILDTFVSSILLYEDRAEVKFNITDQKTGDFERVILPISANKKPPEDDDTTSNSEGSTALRLVEAMGVEPMSEKSSV

SEQ ID NO: 2907 - protein, 536 aa, Unknown
  Description of Unknown: Integrase B2908 sequence
  PTHR30461:SF3,IPR036162,PS51737,IPR011109,PTHR30461, PF00239,G3DSA:1.10.10.2600,IPR006119,SSF53041,cd00338, SM00857,IPR025827,IPR038109,mobidb-lite,PS51736, PF13408,G3DSA:3.40.50.1390,PF07508,Coil
MPRKKKLQEVGGLRLVAYYRYSNGGQQTEQSIEGQRRDCEAYAKAHGYKIVHEYIDRHISGKSDSRPAFQQMISDSDSHLFDAVICWKTDRLARSRYDSIIYKTRLRRNGVKILYAAETVVDGPEGIIIEGLMESLAEYYSAELAQKLRRGQRESALKCIALGGNRSFGYDIGPDKHYCINEKQAPAVRYIFEQYAAGATAADIVRELTARGYRTSRGNPFNKNSICRIITNEMYLGVYKYADIRIEGGVPAMIDRELFNRCQTQLAFNRAHGGGKGAPRADYVLVGKLDCGLCGHAMKGASATGHTGSKHYYYTCTQHVEKKCPKTSIEKNYLEQVIVDGVAKYILTPEKISQIVDCMMELQAKEQEPKGNPEKDALEAELAECRRKQNNILEAIEEGGSARLAARLRALEEQEAQLTFALGEINNAPAPPQFSREALTFMFEQFRREEDEVDEEYRRRILDTFVSSILLYEDRAEVKFNITDQKTGDFERVILPISANKKPPEDDDTTSNSEGSTALRLVEAMGVEPMSEKSSA

SEQ ID NO: 2908 - protein, 536 aa, Unknown
  Description of Unknown: Integrase B2909 sequence
  PTHR30461:SF3,IPR036162,PS51737,IPR011109,PTHR30461, PF00239,G3DSA:1.10.10.2600,IPR006119,SSF53041,cd00338, SM00857,IPR025827,IPR038109,mobidb-lite,PS51736, PF13408,G3DSA:3.40.50.1390,PF07508,Coil
MPRKKKLQEVGGLRLVAYYRYSNGGQQTEQSIEGQRRDCEAYAKAHGYKIVHEYIDRHISGKSDSRPAFQQMISDSDSHLFDAVICWKTDRLARSRYDSIIYKTRLRKNGVKILYAAETVVDGPEGIIIEGLMESLAEYYSAELAQKLRRGQRESALKCIALGGNRSFGYDIGPDKHYCINEKQAPAVRYIFEQYAAGATAADIVRELTARGYRTSRGNPFNKNSICRIITNEMYLGVYKYADIRIEGGVPAMIDRELFNRCQTQLAFNRAHGGGKGAPRADYVLVGKLDCGLCGHAMKGASATGHTGSKHYYYTCTQHVEKKCPKTSIEKNYLEQIIVDGVAKYVLTPEKISQIVDCMMELQAKEQEPKGNPEKDALEAELAECRRKQNNILEAIEEGGSARLAARLRALEEQEAQLTFALGEINNAPAPPQFSREALTFMFEQFRREEDEVDEEYRRRILDTFVSSILLYEDRAEVKFNITDQKTGDFERVILPISANKKPPEDDDTTSNSEGSTALRLVEAMGVEPMSEKSSV

SEQ ID NO: 2909 - protein, 536 aa, Unknown
  Description of Unknown: Integrase B2910 sequence
  PTHR30461:SF3,cd00338,SM00857,G3DSA:1.10.10.2600,IPR036162, PF13408,PS51737,G3DSA:3.40.50.1390,IPR025827,IPR006119, IPR038109,PF07508,IPR011109,SSF53041,PTHR30461, PS51736,Coil,PF00239
MNAVIYARYSSDRQTEQSIEGQIRFCTQYAQQHGYNVIKHYVDRAISGTTDHRPQFQQMIADSAKRQFQFVIVWKLDRFARNRYDSAIYKSKLKKNGVKVLSATEGIGEGDESIILEAVLEAMAETYSRQLSQNVRRGMRESALKGNSTGGAIPLGYKLEGKKLSVDEETAPIVRYIFERYAAGASKTEIAAYLNDRGHRTKSGTKFTVNSFRTILSNPKYIGVYHYDEVSVEDGCPALIEKELFDDVQKKTAATKRAPAHKKAKVEYLLNGKLFCGYCASPMVGDCGTSKTGERYYYYSCAARKKKPKSCKKKREKKDFIEWYVVEQTVDYVLTPSRIDYIAERVVEEYNKGCSDDEIKRLEKEITKHDAEIGQCAEALIGAKTSGIIDKINEKAMQIEARKQEAEESLINLRLAGKYQLKKEEVAAWLTSFCKGDLFDMEFRKRIIDVFINAIYLYDDKVVIYFNVRGGKQVSYMEMIDDTTDFFDNITESSNFAHSGPPKRNDSFRKEIVISFYTLLFSLKIVISSEKIKEKR

SEQ ID NO: 2910 - protein, 536 aa, Unknown
  Description of Unknown: Integrase B2911 sequence
  PTHR30461:SF3,SM00857,G3DSA:1.10.10.2600,IPR036162,PF13408, PS51737,G3DSA:3.40.50.1390,IPR025827,IPR006119,IPR038109, PF07508,IPR011109,SSF53041,PF00239,PTHR30461, PS51736,Coil,cd00338
MKKQPTGGNRLVAYYRYSGGSHQTEQSIEGQRRDCETYARIHGMVILHEYIDRHISGKTDDRPEFQQMIADAGKGMFDYVICWKTDRIARSRYDSIVYKKKLRDNGVELLYAAEANVEGSGGIIVEGLMEALAEYYSAELAEKVRRGMRESALKGKAIGSSRPLGLTVDKDKKYIIDPAGAAAVRYIFEQYAAGAASSAIVAHLNEQGLCTSRGNPFNKSSVVRIIQNEVYRGVYVSPKFDVRIEGAVPAIIDDDLWERAQKMFIRNRQSRSPRNDRADYILSGKLFCGECGTAMKGVSGHSSNGEVYFYYNCPCKDCHRRNIPKDELEGLVIRTVCNDVLQPDVMDRIADSVIAAQTAELNQPNPEKEALQHELADVQRKAKNLLSALENGTAGAMLTNRLAELEQQADTLSYQLSSLESEPKYPVFSKEEVLYLLEQFLIAPSEKTKAYRRRLIDTFVSKIEVSNTELTIYFNIAEEDCGKMKKAPQSNQPEGCSTEKQMVHLAHQQANYSLYAASGYFSLVEHQFSARLWRTA

SEQ ID NO: 2911 - protein, 536 aa, Unknown
  Description of Unknown: Integrase B2912 sequence
  PTHR30461:SF3,cd00338,SM00857,G3DSA:1.10.10.2600,IPR036162, PF13408,IPR025827,G3DSA:3.40.50.1390,PS51737,IPR006119, IPR038109,PF07508,SSF53041,IPR011109,PTHR30461, PS51736,Coil,PF00239
MKKKFSSVPDPDIQDAVIYARYSSHSQRDCSIEQQVADCELFAQQNGLRVVKIYADRHLSGTTDNRPEFQQMLKDAAHGHWPFVICWKIDRFARNRYDSATYKYKLKKAGVRVLYAKESIPDGPEGILLESVLEGSAEYYSASLAQNIRRGMRFNAENCKVNSGSIPFGYCKGPDGRFAIHETNAEIVREIFRKAAAGVPFVDIATELNNKGLKTSRGGRWNKNSFVLLKNESYIGVYHFSDIRIEGGMPAIIDPGTFLAANERMNANRRVRGRHHDGGDYLLTGKLKCAHCGSYMVGFSGTAKNGESHYYYGCQKRRRERACKKANVPREWIEKVVVKAALDYVLQPDVMEWITDAVMEYQEREAASSQLAALTAELEENQKATDNVMKAIEAGIITATTKQRLLDLETKAKDLKRAIELEKLSRVRLEREQILYWLEQFQGGSLQNQEFRRKVIDTFVSVVYLSDDHLRIAFNYSGQNRSEADFNLIMDAETASADYPINSFSLPLSPPHKNQANPTIYFVGAFFVLIMPLPER

SEQ ID NO: 2912 - protein, 536 aa, Unknown
  Description of Unknown: Integrase B2913 sequence
  PTHR30461:SF3,IPR036162,PS51737,IPR011109,PTHR30461, PF00239,G3DSA:1.10.10.2600,IPR006119,SSF53041,cd00338, SM00857,IPR025827,IPR038109,mobidb-lite,PS51736, PF13408,G3DSA:3.40.50.1390,PF07508,Coil
MPRKKKLQEVGGLRLVAYYRYSNGGQQTEQSIEGQRRDCEAYAKAHGYKIVHEYIDRHISGKSDSRPAFQQMISDSDSHLFDAVICWKTDRLARSRYDSIIYKTRLRRNGVKILYAAETVVDGPEGIIIEGLMESLAEYYSAELAQKLRRGQRESALKCIALGGNRSFGYDIGPDKHYCINEKQAPAVRYIFEQYAAGATAADIVRELTARGYRTSRGNPFNKNSICRIITNEMYLGVYKYADIRIEGGVPAMIDRELFNRCQTQLAFNRAHGGGKGAPRADYVLVGKLDCGLCGHAMKGASATGHTGSKHYYYTCTQHVEKKCPKTSIEKNYLEQIIVDGVAKYVLTPEKISQIVDCMMELQAKEQEPKGNPERDALEAELAECRRKQNNILEAIEEGGSARLAARLRALEEQEAQLTFALGEINNAPTPPQFSREALTFMFEQFRREEDEVDEEYRRRILDTFVSSILLYEDRAEVKFNITDQKTGDFERVILPISANKKPPEDDDTTSNSEGSTALRLVEAMGVEPMSEKSSA

SEQ ID NO: 2913 - protein, 536 aa, Unknown
  Description of Unknown: Integrase B2914 sequence
  PTHR30461:SF3,IPR036162,PS51737,IPR011109,PTHR30461, PF00239,G3DSA:1.10.10.2600,IPR006119,PF14287,SSF53041, IPR025378,SM00857,IPR025827,cd03770,IPR038109, cd16858,PS51736,PF13408,G3DSA:3.40.50.1390,PF07508,Coil
MQTGKITALYVRFSYDDGIDAESGSIEHQKSLLRSYAESNGFTNLSYYADDGYTGTNFNRPDFQRMLGDIQKGLVSTVIVKDMSRLGRNYLMVGQYVEMEFPKHNVRFIAISDNVDSAKGMNDLLPIHNLMNEWYSHDISKKVRAMIRQKGNSGQAIASKLPYGYYNTPEDKQTWLIDESAANVVRKIFDLYLNQSFGMYQIAKILKAEGVPKPTYHRRLAKGIKVEADDLCVWSASVVRGILQHREYIGDTVNFRTEITSYKNKKVIHNSDDKWRIFPNTHPAIIDRETFQKVQDKIAKEIRHTRNVHSYLFADYLYCMDCHSRMHGRQCYLKGKRSLPAYECSTYRKSKGCCFHGVPEMYLQAEVLARIQKVLAFAKSNPAEFRQNIRKALEEQSDGSKAVIQEELDKAQTRTAEIDKYIQGLFEAKVRGEIDGSLFASLKKTYDEEKEQLNRLIIELITKLSRENEANEKVQLLYAAIRKYDAVWELTPEVLTDFIEKIEVGQVSAENKKISFELRDNQISVFFWGVGIIDFI

SEQ ID NO: 2914 - protein, 536 aa, Unknown
  Description of Unknown: Integrase B2915 sequence
  PTHR30461:SF3,IPR036162,PS51737,IPR011109,PTHR30461, PF00239,G3DSA:1.10.10.2600,IPR006119,SSF53041,cd00338, SM00857,IPR025827,IPR038109,PS51736,mobidb-lite, PF13408,G3DSA:3.40.50.1390,PF07508,Coil
MPRKKKLQEVGGLRLVAYYRYSNGGQQTEQSIEGQRRDCEAYAKAHGYKIVHEYIDRHISGKSDSRPAFQQMISDSDSHLFDAVICWKTDRLARSRYDSIIYKTRLRRNGVKILYAAETVVDGPEGIIIEGLMESLAEYYSAELAQKLRRGQRESALKCIALGGNRSFGYDIGPDKHYCINEKQAPAVRYIFEQYAAGATAADIVRELTARGYRTSRGNPFNKNSICRIITNEMYLGVYKYADIRIEGGVPAMIDRELFNRCQTQLAFNRAHGGGKGAPRADYVLVGKLDCGLCGHAMKGASATGHTGSKHYYYTCTQHVEKKCPKTSIEKNFLEQIIVDGVAKYVLTPEKISQIVDCMMELQAKEQEPKDNPEKDALEAELAECRRKQNNILEAIEEGGSARLAARLRALEEQEAQLTFALGEINNAPAPPQFSREALTFMFEQFRREEDEVDEEYRRRILDTFVSSILLYEDRAEVKFNITDQKTGDFERVILPISANKNPPEDDDITSNSEGSTALRLVEAMGVEPMSEKSSA

SEQ ID NO: 2915 - protein, 536 aa, Unknown
  Description of Unknown: Integrase B2916 sequence
  PTHR30461:SF3,IPR036162,PS51737,IPR011109,PTHR30461, PF00239,G3DSA:1.10.10.2600,IPR006119,SSF53041,cd00338, SM00857,IPR025827,IPR038109,PS51736,mobidb-lite, PF13408,G3DSA:3.40.50.1390,PF07508,Coil
MPRKKKLQEVGGLRLVAYYRYSNGGQQTEQSIEGQRRDCEAYAKAHGYKIVHEYIDRHISGKSDSRPAFQQMISDSDSHLFDAVICWKTDRLARSRYDSIIYKTRLRRNGVKILYAAETVVDGPEGIIIEGLMESLAEYYSAELAQKLRRGQRESALKCIALGGNRSFGYDIGPDKHYCINEKQAPAVRYIFEQYAAGATAADIVRELTARGYRTSRGNPFNKNSICRIITNEMYLGVYKYGDIRIEGGVPAMIDRELFNRCQTQLAFNRVHGGGKGAPRADYVLVGKLDCGLCGHAMKGASATGHTGSKHYYYTCNQHVEKKCPKTSIEKNYLEQVIVDGVAKYVLTPEKISQIVDCMMELQAKEQEPKGNPEKDALEAELAECRRKQNNILEAIEEGGSARLAARLRALEEQEAQLTFALGEINNAPAPPQFSREALTFMFEQFRREEDEVDEEYRRRILDTFVSSILLYEDRAEVKFNITDQKTGDFERVILPISANKKPPEDDDITSNSEGSTALRLVEAMGVEPMSEKSSV

SEQ ID NO: 2916 - protein, 536 aa, Unknown
  Description of Unknown: Integrase B2917 sequence
  PTHR30461:SF3,IPR036162,PS51737,IPR011109,PTHR30461, PF00239,G3DSA:1.10.10.2600,IPR006119,PF14287,SSF53041, IPR025378,SM00857,IPR025827,cd03770,IPR038109, PF13408,G3DSA:3.40.50.1390,PF07508,Coil
MKQLIYRVALYMRLSRDDEDYGESVSIETQRKIITQFANEQHFIIVDEYIDDGWTGTNFDRPAFQRMMEDVESGKVNCIITKDLSRLGREHIMMDYYLEFYFPEKRIRYIAVTENEDTEKGLSDFVPFKNLFNEWFAKDTSRKVKAAFKAKFAAGDRICAYVKIGYKRHPEIKNRIVPDEETRWIPEKIFDLAYHGAGAAKITRTLIAEKVPTPSWINYQRFGTFAHVYQNASEEKRYAWTVAQVKYILKDETYIGNTVHYKQTNISFKNKKRIRKPEDEWWRIENTHEGLIPKEMFASVQEQIATRRRIQKDHTTQIFSGLVKCADCGWSMRFGTNRQNKNPYSHYTCSKYGQVGIHCSAHYIRYDVLYTYVLSRIQYWAAQAVQDEDALLERLLQTGNAKQNAERKKIADDLKRAEKRQKELDNLFAKLYEDRIAERITERNFIMLSAKYQEEQNALDGKIDLLNGQISENSERYSNIETWVKLIKQYASPTELDSILLNALVEKIAVHEAIKHEDGSREQEVEIFYKFVGKID

SEQ ID NO: 2917 - protein, 536 aa, Unknown
  Description of Unknown: Integrase B2918 sequence
  PTHR30461:SF3,IPR036162,PS51737,IPR011109,PTHR30461, PF00239,G3DSA:1.10.10.2600,IPR006119,SSF53041,cd00338, SM00857,IPR025827,IPR038109,PS51736,mobidb-lite, PF13408,G3DSA:3.40.50.1390,PF07508,Coil
MPRKKKLQEVGGLRLVAYYRYSNGGQQTEQSIEGQRRDCEAYAKAHGYKIVHEYIDRHISGKSDSRPAFQQMISDSDSHLFDAVICWKTDRLARSRYDSIIYKTRLRRNGVKILYAAETVVDGPEGIIIEGLMESLAEYYSAELAQKLRRGQRESALKCIALGGNRSFGYDIGPDKHYCINEKQAPAVRYIFEQYAAGATAADIVRELTARGYRTSRGNPFNKNSICRIITNEMYLGVYKYADIRIEGGVPAMIDRELFNRCQTQLAFNRAHGGGKGAPRADYVLVGKLDCGLCGHAMKGASATGHTGSKHYYYTCTQHVEKKCPKTSIEKNYLEQIIVDGVAKYVLTPEKISQIVDCMMELQAKEQEPKGNPEKDALEAELAECRRKQNNILEAIEEGGSARLAARLRALEEQEAQLTFALGEINNAPSPPQFSREALTFMFEQFRREEDEVDEEYRRRILDTFVSSILLYEDRAEVKFNITDQKTGDFERVILPISVNKKPPEDDDTTSNSEGSTALRLVEAMGVEPMSEKSSV

SEQ ID NO: 2918 - protein, 536 aa, Unknown
  Description of Unknown: Integrase B2919 sequence
  cd03768,SM00857,G3DSA:1.10.10.2600,IPR036162,PS51737, G3DSA:3.40.50.1390,IPR006119,IPR038109,PF07508,SSF53041, IPR011109,PTHR30461,PS51736,PF00239
MAEEHKILRCAIYTRKSTEEGLELQFNSLQAQREACEAYIKSQKHEGWKLVPTEYDDGGYSGGNLNRPALQRLLKDIADGLIDIIVVYKIDRLTRSLHDFSKIVDVLEERNASFVSITQHFNTSSSMGRLTLNMLLSFAQFEREITGERLRDKIAASKKKGMWMGGTPPMGYKRKDKKLYPDESQSAKIQLIFDKYNELKSVQRLKKYLDSQHIYSQHDRPLSVGNLYRILQNRAYIGEVPHKGVWYKGEHKGIIEIGVFHKAQDTLQEHRIDRQRYEPQKSLLCGKLYDDKGNRMSPCWSTGSKGKKYRYYVSQAVIKCKSDKIGKVSKISLLEIETFIDKWFNKQFKEDKSVFANLLKSYSVNDTKQILNSIQNKTIEQKTQRILLGRVDLLPEEITLTIYQEQLCEYIRSLYENRPIKELFKESLKTSLVFYVKYHIAVIDNGAKAIVGERIEKNTNKTLVQLLIQAFNISHDILQGKQVKDLCEKYQLTDRYMRKILTLRFLPAKVILSILDGTQGREITAKQLFEQANQHK

SEQ ID NO: 2919 - protein, 536 aa, Unknown
  Description of Unknown: Integrase B2920 sequence
  PTHR30461:SF3,IPR036162,PS51737,IPR011109, PTHR30461,PF00239,G3DSA:1.10.10.2600,PF14287, IPR006119,SSF53041,IPR025378,SM00857,IPR025827 ,cd03770,IPR038109,PF13408,G3DSA:3.40.50.1390,PF07508,Coil
MKQLIYRVALYMRLSRDDEDYGESVSIETQRKIITQFANEQHFIIVDEYIDDGWTGTNFDRPAFQRMMEDVESGKVNCIITKDLSRLGREHIMMDYYLEFYFPEKRIRYIAVTENEDTEKGLSDFVPFKNLFNEWFAKDTSRKVKAAFKAKFAAGDRICAYVKIGYKRHPEIKNRIVPDEETRWIPEKIFDLAYHGAGAAKITRTLIAEKVPTPSWINYQRFGTFAHVYQNASEEKRYAWTVAQVKYILKDETYIGNTVHYKQTNISFKNKKRIRKPEDEWWRIENTHEGLIPKEMFASVQEQIATRRRMQKDHTTQIFSGLVKCADCGWSMRFGTNRQNKNPYSHYTCSKYGQVGIHCSAHYIRYDVLYAYVLSRIQYWAAQAVQDEDALLERLLQTGNAKQNAERKKIADDLKRAEKRQKELDNLFAKLYEDRIAERITERNFIMLSAKYQEEQNALDGKIDLLNGQISENSERYSNIETWVKLIKQYASPTELDSILLNALVEKITVHEAIKHEDGSREQEVEIFYKFVGKID

SEQ ID NO: 2920 - protein, 536 aa, Unknown
  Description of Unknown: Integrase B2921 sequence
  PTHR30461:SF3,IPR036162,PS51737,IPR011109,PTHR30461, PF00239,G3DSA:1.10.10.2600,IPR006119,PF14287,SSF53041, IPR025378,SM00857,IPR025827,cd03770,IPR038109, PF13408,G3DSA:3.40.50.1390,PF07508,Coil
MKQLIYRVALYMRLSRDDEDYGESVSIETQRKIITQFANEQHFIIVDEYIDDGWTGTNFDRPAFQRMMEDVESGKVNCIITKDLSRLGREHIMMDYYLEFYFPEKRIRYIAVTENEDTEKGLSDFVPFKNLFNEWFAKDTSRKVKAAFKAKFAAGDRICAYVKIGYKRHPEIKNRIVPDEETRWIPEEIFDLAYHGAGAAKITRTLIAEKVPTPSWINYQRFGTFAHVYQNASEEKRYAWTVAQVKYILKDETYIGNTVHYKQTNISFKNKKRIRKPEDEWWRIENTHEGLIPKEMFASVQEQIATRRRMQKDHTTQIFSGLVKCADCGWSMRFGTNRQNKNPYSHYTCSKYGQVGIHCSAHYIRYDVLYAYVLSRIQYWAAQAVQDEDALLERLLQTGNAKQNAERKKIADDLKRAEKRQKELDNLFAKLYEDRIAERITERNFIMLSAKYQEEQNALDGKIDLLNGQISENSERYSNIETWVKLIKQYASPTELDSILLNALVEKITVHEAIKHEDGNREQEVEIFYKFVGKID

SEQ ID NO: 2921 - protein, 536 aa, Unknown
  Description of Unknown: Integrase B2922 sequence
  PTHR30461:SF3,IPR036162,PS51737,IPR011109,PTHR30461, PF00239,G3DSA:1.10.10.2600,IPR006119,SSF53041,cd00338, SM00857,IPR025827,IPR038109,mobidb-lite,PS51736, PF13408,G3DSA:3.40.50.1390,PF07508,Coil
MPRKKKLQEVGGLRLVAYYRYSNGGQQTEQSIEGQRRDCEAYAKAHGYKIVHEYIDRHISGKSDSRPAFQQMISDSDSHLFDAVICWKTDRLARSRYDSIIYKTRLRKNGVKILYAAETVVDGPEGIIIEGLMESLAEYYSAELAQKLRRGQRESALKCIALGGNRSFGYDIGPDKHYCINEKQAPAVRYIFEQYAAGATAADIVRELTARGYRTSRGNPFNKNSICRIITNEMYLGVYKYADIRIEGGVPAMIDRELFNRCQTQLAFNRAHGGGKGAPRADYVLVGKLDCGLCGHAMKGASATGHTGSKHYYYTCTQHVEKKCPKTSIEKSYLEQIIVDGVAKYVLTPEKISQIVDCMMELQAKEQEPKGNPEKDALEAELAECRRKQNNILEAIEEGGSARLAARLRTLEEQEAQLTFALGEINNAPTPPQFSREALTFMFEQFRREEDEVDEEYRRRILDTFVSSILLYEDRAEVKFNITDQKTGDFERVILPISANKKPPEDDDATSNSEGSTALRLVEAMGVEPMSEKSSA

SEQ ID NO: 2922 - protein, 536 aa, Unknown
  Description of Unknown: Integrase B2923 sequence
  SM00857,G3DSA:1.10.10.2600,IPR036162,PF13408,PS51737, G3DSA:3.40.50.1390,IPR025827,IPR006119,IPR038109,PF07508, SSF53041,IPR011109,PTHR30461,PS51736,cd00338, PF00239
MKLTHGAYILARFSTDRQEADSIEVQVSKCREWCERQRLPVLDVFADEAVSGMKETRPQFDRMMRLLSEGGADTVVIYDQSRMFRKMTAWFTLRERLERLGVRVVSVTQPMIGGDLRDPATFMSEGGMALMNQMWVLQTRQKVCEKMRWMAEQGKYTGGVPPLGYVVIDGRIEVCEPEAETVRIIFGDYAAGRSYREIIQRLNAEGRRTKSGGTFGSNSLHDLLKNEKYIGVLTYGRTQKRPDGSRNSHAVASTVMRIEGMIPAIVDRKTWDIVQEKLMANKRKQAGRPVRVREYPLKGKVFCGECKASMSVTCSQGGYYYYACSEKKRKKTCDNMPIKVDDLERMIAEAIKNMLGNPENVDGLICILREERGKIQEQTAMRMKALFDRQAEIKKQLDAAMSAVLAGMHSQSLIDTVHALEAEQAQNDREMTTLHNQAQGTTIPEDRLRELLKVAANDIPALLSVVVRVEVGKDRIRVWTLLDAKPDGTFDFNTDWDDPEIGLIIIPGVAPPVPRIIINGGLLCFSLPRQKKNRAE

SEQ ID NO: 2923 - protein, 536 aa, Unknown
  Description of Unknown: Integrase B2924 sequence
  PTHR30461:SF3,IPR036162,PS51737,IPR011109,PTHR30461, PF00239,G3DSA:1.10.10.2600,IPR006119,SSF53041,cd00338, SM00857,IPR025827,IPR038109,PS51736,mobidb-lite, PF13408,G3DSA:3.40.50.1390,PF07508,Coil
MPRKKKLQEVGGLRLVAYYRYSNGGQQTEQSIEGQRRDCEAYAKAHGYKIVHEYIDRHISGKSDSRPAFQQMISDSDSHLFDAVICWKTDRLARSRYDSIIYKTRLRRNGVKILYAAETVVDGPEGIIIEGLMESLAEYYSAELAQKLRRGQRESALKCIALGGNRSFGYDIGPDKHYCINEKQAPAVRYIFEQYAAGATAADIVRELTARGYRTSRGNPFNKNSICRIITNEMYLGVYKYADIRIEGGVPAMIDRELFNRCQTQLAFNRAHGGGKGAPRADYVLVGKLDCGLCGHAMKGASATGHTGSKHYYYTCTQHVEKKCPKTSIEKNYLEQVIVDGVAKYVLTPEKISQIVDCMMELQAKEQEPKGNPEKDALEAELAECRRKQNNILEAIEEGGSARLAARLRALEEQEAQLTFALGEINNAPAPPQFSREALTFMFEQFRREEDEVDEEYRRRILDTFVSSILLYEDRAEVKFNITDQKTGDFERVILPISANKKPPEDDDITSNSEGSTALRLVEAMGVEPMSEKSSV

SEQ ID NO: 2924 - protein, 536 aa, Unknown
  Description of Unknown: Integrase B2925 sequence
  PTHR30461:SF3,SM00857,G3DSA:1.10.10.2600,IPR036162,PF13408, IPR025827,G3DSA:3.40.50.1390,PS51737,IPR006119,IPR038109, PF07508,IPR011109,SSF53041,PF00239,PTHR30461, PS51736,Coil,cd00338
MKKTKNPVQRAVIYARYSCSNQTEQSIEGQLADCEKFAEKYNYYIVDTYIDRAMSATTDRRPQFQQMIADSATGGFDVIIVWKLDRFARNRYDSAVNKQKLNSNGVKVVSVMEHIEDTPEGALMESVLEGFAEYFSKDLSQKVSRGMRETALKFKATGLIPYGYKKTSDNICVPDEHTAPVVKKIFEMYADGVINKDICDWLNSHGYRTSNGNLFRNQYLRKILNRRRYTGSYTYGDLELHDENQRIISDELFDRVQIQLQAKKRTGRIAREQYILVGKLFCGYCRNPIRGESGRNHQNRIYTYYKCSVNKTGGKCPKTTVQRDIIENNTIKFILNNFLNDEIINSVVDTIQASETAENNSAELITLRTQIEDTDRKINNLLTAIENGVFTPSTKQRLNDLENVKEKLKYELIVKQSEKNNFNATAFKRFLKNIDVDDFKTTEQRQKLINLVLYREYLWNDKVLYIFNLTPSKPNDSVDIDSYVDALLASTGSTSPTDGVPQVAISELLFGYFFVMGFFPFHKHFALSFFALYIYR

SEQ ID NO: 2925 - protein, 536 aa, Unknown
  Description of Unknown: Integrase B2926 sequence
  PTHR30461:SF3,cd00338,SM00857,G3DSA:1.10.10.2600,IPR036162, PF13408,PS51737,G3DSA:3.40.50.1390,IPR025827,IPR006119, IPR038109,PF07508,IPR011109,SSF53041,PTHR30461, PS51736,Coil,PF00239
MQKLKVAAYARVSTDKDDQTNSLDNQRNYFTNYIINHENWKLVDVYFDEGISGTQTEKRVGFNRMIEDAKNKEIDLIITKEVSRFARNTVDTLSYTRKLKEYGVGVVFTLDNIDTRETDGEFRLTIMASIAQEESRKTSERVRWGQRRQMEKGVVFGRDLLGYTVRHGVLAINQEEVPVVKAIFHKYTNEGKGTHVIARELIEEGMRPKRIALWSNTIILKVLRNEKYVGDLLQKKTYTPDFLTHAKKYNHGEEKMVYLQNHHEPIIDRDLWDRTQEELKRRSGSIEQRSKHSNRYWCSGKLRCAECGSRFVSRTKKLKDGTQYKAWRCHAAAIYGSIKKDADGKLVGCSNSAINERSLRTCMNYCISLVQSEKNSIKKEILSEIKELQKSAEKKTDTKKIQKKVDQLEAKKRKAIDLMLDGLISETDLKSQTEWYNEEIKQLNQQLLDSEQENKVKSRQANAMNEYISALDEIMDMDSDNELVYKEVLDHIDVHKGYILDIWLKCIPFAIRLKIKSSGKGEYFKTEIIETSFIEK

SEQ ID NO: 2926 - protein, 536 aa, Unknown
  Description of Unknown: Integrase B2927 sequence
  PTHR30461:SF3,IPR036162,PS51737,IPR011109,PTHR30461, PF00239,G3DSA:1.10.10.2600,PF14287,IPR006119,SSF53041, IPR025378,SM00857,IPR025827,cd03770,IPR038109, PF13408,G3DSA:3.40.50.1390,PF07508,Coil
MKQLIYRVALYMRLSRDDEDYGESVSIETQRKIITQFANEQHFIIVDEYIDDGWTGTNFDRPAFQRMMEDVESGKVNCIITKDLSRLGREHIMMDYYLEFYFPEKRIRYIAVTENEDTEKGLSDFVPFKNLFNEWFAKDTSRKVKAAFKAKFAAGDRICAYVKIGYKRHPEIKNRIVPDEETRWIPEKIFDLAYHGAGAAKITRTLIAEKVPTPSWINYQRFGTFAHVYQNASEEKRYAWTVAQVKYILKDETYIGNTVHYKQTNISFKNKKRIRKPEDEWWRIENTHDGLIPKEMFASVQEQIATRRRMQKDHTTQIFSGLVKCADCGWSMRFGTNRQNKNPYSHYTCSKYGQVGIHCSAHYIRYDVLYAYVLSRIQYWAAQAVQDEDALLERLLQTGNAKQNAERKKIADDLKRAEKRQKELDNLFAKLYEDRIAERITERNFIMLSAKYQEEQNALDGKIDLLNGQISENSERYSNIETWVKLIKQYASPTELDSILLNALVEKIAVHEAIKHEDGSREQEVEIFYKFVGKID

SEQ ID NO: 2927 - protein, 536 aa, Unknown
  Description of Unknown: Integrase B2928 sequence
  PTHR30461:SF3,SM00857,G3DSA:1.10.10.2600,IPR036162,PF13408, IPR025827,G3DSA:3.40.50.1390,PS51737,IPR006119,IPR038109, PF07508,IPR011109,SSF53041,PF00239,PTHR30461, PS51736,Coil,cd00338
MKKTKNSVQRAVIYARYSCSNQTEQSIEGQLADCEKFAEKYNYYIVDTYIDRAMSATTDRRPQFQQMIADSATGGFDVIIVWKLDRFARNRYDSAVNKQKLNSNGVKVVSVMEHIEDTPEGALMESVLEGFAEYFSKDLSQKVSRGMRETALKFKATGLIPYGYKKTSDNICVPDEHTAPVVKKIFEMYAGGMINKDICDWLNSHGYRTSNGNLFKNQYLRKILNRRRYTGSYTYGDLELHDENQRIISDELFDRVQIQLQAKRRTGRIAREQYILVGKLFCGYCRNPIRGESGRNHQNRIYTYYKCSVNKTGGKCPKTTVQRDIIENNTIKFILNNFLNDEIINSVVDTIQASETAENNSAELITLRTQIEDTDRKINNLLTAIENGVFTPSTKQRLNDLENVKEKLKYELIVKQSEKNNFNATAFKRFLKNIDVDDFKTTEQRQKLINLVLYREYLWNDKVLYIFNLTPSKPNDSVDIDSYVDALLASTGSTSPTDGVPQVAISELLFGYFFVMDFFPFHKHFALSCFALYIYR

SEQ ID NO: 2928 - protein, 536 aa, Unknown
  Description of Unknown: Integrase B2929 sequence
  PTHR30461:SF3,IPR036162,PS51737,IPR011109,PTHR30461, PF00239,G3DSA:1.10.10.2600,IPR006119,PF14287,SSF53041, IPR025378,SM00857,IPR025827,cd03770,IPR038109, PF13408,G3DSA:3.40.50.1390,PF07508,Coil
MKQLIYRVALYMRLSRDDEDYGESVSIETQRKIITQFANEQHFIIVDEYIDDGWSGTNFDRPAFQRMMEDVESGKVNCIITKDLSRLGREHIMMDYYLEFYFPEKRIRYIAVTENEDTEKGLSDFVPFKNLFNEWFAKDTSRKVKAAFKAKFAAGDRICAYVKIGYKRHPEIKNRIVPDEETKWIPEKIFDLAYHGAGAAKITRTLIAEKVPTPSWINYQRFGTFAHVYQNASEEKRYAWTVAQVKYILKDETYIGNTVHYKQTNISFKNKKRIRKPEDEWWRIENTHEGLIPKEMFDSVQAQIATRRRMQKDHTTQIFSGLVKCADCGWSMRFGTNRQNKNPYSHYTCSKYGQVGIHCSAHYIRYDVLYAYVLSRIQYWAAQAVQDEDALLERLLQTGNAKQNAERKKIADDLKRSEKRQKELDNLFAKLYEDRIAERITERNFIMLSAKYQEEQNALDGKIDLLNGQISENSERYSNIETWVKLIKQYASPTELDSILLNALVEKITVHEAVKHEDGSREKEVEIFYKFIGKID

SEQ ID NO: 2929 - protein, 536 aa, Unknown
  Description of Unknown: Integrase B2930 sequence
  PTHR30461:SF3,IPR036162,PS51737,IPR011109,PTHR30461, PF00239,G3DSA:1.10.10.2600,IPR006119,SSF53041,cd00338, SM00857,IPR025827,IPR038109,mobidb-lite,PS51736, PF13408,G3DSA:3.40.50.1390,PF07508,Coil
MPRKKKLQEVGGLRLVAYYRYSNGGQQTEQSIEGQRRDCESYAKAHGYKIVHEYIDRHISGKSDSRPAFQQMISDSDSHLFDAVICWKTDRLARSRYDSIIYKTRLRRNGVKILYAAETVVDGPEGIIIEGLMESLAEYYSAELAQKLRRGQRESALKCIALGGNRSFGYDIGPDKHYCINEKQAPAVRYIFEQYAAGATAADIVRELTARGYRTSRGNPFNKNSICRIITNEMYLGVYKYADIRIEGGVPAMIDRELFNRCQTQLAFNRAHGGGKGAPRADYVLVGKLDCGLCGHAMKGASATGHTGSKHYYYTCNQHVEKKCPKTSIEKNYLEQIIVDGVAKYVLTPEKISQIVDCMMELQAKEQEPKGNPEKDALEAELSECRRKQNNILEAIEEGGSARLAARLRALEEQEAQLTFALGEINNAPTPPQFSREALTFMFEQFRREENEVDEEYRRRILDTFVSSILLYEDRAEVKFNITDQKTGDFERVILPISANKKPPEDDDTTSNSEGSTALRLVEAMGVEPMSEKSSV

SEQ ID NO: 2930 - protein, 536 aa, Unknown
  Description of Unknown: Integrase B2931 sequence
  PTHR30461:SF3,IPR036162,PS51737,IPR011109,PTHR30461, PF00239,G3DSA:1.10.10.2600,IPR006119,SSF53041,cd00338, SM00857,IPR025827,IPR038109,mobidb-lite,PS51736, PF13408,G3DSA:3.40.50.1390,PF07508,Coil
MPRKKKLQEVGGLRLVAYYRYSNGGQQTEQSIEGQRRDCEAYAKAHGYKIVHEYIDRHISGKSDSRPAFQQMISDSDSHLFDAVICWKTDRLARSRYDSIIYKTRLRKNGVKILYAAETVVDGPEGIIIEGLMESLAEYYSAELAQKLRRGQRESALKCIALGGNRSFGYDIGPDKHYCINEKQAPAVRYIFEQYAAGATAADIVRELTARGYRTSRGNPFNKNSICRIITNEMYLGVYKYADIRIEGGVPAMIDRELFNRCQTQLAFNRAHGGGKGAPRADYVLVGKLDCGLCGHAMKGASATGHTGSKHYYYTCTQHVEKKCPKTSIEKNYLEQVIVDGVAKYVLTPEKISQIVDCMMELQAKEQEPKGNPEKDALEAELAECRRKQNNILEAIEEGGSARLAARLRALEEQEAQLTFALGEINNAPAPPQFSREALTFMFEQFRREEDEVDEEYRRRILDTFVSSILLYEDRAEVKFNITDQKTGDFERVILPISANKKPPEDDDTTSNSEGSTALRLVEAMGVEPMSEKSSV

SEQ ID NO: 2931 - protein, 536 aa, Unknown
  Description of Unknown: Integrase B2932 sequence
  PTHR30461:SF3,SM00857,G3DSA:1.10.10.2600,IPR036162,PF13408, PS51737,G3DSA:3.40.50.1390,IPR025827,IPR006119,IPR038109, PF07508,IPR011109,SSF53041,PTHR30461,Coil, PS51736,cd00338,PF00239
MKAAIYSRKSKFTGKGESIENQIEMCKKYATDNNYTEISIYEDEGFSGKNTNRPEFKKMMKDAKAHKFDAIICYRLDRISRNVSDFSTLVDELKKLNIDFISIREQFDTSSPMGTAMMFISSVFAQLERETIAERIRDNMYELAKTGRWLGGTPPYGFISEPDYYLDANGKQKKMVKLSPVKSETNLVKSFFESYLKLGSLSKLQKHLIINSINTKRNVAWDVKALQLLLRNPVYVKSSELVISYLESKGATVFGEPNGNGILSYNKKDSKDKYKDISDWILSISKHEGIIDDLLWLKVQKQLDRNKDLAPRLVSNNSSGLLNNILYCKKCGGRMIQKQGHISKKTGEVLRYYVCLTKTNSSGVLCDCKNVRADKLENDIVDELLKETTDESDLIYTIENYKESLKSDIYSKKDLDSIKKQISQKQIQIDNLLEKISLNPNLYDLFEKKLEELNTELKSLKFKKFELESSNENTKLAIKEITASTEMILNFSKLWKNADFPMKKLLLNTYIDKIIYDSDTKSGRMKLFNSKKKGAL

SEQ ID NO: 2932 - protein, 536 aa, Unknown
  Description of Unknown: Integrase B2933 sequence
  PTHR30461:SF3,IPR036162,PS51737,IPR011109,PTHR30461, PF00239,G3DSA:1.10.10.2600,IPR006119,SSF53041,cd00338, SM00857,IPR025827,IPR038109,PS51736,mobidb-lite, PF13408,G3DSA:3.40.50.1390,PF07508,Coil
MPRKKKLQEVGGLRLVAYYRYSNGGQQTEQSIEGQRRDCEAYAKAHGYKIVHEYIDRHISGKSDSRPAFQQMISDSDSHLFDAVICWKTDRLARSRYDSIIYKTRLRKNGVKILYAAETVVDGPEGIIIEGLMESLAEYYSAELAQKLRRGQRESALKCIALGGNRSFGYDIGPDKHYCINEKQAPAVRYIFEQYAAGATAADIVRELTARGYRTSRGNPFNKNSICRIITNEMYLGVYKYADIRIEGGVPAMIDRELFNRCQTQLAFNRAHGGGKGAPRADYVLVGKLDCGLCGHAMKGASATGHTGSKHYYYTCTQHVEKKCPKTSIEKNYLEQVIVDGVAKYVLTPEKISQIVDCMMELQAKEQEPKGNPERDALEAELAECRRKQNNILEAIEEGGSARLAARLRTLEEQEAQLTFALGEINNAPTPPQFSREALTFMFEQFRREEDEVDEEYRRRILDTFVSSILLYEDRAEIKFNITDQKTGDFERVILPISANKKPPEDDDIPSNSEGSTALRLVEAMGVEPMSEKSSA

SEQ ID NO: 2933 - protein, 536 aa, Unknown
  Description of Unknown: Integrase B2934 sequence
  PTHR30461:SF3,cd00338,SM00857,G3DSA:1.10.10.2600,IPR036162, PF13408,IPR025827,PS51737,G3DSA:3.40.50.1390,IPR006119, IPR038109,PF07508,SSF53041,IPR011109,PTHR30461, PS51736,Coil,PF00239
MQRQHGAYIYARYSTENQDADSIDVQVGKCTQYCSQRGLPILGVFADEAVSGMKESRPRFDAMMAQLGMGLADTVVCYDQSRLFRKMTAWFDLREKLSVMGVAVISVTQPMVGGDLRDPTIFLTEGGMALFNQVWVFQSRQKVMEKMQHMARNGQHTGGKPPLGYQVVELGGVKRLAILPPEAETVKRIFAEYDGGRSYHDIIAGLNRDGIKTKRGNPFGTNSLHDLLKNEKYIGTLVYGASPYRADGTRNTHAKDGENVIRVEDAIPAIIDKDQFARVQARMAENKRVQGGRPATRREYPLKGKVFCGYCKSAMSVSISRKSYTYYKCGAKKRQHSCDAGNVSVDALEQTVAENVRLVLGQKGSIDKLIAVLRQQRTVIQDNALAQLKTLISRREELRRKLDNAADLVLDGRGSKTLIARMTDMEREQEQLDAKMAALKRAVDASAVPEQTLRRYAQMMADGSVDNLAPYLAIVCRVEVYGDKVVIWTILDDDPTAPKDFNAPGVQITLGTPSGVPMVFVTADLLRIVATKQSTS

SEQ ID NO: 2934 - protein, 536 aa, Unknown
  Description of Unknown: Integrase B2935 sequence
  PTHR30461:SF3,IPR036162,PS51737,IPR011109,PTHR30461, PF00239,G3DSA:1.10.10.2600,IPR006119,PF14287,SSF53041, IPR025378,SM00857,IPR025827,cd03770,IPR038109, PF13408,G3DSA:3.40.50.1390,PF07508,Coil
MKQLIYRVALYMRLSRDDEDYGESVSIETQRKIITQFANEQHFIIVDEYIDDGWTGTNFDRPAFQRMMEDVESGKVNCIITKDLSRLGREHIMMDYYLEFYFPEKRIRYIAVTENEDTEKGLSDFVPFKNLFNEWFAKDTSRKVKAAFKAKFAAGDRICAYVKIGYKRHPEIKNRIVPDEETRWIPEKIFDLAYHGAGAAKITRTLIAEKVPTPSWINYQRFGTFAHVYQNASEEKRYAWTVAQVKYILKDETYIGNTVHYKQTNISFKNKKRIRNPEDEWWRIENTHEGLIPKEMFASVQEQIATRRRMQKDHTTQIFSGLVKCADCGWSMRFGTNRQNKNPYSHYTCSKYGQVGIHCSAHYIRYDVLYTYVLSRIQYWAAQAVQDEDALLERLLQTGNAKQNAERKKIADDLKRAEKRQKELDNLFAKLYEDRIAERITERNFIMLSAKYQEEQNALDGKIDLLNGQISENSERYSNIETWVKLIKQYASPTELDSILLNALVEKIAVHEAIKHEDGSREQEVEIFYKFVGKID

SEQ ID NO: 2935 - protein, 536 aa, Unknown
  Description of Unknown: Integrase B2936 sequence
  PTHR30461:SF3,IPR036162,PS51737,IPR011109,PTHR30461, PF00239,G3DSA:1.10.10.2600,IPR006119,SSF53041,cd00338, SM00857,IPR025827,IPR038109,mobidb-lite,PS51736, PF13408,G3DSA:3.40.50.1390,PF07508,Coil
MPRKKKLQEVGGLRLVAYYRYSNGGQQTEQSIEGQRRDCEAYAKAHGYKIVHEYIDRHISGKSDSRPAFQQMISDSDSHLFDAVICWKTDRLARSRYDSIIYKTRLRRNGVKILYAAETVVDGPEGIIIEGLMESLAEYYSAELAQKLRRGQRESALKCIALGGNRSFGYDIGPDKHYCINEKQAPAVRYIFEQYAAGATAADIVRELTARGYRTSRGNPFNKNSICRIITNEMYLGVYKYADIRIEGGVPAMIDRELFNRCQTQLAFNRAHGGGKGAPRADYVLVGKLDCGLCGHAMKGASATGHTGSKHYYYTCTQHVEKKCPKTSIEKNYLEQIIVDGVAKYVLTPEKISQIVDCMMELQAKEQEPKGNPEKDALEAELAECRRKQNNILEAIEEGGSARLAARLRALEEQEAQLTFALGEINNAPAPPQFSREALTFMFEQFRREEDEVDEEYRRRILDTFVSSILLYEDRAEVKFNITDQKTGDFERVILPISANKKPPEDDDATSNSEGSTALRLVEAMGVEPMSEKSSA

SEQ ID NO: 2936 - protein, 536 aa, Unknown
  Description of Unknown: Integrase B2937 sequence
  PTHR30461:SF3,IPR036162,PS51737,IPR011109,PTHR30461, PF00239,G3DSA:1.10.10.2600,IPR006119,SSF53041,cd00338, SM00857,IPR025827,IPR038109,PS51736,mobidb-lite, PF13408,G3DSA:3.40.50.1390,PF07508,Coil
MPRKKKLQEVGGLRLVAYYRYSNGGQQTEQSIEGQRRDCEAYAKAHGYKIVHEYIDRHISGKSDSRPAFQQMISDSDSHLFDAVICWKTDRLARSRYDSIIYKTRLRKNGVKILYAAETVVDGPEGIIIEGLMESLAEYYSAELAQKLRRGQRESALKCIALGGNRSFGYDIGPDKHYCINEKQAPAVRYIFEQYAAGATAADIVRELTARGYRTSRGNPFNKNSICRIITNEMYLGVYKYADIRIEGGVPAMIDRELFNRCQTQLAFNRAHGGGKGAPRADYVLVGKLDCGLCGHAMKGASATGHTGSKHYYYTCNQHVEKKCPKTSIEKNYLEQIIVDGVAKYVLTPEKISQIVDCMMELQAKEQEPKGNPEKDALEAELAECRRKQNNILEAIEEGGSARLAARLRALEEQEAQLTFALGEINNAPTPPQFSREALTFMFEQFRREENEVDEEYRRRILDTFVSSILLYEDRAEVKFNITDQKTGDFERVILPISANKKPPEDDGTTSNSEGSTALRLVEAMGVEPMSEKSSA

SEQ ID NO: 2937 - protein, 536 aa, Unknown
  Description of Unknown: Integrase B2938 sequence
  PTHR30461:SF3,IPR036162,PS51737,IPR011109,PTHR30461, PS00397,PF00239,G3DSA:1.10.10.2600,IPR006119,SSF53041, cd00338,SM00857,IPR025827,IPR038109,PS51736, IPR006118,PF13408,G3DSA:3.40.50.1390,PF07508,Coil
MLKNTKIAVYCRVSSDEQAERGTIDNQVTFAQQYADLHHLDIYDVYKDDGVTGTIPLQDRPEGHRLLQDAADERFGLVIFYKMDRLGRSTRVILNAVEALSQHGVGVQSMSEPFDTATPSGRFMLTMFAGVAELDRANILDRMYQGTLRHARLGKWCGGPAPFGYRLQDGYLVISEEPMPGQQLSEADVIRMLYSKTIEGWSALRLAQHLNALGIPNKYTLRGNVAAGSGKWHQSKILYILHNTLYYGERSFGRLSKNSNKNIIPQQVPAIVSKETWDAAQAAIEQHSIMPKFIKRRSYLLRGLIRCGICGHTYVGTYYKRKAGNSIYYVCNAKNTRGVTPEPCKGQTLRGEWIESLVWEDCLRYIKQPDVIAVDEDCRYLQSAGDIKKEIDAATAQLKQLDQERQTVIGLCRQGIITAADLDAQLSEITEKQNTLQQTLEGLNSKNIVTKEDAEKRVKEIADILDGFRQQLQSGGELSFDAKQGIIRTLVKQITVHTELQPGAERDIPTVRVCIDYNFTLLSAKTAMLDPYRQGF

SEQ ID NO: 2938 - protein, 536 aa, Unknown
  Description of Unknown: Integrase B2939 sequence
  PTHR30461:SF3,IPR036162,PS51737,IPR011109,PTHR30461, PF00239,G3DSA:1.10.10.2600,IPR006119,PF14287,SSF53041, IPR025378,SM00857,IPR025827,cd03770,IPR038109, PF13408,G3DSA:3.40.50.1390,PF07508,Coil
MKQLIYRVALYMRLSRDDEDYGESVSIETQRKIITQFANEQHFIIVDEYIDDGWSGTNFDRPAFQRMMEDVESGKVNCIITKDLSRLGREHIMMDYYLEFYFPEKRIRYIAVTENEDTEKGLSDFVPFKNLFNEWFAKDTSRKVKAAFKAKFAAGDRICAYVKIGYKRHPEIKNRIVPDEETRWIPEKIFDLAYHGAGAAKITRTLIAEKVPTPSWINYQRFGTFAHVYQNASEEKRYAWTVAQVKYILKDETYIGNTVHYKQTNISFKNKKRIRKPEDEWWRIENTHEGLIPKEMFDSVQAQIATRRRMQKDHTTQIFSGLVKCADCGWSMRFGTNRQNKNPYSHYTCSKYGQVGIHCSAHYIRYDVLYAYVLSRIQYWAAQAVQDEDALLERLLQTGNAKQNAERKKIADDLKRSEKRQKELDNLFAKLYEDRIAERITERNFIMLSAKYQEEQNALDGKIDLLNGQISENSERYSNIETWVKLIKQYASPTELDSILLNALVEKITVHEAVKHEDGSREQEVEIFYKFIGKID

SEQ ID NO: 2939 - protein, 536 aa, Unknown
  Description of Unknown: Integrase B2940 sequence
  PTHR30461:SF3,SM00857,G3DSA:1.10.10.2600,IPR036162,PF13408, PS51737,IPR025827,G3DSA:3.40.50.1390,IPR006119,IPR038109, PF07508,SSF53041,IPR011109,PTHR30461,Coil, PS51736,cd00338,PF00239
MERAVIYARYSSDHQREESIDAQVRACREYCQRKGYLVTKIYADEAKSGKSIAKREQYKKMLSDSQKNLFDVVVFHKIDRNSRNELDYYLTKNQLISSGIKYEYAAQNIDTSPAGQMVEGILVAVAANYSRNLAEETKKGLKENALKALFNGGRPPLGFEINQENKYVINDYEAGAIRIIFDLYLKGKGYHYIISQLNSLGYKTREGRKFGKNSLYDILRNPKYCGTYTFNKVNKDPSGKRNSHKISENTIIVEDAIPAIISKEDFRKVQEKMNQNRYRSAAYKSKETYLLTGKVFCGICGAAMNGHRASSNGKKYVYYTCSGRDRLGTSACQNKVVPRDDLEELVLLTIEQELLSENSLKKLKDTIEMEYQAVANEYADEASSLSEQKAIAERKLNNLYTVIEQGTADEYDLERLAAVKQELSQIKEKLAKCAGANSIATINPAHIEKVLKVCRKMLFKNITNESLRMLFDDLVNKITIDAKKITLQLKLECSGTYGAEGPYNTIPQKFTLTFIRPRPLTVRQQQAQKKLNPANI

SEQ ID NO: 2940 - protein, 536 aa, Unknown
  Description of Unknown: Integrase B2941 sequence
  PTHR30461:SF3,IPR036162,PS51737,IPR011109,PTHR30461, PF00239,G3DSA:1.10.10.2600,IPR006119,SSF53041,cd00338, SM00857,IPR025827,IPR038109,PS51736,mobidb-lite, PF13408,G3DSA:3.40.50.1390,PF07508,Coil
MPRKKKLQEVGGLRLVAYYRYSNGGQQTEQSIEGQRRDCEAYAKAHGYKIVHEYIDRHISGKSDSRPAFQQMISDSDSHLFDAVICWKTDRLARSRYDSIIYKTRLRRNGVKILYAAETVVDGPEGIIIEGLMESLAEYYSAELAQKLRRGQRESALKCIALGGNRSFGYDIGPDKHYCINEKQAPAVRYIFEQYAAGATAADIVRELTARGYRTSRGNPFNKNSICRIITNEMYLGVYKYADIRIEGGVPAMIDRELFNRCQTQLAFNRAHGGGKGAPRADYVLVGKLDCGLCGHAMKGASATGHTGSKHYYYTCTQHVEKKCPKTSIEKNYLEQVIVDGVAKYVLTPEKISQIVDCMMELQAKEQEPKGNPEKDALEAELAECRRKQNNILEAIEEGGSARLAARLRALEEQEAQLTFALGEINNAPTPPQFSREALTFMFDQFRREEDEVDEEYRRRILDTFVSSILLYEDRAEVKFNITDQKTGDFERVILPISANKKPPEDDDITSNSEGSTALRLVEAMGVEPMSEKSSA

SEQ ID NO: 2941 - protein, 536 aa, Unknown
  Description of Unknown: Integrase B2942 sequence
  PTHR30461:SF3,SM00857,G3DSA:1.10.10.2600,IPR036162,PF13408, IPR025827,G3DSA:3.40.50.1390,PS51737,IPR006119,IPR038109, PF07508,SSF53041,IPR011109,PTHR30461,Coil, PS51736,cd00338,PF00239
MSTAVVYARYSSHSQRDASIDQQLATCRAFAQRGGIDIVDVYTDRALTGTNDNRPGFKKMIADAAKGRWNYVLVYALDRFSRDRYDSAVNKKRLRDCGVKVISATEPITEDPVGSLMESMLEGYAEYYSRELSAKVRRGHADNAKKGIVNGPLPLGYRRGTDGRPEIDPDRAEIVREIYRRAGQGEPLVRIAEDLNARGIRTKTGGPWGKSSFNTLLSNERYTGLYIYQDTRIPGGIPAIISPEDFAAVQHRLGGKKNPRRPVLPDAPPSRRRGADIYLLTGKLFCAGCGAPLVGVSGKARDGSLRHYYACRGRIREGRQCNLKNIRREDIEADIAAAIKQQILNEPTIQAISEAAYTYQLSLCESADLTILRQQLADTTKALKNIMAAIEQGIFTASTKTRLQELEADQQSLTARITAAEAAVENIPTKSEIAATLKYYATGDLADPLYREALIDTFLVRAYVHPDHYDIYFSTDAKSAVSFPLDLKTATLSEPELLNGSYSAPGLGPDKAIRTVTQHIISICGMFRITFNRPSH

SEQ ID NO: 2942 - protein, 536 aa, Unknown
  Description of Unknown: Integrase B2943 sequence
  PTHR30461:SF3,IPR036162,PS51737,PS01030,IPR011109, PTHR30461,PF00239,G3DSA:1.10.10.2600,IPR006119,PF14287, SSF53041,IPR025378,SM00857,IPR025827,cd03770,IPR038109 ,PS51736,IPR019761,PF13408,G3DSA:3.40.50.1390,PF07508,Coil
MLRQTTRNLITALYPRLSHEDELQGESNSISNQKRILETYAKQNGFSNLQWYTDDGYSGANFQRPGFQAMLADIEAGKVGTVIVKDMSRLGRNYLQVGMYTEMIFPQKGVRFIAINDGVDSAQGDNDFAPLRNIFNEWLVRDTSKKIKAVKRSKGMSGKPVTSKPVYGYFMDEDENFIIDGEAAPVVRQIYSLCLAGNGPTKIARMLTEQEIPTPGTLEYRRTGSTRRYHPGYECKWATNTVVHILENREYTGCLVNFKTEKPSYKTKHSVENPIEKQAIFENHHEPIIDTQMWERVQELRKQRKRPNRYDEVGLFSGILFCADCGSVLYQQRYQNATRKQDCYICGSYKKRTRDCTAHFIRTDLLTAGVTDNLRKVTSYAAKHEARFMKLLIEQNEDGGKRRNAARKKELEAAEKRISELSAIFKRLYEDSVTGRISDERFTELSADYEAEQKELKERAAAIRAELSKAQEATVNAEKFMNVVRKYTSFEELTPTLLREFVEKIVVHECSYDENGTRRQDIDIYYSFVGKVDLPE

SEQ ID NO: 2943 - protein, 536 aa, Unknown
  Description of Unknown: Integrase B2944 sequence
  PTHR30461:SF3,IPR036162,PS51737,IPR011109,PTHR30461, PF00239,G3DSA:1.10.10.2600,IPR006119,SSF53041,cd00338, SM00857,IPR025827,IPR038109,PS51736,mobidb-lite, PF13408,G3DSA:3.40.50.1390,PF07508,Coil
MPRKKKLQEVGGLRLVAYYRYSNGGQQTEQSIEGQRRDCEAYAKAHGYKIVHEYIDRHISGKSDSRPAFQQMISDSDSHLFDAVICWKTDRLARSRYDSIIYKTRLRRNGVKILYAAETVVDGPEGIIIEGLMESLAEYYSAELAQKLRRGQRESALKCIALGGNRSFGYDIGPDKHYCINEKQAPAVRYIFEQYAAGATAADIVRELTARGYRTSRGNPFNKNSICRIITNEMYLGVYKYADIRIEGGVPAMIDRELFNRCQTQLAFNRAHGGGKGAPRADYVLVGKLDCGLCGHAMKGASATGHTGSKHYYYTCNQHVEKKCPKTSIEKNYLEQIIVDGVAKYVLTPEKISQIVDCMMELQAKEQEPKGNPEKDALEAELAECRRKQNNILEAIEEGGSARLAARLRTLEEQEAQLTFALGEINNAPTPPQFSREALTFMFEQFRREEDEVDEEYRRRILDTFVSSILLYEDRAEVKFNITDQKTGDFERVILPISANKKPPEDDGTSSNSEGSTALRLVEAMGVEPMSEKSSA

SEQ ID NO: 2944 - protein, 536 aa, Unknown
  Description of Unknown: Integrase B2945 sequence
  PTHR30461:SF3,IPR036162,PS51737,IPR011109,PTHR30461, PF00239,G3DSA:1.10.10.2600,IPR006119,SSF53041,cd00338, SM00857,IPR025827,IPR038109,PS51736,mobidb-lite, PF13408,G3DSA:3.40.50.1390,PF07508,Coil
MPRKKKLQEVGGLRLVAYYRYSNGGQQTEQSIEGQRRDCEAYAKAHGYKIVHEYIDRHISGKSDSRPAFQQMISDSDSHLFDAVICWKTDRLARSRYDSIIYKTRLRRNGVKILYAAETVVDGPEGIIIEGLMESLAEYYSAELAQKLRRGQRESALKCIALGGNRSFGYDIGPDKHYCINEKQAPAVRYIFEQYAAGATAADIVRELTARGYRTSRGNPFNKNSICRIITNEMYLGVYKYADIRIEGGVPAMIDRELFNRCQTQLAFNRAHGGGKGAPRADYVLVGKLDCGLCGHAMKGASATGHTGSKHYYYTCTQHVEKKCPKTSIEKNYLEQVIVDGVAKYVLTPEKISQIVDCMMELQAKEQEPKGNPEKDALEAELAECRRKQNNILEAIEEGGSARLAARLRALEEQEAQLTFALGEINNAPAPPQFSREALTFMFEQFRREEDEVDEEYRRRILDTFVSSILLYEDRAEVKFNITDQKTGDFERVILPISANKKPPEDDDIPSNSEGSTALRLVEAMGVEPMSEKSSV

SEQ ID NO: 2945 - protein, 536 aa, Unknown
  Description of Unknown: Integrase B2946 sequence
  PTHR30461:SF3,IPR036162,PS51737,IPR011109,PTHR30461, PF00239,G3DSA:1.10.10.2600,IPR006119,PF14287,SSF53041, IPR025378,SM00857,IPR025827,cd03770,IPR038109, PF13408,G3DSA:3.40.50.1390,PF07508,Coil
MKQLIYRVALYMRLSRDDEDYGESVSIETQRKIITQFANEQHFIIVDEYIDDGWTGTNFDRPAFQRMMEDVESGKVNCIITKDLSRLGREHIMMDYYLEFYFPEKRIRYIAVTENEDTEKGLSDFVPFKNLFNEWFAKDTSRKVKAAFKAKFAAGDRICAYVKIGYKRHPEIKNRIVPDEETRWIPEKIFDLAYHGAGAAKITRTLIAEKVPTPSWINYQRFGTFAHVYQNASEEKRYAWTVAQVKYILKDETYIGNTVHYKQTNISFKNKKRIRKPEDEWWRIENTHEGLIPKEMFASVQEQIATRRRMQKDHTTQIFSGLVKCADCGWSMRFGTNRQNKNPYSHYTCSKYGQVGIHCSAHYIRYDVLYTYVLSRIQYWAAQAVQDEDALLERLLQTGNAKQNAERKKIADDLKRAEKRQKELDNLFAKLYEDRIAERITERNFIMLSAKYQEEQNALDGKIDLLNGQISENSERYSNIETWVKLIKQYASPTELDSILLNALVEKIAVHEAIKHEDGSREQEVEIFYKFVGKID

SEQ ID NO: 2946 - protein, 536 aa, Unknown
  Description of Unknown: Integrase B2947 sequence
  PTHR30461:SF3,SM00857,G3DSA:1.10.10.2600,IPR036162,PF13408, IPR025827,G3DSA:3.40.50.1390,PS51737,IPR006119,IPR038109, PF07508,IPR011109,SSF53041,PF00239,PTHR30461, PS51736,Coil,cd00338
MQTIPIDLSALTPEERQQFADNPSVLSSDCEAVCCLYMRYSSDRQTEQSIEGQLRELIAYCKHHSYRVAAIYVDRAISAHASMDKRPAFQQMLSDSARSSWKTVLVYKLDRFARNREDSAIARMRLRKNGCNVESAKEGISKNPEGVILEALLEGMAEYYSLELSQKITRGMRESAIKGNCLGGQIPLGYKIENKKYVIDPLTAPLVKEAFSRYGDGETAASICADFNARGYRTASGAEFNKSSFKNIFRNEKYIGVYKYKEIRREGIIPRIIADDAWIAVQSRLKVNEAAPARGKAKVAYLLAGKIFCGHCGAPMTGECGRGKSGKMYNYYSCATRKHHNSCEKKPVPKDWLEDVVAQDALDVLTDEIIEFVAEVAAQQSEEDIQKNTQIPVIRKKISEIEIKIRNLTKALECASVAPDAIVERLAELEAQKKGLSTQLSDEERGVIPLTKESVVVYLKAVREKAVPLETQKAMLIEMLVNSVTVYDDEPGFLKLVYAYRLTQIPTRTYRVPIPAKVPCSDFRTQPAPKLQHALP

SEQ ID NO: 2947 - protein, 536 aa, Unknown
  Description of Unknown: Integrase B2948 sequence
  SM00857,G3DSA:1.10.10.2600,IPR036162,PF13408,IPR025827, PS51737,G3DSA:3.40.50.1390,IPR006119,IPR038109,PF07508, IPR011109,SSF53041,PTHR30461,PS51736,cd00338, PF00239
MKLTHGAYILARFSTDRQDADSIEVQVSRCREWCDRQRLPVLDVFADEAVSGMKETRPQFDRMMRLLSEGGADTVVIYDQSRMFRKMTAWFTLRERLERLGVRVVSVTQPMIGGDLRDPATFMSEGGMALMNQMWVLQTRQKVCEKMRWMAEQGKYTGGVPPLGYVVIDGRIEVCEPEAETVRIIFGDYAAGRSYREIIQRLNAEGRRTKSGGTFGSNSLHDLLKNEKYIGVLTYGRTQKRPDGSRNSHAVASTVMRMEGVIPAIVDRETWDIVQEKLMANKRKQAGRPVRVREYPLKGKVFCGECKASMSVTCSQGGYYYYACSEKKRKKTCDNMPIKVDDLERMIAEAIKNMLGNPENVDGLICILREERGKIQEQTAMRMKALFDRQAEIKKQLDAAMSAVLAGMHSQSLIDTVHALEAEQAQNDREMTTLHNQAQGTTIPEDRLRELLKVAANDIPALLSVVVRVEVGKDRIRVWTLLDAKPDGTFDFNTDWDDPEIGLIIIPGVAPPVPRIIINGGLLCFSLPRPKKNRAE

SEQ ID NO: 2948 - protein, 536 aa, Unknown
  Description of Unknown: Integrase B2949 sequence
  PTHR30461:SF3,IPR036162,PS51737,IPR011109,PTHR30461, PF00239,G3DSA:1.10.10.2600,IPR006119,PF14287,SSF53041, IPR025378,SM00857,IPR025827,cd03770,IPR038109, PF13408,G3DSA:3.40.50.1390,PF07508,Coil
MKQLIYRVALYMRLSRDDEDYGESVSIETQRKIITQFANEQHFIIVDEYIDDGWSGTNFDRPAFQRMMEDVESGKVNCIITKDLSRLGREHIMMDYYLEFYFPEKRIRYIAVTENEDTEKGLSDFVPFKNLFNEWFAKDTSRKVKAAFKAKFAAGDRICAYVKIGYKRHPEIKNRIVPDEETRWIPEKIFDLAYHGAGAAKITRTLIAEKVPTPSWINYQRFGTFAHVYQNTSEEKRYAWTVAQVKYILKDETYIGNTVHYKQTNISFKNKKRIRKPEDEWWRIENTHEGLIPKEMFDSVQAQIATRRRMQKDHTTQIFSGLVKCADCGWSMRFGTNRQNKNPYSHYTCSKYGQVGIHCSAHYIRYDVLYAYVLSRIQYWAAQAVQDEDALLERLLQTGNAKQNAERKKIADDLKRSEKRQKELDNLFAKLYEDRIAERITERNFIMLSAKYQEEQNALDGKIDLLNGQISENSERYSNIETWVKLIKQYASPTELDSILLNALVEKITVHEAVKHEDGSREQEVEIFYKFIGKID

SEQ ID NO: 2949 - protein, 536 aa, Unknown
  Description of Unknown: Integrase B2950 sequence
  PTHR30461:SF3,IPR036162,PS51737,IPR011109,PTHR30461, PF00239,G3DSA:1.10.10.2600,IPR006119,PF14287,SSF53041, IPR025378,SM00857,IPR025827,cd03770,IPR038109, PF13408,G3DSA:3.40.50.1390,PF07508,Coil
MKQLIYRVALYMRLSRDDEDYGESVSIETQRKIITQFANEQHFIIVDEYIDDGWTGTNFDRPAFQRMMEDVESGKVNCIITKDLSRLGREHIMMDYYLEFYFPEKRIRYIAVTENEDTEKGLSDFVPFKNLFNEWFAKDTSRKVKAAFKAKFAAGDRICAYVKIGYKRHPEIKNRIVPDEETRWIPEKIFDLAYHGAGAAKITRTLIAEKVPTPSWINYQRFGTFAHVYQNASEEKRYAWTVAQVKYILKDETYIGNTVHYKQTNISFKNKKRIRKPEDEWWRIENTHEGLIPKEMFDSVQAQIATRRRMQKDHTTQIFSGLVKCADCGWSMRFGTNRQNKNPYSHYTCSKYGQVGIHCSAHYIRYDALYAYVLSRIQYWAAQAVQDEDALLERLLQTGNAKQNAERKKIADDLKRAEKRQKELDNLFAKLYEDRIAERITERNFIMLSAKYQEEQNALDGKIDLLNGQISDNSERYSNIETWVKLIKQYASPTELDSILLNALVEKITVHEAVKHEDGSREQEVEIFYKFVGKID

SEQ ID NO: 2950 - protein, 536 aa, Unknown
  Description of Unknown: Integrase B2951 sequence
  PTHR30461:SF3,IPR036162,PS51737,IPR011109,PTHR30461, PF00239,G3DSA:1.10.10.2600,IPR006119,PF14287,SSF53041, IPR025378,SM00857,IPR025827,cd03770,IPR038109, PF13408,G3DSA:3.40.50.1390,PF07508,Coil
MKQLIYRVALYMRLSRDDEDYGESVSIETQRKIITQFANEQHFIIVDEYIDDGWSGTNFDRPAFQRMMEDVESGKVNCIITKDLSRLGREHIMMDYYLEFYFPEKRIRYIAVTENEDTEKGLSDFVPFKNLFNEWFAKDTSRKVKAAFKAKFAAGDRICAYVKIGYKRHPEIKNRIVPDEETRWIPEKIFDLAYHGAGAAKITRTLIAEKVPTPSWINYQRFGTFAHVYQNTSEEKRYAWTVAQVKYILKDETYIGNTVHYKQTNISFKNKKRIRNPEDEWWRIENTHEGLIPKEMFDSVQAQIATRRRMQKDHTTQIFSGLVKCADCGWSMRFGTNRQNKNPYSHYTCSKYGQVGIHCSAHYIRYDVLYAYVLSRIQYWATQAVQDGDALLERLLQTGNAKQNAERKKIADDLKRAEKRQKELDNLFAKLYEDRIAERITERNFIMLSAKYQEEQNALDGKIDLLNGQISENSERYSNIETWVKLIKQYASPTELDSILLNALVEKITVHEAVKHEDGSREQEVEIFYKFIGKID

SEQ ID NO: 2951 - protein, 536 aa, Unknown
  Description of Unknown: Integrase B2952 sequence
  PTHR30461:SF3,IPR036162,PS51737,IPR011109,PTHR30461, PF00239,G3DSA:1.10.10.2600,PF14287,IPR006119,SSF53041, cd00338,IPR025378,SM00857,IPR025827,IPR038109, PS51736,PF13408,G3DSA:3.40.50.1390,PF07508,Coil
MIIILNDFNTSLRVGIYLRLSNEDRDKISKEEVSESIKNQRNMLLDYIEKNSEFMLIDEYCDEDLSGAGTYRPEFERLIRDCENGKLDVVLCKSQSRFSRDMEIVEKYINNKFKEWNIRFIGLSDNADTEVLGNKKSRQINGLVNEWYLEDVSNNIRSAFYSKMKQGEFISPFAPFGYEISPYDNNKLIVDTAASIIVKEIYDLYLKGMGFTGIAHYLNDKNIPCPSLYKYKKGIKLNIISNRPREEIKWNTNAIKTILKNELYLGHLIQGKRTTVSYKNHKVINKPEDEWIRRENMHEAIIDEETFAKVQLALKERTKPMKSTGIVHNFSGKVFCKECGHYMRKKNSSKHEYLVCSNNRDGYNDCINKSSIRYDALEELVLSHINKKVKKFYDLNILETESAKKENNKFTKKINLLTKQKENIVNQMTKTKNYLKNLYEDKVNGIINAEQFKELITNYNNDDEKLKDQLKSIDNEINYYILKESSKKNTKELFNKYHQLEKLNRVIVVEFVDKIYIGKINDETNTRDIEIKWNFE

SEQ ID NO: 2952 - protein, 536 aa, Unknown
  Description of Unknown: Integrase B2953 sequence
  PTHR30461:SF3,cd00338,SM00857,G3DSA:1.10.10.2600,IPR036162, PF13408,PS51737,G3DSA:3.40.50.1390,IPR025827,IPR006119, IPR038109,PF07508,IPR011109,SSF53041,PTHR30461, Coil,PF00239
MYEEIKTACLYLRYSSSNQTEQSIEGQMHVCQDFCKRHNIRIVEMYIDRATSASKDIEKRVEFLKMIKDSEKGNFNAVIVYKLDRFARSRYDSATYKYRLKRNGVQLISATENITQDPEGIILESVLEGMAEFYSAELSQKINRGMRESAMKHNSIGGAIPLGYKTVDKKLVIDETTAPIVREAFQMYADGESVAEICRTFNNRGYKTSKGTRFGKSSFTKIFRNEKYIGVYKYHDYRAEDVIPPIIDKDLWDRVQVRVGKIKKAPARNKARHTYLLTGKLFCGHCGSAMNADGNSQGYLYYRCYGKKNLDKQCNKRNMEKNLIERLVAQDTMSFLTDEYIEKIATIACDRNKQEIESDSPIPVIRDRIRQVDVSLNNLLKAIETGSAPDMLVKRMGELETEKKDMEVQLKKEMAHQVYIDKEQVIFWLEKFREGDINDEEFCQTVIDLFVNSVTVWDEPDDKFKITIAYNLTSIPQKTYRLSKDGRLSDYASNTPDWEVFCQLWTIKISFFAFIISLTPTTGNCTNCYAVITLSL

SEQ ID NO: 2953 - protein, 536 aa, Unknown
  Description of Unknown: Integrase B2954 sequence
  PTHR30461:SF3,IPR036162,PS51737,IPR011109,PTHR30461, PF00239,G3DSA:1.10.10.2600,IPR006119,SSF53041,cd00338, SM00857,IPR025827,IPR038109,PS51736,mobidb-lite, PF13408,G3DSA:3.40.50.1390,PF07508,Coil
MPRKKKLQEVGGLRLVAYYRYSNGGQQTEQSIEGQRRDCEAYAKAHGYKIVHEYIDRHISGKSDSRPAFQQMISDSDSHLFDAVICWKTDRLARSRYDSIIYKTRLRKNGVKILYAAETVVDGPEGIIIEGLMESLAEYYSAELAQKLRRGQRESALKCIALGGNRSFGYDIGPDKHYCINEKQAPAVRYIFEQYAAGATAADIVRELTARGYRTSRGNPFNKNSICRIITNEMYLGVYKYADIRIEGGVPAMIDRELFNRCQTQLAFNRAHGGGKGAPRADYVLVGKLDCGLCGHAMKGASATGHTGSKHYYYTCTQHVEKKCPKTSIEKNYLERVIVDGVAKYVLTPEKISQIVDCMMELQAKEQEPKGNPEKDALEAELAECRRKQNNILEAIEEGGSARLAARLRTLEEQEAQLTFALGEINNAPTPPQFSREALTFMFEQFRREEDEVDEEYRRRILDTFVSSILLYEDRAEVKFNITDQKTGDFERVILPISANKKPPEDDDIPSNSGGSTALRLVEAMGVEPMSEKSSA

SEQ ID NO: 2954 - protein, 536 aa, Unknown
  Description of Unknown: Integrase B2955 sequence
  PTHR30461:SF3,IPR036162,PS51737,IPR011109,PTHR30461, PF00239,G3DSA:1.10.10.2600,IPR006119,SSF53041,cd00338, SM00857,IPR025827,IPR038109,mobidb-lite,PS51736, PF13408,G3DSA:3.40.50.1390,PF07508,Coil
MPRKKKLQEVGGLRLVAYYRYSNGGQQTEQSIEGQRRDCEAYAKAHGYKIVHEYIDRHISGKSDSRPAFQQMISDSDSHLFDAVICWKTDRLARSRYDSIIYKTRLRKNGVKILYAAETVVDGPEGIIIEGLMESLAEYYSAELAQKLRRGQRESALKCIALGGNRSFGYDIGPDKHYCINEKQAPAVRYIFEQYAAGATAADIVRELTARGYRTSRGNPFNKNSICRIITNEMYLGVYKYADIRIEGGVPAMIDRELFNRCQTQLAFNRAHGGGKGAPRADYVLVGKLDCGLCGHAMKGASATGHTGSKHYYYTCTQHVEKKCPKTSIEKNYLEHVIVDGVAKYVLTPEKISQIVDCMMELQAKEQEPKGNPEKDALEAELAECRRKQNNILEAIEEGGSARLAARLRTLEEQEAQLTFALGEINNAPTPPQFSREALTFMFEQFRREEDEVDEEYRRRILDTFVSSILLYEDRAEVKFNITDQKTGDFERVILPISANKKPPEDDDATSNSEGSTALRLVEAMGVEPMSEKSSA

SEQ ID NO: 2955 - protein, 536 aa, Unknown
  Description of Unknown: Integrase B2956 sequence
  PTHR30461:SF3,SM00857,G3DSA:1.10.10.2600,IPR036162,PF13408, PS51737,G3DSA:3.40.50.1390,IPR025827,IPR006119,IPR038109, PF07508,IPR011109,SSF53041,PTHR30461,Coil, cd00338,PF00239
MARTATKHPAKPKRGKKLEAEEPGVLYGRYSSHNQKDISVEQQFEKGYGLAGEYGIRIVETYADRAVSGRTDKRKDFQRMMADAAKGKFRYVIAWKSNRMGRNMLEALVNEAKLQELGVRVLYVEEDFDDTAAGRFAARSMMNVNQFYSENMAEDIKRGLYDNASNCMVANGHLPYGYKRDDTLHYVIDEAKAAVIREIFVRVSCGEPLVDIYDSLNARGIKTSYGRPWGRSSFQKILSNERYRGIYIYGDVRKEGGIPRIVSDELYFKVQEVLKTKKNPQGRHRVNGDYLLTGKLFCGNCKSPMIGISGTGRTGKLHYYYVCQKKRSEKTCDKKNVRRDEVEYQIAKAIFDNALQDQVIEWIADSTIAYNDRKEAEGHIGILEDQLADVQRSLKNIMSAIEQGIVTETTKSRLLELESERSEIEGKIAAAKADIVPVNREQLIEWLLSLREGDIHDKKYQARLFDTFLIAAYLYDDGTAKLVFSFAGDKNTVTVPLAEAVDSVEENTAEGSFKLCLAPPNSASKDAEFCFILSTF

SEQ ID NO: 2956 - protein, 536 aa, Unknown
  Description of Unknown: Integrase B2957 sequence
  PTHR30461:SF3,IPR036162,PS51737,IPR011109,PTHR30461, PF00239,G3DSA:1.10.10.2600,IPR006119,SSF53041,cd00338, SM00857,IPR025827,IPR038109,mobidb-lite,PS51736, PF13408,G3DSA:3.40.50.1390,PF07508,Coil
MPRKKKLQEVGGLRLVAYYRYSNGGQQTEQSIEGQRRDCDAYAKAHGYKIVHEYIDRHISGKSDSRPAFQQMISDSDSHLFDAVICWKTDRLARSRYDSIIYKTRLRKNGVKILYAAETVVDGPEGIIIEGLMESLAEYYSAELAQKLRRGQRESALKCIALGGNRSFGYDIGPDKHYCINEKQAPAVRYIFEQYAAGATAADIVRELTARGYRTSRGNPFNKNSICRIITNEMYLGVYKYADIRIEGGVPAMIDRELFNRCQTQLAFNRAHGGGKGAPRADYVLVGKLDCGLCGHAMKGASATGHTGSKHYYYTCTQHVEKKCPKTSIEKNYLEQVIVDGVAKYVLTPEKISQIVDCMMELQAKEQEPKGNPEKDALEAELAECRRKQNNILEAIEEGGSARLAARLRALEEQEAQLTFALGEINNAPAPPQFSREALTFMFEQFRREEDEVDEEYRRRILDTFVSSILLYEDRAEVKFNITDQKTGDFERVILPISANKKPPEDDDTTSNSESSTALRLVEAMGVEPMSEKSSV

SEQ ID NO: 2957 - protein, 536 aa, Unknown
  Description of Unknown: Integrase B2958 sequence
  PTHR30461:SF3,IPR036162,PS51737,IPR011109,PTHR30461, PF00239,G3DSA:1.10.10.2600,IPR006119,SSF53041,cd00338, SM00857,IPR025827,IPR038109,mobidb-lite,PS51736, PF13408,G3DSA:3.40.50.1390,PF07508,Coil
MPRKKKLQEVGGLRLVAYYRYSNGGQQTEQSIEGQRRDCEAYAKAHGYKIVHEYIDRHISGKSDSRPAFQQMISDSDSHLFDAVICWKTDRLARSRYDSIIYKTRLRKNGVKILYAAETVVDGPEGIIIEGLMESLAEYYSAELAQKLRRGQRESALKCIALGGNRSFGYDIGPDKHYCINEKQAPAVRYIFEQYAAGATAADIVRELTARGYRTSRGNPFNKNSICRIITNEMYLGVYKYADIRIEGGVPAMIDRELFNRCQTQLAFNRAHGGGKGAPRADYVLVGKLDCGLCGHAMKGASATGHTGSKHYYYTCTQHVEKKCPKTSIEKNYLEQIIVDGVAKYVLTPEKISQIVDCMMELQAKEQEPKGNPEKDTLEAELAECRRKQNNILEAIEEGGSARLAARLRTLEEQEAQLTFALGEINNAPAPPQFSREALTFMFEQFRREEDEVDEEYRRRILDTFVSSILLYEDRAEVKFNITDQKTGDFERVILPISANKKPPEDDDTTSNSEGSTALRLVEAMGVEPMSEKSSA

SEQ ID NO: 2958 - protein, 536 aa, Unknown
  Description of Unknown: Integrase B2959 sequence
  PTHR30461:SF3,cd00338,SM00857,G3DSA:1.10.10.2600,IPR036162, PF13408,PS51737,G3DSA:3.40.50.1390,IPR025827,IPR006119, IPR038109,PF07508,SSF53041,IPR011109,PTHR30461, PS51736,Coil,PF00239
MQKLKVAAYARVSTDKDDQTNSLDNQRNYFTNYIINHENWKLVDVYFDEGISGTQTEKRVGFNRMIEDAKNKEIDLIITKEVSRFARNTVDTLSYTRKLKEYGVGVVFTLDNIDTRETDGEFRLTIMASIAQEESRKTSERVRWGQRRQMEKGVVFGRDLLGYTVRHGVLAINQEEVPVVKAIFHKYTNEGKGTHVIARELIEEGMRPKRIALWSNTIILKVLRNEKYVGDLLQKKTYTPDFLTHAKKYNHGEEEMVYLQNHHEPIIDRDLWDRTQEELKRRSTSAEQKAKHSNRYWCSGKLCCAECGSRFVSRTKKLKNASQYKAWRCHAAANHGALKEDADGNYIGCSNGSINDRSLQTCMNYCISLIQTEKDTLKREILSEIKELQKSAEKKTDTKKIQKKIDQLETKKRKAIDLMLDGLISKDDLKNQTEWYNEEIKQLNQQVLDSEQENKVKSRQANAMKEYISALDEIMDMDSNNELVYKEILDHIDIHKNYILDIWLKCIPFAIRLKVKPSGKGEYFKTEIIETSFIEK

SEQ ID NO: 2959 - protein, 536 aa, Unknown
  Description of Unknown: Integrase B2960 sequence
  PTHR30461:SF3,IPR036162,PS51737,IPR011109,PTHR30461, PF00239,G3DSA:1.10.10.2600,IPR006119,PF14287,SSF53041, IPR025378,SM00857,IPR025827,cd03770,IPR038109, PF13408,G3DSA:3.40.50.1390,PF07508,Coil
MKQLIYRVALYMRLSRDDEDYGESVSIETQRKIITQFANEQHFIIVDEYIDDGWSGTNFDRPAFQRMMEDVESGKVNCIITKDLSRLGREHIMMDYYLEFYFPEKRIRYIAVTENEDTEKGLSDFVPFKNLFNEWFAKDTSRKVKAAFKAKFAAGDRICAYVKIGYKRHPEIKNRIVPDEETRWIPEKIFDLAYHGAGAAKITRTLIAEKVPTPSWINYQRFGTFAHVYQNASEEKRYAWTVAQVKYILKDETYIGNTVHYKQTNISFKNKKRIRKPEDEWWRIENTHEGLIPKEMFDSVQAQIATRRRMQKDHTTQIFSGLVKCADCGWSMRFGTNRQNKNPYSHYTCSKYGQVGIHCSAHYIRYDVLYAYVLSRIQYWAAQAVQDEDALLERLLQTGNAKQNAERKKIADDLKRAEKRQKELDNLFAKLYEDRIAERITERNFIMLSAKYQEEQNALDGKIDLLNGQISENSERYSNIETWVKLIKQYASPTELDSILLNALVEKITVHEAVKHEDGSREQEVEIFYKFVGKID

SEQ ID NO: 2960 - protein, 536 aa, Unknown
  Description of Unknown: Integrase B2961 sequence
  PTHR30461:SF3,IPR036162,PS51737,IPR011109,PTHR30461, PS00397,PF00239,G3DSA:1.10.10.2600,IPR006119,SSF53041, cd00338,SM00857,IPR025827,IPR038109,PS51736, IPR006118,PF13408,G3DSA:3.40.50.1390,PF07508,Coil
MFKNTKIAVYCRVSSDEQAERGTIDNQITFAQQYADLHHLDIYDVYKDDGVTGTIPLQDRPEGHRLLQDAADERFTLVVFYKMDRLGRSTRVILNAVEALSQHGVGVQSMSEPFDTSTPSGRFMLTMFAGVAELDRANILDRMYQGTLRHARLGKWCGGPAPFGYCLQDGYLVVSEEPMPGQQLSEADVIRMLYGKTIEGWSALRLAQHLNALGIPNKYTLRGNVAAGSGKWHQSKILYILHNTLYYGERSFGKMSKNNNKNIIPQQVPAIVSKETWDAAQAAVEQHSIMPKFIKRRSYLLRGLIRCGLCGHTYVGTYYKRKAGNSIYYVCNAKNTRGVTPEPCKGQTLRGEWIESLVWEDCLRYIKQPDVIAVDEDCRYLQSAGDIKKEIDAATAQLKQLDQERQTVIGLCRQGIITAADLDGQLSDITEKQNTLQQTLEGLNSQSLVTKEDAEKRVKEIADILGGFRQQLQSGGELTFDAKQGIIRTLVKQITVHTELQPGAERDIPTVRVCIDYNFTLLPSKSGMLDPYRQGF

SEQ ID NO: 2961 - protein, 536 aa, Unknown
  Description of Unknown: Integrase B2962 sequence
  PTHR30461:SF3,SM00857,G3DSA:1.10.10.2600,IPR036162,PF13408, PS51737,IPR025827,G3DSA:3.40.50.1390,IPR006119,IPR038109, PF07508,IPR011109,SSF53041,PF00239,PTHR30461, PS51736,Coil,cd00338
MQRQHGAYIYARYSTENQDADSIDVQVGKCTQYCSQRGLPILGVFADEAVSGMKESRPRFDAMMAQLGMGLADTVVCYDQSRLFRKMTAWFDLREKLSVMGVAVISVTQPMVGGDLRDPTIFLTEGGMALFNQVWVFQSRQKVMEKMQHMARNGQHTGGKPPLGYQVVELGGVKKLAILQPEAETVKRIFAEYDSGRSYHDIIAGLNRDGIKTKRGNPFGTNSLHDLLKNEKYIGTLVYGASPYRADGTRNTHAKDGENIIRVEDAIPAIIDKDQFARVQARMAENKRVQGGRPATRREYPLKGKVFCGYCKSAMSVSISRKSYTYYKCGAKKRQHSCAAGNVSVDALEQTVAENVRLVLGQKGSIDKLIAVLRQQRTVIQDNALAQLKALISRREELRRKLDNAADLVLDGRGSKTLIARMTDMEREQEQLDAKMAALKRAVDASAVPEQTLRRYAQMMADGSVDNLAPYLAIVCRVEVYGDKVVIWTILDDDPTAPKDFNAPGVQITLGTPSGVPMVFVTADLLRIVATKQSTS

SEQ ID NO: 2962 - protein, 536 aa, Unknown
  Description of Unknown: Integrase B2963 sequence
  PTHR30461:SF3,SM00857,G3DSA:1.10.10.2600,IPR036162,PF13408, IPR025827,G3DSA:3.40.50.1390,PS51737,IPR006119,IPR038109, PF07508,IPR011109,SSF53041,PF00239,PTHR30461, PS51736,Coil,cd00338
MQRQHGAYIYARYSTENQDADSIDVQVGKCTQYCSQRGLPILGVFADEAVSGMKESRPRFDAMMAQLGMGLADTVVCYDQSRLFRKMTAWFDLREKLSVMGVAVISVTQPMVGGDLRDPTIFLTEGGMALFNQVWVFQSRQKVMEKMQHMARNGQHTGGKPPLGYQVVELGGVKRLAILPPEAETVKRIFAEYDSGRSYHDIIAGLNRDGIKTKRGNQFGTNSLHDLLKNEKYIGTLVYGASPYRADGTRNTHAKDGENVIRVDDAIPAIIDKDQFARVQARMAENKRVQGGRPATRREYPLKGKVFCGYCKSAMSVSISRKSYTYYKCGAKKRQHSCAAGNVSVDALEQTVAENVRLVLGQKGSIDKLIAVLRQQRTVIQDNALAQLKTLISRREELRRKLDNAADLVLDGRGSKTLIARMTDMEREQEQLDAKMTALKRAVDASAVPEQTLRRYAQMMADGSVDNLAPYLAIVCRVEVYGDKVVIWTILDDDPTAPKDFNAPGVQITLGVPSGVPMVFVTADLLRIVATKQSTS

SEQ ID NO: 2963 - protein, 536 aa, Unknown
  Description of Unknown: Integrase B2964 sequence
  PTHR30461:SF3,IPR036162,PS51737,IPR011109,PTHR30461, PF00239,G3DSA:1.10.10.2600,IPR006119,SSF53041,cd00338, SM00857,IPR025827,IPR038109,PS51736,mobidb-lite, PF13408,G3DSA:3.40.50.1390,PF07508,Coil
MPRKKKLQEVGGLRLVAYYRYSNGGQQTEQSIEGQRRDCEAYAKAHGYKIVHEYIDRHISGKSDSRPAFQQMISDSDSHLFDAVICWKTDRLARSRYDSIIYKTRLRKNGVKILYAAETVVDGPEGIIIEGLMESLAEYYSAELAQKLRRGQRESALKCIALGGNRSFGYDIGPDKHYCINEKQAPAVRYIFEQYAAGATAADIVRELTARGYRTSRGNPFNKNSICRIITNEMYLGVYKYADIRIDGGVPAMIDRELFNRCQTQLAFNRAHGGGKGAPRADYVLVGKLDCGLCGHAMKGASATGHTGSKHYYYTCTQHVEKKCPKTSIEKNYLEQIIVDGVAKYVLTPEKISQIVDCMMELQAKEQEPKGNPEKDALEAELAECRRKQNNILEAIEEGGSARLAARLRALEEQEAQLTFALGEINNAPTPPQFSREALTFMFEQFRREEDEVDEEYRRRILDTFVSSILLYEDRAEVKFNITDQKTGDFERVILPISANKKPPEDDDTTSNSEGSTALRLVEAMGVEPMSEKSSA

SEQ ID NO: 2964 - protein, 536 aa, Unknown
  Description of Unknown: Integrase B2965 sequence
  PTHR30461:SF3,SM00857,G3DSA:1.10.10.2600,IPR036162,PF13408, IPR025827,G3DSA:3.40.50.1390,PS51737,IPR006119,IPR038109, PF07508,SSF53041,IPR011109,PTHR30461,PS51736, cd00338,PF00239
MKRAALYARYSSDNQRHESIDAQLRASREYCASRNYAIVRIYTDEAITGTSVVRRDAFQKMILDSGDDIFDVVIFHKIDRNARDEIDYYTNVDRLRKNGVTYEYSAEGIDVSTTNGKLTEGIKVAVAAWYSRNLATEVKKGQKENALKGIFNGGRPPLGYKIVNQRYEIEPREAEAVRLIFDMYIHGNGYVKIASELNRRGFTTRNGKPFVKNSLYEILGNERYTGTYIFNRICTDEFGRRNNHKINPDAIRIENAIPAIIDKETFKIVAELRARNKNCSSRFRAVETYLLSGKVKCALCGSPMNGHRVKCKTGTYSYYCCSKTRLPKDVKCAQKLISKTALEKKVANVIMERILSESERPKLFEEMKNYYQMLIGHSEKERHTLNIAKAAAETKLSNLYALVEAGNVIDKFDIMRIQKVKAEITDITNQLNNIPKTTNLKLPDEETFNKILKEMHSALLRDDKEVMEMIINIFVSEVEIGPNYVHIYVETKGPPIFSAKHGSLHLHHFHEYTLIKCRIPRTILCKTLHLNDVVIL

SEQ ID NO: 2965 - protein, 536 aa, Unknown
  Description of Unknown: Integrase B2966 sequence
  PTHR30461:SF3,IPR036162,PS51737,IPR011109,PTHR30461, PF00239,G3DSA:1.10.10.2600,IPR006119,SSF53041,cd00338, SM00857,IPR025827,IPR038109,mobidb-lite,PS51736, PF13408,G3DSA:3.40.50.1390,PF07508,Coil
MPRKKKLQEVGGLRLVAYYRYSNGGQQTEQSIEGQRRDCEAYAKAHGYKIVHEYIDRHISGKSDSRPAFQQMISDSDSHLFDAVICWKTDRLARSRYDSIIYKTRLRRNGVKILYAAETVVDGPEGIIIEGLMESLAEYYSAELAQKLRRGQRESALKCIALGGNRSFGYDIGPDKHYCINEKQAPAVRYIFEQYAAGATAADIVRELTARGYRTSRGNPFNKNSICRIITNEMYLGVYKYADIRIEGGVPAMIDRELFNRCQTQLAFNRAHGGGNGAPRADYVLVGKLDCGLCGHAMKGASATGHTGSKHYYYTCTQHVEKKCPKTSIEKNYLEQVIVDGVAKYVLTPEKISQIVDCMMELQAKEQEPKGNPERDALEAELAECRRKQNNILEAIEEGGSARLAARLRALEEQEAQLTFALGEINNAPAPPQFSREALTFMFEQFRREEDEVDEEYRRRILDTFVSSILLYEDRAEVKFNITDQKTGDFERVILPISTNKKPPEDDDITSNSEGSTALRLVEAMGVEPMSEKSSA

SEQ ID NO: 2966 - protein, 536 aa, Unknown
  Description of Unknown: Integrase B2967 sequence
  PTHR30461:SF3,cd00338,SM00857,G3DSA:1.10.10.2600,IPR036162, PF13408,IPR025827,G3DSA:3.40.50.1390,PS51737,IPR006119, IPR038109,PF07508,IPR011109,SSF53041,PTHR30461, PS51736,Coil,PF00239
MSVDIKWQVPKAQPEANELAVVYARYSSHSQGEQSIEGQLSNARDYAAAHGYTIVHEYVDRAKSGRTDNRAEFQQMLKDTAKRQFSVIILWKVDRFGRNREEIAINKMKCRKNGVRVEYVAETIPDSPEGVILESVLEGFAEYYSLQLSQNIRRGRAESAEKCQSLGGNRPLGYKTGPDKKFVIDENTAPTVKIIFTMYADGKTVTEIVDKLNEMGLRTLRGGPFTKNSLHSILKNKKYIGIYEYQGHEIKDGVPRIIEDDVFNKVQEMLKINKRAPAKTWSRADYILTDKLFCGKCGALMFGESGTSKTGAKHNYYICSNKKRFRSCDKKAVRQADIEDTVLNATHELLQDDELLDYIVDRTWEYYLAQDNSQEELRNLQRQLAQTDTAISNLIRAIEAGILTEETKKRMDELTQQKADLKASIADREIARGFHLKKSHIAYYLRSLRDADWSDKETQKRLIQTFVNAVFVYDDHITLTYNFSGDKNTITLRDMQRFEDGEEFGCRASRSTIGRISEPYIAWGTVFVQTKRHSLP

SEQ ID NO: 2967 - protein, 536 aa, Unknown
  Description of Unknown: Integrase B2968 sequence
  PTHR30461:SF3,SM00857,G3DSA:1.10.10.2600,IPR036162,PF13408, IPR025827,G3DSA:3.40.50.1390,PS51737,IPR006119,IPR038109, PF07508,IPR011109,SSF53041,PF00239,PTHR30461, PS51736,Coil,cd00338
MYEDIKTACLYVRFSSHNQTEQSIEGQTRVCRDFCKRHNIRIVEIYADRATSASKDIEKRVQFLKMIKDSEKGLFDAVIVYKLDRFARSRYDSATYKYRLKRNEVQLISATENISNDPEGIILESVLEGMAEFYSAELSQKINRGMRESAYKHNSIGGAIPLGYKIEDKKLVIDPKTAPIVKEAFEKYADGETVAEICRQFNARGYKTSKGTAFGKSSFTKIFRNERYIGVYTFHDYRAEDAIPAIIDKDLWDRVQLRVGKIKNAPARNKAKVVYLLSGKIFCGHCGSKMNGNCNAGNYYYYQCYGKKNGNVDCKKKNIRKEFIERLVAQDALSLLTDEYIEQIATIACEKNQHEIELDSALPTIRDRIHQVDLSLNNLLKAIESGSAPDMLVKRMGELEKEKKDLQAQAKKESEDIVELDKAQVIYWLEQFRGGSIEDEEFCRMLIDLFVNSVTVWDEDDNTYKVTVVYNLTSLPTKTYRLNKGGTLSDFTSNAPPWIAPRCPLPSGRYSKICPAPGRCGPAPEHDSYKRPFPAG

SEQ ID NO: 2968 - protein, 536 aa, Unknown
  Description of Unknown: Integrase B2969 sequence
  SM00857,G3DSA:1.10.10.2600,IPR036162,PF13408,PS51737, IPR025827,G3DSA:3.40.50.1390,IPR006119,IPR038109,PF07508, IPR011109,SSF53041,PTHR30461,PS51736,cd00338, PF00239
MKLTHGAYILARFSTDRQEADSIEVQVSKCREWCERQRLPVLDVFADEAVSGMKETRPQFDRMMRMLSEGGADTVVIYDQSRMFRKMTAWFALRERLERLGVRVVSVTQPMIGGDLRDPATFMSEGGMALMNQMWVLQTRQKVCEKMRWMAEQGKYTGGVPPLGYVVIDGRIEVCEPEAETVRIIFGDYAAGRSYREIIQRLNAEGRRTKSGGTFGSNSLHDLLKNEKYIGVLTYGRTQKRPDGSRNSHAVASTVMRMEDMIPAIVDRETWDTVQEKLMANKRKQAGRPVRVREYPLKGKVFCGECKASMSVTCSQGGYYYYACSEKKRKKTCDNMPIKVDDLERMIAEAIKNMLGNPENVDGLICILREERGKIQEQTAMRMKALFDRQAEIKKQLDAAMSAVLAGMHSQSLIDTVHALEAEQAQNDREMTTLHNQAQGTTIPEDRLRELLKVAANDIPALLSVVVRVEVGKDRIRVWTLLDAKPDGTFDFNTDWDDPEIGLIIIPGVAPPVPRIIINGGLLCFSLPRQKKNRAE

SEQ ID NO: 2969 - protein, 536 aa, Unknown
  Description of Unknown: Integrase B2970 sequence
  PTHR30461:SF3,IPR036162,PS51737,IPR011109,PTHR30461, PF00239,G3DSA:1.10.10.2600,IPR006119,SSF53041,cd00338, SM00857,IPR025827,IPR038109,PS51736,mobidb-lite, PF13408,G3DSA:3.40.50.1390,PF07508,Coil
MPRKKKLQEVGGLRLVAYYRYSNGGQQTEQSIEGQRRDCEAYAKAHGYKIVHEYIDRHISGKSDSRPAFQQMISDSDSHLFDAVICWKTDRLARSRYDSIIYKTRLRRNGVKILYAAETVVDGPEGIIIEGLMESLAEYYSAELAQKLRRGQRESALKCIALGGNRSFGYDIGPDKHYCINEKQAPAVRYIFEQYAAGATAADIVRELTARGYRTSRGNPFNKNSICRIITNEMYIGVYKYADIRIEGGVPAMIDRELFNRCQTQLAFNRAHGGGKGAPRADYVLVGKLDCGLCGHAMKGASATGHTGSKHYYYTCTQHVEKKCPKTSIEKNYLEQVIVDGVAKYVLTPEKISQIVDCMMELQAKEQEPKGNPEKDALDAELAECRRKQNNILEAIEEGGSARLAARLRALEEQEAQLTFALGEINNAPTPPQFSREALTFMFEQFRREEDEVDEEYRRRILDTFVSSILLYEDRAEVKFNITDQKTGDFERVILPISANKKPPEDDDTTSNSEGSTALRLVEAMGVEPMSEKSSV

SEQ ID NO: 2970 - protein, 536 aa, Unknown
  Description of Unknown: Integrase B2971 sequence
  PTHR30461:SF3,IPR036162,PS51737,IPR011109,PTHR30461, PF00239,G3DSA:1.10.10.2600,IPR006119,PF14287,SSF53041, IPR025378,SM00857,IPR025827,cd03770,IPR038109, PF13408,G3DSA:3.40.50.1390,PF07508,Coil
MKQLIYRVALYMRLSRDDEDYGESVSIETQRKIITQFANEQHFIIVDEYIDDGWSGTNFDRPAFQRMMEDVESGKVNCIITKDLSRLGREHIMMDYYLEFYFPEKRIRYIAVTENEDTEKGLSDFVPFKNLFNEWFAKDTSRKVKAAFKAKFAAGDRICAYVKIGYKRHPEIKNRIVPDEETKWIPEKIFDLAYHGAGAAKITRTLIAEKVPTPSWINYQRFGTFAHVYQNASEEKRYAWTVAQVKYILKDETYIGNTVHYKQTNISFKNKKRIRKPEDEWWRIENTHEGLIPKEMFDSVQAQIATRRRMQKDHTTQIFSGLVKCADCGWSMRFGTNRQNKNPYSHYTCSKYGQVGIHCSAHYIRYDVLYAYVLSRIQYWAAQAVQDEDALLERLLQTGNAKQNAERKKIADDLKRSEKRQKELDNLFAKLYEDRIAERITERNFIMLSAKYQEEQNALDGKIDLLNGQISENSERYSNIETWVKLIKQYASPTELDSILLNALVEKITVHEAVKHEDGSREQEVEIFYKFIGKID

SEQ ID NO: 2971 - protein, 536 aa, Unknown
  Description of Unknown: Integrase B2972 sequence
  PTHR30461:SF3,SM00857,G3DSA:1.10.10.2600,IPR036162,PF13408, IPR025827,G3DSA:3.40.50.1390,PS51737,IPR006119,IPR038109, PF07508,SSF53041,IPR011109,PTHR30461,Coil, PS51736,cd00338,PF00239
MKAAIYSRKSKFTGKGESIENQIEMCKKYAANNNYIETYIYEDEGFSGKNTNRPEFKQMMKDAKMHKFDAIICYRLDRISRNVSDFSSLVDELKNLNIDFVSIREQFDTTNPMGTAMMFISSVFAQLERETIAERIRDNMYELAKTGRWLGGTPPFGFISEPDYYLDANGKQKKMVKLSPVESEIELIKTFFEEYLKLGSLSKLQKYLIKNNINTKRNVAWDIKALQLLLRNPVYVKSSELVISYLDSKGAAVFGEPNGCGILSYNKKDSKDKYKDIKEWVLSIAKHEGVIEDTLWLNVQKQLDRNKCLAPRLVSNDASGLFNSVLYCSHCGSKMIQKQGHISAKTGKKLTYYVCTNKINSSGELCKCKNIRADKLEHDVLEQLFEETSYNSSLINAIEEYKKELQSEMYSKSDINSIKKLIKQKQLQIDNLLEKISLNPNLYDLFEKKLEELNSEVKQLKFKKFELEDSTANIALAIKEIDASTKMLLNFKKLWDNSDHPMKKLLISTLVDKIFYDYEAKTAKIKLFCSKKKGAI

SEQ ID NO: 2972 - protein, 536 aa, Unknown
  Description of Unknown: Integrase B2973 sequence
  PTHR30461:SF3,IPR036162,PS51737,IPR011109,PTHR30461, PF00239,G3DSA:1.10.10.2600,IPR006119,PF14287,SSF53041, IPR025378,SM00857,IPR025827,cd03770,IPR038109, PF13408,G3DSA:3.40.50.1390,PF07508,Coil
MKQLIYRVALYMRLSRDDEDYGESVSIETQRKIITQFANEQHFIIVDEYIDDGWSGTNFDRPAFQRMMEDVESGKVNCIITKDLSRLGREHIMMDYYLEFYFPEKRIRYIAVTENEDTEKGLSDFVPFKNLFNEWFAKDTSRKVKAAFKAKFAAGDRICAYVKIGYKRHPEIKNRIVPDEETRWIPEKIFDLAYHGAGAAKITRTLIAEKVPTPSWINYQRFGTFAHVYQNASEEKRYAWTVAQVKYILKDETYIGNTVHYKQTNISFKNKKRIRKPEDEWWRIENTHEGLIPKEMFDSVQAQIATRRRMQKDHTTQIFSGLVKCADCGWSMRFGTNRQNKNPYSHYTCSKYGQVGIHCSAHYIRYDVLYAYVLSRIQYWATQAVQDEDALLERLLQTGNAKQNAERKKIADDLKRAEKRQKELDNLFAKLYEDRIAERITERNFIMLSAKYQEEQNALDGKIDLLNGQISENSERYSNIETWVKLIKQYASPTELDSILLNALVEKITVHEAVKHEDGSREQEVEIFYKFVGKID

SEQ ID NO: 2973 - protein, 536 aa, Unknown
  Description of Unknown: Integrase B2974 sequence
  PTHR30461:SF3,cd00338,SM00857,G3DSA:1.10.10.2600,IPR036162, PF13408,PS51737,G3DSA:3.40.50.1390,IPR025827,IPR006119, IPR038109,PF07508,IPR011109,SSF53041,PTHR30461, PS51736,Coil,PF00239
MPRKKAPAAEAPRLVAYYRYSGGSRQTEQSIEGQRRDCEAYARARGMTILREYVDRHISGKTDDRPAFQQLVADSAAHTFDAVICWKTDRLARNRYDSAVYKKKLRDNGVEILYAAESNISGAEGIIIEGLMEALAEYYSAELAEKARRGMRESALKGKALGSSRPLGLTVDADKHYIIEPTGAEAVRYIFEQYAAGLSSSSIVERLNAMGLRTSHGGPFNKSSINRIIQNEMYRGVYVSKKFDVRIEGAIPAIIDNDLWKRAQNMFERNRQSRTPHASRADYILSGKLYCGECGCLMKGVCGRSSGNGQMYHYYACPGRSIGRACTRKNIPQDELEAMVVNSVADLLLEPELLEQIADAIVELQQAEAARPDPEKQALEKSLSDVRNKIQNILSAIENGTSSAALSARLADLEQQESTLSYQLSSLTAKKPLTFTRDQILFLLQQFRVSPSERTKAYCRRLVDTFVDHIELTNTELILYFNISDETIDKNKKAPRSNPSKESSTEKRLVRLMFPQSNLSVTVFPSYFLLTRPLFH

SEQ ID NO: 2974 - protein, 536 aa, Unknown
  Description of Unknown: Integrase B2975 sequence
  PTHR30461:SF3,SM00857,G3DSA:1.10.10.2600,IPR036162,PF13408, PS51737,G3DSA:3.40.50.1390,IPR025827,IPR006119,IPR038109, PF07508,IPR011109,SSF53041,PTHR30461,Coil, PS51736,cd00338,PF00239
MKAAIYSRKSKFTGKGESIENQIEMCKKYAADNNYTETFIYEDEGFSGKNTNRPEFKQMMKDAKKHKFDAIICYRLDRISRNVSDFSSLVDELKSLNIDFVSIREQFDTTNPMGTAMMFISSVFAQLERETIAERIRDNMYELAKTGRWLGGTPPYGFISEPDSYLDSNGKQKKMVKLSPINDETELVKSFFKDYLKLGSLGKLQKHLIKNNINTKRNVAWDVKALQMLLRNPVYVKSSELVISYLESKGATVFGDPNGCGILSYNKKDSKSKYKDISEWILSVAQHDGIIEDTLWLNVQKQLDRNKVLAPRLISNDASGLFNSVLRCKECDGKMIQKQGHVSTKTGKKLRYYVCLNKVNSNGELCNCKNIRADKLEHDVLEKLFEETSNNSSLINAIDNYKKKLQSEISSKNDINSIKKLISQKQLQVDNLLDKISLNPNLYDLFEKKLEELNNELKQLKFRKFELEDSSVNMKIAIKEIDASTKMLLNFKQLWENADHSMKKLLISTLIDKIYYDAESKTASIKLFCIKKKGAL

SEQ ID NO: 2975 - protein, 535 aa, Unknown
  Description of Unknown: Integrase B2976 sequence
  PTHR30461:SF3,cd00338,SM00857,G3DSA:1.10.10.2600,IPR036162, PF13408,IPR025827,G3DSA:3.40.50.1390,PS51737,IPR006119, IPR038109,PF07508,IPR011109,SSF53041,PTHR30461, PS51736,Coil,PF00239
MKKKQPNTRHGRAAIYARYSSHNQREASIEQQVKACGELAVRLGLDVVETYEDKAISGKSDRRPSFQRLLRDAEKGYFDCVLAWKSNRMGRNMLQAMTNEARLKDWGVRTFYAEEDFDDTAAGRFALRNMMNVNQFYSENMAEDITRGMMDNASKCLSNGALPLGYKAGENGRIVLDKAQAAVVQEIYTRVACREPFVDIAADLNRRGIKTKRGGTWTKSSFYTICRNERYRGIYIYDDVRVEGGVPRIVSDGLFYRVQEVLKVKKTPQSARHHTGAEDYLLTGKLFCGKCGRPMTGVSGTSRSGEMHYYYTCQKRRREHACDKKNVIREQIEKSVAQAIKRYMLTDEMIQHMADATMAYNARQEKDLHLQDLQGQLAAVKTSAANLLKAIEMGVITETTKARMVELEQEQGRLNAQIENARAELVPITRDNFVSLLHIYRDGDINDSKYLASLFETFLVRVDLYDDHFLIWFNPLGQKTPADIPITSIENGDADEFFDECRSKNVFDWGGKWSTKIKTPAVPRRVFLFWCSVSC

SEQ ID NO: 2976 - protein, 535 aa, Unknown
  Description of Unknown: Integrase B2977 sequence
  PTHR30461:SF3,SM00857,G3DSA:1.10.10.2600,IPR036162,PF13408, IPR025827,G3DSA:3.40.50.1390,PS51737,IPR006119,IPR038109, PF07508,IPR011109,SSF53041,PF00239,PTHR30461, PS51736,Coil,cd00338
MPRKKKLQEVGGLRLVAYYRYSNGGQQTEQSIEGQRRDCEAYAKAHGYKIVHEYIDRHISGKSDSRPAFQQMISDSDSHLFDAVICWKTDRLARSRYDSIIYKTRLRRNGVKILYAAETVVDGPEGIIIEGLMESLAEYYSAELAQKLRRGQRESALKCIALGGNRSFGYDIGPDKHYCINEKQAPAVRYIFEQYAAGATAADIVRELTARGYRTSRGNPFNKNSICRIITNEMYLGVYKYADIRIEGGVPAMIDRELFNRCQTQLAFNRAHGGGKGAPRADYVLVGKLDCGLCGHAMKGASATGHTGSKHYYYTCTQHVEKKCPKTSIEKNYLEQVIVDGVAKYVLTPEKISQIVDCMMELQAKEQEPKGNPEKDALEAELAECRRKQNNILEAIEEGGSARLAARLRALEEQEAQLTFALGEINNAPAPPQFSREALTFMFEQFRREEDEVDEEYRRRILDTFVSSILLYEDRAEVKFNITDQKTGDFELVILPISANKKPPEDDDATSNSEGSTALRLVEAMGVEPIPAVLS

SEQ ID NO: 2977 - protein, 535 aa, Unknown
  Description of Unknown: Integrase B2978 sequence
  cd00338,SM00857,G3DSA:1.10.10.2600,IPR036162,PF13408, IPR025827,PS51737,G3DSA:3.40.50.1390,IPR006119,IPR038109, PF07508,IPR011109,SSF53041,PTHR30461,PS51736, Coil,PF00239
MSIDIKWQVPKAQPEASELAVVYARYSSHSQGEQSIEGQLSNARDYAAAHGYTIVHEYVDRAKSGRTDNRAEFQQMLKDTAKRQFSVIILWKVDRFGRNREEIAINKMKCRKNGVRVEYVAETIPDSPEGVILESVLEGFAEYYSLQLSQNIRRGRAESAEKCQSLGGNRPLGYKTGPDKKFVIDENTAPTVKMIFTMYADGKTVTEIVDKLNELGLRTLRGGPFTKNSLHSILKNKKYIGIYEYQGREIKDGVPRIIEDDVFNKVQEMLKINKRAPAKTWSRADYILTDKLFCGKCGALMFGESGTSKTGAKHNYYICSNKKRFRSCDKKAVRQADIEDTVLNATHELLQDDELLDYIVDRTWEYYLAQDNSQEELRNLQRQLAQTDTAISNLIRAIEAGILTEETKKRMDELTQQKADLKASIADREIARGFHLKKSHIAYYLRSLRDADWSDKEAQKRLIQTFVNAVFVYDDHITLTYNFSGDKNTITLRDMQRFEDGEEFGCRASRSTKTHRYELFWFRNVFGLTRKLPQR

SEQ ID NO: 2978 - protein, 535 aa, Unknown
  Description of Unknown: Integrase B2979 sequence
  PTHR30461:SF3,SM00857,G3DSA:1.10.10.2600,IPR036162,PS51737, G3DSA:3.40.50.1390,IPR006119,IPR038109,PF07508,IPR011109, SSF53041,PTHR30461,Coil,PS51736,cd00338, PF00239
MNSYDISFRPEEVIQYLRKSRSDDPNMTIEEVLEKHEHMLRDFAVNHFGAPVPDCNVYREVASSETIDGRPEMLRLLRAIESPDIHAVLVVDVQRLSRGDLEDAGRLMKLLRYTNTQVITPMKTYDLRDEWDRDIFERELKRGNEYLEYFKKIQARGRLQSVQEGNYLGSKPPYGYDRAVIRIGKKNCPTLAVNKEQADVVRLIYELYVNKDWGAQRIANHLDSLGIHPLHNAHWNPAVIKDILRNYHYIGKVVWNRRKTITVVDNQEVYKTRPWNENMLIFDGRHEAIISEELFHAALARQGRSHRCRPDTRVSNVFASILHCSCGYSMSLRHDGRGSLRLSCDDQRHCKSGSIGYEELIDYICKVLTAYIDDFKIKVKHDNANEVDIHRALVSDLEARLAALEAKEVKQWEVYSMEGMPRAIFNKLNKQVKEDKAEIERALKQARKDSPDPVDYRERIAKFGDALNALQNPAASAEIKNQYLKAIINDMIYTRPGAVRLTADNCSDYGINYKDMAKRGGWYSPPFRLEIKFRF

SEQ ID NO: 2979 - protein, 535 aa, Unknown
  Description of Unknown: Integrase B2980 sequence
  PTHR30461:SF3,cd00338,SM00857,IPR036162,PF13408, IPR025827,G3DSA:3.40.50.1390,PS51737,IPR006119,PF07508, IPR011109,SSF53041,PTHR30461,PS51736,Coil, PF00239
MLTVFLSNGKGDSMIAIYTRQSIEKKDSLSIDAQVKACADYCKAQGWEYEIYAQDHGFSGKSLDRPGFQAMMSAVRSGQVNKIVCYKLDRISRSVSDFAQLLQELEQYKCDFISVTENFDTSSPIGRAMVYICMVFAQMERENIQERVKSNYYYRSGLGFWGGGPAPYGYQLKRQQIAGKVHTVLEPDPNEAPWVKKMYEWYLEPGGSAMKILRLLTENQVPTKRGYKWTSRVLMDVLSKPLYTQNSMDVYNYLTQSGAVISNPPEDFDGTLSVDLYGKKDSSQSKHKRCRKGSDMYCNISLHEAIIDSDTWLQVQYKILARPKIGGRTGTSKNSWFTGLMICGVCGRHVSFTHSARTAGYYICSSRKNCGWNSCSSKPASKKKFDPIIVKFIRDHYDSPETKATIQQAKLAAKTPQVSIERNNLQMELATINNQIDNLLTSLASGNAVMSKYINDKITELDAKRTPLQAKLLQFDATSSVNDELKRLERIEWAMEQLPLVYTEDTFDLSVQVSQALVNNIVFNADGEVTISFAI

SEQ ID NO: 2980 - protein, 535 aa, Unknown
  Description of Unknown: Integrase B2981 sequence
  PTHR30461:SF3,SM00857,IPR036162,PF13408,IPR025827, G3DSA:3.40.50.1390,PS51737,IPR006119,PF07508,SSF53041, IPR011109,PF00239,PTHR30461,PS51736,Coil, cd00338
MLTVFLSNGKGGSMIAIYTRQSIEKKDSLSIDAQVKACADYCKAQGWEYEIYTQDHGFSGKSLDRPGFQAMMSAVRSGQVNKIVCYKLDRISRSVSDFAQLLQELEQYKCDFISVTENFDTSSPIGRAMVYICMVFAQMERENIQERVKSNYYYRSGLGFWGGGPAPYGYQLKRQQIAGKVHTVLEPDPNEAPWVQKMYEWYLEPGGSAMKILRLLTENQVPTKRGYKWTSRVLMDVLSKPLYTQNSMDVYNYLTQSGAVISNPPEDFDGTLSVDLYGKKDSSQSKHKRCRKGSDMYCNISLHEAIIDSDTWLQVQYKILARPKIGGRTGTSKNSWFTGLMICGVCGRHVSFTHSARTAGYYICSSRKNCGWNSCSSKPASKKKFDPIIVKFIRDHYDSPKTKAAIQQAKLAAKTPQVSIERNNLQMELATINNQIDNLLTSLASGNAVMSKYINDKITELDAKRTPLQAKLLQLDATSSVNDELKRLERIEWAMEQLPLVYTEDTFDLSVQVSQALVNNIVFNADGEVTISFAI

SEQ ID NO: 2981 - protein, 535 aa, Unknown
  Description of Unknown: Integrase B2982 sequence
  PTHR30461:SF3,cd00338,SM00857,G3DSA:1.10.10.2600,IPR036162, PF13408,IPR025827,G3DSA:3.40.50.1390,PS51737,IPR006119, IPR038109,PF07508,IPR011109,SSF53041,PTHR30461, PS51736,Coil,PF00239
MKKKQPNTRHGRAAIYARYSSHNQREASIEQQVKACRELAVRLGLDVVETYEDKAISGKSDRRPSFQRLLRDAEKGYFDCVLAWKSNRMGRNMLQAMTNEARLKDWGVRTFYAEEDFDDTAAGRFALRNMMNVNQFYSENMAEDITRGMMDNASKCLSNGALPLGYKAGENGRIVLDKAQAAVVQEIYTRVACREPFVDIAADLNRRGIKTKRGGPWTKSSFYTICRNERYRGIYIYDDVRVEGGVPRIVSDGLFYRVQEVLKVKKTPQSARHHTGAEDYLLTGKLFCGKCGRPMTGVSGTSRSGEMHYYYTCQKRRREHACDKKNVIREQIEKSVAQAIKQYMLTDEMIQHMADATMAYNARQEKDLHLQDLQGQLAAVKTSAANLLKAIEMGVITETTKARMVELEQEQGRLNAQIENARAELVPITRDNFVSLLHIYRDGDINDSKYLASLFETFLVRVDLYDDHFLIWFNPLGQKTPADIPITSIENGDTDEFFDECRSKNVFDWGGKWSTKIKAPAVPRRVFLFWCSVSC

SEQ ID NO: 2982 - protein, 535 aa, Unknown
  Description of Unknown: Integrase B2983 sequence
  PTHR30461:SF3,cd00338,SM00857,G3DSA:1.10.10.2600,IPR036162, PF13408,PS51737,G3DSA:3.40.50.1390,IPR025827,IPR006119, IPR038109,PF07508,IPR011109,SSF53041,PTHR30461, PS51736,Coil,PF00239
MQNAVIYARYSSHGQNEQTIEGQIRVCSEYAQQHKLRVVNIYIDKHKTGTDVNRPQFQKMIDDAATGAFTHVIVYMIDRFARNRYYSTVYRWQLQQQNIRVVSATENISESEEGEFYQMFLEWNAEKYSTRLSKRVREGLTTSVANGTFAGGYLIYGYKKEGKRVVIDEAEASIVRYFFEEYASGVPKKDIAEALNARGERYRGKPWRGRDFDKMLTNAKYTGTFEFGGRLCANTYPQIIDKALFDKVQRRAQQNKYFSGANSARITYLLQGKLYCGHCGANMVADGGTSKTGAVYHYYACTAKKKRRTCTKRNEKKDFLEWYATEQTVAYLSDPRRVALIADDVIAYYESRTDTSEIKRITVERTRIQKEIDNAVNLMVSGVSPEVVKTLDKKIVELTAQLNDLTEYQAKLELERGLQVRREDIIAFVAEFIRGDLHDKEFQKRIIDNLVNAMYIYDDRVVLYFNISGGRETAFIGKEDTDEASGVPLDDNNNAHAGAGGSVQTLTPPLRQKKIIRTPRQFRGSYYSFLTIISA

SEQ ID NO: 2983 - protein, 535 aa, Unknown
  Description of Unknown: Integrase B2984 sequence
  PTHR30461:SF3,SM00857,G3DSA:1.10.10.2600,IPR036162,PS51737, G3DSA:3.40.50.1390,IPR006119,IPR038109,PF07508,IPR011109, SSF53041,PTHR30461,Coil,PS51736,cd00338, PF00239
MNSYDISFRPEEVIQYLRKSRSDDPNMTIEEVLEKHEHMLRDFAVNHFGAPVPDCNVYREVASSETIDGRPEMLRLLRAIESPDIRAVLVVDVQRLSRGDLEDAGRLMKLLRYTNTQVITPMKTYDLRDEWDRDIFERELKRGNEYLEYFKKIQARGRLQSVQEGNYLGSKPPYGYDRAVIRIGKKNCPTLAVNKEQADVVRLIYELYVNKDWGAQRIANHLDSLGIHPLHNAHWNPAVIKDILRNYHYIGKVVWNRRKTITVVDNQEVYKTRPWNENMLIFDGRHEAIISEELFHAALARQGRSHRCRPDTRVSNVFASILHCSCGYSMSLRHDGRGSLRLSCDDQRHCKSGSIGYEELIDYICKVLTAYIDDFKIKVKHDNANEVDIHRALVTDLEARLTALEAKEVKQWEVYSMEGMPRAIFDKLNKHVKEDKAEVERALKQARKDSPDPVDYRERIAKFGDALNALQNPAASAEIKNQYLKAIINDMIYTRPGAVRLTADNCSDYGINYRDMAKRGGWYSPPFRLEIKFRF

SEQ ID NO: 2984 - protein, 535 aa, Unknown
  Description of Unknown: Integrase B2985 sequence
  PTHR30461:SF3,SM00857,G3DSA:1.10.10.2600,IPR036162,PF13408, IPR025827,PS51737,G3DSA:3.40.50.1390,IPR006119,IPR038109, PF07508,IPR011109,SSF53041,PTHR30461,Coil, PS51736,cd00338,PF00239
MKKEKAKTPENNRAAVYARYSSRKQGEQSIEGQLSEAYKYAETHGYNIIHEYIDRAKSGRTDNREAFQEMLRDTAKGTFSTIILWKLDRFGRNREEIAANKYRCKKNGVKVVYVAENVPDSPEGVILESVLEGMAEYYSLQLSQNVRRGMHANAEKCQSTGGTTPLGYAVDPATKKFVIDPNTAPTVRRIFDMYAGGTKISEIVRTLNDSGIRTARGSRFKVDSLYTVLRNVKYTGIYTYNGSVRIENGIPAIVDRATFEKVQEMLKVNKRKPSKLWDTFDYILTDKLFCGMCGSKMVGESGTSKNGTKHSYYTCVKKRRDHACKKKAVRQYYIETLVLDRIAAILDDDSLLAFIADNVYSYYVKLQNDDDMTDALKKRLREVEKAQINILRAIEAGVFNDMTKARMDELDEQKSELQAQIAEEEYAKTGLATRDTILAWLYSQREKDLSDRASQRQLIETFVNAIYVFDDRIEILFNYSRDRRSIKFEELSDLYEYGDVFVSSALSFTSPEAGQPRIMEAGLSLFPYRPMGDWF

SEQ ID NO: 2985 - protein, 535 aa, Unknown
  Description of Unknown: Integrase B2986 sequence
  PTHR30461:SF3,SM00857,G3DSA:1.10.10.2600,IPR036162,PF13408, IPR025827,G3DSA:3.40.50.1390,PS51737,IPR006119,IPR038109, PF07508,IPR011109,SSF53041,PTHR30461,Coil, PS51736,cd00338,PF00239
MKKEKAKTPENNRAAVYARYSSRKQGEQSIEGQLSEAYKYAETHGYNIIHEYIDRAKSGRTDNREAFQEMLRDTAKGTFSTIILWKLDRFGRNREEIAANKYRCKKNGVKVVYVAENVPDSPEGVILESVLEGMAEYYSLQLSQNVRRGMHANAEKCQSTGGTTPLGYAVDPATKKFVIDPNTAPTVRRIFDMYAGGTKISEIVRTLNDSGIRTARGSRFKVDSLYTVLRNVKYTGIYTYNGSVRIENGIPAIVDRATFEKVQEMLKVNKRKPSKLWDTFDYILTDKLFCGMCGSKMVGESGTSKNGTKHSYYTCVKKRRDHACKKKAVRQYYIETLVLDRIAAILDDDSLLAFIADNVYSYYVKLQNDDDMTDALKKRLREVEKAQINILRAIEAGVFNDMTKARMDELDEQKSELQAQIAEEEYAKTGLATRDTILAWLYSQREKDLNDRASQRQLIETFVNAIYVFDDRIEILFNYSRDRRSIKFEELSDLYEYGDVFVSSALSFTSPEAGQPRIMEAGLSLFPYRPMGDWF

SEQ ID NO: 2986 - protein, 535 aa, Unknown
  Description of Unknown: Integrase B2987 sequence
  cd00338,SM00857,G3DSA:1.10.10.2600,IPR036162,PF13408, PS51737,G3DSA:3.40.50.1390,IPR025827,IPR006119,IPR038109, PF07508,IPR011109,SSF53041,PTHR30461,PS51736, Coil,PF00239
MSIDIKWQVPIAKPEVSELAVVYARYSSHSQGEQSIEGQLSNARDYAAAHGYTIVHEYVDRAKSGRTDNRAEFQQMLKDTAKRQFSVIILWKVDRFGRNREEIAINKMKCRKNGVRVEYVAETIPDSPEGVILESVLEGFAEYYSLQLSQNIRRGRAESAEKCQSLGGNRPLGYKTGPDKKFVIDENTAPTVKMIFTMYADGKTVTEIVDKLNEMGLRTLRGGPFTKNSLHSILKNKKYIGVYEYQGREIKDGVPRIIEDDVFNKVQEMLKINKRAPAKTWSRADYILTDKLFCGKCGALMFGESGTSKTGVKHNYYICSNKKRFRSCDKKAVRQADIEDAVLNATHELLQDDELLDYIVDRTWEYYLAQDNSQEELRNLQRQLAQTDTAISNLIRAIEAGILTEETKKRMDELTQQKADLKASIADREIARGFHLKKSHIAYYLRSLRDADWSDKEAQKRLIQTFVNAVFVYDDHITLTYNFSGDKNTITLRDMQRFEDGEEFGCRASRSTKTHRYELFWFRNVFGLTRKLPQR

SEQ ID NO: 2987 - protein, 535 aa, Unknown
  Description of Unknown: Integrase B2988 sequence
  PTHR30461:SF3,SM00857,G3DSA:1.10.10.2600,IPR036162,PF13408, IPR025827,G3DSA:3.40.50.1390,mobidb-lite,PS51737,IPR006119, IPR038109,PF07508,SSF53041,IPR011109,PTHR30461, PS51736,cd00338,PF00239
MPRKKSATGAPVCLVAYYRYSGGSRQNEQSIEGQRHDCEAYARSHGLTITKEYIDRHISGKTDDRPAFQQMISDSDRHAFDAVICWKTDRLARNRYDSAIYKNRLRKNGVKILYAAETVVDGPEGIILEGLMESLAEYYSAELSQKLRRGQRESAMKCIALGGNRSFGYDIGPDKHYCINPQQAPAVRYIFEQYAAGFTAADIVAHLNANGIRTSRGNAFNKNSILRIITNEMYLGVYKYADIRIEGGVPAMIDRDLFDRCQRQLAFNRAHSGGTGPRADYILSGKLFCAACSRPMKGVSGISHSGEKYCYYACPGHTEKKGCTKSNVEKSTLECAIVRATAQYILAPDKLQQILDQVLALQAHQTAPKPDPEKQALEAELSEVLHKQTNLLTALESGSSARLVQRLQDLEQQESTIRVRLAAIPDPPVPPRFTRDELEFMLSQFQRDESEQTLSYQRRLLDTFVSSVTLSDDQAVVCFNLTAPGTHSPERLTVPFSTNKNPAEPSDLTPDSAGSTALRLVEAMGVEPMSEKSSV

SEQ ID NO: 2988 - protein, 535 aa, Unknown
  Description of Unknown: Integrase B2989 sequence
  PTHR30461:SF3,cd00338,SM00857,IPR036162,PF13408, IPR025827,PS51737,G3DSA:3.40.50.1390,IPR006119,PF07508, SSF53041,IPR011109,PTHR30461,PS51736,Coil, PF00239
MLTVFLSNGKGDSMIAIYTRQSIEKKDSLSIDAQVKACADYCKAQGWEYEIYTQDHGFSGKSLDRPGFQAMMSAVRSGQVDKIVCYKLDRISRSVSDFAQLLQELEQYKCDFISVTENFDTSSPIGRAMVYICMVFAQMERENIQERVKSNYYYRSGLGFWGGGPAPYGYQLKRQQIAGKVHTVLEPDPNEAPWVKKMYEWYLEPGGSAMKILRLLTENQVPTKRGYKWTSRVLMDVLSKPLYTQNSMDVYNYLTQSGAVISNPPEDFDGTLSVDLYGKKDSSQSKHKRCRKGSDMYCNISLHEAIIDSDTWLQVQYKILARPKIGGRTGTSKNSWFTGLMICGVCGRHVSFTHSARTAGYYICSSRKNCGWNSCSSKPASKKKFDPIIVKFIRDHYDSPKTKAAIQQAKLAAKTPQVSIERNNLQMELATINNQIDNLLTSLASGNAVMSKYINDKITELDAKRTPLQAKLLQLDATSSVNDELKRLERIEWAMEQLPLVYTEDTFDLSVQVSQALVNNIVFNADGEVTISFAI

SEQ ID NO: 2989 - protein, 535 aa, Unknown
  Description of Unknown: Integrase B2990 sequence
  PTHR30461:SF3,cd00338,SM00857,G3DSA:1.10.10.2600,IPR036162, PF13408,IPR025827,G3DSA:3.40.50.1390,PS51737,IPR006119, IPR038109,PF07508,IPR011109,SSF53041,PTHR30461, PS51736,Coil,PF00239
MSVDIKWQVPKAQPEANELAVVYARYSSHSQGEQSIEGQLSNARDYAAAHGYTIVHEYVDRAKSGRTDNRAEFQQMLKDTAKRQFSVIILWKVDRFGRNREEIAINKMKCRKNGVRVEYVAETIPDSPEGVILESVLEGFAEYYSLQLSQNIRRGRAESAEKCQSLGGNRPLGYKTGPDKKFVIDENTAPTVKMIFTMYADGKTVTEIVDKLNEMGLRTLRGGPFTKNSLHSILKNKKYIGVYEYQGHEIKDGVPRIIEDDVFNKVQEMLKINKRAPAKTWSRADYILTDKLFCGKCGALMFGESGTSKTGVKHNYYICSNKKRFRSCDKKAVRQADIEDTVLNATHELLQDDELLDYIVDRTWEYYLAQDNSQEELRNLQRQLAQTDTAISNLIRAIEAGILTEETKKRMDELTQQKADLKASIADREIARGFHLQKSHIAFYLRSLRDADWSDKEAQKRLIQTFVNAVFVYDDHITLTYNFSGDKSTITLHDMQRFEDGEEFGCRASRSTKTHRYELFWFRNVFGLTRKLPQR

SEQ ID NO: 2990 - protein, 535 aa, Unknown
  Description of Unknown: Integrase B2991 sequence
  PTHR30461:SF3,SM00857,G3DSA:1.10.10.2600,IPR036162,PF13408, IPR025827,G3DSA:3.40.50.1390,PS51737,IPR006119,IPR038109, PF07508,SSF53041,IPR011109,PTHR30461,PS51736, cd00338,PF00239
MQRAVIYARFSSDMQREESIDAQVRACKAYAKNKGYIVVDTYADEAKSGRDVTKRDAYNQMLADAMEDKFDIIIFHKIDRNSRNELNYFTFKDKLEKLGIRYEYAAQPIDALSPEGQMMETMMVGMAAYYSRNLAKETKKGLNENAYKALFNGGCPPLGYKIVDKKYVIDEQEAAAVRLIFDLYLNGYGYAAICRELSAKGYTTKAGKAFAKNSLHDILCNEKYIGTYTFNKIPRKKGGRNSHAAERPEDFISIENAFPAIISKDDWALVRAKMDRNRHRAASYTAKEKYLLSGKVFCGHCGSAMVGHRIRKRYCYYGCTRKEQTPTSKCPQKMIRAEVLEHWVLQILERVVFTVGGMRRIADAIVDAYEAEQKEQAGSQATLLQRKAVAEKKLNNLYKIFEEGNADEFDRQRLNQIKAELREINKSICETSVKPAKLLSKQKIAAILAAMKDEIFVKKNSYYVQQAVDLLVDHVTITDKMLKITLSTQNVCAYFVPRTQTQPIGYASLFFAAEKADIVNFHVMCRPTRERRKLL

SEQ ID NO: 2991 - protein, 535 aa, Unknown
  Description of Unknown: Integrase B2992 sequence
  PTHR30461:SF3,cd00338,SM00857,G3DSA:1.10.10.2600,IPR036162, PF13408,IPR025827,G3DSA:3.40.50.1390,PS51737,IPR006119, IPR038109,PF07508,SSF53041,IPR011109,PTHR30461, PS51736,Coil,PF00239
MKKKQPNTRHGRAAIYARYSSHNQREASIEQQVKACRKLAVRLGLDVVETYEDKAISGKSDRRPSFQRLLRDAEKGYFDCVLAWKSNRMGRNMLQAMTNEARLKDWGVRTFYAEEDFDDTAAGRFALRNMMNVNQFYSENMAEDITRGMMDNASKCLSNGALPLGYKAGENGRIVLDKAQAAVVQEIYTRVACREPFVDIAADLNRRGIKTKRGGPWTKSSFYTICRNERYRGIYIYDDVRVEGGVPRIVSDGLFYRVQEVLKVKKTPQSARHHTGAEDYLLTGKLFCGKCGRPMTGVSGTSRSGEMHYYYTCQKRRREHACDKKNVIREQIEKSVAQAIKQYMLTDEMIQHMADATMAYNARQEKDLHLQDLQGQLAAVKTSAANLLKAIEMGVITETTKARMVELEQEQGRLNAQIENARAELVPITRDNFVSLLHIYRDGDINDSKYLASLFETFLVRVDLYDDHFLIWFNPLGQKTPADIPITSIENGDADEFFDECMSKNVFDWGGKWSTKIKAPAVPRRVFLFWYSVSC

SEQ ID NO: 2992 - protein, 535 aa, Unknown
  Description of Unknown: Integrase B2993 sequence
  PTHR30461:SF3,SM00857,G3DSA:1.10.10.2600,IPR036162,PF13408, PS51737,IPR025827,G3DSA:3.40.50.1390,IPR006119,IPR038109, PF07508,IPR011109,SSF53041,PTHR30461,cd00338, PF00239
MPTSKNTARKYAAGGSSDNSCGVEPLRAVIYARYSSSGQREESIEGQLRDCYEFAKKHGIIVIGEYIDKAMTGRVDRRPDFQRMMKDSEKGRFNCVLLWKMDRFARNRYDSAMYKYKLKKNGIRIFYAKETIPDGPEGIILESVMEGYAEYYSENLAQNVKRGNYDSALELKTLGKTCLGLKTGPDGRYMIDQAEAAIVRRIFEEYAEGERAKDIYERLNSEGYRTSRGGKFNKNSLRRILSNKKYIGVYEYEDIYVENGIPAIITDRDLFERVQKMLKINHDAPARGKAQNFLLTTKLFCGLCGSPMIGDGGTSHTGKAYAYYSCTKRKRGRSCKKESVPKDWIEDLVVGELVKIVHNDELIEQIADRVMEYQKREKDQSGLHALEIRQKENEKAISNMLAAIEAGIITPSTKTRLMELEADRADIEKGIAHELLAEPEFERDQIIYFLERFRSGDINDEAYRIMLVDTFLNSVYLYDDDHLVLVMNYSGENCKVDLKLVEGAVSGDGCKGSAFAPSSALRCEKALRDQGFFVI

SEQ ID NO: 2993 - protein, 535 aa, Unknown
  Description of Unknown: Integrase B2994 sequence
  PTHR30461:SF3,SM00857,G3DSA:1.10.10.2600,IPR036162,PF13408, PS51737,G3DSA:3.40.50.1390,IPR025827,IPR006119,IPR038109, PF07508,IPR011109,SSF53041,PTHR30461,Coil, cd00338,PF00239
MARTATKHPAKPKRGKKLEAEEPGVLYGRYSSHNQKDISVEQQFEKGYGLAGEYGIRIVETYADRAVSGRTDKRKDFQRMMADAAKGKFRYVIAWKSNRMGRNMLEALVNEAKLQELGVRVLYVEEDFDDTAAGRFAARSMMNVNQFYSENMAEDIKRGLYDNASNCMVANGHLPYGYKRDDTLHYVIDEAKAAVIREIFVRVSCGEPLVDIYDSLNARGIKTSYGRPWGRSSFQKILSNERYRGIYIYGDVRKEGGIPRIVSDELYFKVQEVLKTKKNPQGRHRVNGDYLLTGKLFCGNCKSPMIGISGTGRTGKLHYYYVCQKKRSEKTCDKKNVRRDEVEYQIAKAIFDNALQDQVIEWIADSTIAYNDRKEAEGHIGILEDQLADVQRSLKNIMSAIEQGIVTETTKSRLLELESERSEIEGKIAAAKADIVPVNREQLIEWLLSLREGDIHDKKYQARLFDTFLIAAYLYDDGTAKLVFSFAGDKNTVTVPLAEAVDSVEENTAEGSFKLCLAPPKSALKSADFCFIRTF

SEQ ID NO: 2994 - protein, 535 aa, Unknown
  Description of Unknown: Integrase B2995 sequence
  PTHR30461:SF3,cd00338,SM00857,G3DSA:1.10.10.2600,IPR036162, PF13408,PS51737,G3DSA:3.40.50.1390,IPR025827,IPR006119, IPR038109,PF07508,IPR011109,SSF53041,PTHR30461, PS51736,Coil,PF00239
MKFPIDLSTLTKEEISQFEEDPFTLYNGDHDVALYLRYSSSGQSDQSIEGQLRDCRAFCKANHYRIVAIYIDRATTARKDVEKRIHLMEMIADSAKQRWDYVVVWKLDRFSRNRNDSAIMKMRLRKNGVKVLSATEHLSDNPESILLESVLEGMAEFFSAELSQKVTRGMRESALKCHSVGGHVPLGYKIENHKLVVNPDTAHIVQEAFALYANGVSVAEIARKFNAAGYKTAKNTEFNRSSFKVMFQNVRYIGTYTYKDIRIENGVPAIIDRELFDAVQRRLSKTATAPARGKAKVDYLLSGKLFCGHCGASMNGESGVGRSGKTYHYYSCYTKKRRLGCEKRPLRKDYIEEIVARSAFELLTDQLIDEIADMAIKQSEQDMVNETRIPQLTEQLSEIEKSIANITTAIEKGIASETLMNRLVQLEHEKKTINKEIKSEEKYVYRIDRDQIVFWLSQFKCGNIEDENFRRRLIDLLVNSVTVWDEPDGYKITTAYNLTSCKTKTFRVEKSPATENVTGFGFGESECANHRITAW

SEQ ID NO: 2995 - protein, 535 aa, Unknown
  Description of Unknown: Integrase B2996 sequence
  cd00338,SM00857,G3DSA:1.10.10.2600,IPR036162,PF13408, IPR025827,PS51737,G3DSA:3.40.50.1390,IPR006119,IPR038109, PF07508,IPR011109,SSF53041,PTHR30461,PS51736, Coil,PF00239
MVKAVIYCRVSTDDEIQINALDKQIEEAKEAVKQNGWILVDEYIDEGKTGTTTKTRDEYNRLVYDLELNKFDVIVIKSQDRLMRSTKDWYIFIDKLVQNKKKLFFYLENKFYSSDDALITGIKAILAEEYSRELSKKINNAHRNRQKNKGNLIITSKTWGYDNINKQVVINEHEAEIVKMIFDLYVEGFGIRTISNILTNNQIYSRTGKQFPDSTLRNIIRNPLYKGMPIMNRVHYNFDSKSSKLNDESEWIYKYDDTLRIIDDDTWNKANEIMDEKCRINKVAENKYKRIGVKNGISPLSGKIICGECGNVYWRRRYKRVSKQIIVWSCREYVMSGRKTPNYRSHPKNQVVDVGNDFGCDNIHIKDDDLNNVLIQCTKNIYTNKDKILIAAVDILNQVLNNNSTDDIDSLNNQIEEIKNKQEILLDKFLDGTIPEELYKKKNIDLQNKIDDLNQRIEEQKIQLCTKDYITDRVAHLKDEIEKIIDQDLSLQFVYEHIEKIIVHPAKLEIMFDVLPQMEVEVKKINYRRTEYICL

SEQ ID NO: 2996 - protein, 535 aa, Unknown
  Description of Unknown: Integrase B2997 sequence
  SM00857,G3DSA:1.10.10.2600,IPR036162,PF13408,IPR025827, G3DSA:3.40.50.1390,PS51737,IPR006119,IPR038109,PF07508, IPR011109,SSF53041,PTHR30461,Coil,PS51736, cd00338,PF00239
MAKPEVSELAVVYARYSSHSQGEQSIEGQLSNARDYAAAHGYTIVHEYVDRAKSGRTDNRAEFQQMLKDTAKRQFSVIILWKVDRFGRNREEIAINKMKCRKNGVRVEYVAETIPDSPEGVILESVLEGFAEYYSLQLSQNIRRGRAESAEKCQSLGGNRPLGYKTGADKKFVIDENTAPTVKMIFTMYADGKTVTEIVDKLNELGLRTLRGGPFTKNSLHSILKNKKYIGIYEYQGREVKDGVPRIIEDDVFNKVQEMLKINKRAPAKTWSRADYILTDKLFCGKCGALMFGESGTSKTGAKHNYYICSNKKRFRSCDKKAVRQADIEDTVLNATHELLQDDELLDYIVDRTWEYYLAQDNSQEELRNLQRQLAQTDTAISNLIRAIEAGILTEETKKRMDELTQQKADLKASIADREIARGFHLQKSHIAFYLRSLRDADWSDKEAQKRLIQTFVNAVFVYDDHITLTYNFSGDKNTITLRDMQRFEDGEEFGCRASRSTIKRVRKRCTRQKARFYRAFLLPKGRFSKFQNRR

SEQ ID NO: 2997 - protein, 535 aa, Unknown
  Description of Unknown: Integrase B2998 sequence
  PTHR30461:SF3,SM00857,G3DSA:1.10.10.2600,IPR036162,PF13408, IPR025827,G3DSA:3.40.50.1390,PS51737,IPR006119,IPR038109, PF07508,IPR011109,SSF53041,PTHR30461,Coil, PS51736,cd00338,PF00239
MEVQRIPKRTVSVIEPQTSILVDKEKYHQKRVAAYCRVSTDSEEQLTSYQNQMRVYTEMIAANKEWEFAGLYADEGISGTRADKRPEFQRMIRDCQNGKIDYIITKSVSRFARNTVECLEYVRSLKAQGIGIFFEEQNIDTLKNESELYLVIYAGFAQSESESISKHITWTYRKKFEEGKVSFQYKNFLGYRKGADNQPEIVPEEAAIVERIYEMFLAGQPVKMIAQTLQAEKIEIPGKNLSFSKNMIMNILRNEKYCGDCILQKTVTVDCISKTRKANQGEAPMYIVENNHPAIISREVFNRVQEELIRRQALRAKSDKTSITATGKYSKYALTEVLQCAECGSRYRRVTWTAHGRKKIVWRCISRLDYGTKHCKDSITVEEAALHGAVVRALRRFRAEDESTYLTLMKATIGEAIGINGGSEEIDLLTRRIDTLNKRMLDLVNETVAAGKDVESSEDEFKGISDQIEQLNRRIAAIQESIHKDGSRQARLEEIQSIIAERNANETQYDDSIVRQMIECIKVHNDGKLTIIFRV

SEQ ID NO: 2998 - protein, 535 aa, Unknown
  Description of Unknown: Integrase B2999 sequence
  PTHR30461:SF3,cd00338,SM00857,G3DSA:1.10.10.2600,IPR036162, PF13408,IPR025827,G3DSA:3.40.50.1390,PS51737,IPR006119, IPR038109,PF07508,SSF53041,IPR011109,PTHR30461, PS51736,Coil,PF00239
MAKRKKKSIDSSVGVCYARYSSHRQKDVSIEQQVTACQAHAAKRGITLIDSYEDRAVSGRSDKRPAFRRMMADAEKGAFAYVIAWKSNRIGRNMMEAMLNEARLSELGVKVLYVEEDFDNTAAGQFCLRTMMNVNQFYSDNMAEDIRRGMRDNALNCKINGRIPFGYKRGEDGKFCIDEPRAAVVREIYRRIASGESFASIADDLNARGIRTSRGRQWTRTSFCRLVSNEKYRGLYLYEDIRIEEGVPRIVSNELFDQVQHALKTKKNPRGGKRNSACTYLLTGRLFCGYCKSPMIGVCGTGRNGMHYYYACKQHRNEHTCAAKSVRKYELEQSVAQAIKTYVLVPEVIDAIADSAVAYAKKLEAESPVAVLEDQLANVQASIKNLLRAIESGILTETTKSRLLELEAEQAELTRQIRVAQSTLVKVDKPAVVAWLDSLRRGEVEDEKYIETLINTFVAAVYVYDDELKIIFTHSGGSTTVPPEAIKNADTANLDDSYPVRLCRQWWTFAAPGRTAIYMAFGLFILLCPYPSRQG

SEQ ID NO: 2999 - protein, 535 aa, Unknown
  Description of Unknown: Integrase B3000 sequence
  IPR036162,PS51737,PS01030,IPR011109,PTHR30461, PF00239,G3DSA:1.10.10.2600,PF14287,IPR006119,SSF53041, IPR025378,SM00857,IPR025827,cd03770,IPR038109, PS51736,IPR019761,PF13408,G3DSA:3.40.50.1390,PF07508,Coil
MLRQTTQKITALYPRLSHEDELQGESNSISNQKRILETYAKQNGFSNLRWYTDDGYSGANFQRPGFQSMLADIEAGKVATVIVKDMSRLGRNYLQVGMYTEMIFPQKGVRFIAINDGVDSAQGDNDFAPLRNIFNEWLVRDTSKKIKAVKRSKGMSGKPVTSKPVYGYLMDEDENFIIDEEAAPVVKQIYRLCLAGNGPTKIARMLTEQEIPTPGTLEYRRTGSTRRYHPGYECKWATNTVVHILENREYMGCLVNFKTEKPSYKTKHSIENPIEKQAVFENHHEPIIDTQTWERVQELRKQRKRPNRYDEVGLFSGMLFCADCGSVMYQQRYQTDKRKQDCYICGNYKKRTHDCTAHFIRTDLLTAGVLSNLRKVTSYAAKHEARFMKLLIEQNEDGGKRRNAAKKKELEAAEKRIGELSAIFKRLYEDSVSGRISDERFTELSADYEAEQQELKERVARIQAELSKAQEATVNAEKFMNIVRKHMNFEELTHTLLREFVEKIVVHECSYDENGTRRQDIEIYYSFVGKVDLPE

SEQ ID NO: 3000 - protein, 535 aa, Unknown
  Description of Unknown: Integrase B3001 sequence
  PTHR30461:SF3,cd00338,SM00857,G3DSA:1.10.10.2600,IPR036162, PF13408,PS51737,G3DSA:3.40.50.1390,IPR025827,IPR006119, IPR038109,PF07508,IPR011109,SSF53041,PTHR30461, PS51736,Coil,PF00239
MARKKNIAAGLDAVIYARYSSHNQREVSIEQQIAECTKHAAALGLRIVGTYEDRAISGKTDNRPRFQQMMRDAEKGKFQAVVAWKSNRIGRNMLQAMVNEAKLDDYGVKVFYAEEDFDDTAAGRFALRNMMNVNQFYSENMAEDITRGLYDNASKCMANGRQPLGYKRGEDGRVVLDEANAAVVREIFTRVAAGDLFVDIARDLNAQGIKTSKGANWNKGSFQSICQNERYRGIYIYGDVRVADGIPRIVSDDLWYRVQEAMRMKKNPVGTRHRVGAEDYLLTGKLRCGHCGSYMTGVSGTSRNGELHYYYTCQKRRTEHACDKKNIRRDVIEPAVAQAIKMYCLTDDVIAWIADRTVEYWEKHDNDLQIEALEQQLEENKKATSNMLKAIEMGIITEATRTRMVELETEQSRLSVQLNAAKEDVVKIDREQIISYLELLQQGDIHDRDFQMELFKNFLVAVYVYDDNRMKLVFSCMGDQNSVEIPLETGEDPPDGGLSPDAKMFVLTPDSSTRRKSTAQKRVVFFCCYRPKEKL

SEQ ID NO: 3001 - protein, 535 aa, Unknown
  Description of Unknown: Integrase B3002 sequence
  PTHR30461:SF3,SM00857,G3DSA:1.10.10.2600,IPR036162,PF13408, IPR025827,G3DSA:3.40.50.1390,PS51737,IPR006119,IPR038109, PF07508,IPR011109,SSF53041,PTHR30461,Coil, PS51736,cd00338,PF00239
MTAPFPKYNNEAAVIYARYSDGPDQTENSIEGQLRECHEFAARSGLLVVGEYIDRAISGRSADRPDFLRMIEDARKSFFSVVIVWKLDRFARNRFDSAIYRKKLKECGVRLLSAREPIGEGAESIILEGMLEAFAEYYSANLAENVKRGLRQRVLDGHFVGGSPPFGYSLQDGVLTLDEGKAEVMRWAFRAYADGRTKQEIAEAFNARGYRNARGQPFTCKSFVRTFANPAYIGKYRAAGMFLPCPAVIDEETFERVQRRIESNRRRGARNKAKVEYLLSGKLFCGHCGSAMTGLSGTSKGGTIYNYYACFGRRRKNGCKKKHERKDFIEWYVCEQALSYILDPSRLSEIARRVVAAYNADTDAAKARALEKKIAQRQRDIDRAAEALIFCPAGARASICQKIEELTALRDDAQADLNAMHRAARLKINEQQVIDWLRSFYGGDPADVGFQKILIDKLVNAVFLWDDRILIFYNVAGGREVSYIDALALSQQFDEQASLYSDASAPPVVPEFKFLSGFRLIAVLSLRGATKRGSP

SEQ ID NO: 3002 - protein, 535 aa, Unknown
  Description of Unknown: Integrase B3003 sequence
  IPR036162,PS51737,PS01030,IPR011109,PTHR30461, PF00239,G3DSA:1.10.10.2600,PF14287,IPR006119,SSF53041, IPR025378,SM00857,IPR025827,cd03770,IPR038109, PS51736,IPR019761,PF13408,G3DSA:3.40.50.1390,PF07508,Coil
MLRQTTQKITALYPRLSHEDELQGESNSISNQKRILETYAKQNGFSNLRWYTDDGYSGANFQRPGFQSMLADIEAGKVATVIVKDMSRLGRNYLQVGMYTEMIFPQKGVRFIAINDGVDSAQGDNDFAPLRNIFNEWLVRDTSKKIKAVKRSKGMSGKPVTSKPVYGYLMDEDENFIIDEEAAPVVKQIYRLCLAGNGPTKIARMLTEQEIPTPGTLEYRRTGSTRRYHPGYECKWATNTVVHILENREYMGCLVNFKTEKPSYKTKHSIENPIEKQAIFENHHEPIIDTQTWERVQELRKQRKRPNRYDEVGLFSGMLFCADCGSVMYQQRYQTDKRKQDCYICGNYKKRTHDCTAHFIRTDLLTAGVLSNLRKVTSYAAKHEARFMKLLIEQNEDGGKRRNAAKKKELEAAEKRIGELSAIFKRLYEDSVSGRISDERFTELSADYEAEQQELKERVARIQAELSKAQEATVNAEKFMNIVRKHMNFEELTHTLLREFVEKIVVHECSYDENGTRRQDIEIYYSFVGKVDLPE

SEQ ID NO: 3003 - protein, 535 aa, Unknown
  Description of Unknown: Integrase B3004 sequence
  PTHR30461:SF3,SM00857,G3DSA:1.10.10.2600,IPR036162,PF13408, PS51737,IPR025827,G3DSA:3.40.50.1390,IPR006119,IPR038109, PF07508,IPR011109,SSF53041,PTHR30461,cd00338, PF00239
MSTSKNTARKYAAGGGSDNSCGVEPLRAVIYARYSSSGQREESIEGQLRDCYEFAKKHGIIVIGEYIDKAMTGRVDRRPDFQRMMKDSEKGRFNCVLLWKMDRFARNRYDSAMYKYKLKKNGIRIFYAKETIPDGPEGIILESVMEGYAEYYSENLAQNVKRGNYDSALELKTLGKTCLGLKTGPDGRYMIDQAEATIVRRIFEEYAEGERAKDIYERLNSEGYRTSRGGKFNKNSLRRILSNKKYIGVYEYEDIYVENGIPAVITDRDLFERVQKMLKINHDAPARGKAQNFLLTTKLFCGLCGSPMIGDGGTSHTGKAYAYYSCTKRKRGRSCKKESVPKDWIEDLVVGELVKIVHNDELIEQIADRVMEYQKREKDQSGLHALEIRQKENEKAISNMLAAIEAGIITPSTKTRLMELEADRADIEKGIAHELLAEPEFERDQIIYFLERFRSGDINDEAYRIMLVDTFLNSVYLYDDDHLVLVMNYSGENCKVDLKLVEGAVSGDGCKGSAFAPSSALSLVGMSIYKAFLML

SEQ ID NO: 3004 - protein, 535 aa, Unknown
  Description of Unknown: Integrase B3005 sequence
  PTHR30461:SF3,SM00857,G3DSA:1.10.10.2600,IPR036162,PF13408, IPR025827,G3DSA:3.40.50.1390,PS51737,IPR006119,IPR038109, PF07508,SSF53041,IPR011109,PTHR30461,PS51736, cd00338,PF00239
MARAAKQDSNSEIIDGVIYARYSEGPNQTEASIEGQVRECKEYAKRNGIRIINVYSDSKHTGTNDNRAEFQKMLRDSRRGGFSVVVVWKIDRFGRNRAEMAQNKALLKLQGVKVVSAKEYIPDSPEGIILESVLEGMAEYYSANLSQNIKRGMKENALHCKSNGSGKSLGYIVDKDGYFEIEPNEATIVKTIFQKYDEGMKIADIWREIVASGAKTKRGKDFTQYGISRVLSNRAYIGEYRYGDIVTPGGMPRIIDDDLFNRVQERRALSKKAPASRRSNSDVDFLLTGKVFCGHCKGTMRGMSGTSKTGRKFYYYACHDKIFKHNKCTKKNVKKEWLETEVTRITRDDILNKETIEFIADRVVEIQRQEQEDKSMLHYYEQQLRDTQSAINNIMKAIEAGIITSSTKSRLFELEEQKSIIEGEIEREKIITPVIEKEQVIFSLERFFGGDINNKEYQRNIIDMFVNKVILYDDKIIITYNISSQNEISVDVVEQAAFAALDECSSKFSLAPPAGACPCTQFRFTLCKAVFYCRS

SEQ ID NO: 3005 - protein, 535 aa, Unknown
  Description of Unknown: Integrase B3006 sequence
  cd00338,SM00857,G3DSA:1.10.10.2600,IPR036162,PS51737, G3DSA:3.40.50.1390,IPR006119,IPR038109,PF07508,IPR011109, SSF53041,PTHR30461,PS51736,Coil,PF00239
MEKAYNAYLSEKINNSFGGYAIYLRKSRADAEAEARGEGETLARHEKMLLDLAEKMGIKIGKIYREIVSGETIEARPEIQKLLSDVKKGMWKGVLVVEVERLARGETMDQGIVAKAFKISDTKIITPMKTYDPNDEFDEEYFEFGLFMSRREYKTINRRLQRGRVSSVNEGKYVGSVAPYGYERVKIKGDKGYTLRKNSESNTVKIIYDLYAYEDLSLHEVVRRINEMGLKPRKNDKWCVASVKDILANPVYIGKVKWNWRKEVRVYKNEKLIKTRPRNDEYILKDGLHKAIIDDRTWKIVEAKRSLNKLPIPRVNTVQNPLCGLVYCAKCGKKMKRRPYTDRSKEPTIYCDNPKCDNISSKLHFVEEKVIEGLRKWLEHYQLDYKEHIEKINCSRIESIEDTIRSLQEEVKKENDKLLNIFNFLEDGTYTREMFKSRSESVSQNVARLNNSIEEYEARLEQEKIVDKEKAVLVPKIENLLDVYNLLKTPEEKNELLKTVITQVTYLKTEKAIKKDSDPTNFIINLYPKINKANV

SEQ ID NO: 3006 - protein, 535 aa, Unknown
  Description of Unknown: Integrase B3007 sequence
  PTHR30461:SF3,IPR036162,PS51737,IPR011109,PTHR30461, PF00239,G3DSA:1.10.10.2600,IPR006119,SSF53041,cd00338, SM00857,IPR025827,IPR038109,PS51736, mobidb-lite,PF13408,G3DSA:3.40.50.1390,PF07508,Coil
MAKKKKPAGGNAIIYARYSSHNQRDVSIEQQIEACRKHAAELGLTITDTYEDRAISGRTDNRPAFQRMMRDAEDGKFQYVLAWKSNRMGRNMMQAMVNESRLMDCGVKVFYAEEDFDDSAAGRFALRSMMNVNQFYSDNLAEDVRRGLMDNASKCMANGRQPLGYKRGEGGKVVVDEPAAAIVREIYTRIASGEMFMDIARDLNRRGIKTQSGSEWNKSSFKVLCRNERYRGIYIYGDTRIEGGIPPIVDDVLWYKVQEVLKVKKSKNRHHCPSDEDYLLTGKLRCGKCGGYMIGMSGRSKTGDVHHYYACQNRRVGHTCDKKNIRRDVVEPAVAQAIKQYCLTDDAIEWITDQTIAYWEDEDRKLQIDSIENDLSAVQSSISNVMKAIEMGVITETTRDRLIELERQQTDLKSKLALAKEEIVHVDRKDLISSLLAFRHGNVHDRAYQEKLFNAFLIAVYVYDDDHLKLVFNSFGKDDTVNIALDLGENDDNSGLSDVSKSSPILSNGQPEQSHLRKLRWLFCLYDSARKNYYR

SEQ ID NO: 3007 - protein, 535 aa, Unknown
  Description of Unknown: Integrase B3008 sequence
  PTHR30461:SF3,SM00857,G3DSA:1.10.10.2600,IPR036162,PF13408, IPR025827,PS51737,G3DSA:3.40.50.1390,IPR006119,IPR038109, PF07508,IPR011109,SSF53041,PTHR30461,cd00338, PF00239
MPTSKTAARKYAAGGGSDNSCGVEPLRAVIYARYSSSGQREESIEGQLRDCYEFAKKHGIIVIGEYIDKAMTGRVDRRPDFQRMMKDSEKGRFNCVLLWKMDRFARNRYDSAMYKYKLKKNGIRIFYAKETIPDGPEGIILESVMEGYAEYYSENLAQNVKRGNYDSALELKTLGKTCLGLKTGPDGRYMIDQAEAAIVRRIFEEYAEGERAKDIYERLNSEGYRTSRGGKFNKNSLRRILSNKKYIGVYEYEDIYVENGIPAIITDRDLFERVQKMLKINHDAPARGKAQNFLLTAKLFCGLCGSPMIGDGGTSHTGKAYAYYSCTKRKRGRSCKKESVPKDWIEDLVVGELVKIVHNDELIEQIADRVMEYQKREKDQSGLHALEIRQKENEKAISNMLAAIEAGIITPSTKTRLMELEADRADIEKGIAHELLAEPEFERDQIIYFLERFRSGDINDEAYRIMLVDTFLNSVYLYDDDHLVLVMNYSGENCKVDLKLVEGAVSGDGCKGSAFAPSSALRIREVLEIRLLSFL

SEQ ID NO: 3008 - protein, 535 aa, Unknown
  Description of Unknown: Integrase B3009 sequence
  PTHR30461:SF3,cd00338,SM00857,G3DSA:1.10.10.2600,IPR036162, PF13408,IPR025827,G3DSA:3.40.50.1390,PS51737,IPR006119, IPR038109,PF07508,IPR011109,SSF53041,PTHR30461, PS51736,Coil,PF00239
MSVDIKWQVPKAQPEANELAVVYARYSSHSQGEQSIEGQLSNARDYAAAHGYTIVHEYVDRAKSGRTDNRAEFQQMLKDTAKRQFSVIILWKVDRFGRNREEIAINKMKCRKNGVRVEYVAETIPDSPEGVILESVLEGFAEYYSLQLSQNIRRGRAESAEKCQSLGGNRPLGYKTGPDKKFVIDENTAPTVKMIFTMYADGKTVTEIVDKLNEMGLRTLRGGPFTKNSLHSILKNKKYIGVYEYQGREIKDGVPRIIEDDVFNKVQEMLKINKRAPAKTWSRADYILTDKLFCGKCGALMFGESGTSKTGVKHNYYICSNKKRFRSCDKKAVRQADIEDTVLNATHELLQDDELLDYIVDRTWEYYLAQDNSQEELRNLQRQLAQTDTAISNLIRAIEAGILTEETKKRMDELTQQKADLKASIADREIARGFHLQKSHIAFYLRSLRDADWSDKEAQKRLIQTFVNAVFVYDDHITLTYNFSGDKSTITLHDMQRFEDGEEFGCRASRSTKTHRYELFWFRNVFGLTRKLPQR

SEQ ID NO: 3009 - protein, 535 aa, Unknown
  Description of Unknown: Integrase B3010 sequence
  PTHR30461:SF3,SM00857,G3DSA:1.10.10.2600,IPR036162,PF13408, IPR025827,G3DSA:3.40.50.1390,PS51737,IPR006119,IPR038109, PF07508,SSF53041,IPR011109,PTHR30461,Coil, PS51736,cd00338,PF00239
MDSNQRIVRTIPASFTRTTSQVVRLLNVGAYARVSTKKEEQEDSYERQGSHYTKYIKSHDGWQFVDVYADEGITGTRAEKRKDFQRMMDDCRLGKLDKILVKSIARFARNTVDALNAIRELKELGVSVYFENENIDTLSPGGEVLLTILAAMAEQESRTISTNIKWAYQKKFQNGDIQLNYKRFLGYTRDENHNLIIVPEEATVVQRIFREYLYGYSCANIAAGLTKDKIPTPSNKTKWYASVIMSILQNEKYYGGLICGKTYKPDVLSKKRYKNEGQVERYYIENSHPAIISKEEFDLVQAEMRRRQTIRGFSETNQGRYSSKYAFSKRLICGECGAYYRRHAQYCKGEYIHTWVCPTHKIKGGTACSQTYLKEEEIEGAFLEMLKALVGDFKEISDTLKENIVSSLDDSIAEDINETLLQIEVRQTEMLELLREKRAGRISDQEYNERGMAIEKAIQELSERRVKLESKSNSAKLAMMRVEQITTALSDVGSLDKYNGEIFRSIVENVVVRNTYTLDFHLKVGIVESITITRK

SEQ ID NO: 3010 - protein, 535 aa, Unknown
  Description of Unknown: Integrase B3011 sequence
  PTHR30461:SF3,cd00338,SM00857,G3DSA:1.10.10.2600,IPR036162, PF13408,IPR025827,PS51737,G3DSA:3.40.50.1390,IPR006119, IPR038109,PF07508,IPR011109,SSF53041,PTHR30461, PS51736,Coil,PF00239
MSVDIKWQVPKAQPEANELAVVYARYSSHSQGEQSIEGQLSNARDYAAAHGYTIVHEYVDRAKSGRTDNRAEFQQMLKDTAKRQFSVIILWKVDRFGRNREEIAINKMKCRKNGVRVEYVAETIPDSPEGVILESVLEGFAEYYSLQLSQNIRRGRAESAEKCQSLGGNRPLGYKTGPDKKFVIDENTAPTVKMIFTMYADGKTVTEIVDKLNEMGLRTLRGGPFTKNSLHSILKNKKYIGIYEYQGHEIKDGVPRIIEDDVFNKVQEMLKINKRAPAKTWSRADYILTDKLFCGKCGALMFGESGTSKTGAKHNYYICSNKKRFRSCDKKAVRQADIEDTVLNATHELLQDDELLDYIVDRTWEYYLAQDNSQEELRNLQRQLAQTDTAISNLIRAIEAGILTEETKKRMDELTQQKADLKASIADREIARGFHLKKSHIAYYLRSLRDADWSDKETQKRLIQTFVNAVFVYDDHITLTYNFSGDKNTITLRDMQRFEDGEEFGCRASRSTKTHRYELFWFRNVFGLTRKLPQR

SEQ ID NO: 3011 - protein, 535 aa, Unknown
  Description of Unknown: Integrase B3012 sequence
  PTHR30461:SF3,SM00857,G3DSA:1.10.10.2600,IPR036162,PF13408, PS51737,G3DSA:3.40.50.1390,IPR025827,IPR006119,IPR038109, PF07508,IPR011109,SSF53041,PF00239,PTHR30461, PS51736,Coil,cd00338
MRVSVNLNAQKPDTTTNAVIYARYSSHGQTEQSIEGQLAKGHEYAAAQGYTVVHEYIDRAMTGRNDNREAFQKMLSDTGKHQFQVVIVWKVDRFGRNREEIAFNKHTCKKNGVRVEYVAESLPNSPEAVILESVLEGMAEYYSIQLSQNIRRGQLESAKKCQCVGGSVPLGYTLDSDKHFVIDPQTAPVVKKIFDLYAEGATISEITGQLNEQGIRTARKQLFTKNSLTKLLKNEKYIGVYTYKDIVRVEGGVPAIVDESTFDRVQELLKINRRAPSHTWTKVEYLLTDKLFCGHCGSPMVGESGFSHTGAKYSYYGCIKRRREKACDKKPVRQDWIEALVLDETVKLLHDDELMEYIIDRTWEYYQVTDKVQEEKAVLEAQLAEVDKAINNLVRAIEAGIFNAATKSRMDELDAQKAALTASLADLELTSGIRITRDHIEYFLLRLRDLDVKDRECQKRLVQTFVNAVFIYDDGRVKITYNYSGQSSTITLNQIASAEKGKGFVCCLPCSTSQEKSEPDSGWKRVRISLFRQEG

SEQ ID NO: 3012 - protein, 535 aa, Unknown
  Description of Unknown: Integrase B3013 sequence
  PTHR30461:SF3,SM00857,G3DSA:1.10.10.2600,IPR036162,PF13408, PS51737,IPR025827,G3DSA:3.40.50.1390,IPR006119,IPR038109, PF07508,IPR011109,SSF53041,PF00239,PTHR30461, PS51736,Coil,cd00338
MLPSNVKIIKPRAQVVIDEQPLIQYIRVAGYARVSTGKPEQKTSFESQQKHYKSLVARHPDWIDVGLYADEGITGTSIRKRKNFIRMIEDCRAGKIDKIIVKSVSRFARNTVDCLATIEELTALNVEVYFELQNLSSIKDSKTTKLQLTLFASMAQEESETLSESVSYGIRMGIESGRYRMPKAYGYYLDENKKLKIHPQEAEEVRFIFNAFLEGYTAAQICRVLNDRGVKPPKGKAWYDSTIVNMLRNEKYAGDLMLEKTMSRDLKSRKRIPNPGNKYFVGDNHEPIISKEMFERVQREFEYRQNLRGYGKKGKAQYTTKYAFSNKLFCGHCGAKYRRHCYDIKRKDGAGIDHIYTWVCINHKLNGKDACPITQVREETLQRAFVAALNSLVDDKEGFVATVIANINVILQTELSPINIEKLRDQYASKQKELQTLMAQSVTSHDAALVARYETLMVELEELKGRIEKAEESRVTASMHRERSEELQTFLAGKQPFEKFDDMIFRKLVQKAIIKEEEVTFVFSDYLERTVPIIK

SEQ ID NO: 3013 - protein, 535 aa, Unknown
  Description of Unknown: Integrase B3014 sequence
  PTHR30461:SF3,cd00338,SM00857,IPR036162,PF13408, PS51737,IPR025827,G3DSA:3.40.50.1390,IPR006119,PF07508, SSF53041,IPR011109,PTHR30461,PS51736,Coil, PF00239
MLTVFLSNGKGGSMIAIYTRQSIEKKDSLSIDAQVKACADYCKAQGWEYEIYTQDHGFSGKSLDRPGFQAMMSAVRSGQVNKIVCYKLDRISRSVSDFAQLLQELEQYKCDFISVTENFDTSSPIGRAMVYICMVFAQMERENIQERVKSNYYYRSGLGFWGGGPAPYGYQLKRQQIAGKVHTVLEPDPNEAPWVKKMYEWYLEPGGSAMKILRLLTENQVPTKRGYKWTSRVLMDVLSKPLYTQNSMDVYNYLTQSGAVISNPPEDFDGTLSVDLYGKKDSSQSKHKRCRKGSDMYCNISLHEAIIDSDTWLQVQYKILARPKIGGRTGTSKNSWFTGLMICGVCGRHVSFTHSARTAGYYICSSRKNCGWNSCSSKPASKKKFDPIIVKFIRDHYDSPKTKAAIQQAKLAAKTPQVSIERNNLQMELATINNQIDNLLTSLASGNAVMSKYINDKITELDAKRTPLQAKLLQFDATSSVNDELKRLERIEWAMEQLPLVYTEDTFDLSVQVSQALVNNIVFNSDGEVTISFAI

SEQ ID NO: 3014 - protein, 535 aa, Unknown
  Description of Unknown: Integrase B3015 sequence
  SM00857,G3DSA:1.10.10.2600,IPR036162,PF13408,IPR025827, G3DSA:3.40.50.1390,PS51737,IPR006119,IPR038109,PF07508, IPR011109,SSF53041,PTHR30461,Coil,PS51736, cd00338,PF00239
MARPEVSELAVVYARYSSHSQGEQSIEGQLSNARDYAAAHGYTIVHEYVDRAKSGRTDNRAEFQQMLKDTAKRQFSVIILWKVDRFGRNREEIAINKMKCRKNGVRVEYVAETIPDSPEGVILESVLEGFAEYYSLQLSQNIRRGRAESAEKCQSLGGNRPLGYKTGPDKKFVIDENTAPTVKMIFTMYADGKTVTEIVDKLNEMGLRTLRGGPFTKNSLHSILKNKKYIGIYEYQGCEIKDGVPRIIEDDVFNKVQEMLKINKRAPAKTWSRADYILTDKLFCGKCGALMFGESGTSKTGAKHNYYICSNKKRFRSCDKKAVRQADIEDTVLNATHELLQDDELLDYIVDRTWEYYLAQDNSQEELRNLQRQLAQTDTAISNLIRAIEAGILTEETKKRMDELTQQKADLKASIADREIARGFHLKKSHIAYYLRSLRDADWSDKEAQKRLIQTFVNAVFVYDDHITLTYNFSGDKSTVTLRDMQRFEDGEEFGCRASRSTMMWRQKMSPAKSPNISGFFAAQTAIFLCTKTQM

SEQ ID NO: 3015 - protein, 535 aa, Unknown
  Description of Unknown: Integrase B3016 sequence
  PTHR30461:SF3,cd00338,SM00857,G3DSA:1.10.10.2600,IPR036162, PS51737,G3DSA:3.40.50.1390,IPR006119,IPR038109,PF07508, IPR011109,SSF53041,PTHR30461,PS51736,Coil, PF00239
MFDNILDEYCIYLRKSRTDLEAEARGEGETLARHEKTLLELSRRLKISIKKIYREIVSGETIAERPVMQKVLSEVEDGIWKGVLVMEVERLARGDTSDQGTVAQSFKYSNTKIITPMKTYDPNDEYDEEYFEFGLFMSRREFKTINRRLQRGRMSSVNEGKYLGSIAPYGYARYKLVKEKGYSLEIIEEEAEVVKMIFDWYVNGKQMPDGTIEAMGTSLIAHELNILQIPSAKGGLWVTETINTIIRNPVYMGKIKWGSRPLKKKKVDGKIVKTRPRMSIDQMILIPGRHEAIVTEALWIKANEKLALNPSKPISPRKKISNPLASIMICGKCNRRLIRRPYPNRNDTLMCPVKECKNVSSELILVESRIMEGLKNWLASYKADWENRRVEKKEDTQVDLLGKAIKKIEKDIADLQTQLDNLHDLLEQKVYTVEKFLDRSQIISEKIKNKVLDKESLLNKLNDNESQITNKEIVIPKLEHVLDIYYKTDDPALKNELLQSVIEKVVYTKEKGARWHGSLDDFEIKIFPKLPRTHH

SEQ ID NO: 3016 - protein, 535 aa, Unknown
  Description of Unknown: Integrase B3017 sequence
  PTHR30461:SF3,cd00338,SM00857,IPR036162,PF13408, IPR025827,G3DSA:3.40.50.1390,PS51737,IPR006119,PF07508, IPR011109,SSF53041,PTHR30461,PS51736,Coil, PF00239
MLTVFLSNGKGDSMIAIYTRQSIEKKDSLSIDAQVKACADYCKAQGWEYEIYTQDHGFSGKSLDRPGFQAMMSAVRSGQVDKIVCYKLDRISRSVSDFAQLLQDLEQYKCDFISVTENFDTSSPIGRAMVYICMVFAQMERENIQERVKSNYYYRSGLGFWGGGPAPYGYQLKRQQIAGKVHTVLEPDPNEAPWVKKMYEWYLEPGGSAMKILRLLTENQVPTKRGYKWTSRVLMDVLSKPLYTQNSMDVYNYLTQSGAVISNPPEDFDGTLSVDLYGKKDSSQSKHKRCRKGSDMYCNISLHEAIIDSDTWLQVQYKILARPKIGGRTGTSKNSWFTGLMICGVCGRHVSFTHSARTAGYYICSSRKNCGWNSCSSKPASKKKFDPIIVKFIRDHYDSPKTKAAIQQAKLAAKTPQVSIERNNLQMELATINNQIDNLLTSLASGNAVMSKYINDKITELDAKRTPLQARLLQFDATSSVNDELKRLERIEWAMEQLPLVYTEDTFDLSVQVSQALVNNIVFNSDGEVTISFAI

SEQ ID NO: 3017 - protein, 535 aa, Unknown
  Description of Unknown: Integrase B3018 sequence
  PTHR30461:SF3,cd00338,SM00857,G3DSA:1.10.10.2600,IPR036162, PF13408,IPR025827,G3DSA:3.40.50.1390,PS51737,IPR006119, IPR038109,PF07508,IPR011109,SSF53041,PTHR30461, PS51736,Coil,PF00239
MKKKQPNTRHGRAAIYARYSSHNQREASIEQQVKACRELAVRLGLDVVETYEDKAISGKSDRRPSFQRLLRDAEKGYFDCVLAWKSNRMGRNMLQAMTNEARLKDWGVRTFYAEEDFDDTAAGRFALRNMMNVNQFYSENMAEDITRGMMDNASKCLSNGALPLGYKAGENGRIVLDKAQAAVVQEIYTRVACREPFVDIAADLNRRGIKTKRGGPWTKSSFYTICRNERYRGIYIYDDVRVEGGVPRIVSDGLFYRVQEVLKVKKTPQSARHHTGAEDYLLTGKLFCGKCGRPMTGVSGTSRSGEMHYYYTCQKRRREHACDKKNVIREQIEKSVAQAIKQYMLTDEMIQHMADATMAYNARQEKDLHLQDLQGQLAAVKTSAANLLKAIEMGVITETTKARMVELEQEQGRLNAQIENARAELVPITRDNFVSLLHIYRDGDINDSKYLASLFETFLVRVDLYDDHFLIWFNPLGQKTPADIPITSIENGDADEFFDECRSKNVFDWGGKWSTKIKAPAVPRRVFLFWCSVSC

SEQ ID NO: 3018 - protein, 535 aa, Unknown
  Description of Unknown: Integrase B3019 sequence
  PTHR30461:SF3,IPR036162,PS51737,IPR011109,PTHR30461, PF00239,G3DSA:1.10.10.2600,IPR006119,PF14287,SSF53041, IPR025378,SM00857,IPR025827,cd03770,IPR038109, PS51736,PF13408,G3DSA:3.40.50.1390,PF07508,Coil
MRIQNIHRVGIYLRLSRDDGNSNAESMSIVTQKRMLTDYVKERGWDLTETYIDDGYSGTTFDRPAFQRMLKDIERGHIDCVITKDLSRLGRNYAKTGYYTEEYFLEHGVRYIAVNDNVDTMKDDNDIAPFKNILNEMYAKDISRKVRAARAVNAKQGKFLGSKPPFGYTRCPTDKHKLIIDEKPAQIIARMFEMFASGDSGRHISDIFNKEGIPSPRAYFYQQAGRENPLNESMTWNSNTVMQLLKNQVYIGNMVQGKRRVTSFKTKSRAVVPEEDWIVVENTHDAIIGKDLWAKVQKKIATGKSPHVTKSGEISLFAGIARCADCGAAMTFNTKQYDGKTYYIYKCSRYAVHGKSSCSIHHVPASALEEAVLQNIRFNAQLLSENDEELLGKLIELGARGQQREIREAETKLNESVKRLEVVEGMAQKLFEERCTGNVPDSVFKKLMQNYDVEQANLNQIIAEKRNVLMEMENAAIDISAWAEEFKQYTNIDKLDRRIVTTLIDSVEVHESTKENGVVRQHITVNYKFVGQLNA

SEQ ID NO: 3019 - protein, 534 aa, Unknown
  Description of Unknown: Integrase B3020 sequence
  PTHR30461:SF3,cd00338,SM00857,G3DSA:1.10.10.2600,IPR036162, PF13408,IPR025827,G3DSA:3.40.50.1390,PS51737,IPR006119, IPR038109,PF07508,SSF53041,IPR011109,PTHR30461, PS51736,Coil,PF00239
MARKKNTAAGLDAVIYARYSSHNQREVSIEQQVSECMKHAADLGLHIIGTYEDRAISGKTDKRPRFQMMMRDAEKGKFQAVVAWKSNRMGRNMLQAMVNEAKLEDHGVKVFYAEEDFDDTAAGRFALRNMMNVNQFYSENMAEDISRGLYDNASKCMANGKQPLGYKRGEDGRVVLDEANAVVVREIYARVAAGELFVDIARDLNARGVKTNTGGVWNKGSFRSICENERYKGIYIYGDVRVVDGIPRIVSDDLWYKVQEAMKMKKNPVGARHRTGAEDYLLTGKLRCGHCGSYMTGISGTSRNGELHYYYTCQKRRAEHACDKKAVRRDVIEPAIAQAIKMYCLTDEVIEWVADRTVEYWERHDNNLHIEALEQQLDENKKATSNMLKAIEMGIITDATRSRMIELETEQSKLTVQLNAAKEDVVKVDRDEIASYLELLRQGDVNNRDFQMELFKNFLVAAYLYDDNRLKLVFSFAGKESSVEIPLETGEDPPDDASSENAKMFVLTPQCSTRTKAPHGNVWCFFVAAKRVRV

SEQ ID NO: 3020 - protein, 534 aa, Unknown
  Description of Unknown: Integrase B3021 sequence
  PTHR30461:SF3,cd00338,SM00857,G3DSA:1.10.10.2600,IPR036162, PF13408,IPR025827,G3DSA:3.40.50.1390,PS51737,IPR006119, IPR038109,PF07508,IPR011109,SSF53041,PTHR30461, PS51736,Coil,PF00239
MARKKNIAAGLDAVIYARYSSHNQREVSIEQQVAECTKHAAALGLRIVGTYEDRAISGKTDNRPRFQQMMRDAEKGKFQAVVAWKSNRIGRNMLQAMVNEAKLDDYGVKVFYAEEDFDDTAAGRFALRNMMNVNQFYSENMAEDITRGLYDNANKCMANGRQPLGYKRGADGKAMLDEPAAAVVREIFTRVAAGDLFVDIARDLNAKGIKTSKGAAWNKGSFQSICQNERYKGIYIYGDVRIVDGIPRIVSDELWYRVQEAMRMKKNPVGTRHRVGAEDYLLTGKLRCGHCGSYMTGVSGTSRNGELHYYYTCQKRRTEHACNKKNVRRDIIEPAIAQAIKMYCLTDDVIEWMADQTVQYWEKHDNDLQIEALEQQLAENKKATSNMLKAIEMGIITEATRSRMVELETENSKLTAQLSAAKRDVVKINREDLIDELHVLRSKDIHDREVQAELFKDFLVAAYIYDDNRLKLVFSFMGKDNSVEIPLETGEDPPDGEDSPDAKMFVLTPDCSTRTKAPHGNVWCFFVAAKRVRV

SEQ ID NO: 3021 - protein, 534 aa, Unknown
  Description of Unknown: Integrase B3022 sequence
  PTHR30461:SF3,IPR036162,PS51737,IPR011109,PTHR30461, PF00239,G3DSA:1.10.10.2600,IPR006119,SSF53041,cd00338, SM00857,IPR025827,IPR038109,PS51736,mobidb-lite, PF13408,G3DSA:3.40.50.1390,PF07508,Coil
MRKKSNLNAATRAVIYARYSSANQRDCSIEQQVAKCRELAARLGLTVIDVYEDRAISGKTDRRPNFQRMMKDADLRQFDVVLAWKSNRMGRNMLQAMTNEERLRDNGIRTVYAEEDFDDTAAGRFALRNMMNVNQFYSENMAEDITRGLMDNAAKCLSNGSLPLGYKPGDDRHVVLDEAEAAIVQEIFTRVSCYEPFIDIARDLNRRGIKTKKGSEWGRSSFHTICRNERYRGIYIYRDVRIEGGMPRIVSDELFYKVQEVLKVKKNPQGRRKRSGYEEYLLTGKLFCGHCGSPMTGIAGTSKTGAMHYYYTCQKRRTDHSCDKKAVRRDQIERAVGVAIQQQLLTDENIQMMADKLMEYNARTETKYRLQGLQDQLNANKTATANILKAIEMGIITDATKARLLELEKEQGQLLVKIDEAKAEMVPISRNDFVKLLYIYKEGEPTDKKYLAALFDNFLVRVDLYDDHLKITFDPTGGRQPIDIPIGAEESPESPGDSSESSDFEASSQDAEKFVLALHNCTKILERLFGDFLF

SEQ ID NO: 3022 - protein, 534 aa, Unknown
  Description of Unknown: Integrase B3023 sequence
  PTHR30461:SF3,cd00338,SM00857,G3DSA:1.10.10.2600,IPR036162, PF13408,PS51737,G3DSA:3.40.50.1390,IPR025827,IPR006119, IPR038109,PF07508,IPR011109,SSF53041,PTHR30461, PS51736,Coil,PF00239
MARKKNIAAGLDAVIYARYSSHNQREVSIEQQIAECTKHAAALGLRIVGTYEDRAISGKTDNRPRFQQMMRDAEKGKFQAVVAWKSNRIGRNMLQAMVNEAKLDDYGVKVFYAEEDFDDTAAGRFALRNMMNVNQFYSENMAEDITRGLYDNASKCMANGRQPLGYKRGEDGRVVLDEANAAVVREIFTRVAAGDLFVDIARDLNAQGIKTSKGANWNKGSFQSICQNERYRGIYIYGDVRVADGIPRIVSDDLWYRVQEAMRMKKNPVGTRHRVGAEDYLLTGKLRCGHCGSYMTGVSGTSRNGELHYYYTCQKRRTEHACDKKNIRRDVIEPAVAQAIKMYCLTDDVIAWIADRTVEYWEKHDNDLQIEALEQQLEENKKATSNMLKAIEMGIITEATRTRMVELETEQSRLSVQLNAAKEDVVKIDREQIISYLELLQQGDIHDRDFQMELFKNFLVAVYVYDDNRMKLVFSCMGDQNSVEIPLETGEDPPDGGLSLDAKMFVLTPDSSTRSERHHTLCGAFFVVAKRVRA

SEQ ID NO: 3023 - protein, 534 aa, Unknown
  Description of Unknown: Integrase B3024 sequence
  PTHR30461:SF3,cd00338,SM00857,G3DSA:1.10.10.2600,IPR036162, PF13408,PS51737,IPR025827,G3DSA:3.40.50.1390,IPR006119, IPR038109,PF07508,SSF53041,IPR011109,PTHR30461, PS51736,Coil,PF00239
MARKKNIAAGLDAVIYARYSSHNQREVSIEQQIAECTKHAAALGLRIVGTYEDRAISGKTDNRPRFQQMMRDAEKGKFQAVVAWKSNRIGRNMLQAMVNEAKLDDYGVKVFYAEEDFDDTAAGRFALRNMMNVNQFYSENMAEDITRGLYDNANKCMANGRQPLGYKRGADGKVMLDEPAAAVVREIFTRVAAGDLFVDIARDLNAKGIKTSKGAAWNKGSFQSICQNERYKGIYIYGNVRIVDGIPRIVSDELWYRVQEAMRMKKNPVGTRHRVGAEDYLLTGKLRCGHCGSYMTGVSGTSRNGELHYYYTCQKRRTEHACNKKNVRRDVIEPAIAQAIKMYCLTDDVIEWMANQTVQYWEKHDNDLQIEALEQQLAENKKATSNMLKAIEMGIITEATRSRMVELETENSKLTAQLSAAKRDVVKINREDLIDELHILRSKDIHDRDVQAELFKDFLVAAYIYDDNRLKLVFSFMGKDNSVEIPLETGEDPPDGKNSPDAKMFVLTPDCSTKKALYFVGSMVLFFLLSWRSH

SEQ ID NO: 3024 - protein, 534 aa, Unknown
  Description of Unknown: Integrase B3025 sequence
  cd00338,SM00857,G3DSA:1.10.10.2600,IPR036162,PF13408, IPR025827,G3DSA:3.40.50.1390,PS51737,IPR006119,IPR038109, PF07508,IPR011109,SSF53041,PTHR30461,PS51736, Coil,PF00239
MKAVIYARYSCDNQREESIEGQLRECKAFAERKGFKLVGTYIDRAMSAKTDNRPEFQRMIKESANELFDVVIVWKLDRFARNRYDSAHYKATLRKNGVKVISATEVISEGAEGIILESVLEGYAEYYSAELSEKVIRGMTDNALKCQYNGGSLTIGYTIDENKHYQLDTLVAPFIKEAFEMYSSGKMVKDIVKYLNDNGVRSGKGKPITKTSATSMLSNVKYKGQYKYRDIIIDDGVPRIVSDALFNKVQERLKKNKYSRSRFKAKIEYFLSTKLICGYCGEFMIGESGTSRQQIKYNYYKCTGVKRHKGCHKKTVRKADIEEIVLNDVMDKMFKEDLINDIADSVMRLQEKENTTIPLMQKQLAEIHQSINNLVKAMEMGIVSRETKQRFEELEAQRTELETDIIKQEIQEEIITREQVVEWLKEMKRLDLSLDDSKRKLVDTFVNSVYLYDDKVVIIFNCREGASTLALPLDDTSACMRIGEPKQKHTNRFDNMRLYGNQKASRITSRRFYFSLNKKSPALNREREKIFTSP

SEQ ID NO: 3025 - protein, 534 aa, Unknown
  Description of Unknown: Integrase B3026 sequence
  PTHR30461:SF3,IPR036162,PS51737,IPR011109,PTHR30461, PF00239,G3DSA:1.10.10.2600,IPR006119,SSF53041,cd00338, SM00857,IPR025827,IPR038109,PS51736,mobidb-lite, PF13408,G3DSA:3.40.50.1390,PF07508,Coil
MKKRINTNSAARAVIYARYSSANQRDCSIEQQVEKCRELAAREGVTVIEIYADRAISGKTDRRPNFQRMMKDASLRQFDVVLAWKSNRMGRNMLQAMMNEEQLRSNGIRTIYAEEDFDDTAAGRFALRNMMNVNQFYSENMAEDISRGLMDNASKCMSNGSLPLGYKTGKDQKVVLDEAEAAIVQEIFTRVSCYEPFIDIARDLNRRGIKTKKGAEWGRSSFHTICRNERYRGIYIYRDIRVEGGMPRIVSDELFYKVQEVLKVKKNPQGRRKRSGYEEYLLTGKLYCGHCGSPMTGIAGTSKTGAMHYYYTCQKRRTDHSCDKKAVRRDQIEKAVAIAIQQQLLTDENIQMMADETMAYNARTEIKYRLQSLQQQLYSNETSTANIMKAIEMGIITDTTKARLLALEQEHGQLLAKIDTAKAEMVPINREDFVSLLDIYRTGDVNNKKYLAALFDTFLVRVDLYDDHFKITFDPTGGKMPVDIPIGAEDSPESPGDSPESSDFEASPQDAEKFVLALHNRTKILERLFGDFLF

SEQ ID NO: 3026 - protein, 534 aa, Unknown
  Description of Unknown: Integrase B3027 sequence
  PTHR30461:SF3,IPR036162,PS51737,IPR011109,PTHR30461, PF00239,G3DSA:1.10.10.2600,IPR006119,SSF53041,cd00338, SM00857,IPR025827,IPR038109,mobidb-lite,PS51736, PF13408,G3DSA:3.40.50.1390,PF07508,Coil
MKKRINTNSAARAVIYARYSSANQRDCSIEQQVAKCRELAAREGVTVIEIYADRAVSGKTDRRPNFQRMMKDASLRQFDVVLAWKSNRMGRNMLQAMMNEEQLRSNGIRTIYAEEDFDDTAAGRFALRNMMNVNQFYSENMAEDISRGLMDNASKCMSNGSLPLGYKTGKDQKVVLDEAEAAIVQEIFTRVSCYEPFIDIARDLNRRGIKTKKGAEWGRSSFHTICRNERYRGIYIYRDIRVEGGMPRIVSDELFYKVQEVLKVKKNPQGRRKRSGYEEYLLTGKLYCGHCGSTMTGIAGTSKTGAMHYYYTCQKRRTDHSCDKKAVRRDQIEKAVAIAIQQQLLTDENIQMMADETMAYNARTEIKYRLQSLQQQLYSNETSTANIMKAIEMGIITDTTKARLLALEQEHGQLLAKIDTAKAEMVPINREDFVSLLDIYRTGDVNNKKYLAALFDTFLVRVDLYDDHFKITFDPTGGKMPVDIPIGAEDSPESPGDSPESSDFEASPQDAEKFVLALHNRTKILERLFGDFLF

SEQ ID NO: 3027 - protein, 534 aa, Unknown
  Description of Unknown: Integrase B3028 sequence
  PTHR30461:SF3,IPR036162,PS51737,IPR011109,PTHR30461, PF00239,G3DSA:1.10.10.2600,IPR006119,SSF53041,cd00338, SM00857,IPR025827,IPR038109,mobidb-lite,PS51736, PF13408,G3DSA:3.40.50.1390,PF07508,Coil
MRKKSNLNAATRAVIYARYSSANQRDCSIEQQVAKCRELAARLGLTVIDVYEDRAISGKTDRRPNFQRMMKDADLRQFDVVLAWKSNRMGRNMLQAMTNEERLRDNGIRTVYAEEDFDDTAAGRFALRNMMNVNQFYSENMAEDITRGLMDNAAKCLSNGSLPLGYKPGDDRHVVLDEAEAAIVQEIFTRVSCYEPFIDIARDLNRRGIKTKKGSEWGRSSFHTICRNERYRGIYIYRDVRIEGGMPRIVSDELFYKVQEVLKVKKNPQGRRKRSGYEEYLLTGKLFCGHCGSPMTGIAGTSKTGAMHYYYTCQKRRTDHSCDKKAVRRDQIERAVGVAIQQQLLTDENIQMMADKLMEYNARTETKYRLQGLQDQLNANKTATANILKAIEMGIITDATKARLLELEKEQGQLLVKIDEAKAEMVPISRNDFVKLLYIYKEGEPTDKKYLAALFDNFLVRVDLYDDHLKITFDPTGGRQPMDMPIGAEESPESPGDSSESSNFEASSQDAEKFVLALHNCTKILEHLFGDFLF

SEQ ID NO: 3028 - protein, 534 aa, Unknown
  Description of Unknown: Integrase B3029 sequence
  PTHR30461:SF3,cd00338,SM00857,G3DSA:1.10.10.2600,IPR036162, PF13408,PS51737,G3DSA:3.40.50.1390,IPR025827,IPR006119, IPR038109,PF07508,IPR011109,SSF53041,PTHR30461, PS51736,Coil,PF00239
MARKKNIAAGQNAVIYARYSSHNQREVSIEQQVRECMKHAAELGLHVVGTYEDRAISGKTDKRPNFQRMMRDAEKGKFQAVVAWKSNRIGRNMLQAMVNEAKLEDCGVKVFYAEEDFDDTAAGRFALRNMMNVNQFYSENMAEDITRGLYDNASKCMANGRQPLGYKRGEDGRVVLDEANAAVVREIFTRVAAGDLFVDIARDLNAQGIKTSKGANWNKGSFQSICQNERYRGIYIYGDVRVADGIPRIVSDDLWYRVQEAMRMKKNPVGTRHRVGAEDYLLTGKLRCGHCGSYMTGVSGTSRNGELHYYYTCQKRRTEHACDKKNIRRDVIEPAVAQAIKMYCLTDDVIEWMADRTVEYWKKHDNDLQIEALEQQLEENKKATSNMLKAIEMGIITEATRTRMVELETEQSRLSVQLNAAKEDVVKIDREQIISYLELLQQGDIHDRDFQMELFKNFLVAVYVYDDNRMKLVFSCMGDQNSVEIPLETGEDPPDGGLSPDAKMFVLTPDSSTRPERHHTLCGAFFVVAKRVRA

SEQ ID NO: 3029 - protein, 534 aa, Unknown
  Description of Unknown: Integrase B3030 sequence
  PTHR30461:SF3,IPR036162,PS51737,IPR011109,PTHR30461, PF00239,G3DSA:1.10.10.2600,IPR006119,SSF53041,cd00338, SM00857,IPR025827,IPR038109,PS51736,mobidb-lite, PF13408,G3DSA:3.40.50.1390,PF07508,Coil
MKKRINTNSAARAVIYARYSSANQRDCSIEQQVEKCRELAAREGVTVIEIYADRAVSGKTDRRPNFQRMMKDASLRQFDVVLAWKSNRMGRNMLQAMMNEEQLRSNGIRTIYAEEDFDDTAAGRFALRNMMNVNQFYSENMAEDISRGLMDNASKCMSNGSLPLGYKTGKDQKVVLDEAEAAIVQEIFTRVSCYEPFIDIARDLNRRGIKTKKGAEWGRSSFHTICRNERYRGIYIYRDIRVEGGMPRIVSDELFYKVQEVLKVKKNPQGRRKRSGYEEYLLTGKLYCGHCGSTMTGIAGTSKTGAMHYYYTCQKRRTDHSCDKKAVRRDQIEKAVAIAIQQQLLTDENIQMMADETMAYNARTEIKYRLQSLQQQLYSNETSTANIMKAIEMGIITDTTKARLLALEQEHGQLLAKIDTAKAEMVPINREDFVSLLDIYRTGDVNNKKYLAALFDTFLVRVDLYDDHFKITFDPTGGKMPVDIPIGAEDSPESPGDSPESSDFEASPQDAEKFVLALHNRTKILERLFGDFLF

SEQ ID NO: 3030 - protein, 534 aa, Unknown
  Description of Unknown: Integrase B3031 sequence
  SM00857,G3DSA:1.10.10.2600,IPR036162,PF13408,IPR025827, G3DSA:3.40.50.1390,PS51737,PS51736,IPR006119,IPR038109, PF07508,IPR011109,SSF53041,PTHR30461,Coil, mobidb-lite,cd00338,PF00239
MEKLDTRPVADILARYSTDNQNPVTIDVQVEKCREWCERNGYQVGKIFSDEAVSGMKETRAGYEACMMHLGMGGAQLVVVYDQSRMFREFTEWFQFRKDVDMLGARVASVTQPMVGGDLKDPAVFINEAATAMLNHAQVLITRQKTIDALKHNAREGKSSGGKPPLGYDLDKDKKYVVNEHEAEAVRLVFQLFARGFSYGEIIDELNSRGYLTKRGQPFGKNSIFDLLKNEKYIGRLVYGATKAQADGRWNSHAKSKEDAIVVENGVPAIIEQELWEQVQSRIRTRKGAGGRYSAKREYLLTGRVFCGDCGASMVVMGSKASGYQYYECNNKRRTHTCKMKNVRTEWLEQTVAASIKQMLTEPANIEMLVDVARDQARQITTEYDTRRAGLASRYTRVCRQLENGVNALLEGVVSAELKEKVRRLEEEKAEIEAETAELNQYKGYVGLDDATIRRCVENVAKVDIDTPEGLKLILSVVSRVNIHTDTIEIKTLISTDGTDPDPTKSRPQNLELFPSEGLSGEKYHTTPENGSGA

SEQ ID NO: 3031 - protein, 534 aa, Unknown
  Description of Unknown: Integrase B3032 sequence
  PTHR30461:SF3,cd00338,SM00857,G3DSA:1.10.10.2600,IPR036162, PF13408,PS51737,IPR025827,G3DSA:3.40.50.1390,IPR006119, IPR038109,PF07508,IPR011109,SSF53041,PTHR30461, PS51736,Coil,PF00239
MARKKNIAAGQNAVIYARYSSHNQREVSIEQQVRECMKHAAELGLHVVGTYEDRAISGKTDKRPNFQRMMRDAEKGKFQAVVSWKSNRIGRNMLQAMVNEAKLDDYGVKVFYAEEDFDDTAAGRFALRNMMNVNQFYSENMAEDITRGLYDNASKCMANGRQPLGYKRGEDGRVVLDEANAAVVREIFTRVAAGDLFVDIARDLNAQGIKTSKGANWNKGSFQSICQNERYRGIYIYGDVRVADGIPRIVSDDLWYRVQEAMRMKKNPVGTRHRVGAEDYLLTGKLRCGHCGSYMTGVSGTSRNGELHYYYTCQKRRTEHACDKKNIRRDVIEPAVAQAIKMYCLTDDVIAWIADRTVEYWEKHDNDLQIEALEQQLEENKKATSNMLKAIEMGIITEATRTRMVELETEQSRLSVQLNAAKEDVVKIDREQIISYLELLQQGDIHDRDFQMELFKNFLVAVYVYDDNRMKLVFSCMGDQNSVEIPLETGEDPPDGGLSLDAKMFVLTPDSSTRTKALHGNVWCFFVAAKRVRV

SEQ ID NO: 3032 - protein, 534 aa, Unknown
  Description of Unknown: Integrase B3033 sequence
  PTHR30461:SF3,cd00338,SM00857,G3DSA:1.10.10.2600,IPR036162, PF13408,PS51737,G3DSA:3.40.50.1390,IPR025827,IPR006119, IPR038109,PF07508,SSF53041,IPR011109,PTHR30461, PS51736,Coil,PF00239
MARKKNIAAGLDAVIYARYSSHNQREVSIEQQIAECTKHAAALGLRIVGTYEDRAISGKTDNRPRFQQMMRDAEKGKFQAVVAWKSNRIGRNMLQAMVNEAKLDDYGVKVFYAEEDFDDTAAGRFALRNMMNVNQFYSENMAEDITRGLYDNANKCMANGRQPLGYKRGADGKVMLDEPAAAVVREIFTRVAAGDLFVDIARDLNAKGIKTSKGATWNKGSFQSICQNERYKGIYIYGNVRIVDGIPRIVSDELWYKVQEAMRMKKNPVGTRHRVGAEDYLLTGKLRCGHCGSYMTGVSGTSRNGELHYYYTCQKRRTEHACNKKNVRRDVIEPAIAQAIKMYCLTDDVIEWVANRTVEYWEKHDNDLHIEALEQQLEENKKATSNMLKAIEMGIITDATRSRMIELETEQSKLAVQLNAAKADVVKIDRDDLIDELQIFRDMDVNNRSVQAELFKDFLVAAYIYDDNRLKLVFSFMGKDNSIEIPLETGEDPPDGEDSPDAKMFVLTPDCSTRAKALHRNVWCFFVDAKRVRV

SEQ ID NO: 3033 - protein, 534 aa, Unknown
  Description of Unknown: Integrase B3034 sequence
  PTHR30461:SF3,cd00338,SM00857,G3DSA:1.10.10.2600,IPR036162, PF13408,PS51737,IPR025827,G3DSA:3.40.50.1390,IPR006119, IPR038109,PF07508,SSF53041,IPR011109,PTHR30461, PS51736,Coil,PF00239
MATAVRTIPATLNKFNSKPVSAIQKRRVAGYARVSTDFAEQATSYEAQMQYYKAYIQSKPDWIFVDMYSDEGISATTTKHRDGFKRMIDDAMNGKIDLIITKSVSRFARNTVDSLSNVRMLKEKGVEVYFEKENIWTLDAKGELLITIMSSLAQEESRSISENTTWGARKRFADGKASVAYTHFLGYDKDFKINEKEAEVVRYIYKRFISGISCYAIGNELESKGILSPYGLPKWWTSTIISILKNEKYKGDALLQKSYSVDFLQKVRKANNGEVPQYYVENHHEAIISPEIFELAQLELKRRSRKKRYCVKTVFTGKILCGICGNEYGSRVHHSNDECRREVFTCGKPWVRGVHKCPTKNLTVKMAKQLFTDALNKLVDVKKEVIDNLRLLLNETFDTTKLKEEHEKLESELNALAFKYNTLMNENARHIIPDQHNFISNQENLAEQYNSKQARYLELEKQIADKEERGLVLKNFIKELSGAEPGIEFREDLWCALLDHIVVLDKLKAKVVFKDGTEELLDIPNDRKPRVKSE

SEQ ID NO: 3034 - protein, 534 aa, Unknown
  Description of Unknown: Integrase B3035 sequence
  PTHR30461:SF3,cd00338,SM00857,G3DSA:1.10.10.2600,IPR036162, PF13408,IPR025827,PS51737,G3DSA:3.40.50.1390,IPR006119, IPR038109,PF07508,SSF53041,IPR011109,PTHR30461, PS51736,Coil,PF00239
MARKKNIAAGLDAVIYARYSSHNQREVSIEQQIAECTKHAAALGLRIVGTYEDRAISGKTDNRPRFQQMMRDAEKGKFQAVVAWKSNRIGRNMLQAMVNEAKLDDYGVKVFYAEEDFDDTAAGRFALRNMMNVNQFYSENMAEDITRGLYDNANKCMANGRQPLGYKRGADGKVMLDEPAAAVVREIFTRVAAGDLFVDIARDLNAKGIKTSKGAAWNKGSFQSICQNERYKGIYIYGNVRIVDGIPRIVSDELWYRVQEAMRMKKNPVGTRHRVGAEDYLLTGKLRCGHCGSYMTGVSGTSRNGELHYYYTCQKRRTEHACNKKNVRRDVIEPAIAQAIKMYCLTDDVIEWMADQTVQYWEKHDNDLQIEALEQQLAENKKATSNMLKAIEMGIITEATRSRMVELETENSKLTAQLSAAKRDVVKINREDLIDELHVLRSKDIQDREVQAELFKDFLVAAYIYDDNRLKLVFSFMGKDNSVEIPLETGEDPPDGEDSPDAKMFVLTPDCSTRTKALHGNVWCFFVAAKRVRV

SEQ ID NO: 3035 - protein, 534 aa, Unknown
  Description of Unknown: Integrase B3036 sequence
  PTHR30461:SF3,IPR036162,PS51737,IPR011109,PTHR30461, PF00239,G3DSA:1.10.10.2600,IPR006119,SSF53041,cd00338, SM00857,IPR025827,IPR038109,mobidb-lite,PS51736, PF13408,G3DSA:3.40.50.1390,PF07508,Coil
MRKKSNLNAATRAVIYARYSSANQRDCSIEQQVAKCRELAARLGLTVIDVYEDRAISGKTDRRPNFQRMMKDADLRQFDVVLAWKSNRMGRNMLQAMTNEERLRDNGIRTVYAEEDFDDTAAGRFALRNMMNVNQFYSENMAEDITRGLMDNAAKCLSNGSLPLGYKPGDDRHVVLDEAEAAIVQEIFTRVSCYEPFIDIARDLNRRGIKTKKGSEWGRSSFHTICRNERYRGIYIYRDVRIEGGMPRIVSDELFYKVQEVLKVKKNPQGRRKRSGYEEYLLTGKLFCGHCGSPMTGIAGTSKTGAMHYYYTCQKRRTDHSCDKKAVRRDQIERAVGVAIQQQLLTDENIQMMADKLMEYNARTETKYRLQGLQDQLNANKTATANILKAIEMGIITDATKARLLELEKEQGQLLVKIDEAKAEMVPISRNDFVKLLYIYKEGEPTDKKYLAALFDNFLVRVDLYDDHLKITFDPTGGRQPIDMPIGAEESPESPGDSSESSNFEASSQDAEKFVLALHNCTKILERLFGDFLF

SEQ ID NO: 3036 - protein, 534 aa, Unknown
  Description of Unknown: Integrase B3037 sequence
  PTHR30461:SF3,cd00338,SM00857,G3DSA:1.10.10.2600,IPR036162, PF13408,PS51737,G3DSA:3.40.50.1390,IPR025827,IPR006119, IPR038109,PF07508,IPR011109,SSF53041,PTHR30461, PS51736,Coil,PF00239
MARKKNIAAGQNAVIYARYSSHNQREVSIEQQVRECMKHAAELGLHVVGTYEDRAISGKTDKRPNFQRMMRDAEKGKFQAVVAWKSNRIGRNMLQAMVNEAKLEDCGVKVFYAEEDFDDTAAGRFALRNMMNVNQFYSENMAEDITRGLYDNASKCMANGRQPLGYKRGEDGRVVLDEANAAVVREIFTRVAAGDLFVDIARDLNAQGIKTSKGANWNKGSFQSICQNERYRGIYIYGDVRVADGIPRIVSDDLWYRVQEAMRMKKNPVGTRHRVGAEDYLLTGKLRCGHCGSYMTGVSGTSRNGELHYYYTCQKRRTEHACDKKNIRRDVIEPAVAQAIKMYCLTDDVIAWIADRTVEYWEKHDNDLQIEALEQQLEENKKATSNMLKAIEMGIITEATRTRMVELETEQSRLSVQLNAAKEDVVKIDREQIISYLELLQQGDIHDRDFQMELFKNFLVAVYVYDDNRMKLVFSCMGDQNSVEIPLETGEDPPDGGLSPDAKMFVLTPDSSTRSERHHTLCGAFFVVAKRVRA

SEQ ID NO: 3037 - protein, 534 aa, Unknown
  Description of Unknown: Integrase B3038 sequence
  PTHR30461:SF3,cd00338,SM00857,G3DSA:1.10.10.2600,IPR036162, PF13408,PS51737,G3DSA:3.40.50.1390,IPR025827,IPR006119, IPR038109,PF07508,IPR011109,SSF53041,PTHR30461, PS51736,Coil,PF00239
MQKNNNIGNRCVIYARYSCSNQTEQSIEGQMHDCEQFAARNNLQIVNSYIDRATTATTDKRPQFLKMIADSKQCVFDVVLVWKLDRFSRNRYDSAMYKKKLKDNGVRVMSAMENITDSPEGVLMESVLEGFAEYFSKDLSQKVKRGMRETAAKHKITNRIPFGYCKSEEDTYIPDPHTANAVRKVFDMYITGFRKSDIADWLNSNGYKTSYGNQFTLTAITPLIKNTRYIGKYYYADNEYTDETQRIVTDDIFYKAQQKAIANQHGGSCKAIERYLLSNKLYCGYCHNKMIGECGKNQNGLAYHYYTCVGRKRKHICNRKNIKKKDIEQYVINAISRLLNDEYAINKIIETAINYQQNDVEHINEIKDIESTIKEIERKISNILSAIEAGIFTDSTKNRLQELENQKTRLTQELNYKNQSSTKIPRTTLKQILKNLDLSKDATNPEKQNIIDLLIHRIYLWQDKILIVFNQSNLCDNEISVDDTDVNTIIKTLSEPNASSSDSVEYGTPYLLISEFLQLYMYKNIAYQIFTIQQ

SEQ ID NO: 3038 - protein, 534 aa, Unknown
  Description of Unknown: Integrase B3039 sequence
  PTHR30461:SF3,SM00857,G3DSA:1.10.10.2600,IPR036162,PF13408, PS51737,IPR025827,G3DSA:3.40.50.1390,IPR006119,IPR038109, PF07508,IPR011109,SSF53041,PTHR30461,Coil, PS51736,cd00338,PF00239
MVQERLRAVFYARVSTEEEKQLNALEKQIQENRDVISNNGWVLVGEYIDEGKSGTTTKRRSDYKRLLADMTEDKFDIVVCKDQERLQRNTLDWYLFVDNLLKNSLKLFMYLDNKFFTPSEDALITGIKAIIAEEYSRNLSKKLNNANRRRVERALAGEEIAAMGNGKSLAFKIVNGKWVKDEKEAELGKKIFELYLQWNSLRKVRDWVNENGYRNSVGKPFTTESIGRILKNEKAKGIIVMGHHHHDFDKKKIVRMPEEQWVRIPAPELAYVSEEMFDEVQRRLKAKTGKKRGVNAYSNPLSSKLYCGKCGGKLWKHNSNGYVNWHCSSKMAKGDIKCTGVSTTSVKVRKIYSEISKDLVVNKSAVKASMLEWLHKLKASLQIEDKSEAAQKAIEQLERKKNKLTEAYLDEIISKEDYKAKYSALEDQIREQQKLLIPVEENEDVKDIEAVIENIDQEIDTYIASSQFEDSKVDYLIEHTKKITVIDKEYYVIDLDLLAGVILTGKDFLLYVHNTMPQHNVPECLHLPGPSGRA

SEQ ID NO: 3039 - protein, 534 aa, Unknown
  Description of Unknown: Integrase B3040 sequence
  PTHR30461:SF3,IPR036162,PS51737,IPR011109,PTHR30461, PF00239,G3DSA:1.10.10.2600,IPR006119,SSF53041,cd00338, SM00857,IPR025827,IPR038109,mobidb-lite,PS51736, PF13408,G3DSA:3.40.50.1390,PF07508,Coil
MKKRINTNSAARAVIYARYSSANQRDCSIEQQVEKCRELAAREGVTVIEIYADRAVSGKTDRRPNFQRMMKDASLRQFDVVLAWKSNRMGRNMLQAMMNEEQLRSNGIRTIYAEEDFDDTAAGRFALRNMMNVNQFYSENMAEDISRGLMDNASKCMSNGSLPLGYKTGKDQKVVLDEAEAAIVQEIFTRVSCYEPFIDIARDLNRRGIKTKKGAEWGRSSFHTICRNERYRGIYIYRDIRVEGGMPRIVSDELFYKVQEVLKVKKNPQGRRKRSGYEEYLLTGKLYCGHCGSPMTGIAGTSKTGAMHYYYTCQKRRTDHSCDKKAVRRDQIEKAVAIAIQQQLLTDENIQMMADETMAYNARTEIKYRLQSLQQQLYSNETSTANIMKAIEMGIITDTTKARLLALEQEHGQLLAKIDTAKAEMVPINREDFVSLLDIYRTGDVNNKKYLAALFDTFLVRVDLYDDHFKITFDPTGGKMPVDIPIGAEDSPESLGDSPESSDFEASPQDAEKFVLALHNRTKILERLFGDFLF

SEQ ID NO: 3040 - protein, 534 aa, Unknown
  Description of Unknown: Integrase B3041 sequence
  PTHR30461:SF3,SM00857,IPR036162,PF13408,IPR025827, G3DSA:3.40.50.1390,PS51737,IPR006119,SSF53041,IPR011109, PTHR30461,Coil,PS51736,cd00338,PF00239
MNRAAFAIHHNKIKTAPAPTETVYISEDMLLKSTNIVSSSEQSRKRNICFALAVIFVPILNIFYKRRVMQMPEKILRCAIYIRVSTFEQSVHGKSLQAQKECLEQYATDNNMSIVGVYADEGKTARKELKKRKAIHALVEDVKRDKIDVIIFWRLDRWFRNLSDFYKVQDVLDDHGVRWISVSEPGINMETRDGRLQLNVVLSIGQNEVDTTSERIKFVNEASIRQKKLIFGDANMPFGYKTGVVDGKKCMVKDSETEHMVEDFFEYFRNHNSKKGAIRYMQETYGIDFSYGMLRTMLSSEFYKGTYRGYPYCPAYLSEKEWDEMQTISKRNIKNTPSGRIYLFTGLMRCPVCGQKLVGTGCSSIINRKTGEKRTYCYYRCNRALIDHICTYRHRVSQNLIEKYLLENLEREYEKYKVRTNQISEELKKQKKAKDPKKLRKEMERLNILFQKGRISYDYYDKEYQRLEREYSASAAFCEEEETRNLHYVEELLKTDFRQMYDSLSLENRRSFWRSTIQEIYLNEDNTIKGVDFI

SEQ ID NO: 3041 - protein, 534 aa, Unknown
  Description of Unknown: Integrase B3042 sequence
  PTHR30461:SF3,cd00338,SM00857,G3DSA:1.10.10.2600,IPR036162, PF13408,PS51737,IPR025827,G3DSA:3.40.50.1390,IPR006119, IPR038109,PF07508,IPR011109,SSF53041, PTHR30461,PS51736,Coil,PF00239
MARKKNIAAGLDAVIYARYSSHNQREVSIEQQIAECTKHAAALGLRIVGTYEDRAISGKTDNRPRFQQMMRDAEKGKFQAVVAWKSNRIGRNMLQAMVNEAKLDDYGVKVFYAEEDFDDTAAGRFALRNMMNVNQFYSENMAEDITRGLYDNANKCMANGRQPLGYKRGADGKVMLDEPAAAVVREIFTRVAAGDLFVDIARDLNAKGIKTSKGATWNKGSFQSICQNERYKGIYIYGNVRIVDGIPRIVSDELWYKVQEAMRVKKNPVGTRHRVGAEDYLLTGKLRCGHCGSYMTGASGTSRNGELHYYYTCQKRRTEHACNKKNVRRDVIEPAIAQAIKMYCLTDDVIEWMADQTVQYWEKHDNDLQIEALEQQLAENKKATSNMLKAIEMGIITEATRSRMVELETENSKLTAQLSAAKRDVVKINREDLIDELHVLRSKDIHDREVQAELFKDFLVAAYIYDDNRLKLVFSFMGKDNSVEIPLETGEDPPDGEDSPDAKMFVLTPDCSTRTKALHRNVWCFFVAAKRVRA

SEQ ID NO: 3042 - protein, 534 aa, Unknown
  Description of Unknown: Integrase B3043 sequence
  PTHR30461:SF3,IPR036162,PS51737,IPR011109,PTHR30461, PF00239,G3DSA:1.10.10.2600,IPR006119,SSF53041,cd00338, SM00857,IPR025827,IPR038109,mobidb-lite,PS51736, PF13408,G3DSA:3.40.50.1390,PF07508,Coil
MRKKSNLNAATRAVIYARYSSANQRDCSIEQQVAKCRELAARLGLTVIDVYEDRAISGKTDRRPSFQRMMKDADRGIFDIVLAWKSNRMGRDMLQAMTNEERLRDNGIRTVYAEEDFDDTAAGRFALRNMMNVNQFYSENMAEDITRGLMDNAAKCLSNGSLPLGYKPGDDRHVVLDEAEAAIVQEIFTRVSCYEPFIDIARDLNRRGIKTKKGSEWGRSSFHTICRNERYRGIYIYRDVRIEGGMPRIVSDELFYKVQEVLKVKKNPQGRRKRSGYEEYLLTGKLFCGHCGSPMTGIAGTSKTGAMHYYYTCQKRRTDHSCDKKAVRRDQIERAVGVVIQQQLLTDENIQMMADKLMEYNARTETKYRLQGLQDQLNANKTATANILKAIEMGIITDATKARLLELEKEQGQLLVKIDEAKAEMVPISRNDFVKLLYIYKEGEPTDKKYLAALFDNFLVRVDLYDDHLKITFDPTGGRQPIDMPIGAEESPESPGDSSESSNFEASSQDAEKFVLALHNCTRILERLFGDFLF

SEQ ID NO: 3043 - protein, 534 aa, Unknown
  Description of Unknown: Integrase B3044 sequence
  PTHR30461:SF3,SM00857,G3DSA:1.10.10.2600,IPR036162,PF13408, IPR025827,G3DSA:3.40.50.1390,PS51737,IPR006119,IPR038109, PF07508,IPR011109,SSF53041,PF00239,PTHR30461, PS51736,Coil,cd00338
MKRKKFPIDLSMLTEEEIDQFREDSTTLYEGVVDVSLYLRFSSERQKEQSIEGQLRDCISYCKRKGYRIVAIYVDRATTARKDVEKRVYFQQMISDSVHREWQYVIVWKLDRFSRNREDSAVFKMRLRKNGVKVESATENISKNPEGIILEAVLEGIAEYYSADLSQKITRGMRESALKCQCVGGHIPLGYKIEDHKLVVDPETAHIVQEAFQLYANGETVAEICRMFNAKGYRTAKGVEFNRNSFKSMFRNERYIGVYTYRDIRIEDGVPAIIDKDLFETVSRRLSKNAEAPARGKAKVDYLLSGKLFCGHCGASMNGESGTSKTGAIHNYYTCYSRKRRKGCDKKPLKKEWIEFIVAQDAMELLTDDVIEEMADMAIAQSDQDLKENTRIPELTARQKEVEQSISNIAKAIEKGVASDTLLDRLTQLEKDKKDIAKQLAEEEKYIYRIDRDQIIFWLAKFKDGDIEDEEFRRHIIDLMVNSVTVWDEPDGYRITTAYNLTSCKTNTFQATSNSDPSCGEGFGFGTPESTIEG

SEQ ID NO: 3044 - protein, 534 aa, Unknown
  Description of Unknown: Integrase B3045 sequence
  PTHR30461:SF3,cd00338,SM00857,G3DSA:1.10.10.2600,IPR036162, PF13408,PS51737,G3DSA:3.40.50.1390,IPR025827,IPR006119, IPR038109,PF07508,IPR011109,SSF53041,PTHR30461, Coil,PF00239
MKRIHTLYRVSTKKQVDKEKNDIPMQRLACKEFAEQQGWVITREFEEKGVSGFKVSANNRDAIQDLKEAAIKHEFDVLLVFMFDRIGRIDDETPFVVEWFVKHGIEVWSVKEGEQRFDSHVDKLTNYIRFWQASGESEKTSMRIKTRKEQLTLEGCYTGGTVPYGYQLIRKGRLNKKGNEMRDLAIEPAEAEIVREIFNKTIHEGYGSYRIADMLNKRGLRTHSGSKFQCNTIIRILRNRLYCGYIVSGNVTSEALSELTIVESDIFDQAQYILDQRAEKDTQKRQIAFTTKGQALLSGNVFCAHCGGKLTTIRYKDKYMRKDGSEYSVDQIKYSCYHRSRKLCKCDGQATYQSERVDAAVIQIMHDIFDKMAGAPDEDRLKAMIKRQTVGCQAKQRKLSLELQKSKAQLEKLQLEIANALTGNSLFSPEDLSSSITTMKGRIAAAETELHELEQSEFQQRQSIAKILPAYNQFKSWADEFDSATKEQKKMIACQLFKRIEIGRNYAITCELNMTYQQFCEEWSNTEISKKMAI

SEQ ID NO: 3045 - protein, 534 aa, Unknown
  Description of Unknown: Integrase B3046 sequence
  PTHR30461:SF3,cd00338,SM00857,G3DSA:1.10.10.2600,IPR036162, PF13408,IPR025827,PS51737,G3DSA:3.40.50.1390,IPR006119, IPR038109,PF07508,IPR011109,SSF53041,PTHR30461, PS51736,Coil,PF00239
MKTPEYRDGVIYARYSPGPNQSEQSIEGQLRDCERFCADNNIRIIATYIDRKQSGRSDNRTDFQRMLRDSKRRAFSTVVVWKIDRFGRNREEIAKNKAVLRLNGVKVLSAKEHIPDGPEGIILESVLEGLAEYYSANLSQNIVRGMRESALKCQYNGSGLSLGYSVDKDHKFHIDPHGAAIVKMIYEKYDNGEKIADILRYIQASGIKTMKGKEYTHYGISRILRNRAYIGEYKWQDIVIPDGMPRIISDELFERVQRRMEKNKKAPSAGRGVDFLLTAKLFCGHCKSTMIGDSGTGKTGGKWYYYSCRGRKTKKTDCKKRSVPKDWLEREVVALTASYILQDDIISNIADRVVEIQREEHEDNSMLRYYEDRLKEAETSIRNIMRAIESGVFTDSTRDRLVELEAEKADMETEIAKEKITRPIVTREQVIYFLNRFKNGDVDDKEYQRQIIDALVNKVILYDDKITITYNYSGEGKEITADIIEEAADEALSDAEDRCSTFQRLVDPNSAYPNTVIFFVCGLFGLVHKISGKN

SEQ ID NO: 3046 - protein, 534 aa, Unknown
  Description of Unknown: Integrase B3047 sequence
  PTHR30461:SF3,IPR036162,PS51737,IPR011109,PTHR30461, PF00239,G3DSA:1.10.10.2600,IPR006119,SSF53041,cd00338, SM00857,IPR025827,IPR038109,PS51736,mobidb-lite, PF13408,G3DSA:3.40.50.1390,PF07508,Coil
MKKRINTNSAARAVIYARYSSANQRDCSIEQQVEKCRELAAREGVTVIEIYADRAVSGKTDRRPNFQRMMKDASLRQFDVVLAWKSNRMGRNMLQAMMNEEQLRSNGIRTIYAEEDFDDTAAGRFALRNMMNVNQFYSENMAEDISRGLMDNASKCMSNGSLPLGYKTGKDQKVVLDEAEAAIVQEIFTRVSCYEPFIDIARDLNRRGIKTKKGAEWGRSSFHTICRNERYRGIYIYRDIRVEGGMPRIVSDELFYKVQEVLKVKKNPQGRRKRSGYEEYLLTGKLYCGHCGSTMTGIAGTSKTGAMHYYYTCQKRRTDHSCDKKAVRRDQIEKAVAIAIQQQLLTDENIQMMADETMAYNARTEIKYRLQSLQQQLYSNETSTANIMKAIEMGIITDTTKARLLALEQEHGQLLAKIDTAKAEMVPINREDFVSLLDIYRTGDVNNKKYLAALFDTFLVRVDLYDDHFKITFDPTGGKMPVDIPIGAEDSPESPGDSPEPSDFEASPQDAEKFVLALHNRTKILERLFGDFLF

SEQ ID NO: 3047 - protein, 534 aa, Unknown
  Description of Unknown: Integrase B3048 sequence
  PTHR30461:SF3,IPR036162,PS51737,IPR011109,PTHR30461, PF00239,G3DSA:1.10.10.2600,IPR006119,SSF53041,cd00338, SM00857,IPR025827,IPR038109,PS51736,mobidb-lite, PF13408,G3DSA:3.40.50.1390,PF07508,Coil
MRKKSNLNAATRAVIYARYSSANQRDCSIEQQVAKCRELAARLGLTVIDVYEDRAISGKTDRRPNFQRMMKDADLRQFDVVLAWKSNRMGRNMLQAMTNEERLRDNGIRTVYAEEDFDDTAAGRFALRNMMNVNQFYSENMAEDITRGLMDNAAKCLSNGSLPLGYKPGDDRHVVLDEAEAAIVQEIFTRVSCYEPFIDIARDLNRRGIKTKKGAEWGRSSFHTICRNERYRGIYIYRDVRVEGGMPRIISDELFYKVQEVLKVKKNPQGRRKRSGYEEYLLTGKLYCGHCGSPMTGIAGTSKTGAMHYYYTCQKRRTDHSCDKKAVRRDQIERAVGVAIQQQLLTDENIQMMADKLMEYNARTETKHRLQGLQDQLNANKTATANILKAIEMGIITDATKARLLELEKEQAQLLVKIDTAKAEMVPISRNDFVKLLYIYKEGEPTDKKYLAALFDNFLVRVDLYDDHLKITFDPTGGRQPIDMPIGAEDSPESPGDSSESSDFEASSQDAEKFVLALHNCTKILERLFGDFLF

SEQ ID NO: 3048 - protein, 534 aa, Unknown
  Description of Unknown: Integrase B3049 sequence
  PTHR30461:SF3,SM00857,G3DSA:1.10.10.2600,IPR036162,PF13408, IPR025827,G3DSA:3.40.50.1390,PS51737,IPR006119,IPR038109, PF07508,IPR011109,SSF53041,PTHR30461,PS51736, cd00338,PF00239
MARAAKQDNNSEIIDGVIYARYSEGPNQTEASIEGQVRECKEYAKRNGIRIINVYSDSKHTGTNDNRAEFQKMLRDSRRGGFSVVVVWKIDRFGRNRAEMAQNKALLKLQGVKVVSAKEYIPDSPEGIILESVLEGMAEYYSANLSQNIKRGMKENALHCKSNGSGKSLGYIVDKDGYFEIEPNEATIVKTIFQKYDEGMKIADIWREIVASGAKTKRGKDFTQYGISRVLSNRAYIGEYRYGDIVTPGGMPRIIDDDLFNRVQERRALSKKAPASRRSNSDVDFLLTGKVFCGHCKGTMRGMSGTSKTGRKFYYYACHDKIFKHNKCTKKNVKKEWLETEVTRITRDDILNKETIEFIADRVVEIQRQEQEDKSMLRYYEQQLRDTQSAINNIMKAIEAGIITSSTKSRLFELEEQKSIIEGEIEREKIITPVIEKEQVIFSLERFFGGDINNKEYQRNIIDMFVNKVILYDNKIIITYNISSQNEISVDVVEQAAFAALDECSSKLSLPPPATRRGGHFPSRLFCKHTKSPL

SEQ ID NO: 3049 - protein, 533 aa, Unknown
  Description of Unknown: Integrase B3050 sequence
  SM00857,G3DSA:1.10.10.2600,IPR036162,PF13408,PS51737, IPR025827,G3DSA:3.40.50.1390,IPR006119,IPR038109,PF07508, IPR011109,SSF53041,PTHR30461,PS51736,cd00338, PF00239
MQQYCLYLRKSRADAEAEARGEGETLARHERTLLELAKRQQLNVTEIYKEIVSGESLAARPVMQRLLSEVEHGIWAGVLVMEVERLARGDTTDQGIVAQTFKFSNTLIITPTKTYDPENEFDEEYFEFGLFMSRREYKTINRRLQRGRIASIKEGKFVGNKSPYGYERVKIKGDKGFTLKIVPEEAEIVKLIYEWYTHGVLQEDGSYRKIGCELIAQKLNQMKAPTRTGADWILPTVRDMLRNPVYTGKVRWNWRQTVKKMVDGKITKTRPRNDNVLIFKALHEPIISDEVFEAAQNIMSKNPPRPVVDSKRIQNPLAGIVICGICGKPMVRRPYQRPYPDTLMCPRAKCPNVSSDLRRVEQRVISALEVWLEQYKLEWESKDVSPAVKQSEVLKKSFEAQQAEIDKLYKQLSKTHDFLEQGVYNTETFLERSRSISERINIAKESLPKIQAQIDIETAKENNLINVIPKAEKLLETYYTLPTAESKNTMLKEVLEKVVYVKTKRCRKKTDSRDDFEITIFPKIPSQDSRPPA

SEQ ID NO: 3050 - protein, 533 aa, Unknown
  Description of Unknown: Integrase B3051 sequence
  PTHR30461:SF3,SM00857,G3DSA:1.10.10.2600,IPR036162,PF13408, PS51737,IPR025827,G3DSA:3.40.50.1390,IPR006119,IPR038109, PF07508,IPR011109,SSF53041,PTHR30461,Coil, PS51736,cd00338,PF00239
MYEDIKTACLYVRFSSHNQTEQSIEGQTRVCRDFCKRHNIRIVEIYADRATSASKDIEKRVQFLKMIKDSEKGLFDAVIVYKLDRFARSRYDSATYKYRLKRNGVQLISATENISNDPEGIILESVLEGMAEFYSAELSQKINRGMRESAYKHNSIGGAVPLGYKIEDKKLVIDPKTAPIVKEAFEKYADGETVAEICRQFNARGYKTSKGTAFGKSSFTKIFRNERYIGVYSFHDYRAEDAIPAIIDKDLWDRVQLRVGKIKNAPARNKAKVVYLLSGKIFCGHCGSKMNGNCNAGNYCYYQCYGKKNGNVDCKKKNIRKEFIERLVAQDALSLLTDEYIEQIATIACEKNQHEIELDSALPTIRDRIHQVDLSLNHLLKAIESGSAPDMLVKRMGELEKEKKDLQAQAKKESGDIVELDKAQVIYWLEQFRGGSIEDEEFCRMLIDLFVNSVTVWDEDDNTYKVTVAYNLTSLPTKTYRLNKGGTLSDFASNAPGMSANPTITGNLLIHTFHCRLKSHSRKRFWDYDTFVV

SEQ ID NO: 3051 - protein, 533 aa, Unknown
  Description of Unknown: Integrase B3052 sequence
  cd03768,PTHR30461:SF3,SM00857,G3DSA:1.10.10.2600,IPR036162, PF13408,PS51737,IPR025827,G3DSA:3.40.50.1390,IPR006119, IPR038109,PF07508,IPR011109,SSF53041,PTHR30461, PS51736,Coil,PF00239
MIKIAIYSRKSVFTGKGESIENQIELCKNYCNTYVNSGSNLEYIIYEDEGFSGKNTNRPEFQHMIDDIKKKKIDTLICYRLDRISRNVADFSSTLELLQKYNVNFISIKERFDTSTPLGRAMIYIASVFAQLERETIAERVRDNMIQLAKSGRWLGGNIPYGFNIARKTYISDFKEKEFSILSPNKKELETVNFVYSYYIKTHSIRQVTRLLNVNSIIGKNGGSFDLTQIRRMLRNPLYVISDDKSHEYLIKKGLNVFGSPNGNGYITYNKSNQKNISADSNQWIVAVSNHKGIITSDNWLKVQYQLDNNKSKMPRIGTGNNHSLFSGILKCKKCGSNMIVKFSGKNKNNIPYEYYVCSGKQNKYLNKCTTKNIRVDKLDKILTRKLKIHNKTVLIKTLRDSIDNICCDFKNNQISSIEYEIHENKVSMDNLIKQLTKSASSTVSDRLMNEINLLDKNIVRLKKHLETIELEQSHDKKTNIDIKNIINVLNSFSDTIEYIDDTAQKRFLIQTLIKSAVWDSDNNNVEIIFNTH

SEQ ID NO: 3052 - protein, 533 aa, Unknown
  Description of Unknown: Integrase B3053 sequence
  PTHR30461:SF3,cd00338,SM00857,G3DSA:1.10.10.2600,IPR036162, PF13408,IPR025827,G3DSA:3.40.50.1390,PS51737,IPR006119, IPR038109,PF07508,IPR011109,SSF53041,PTHR30461, PS51736,Coil,PF00239
MYEDIKTACLYVRFSSHNQTEQSIEGQTRVCRDFCKRHNIRIVEIYADRATSASKDIEKRVQFLKMIKDSEKGLFDAVIVYKLDRFARSRYDSATYKYRLKRNGVQLISATENISNDPEGIILESVLEGMAEFYSAELSQKINRGMRESAYKHNSIGGAVPLGYKIEDKKLVIDPKTAPLVKEAFEKYADGETVAEICRQFNARGYKTSKGTAFGKSSFTKIFRNERYIGVYTFHDYRAEGAVPAIIDKDLWDRVQLRAGKIKSAPARHKAKVVYLLSGKLFCGHCGSRMNGNCNASNYYYYQCYGKKNGHVDCNKKNIRKEFIERLVAQDALSLLTDEYIEQIAAIACEKNQHEIELDSALPTIRDRIHQVDLSLNNLLKAIESGSAPDMLVKRMGELEKEKKDLQAQAKKESEDIVELDKAQVIYWLEQFRGGSIEDEEFCRMLIDLFVNSVTVWDEDDDTYKVTVAYNLTSLPTKTYRLNKGGTLSDFASNAPGMSANPTITGNLLIHTFHCRLKSHSWKRFWDYDTFVV

SEQ ID NO: 3053 - protein, 533 aa, Unknown
  Description of Unknown: Integrase B3054 sequence
  SM00857,G3DSA:1.10.10.2600,IPR036162,PF13408,PS51737, G3DSA:3.40.50.1390,IPR025827,IPR006119,IPR038109,PF07508, SSF53041,IPR011109,PTHR30461,Coil,PS51736, cd00338,PF00239
MAKPEVSELAVVYARYSSHSQGEQSIEGQLSNARDYAAAHGYTIVHEYVDRAKTGRTDNRAEFQQMLKDTAKRQFSVIILWKVDRFGRNREEIAINKMKCRKNGVRVEYVAETIPDSPEGVILESVLEGFAEYYSLQLSQNIRRGRAESAEKCQSLGGNRPLGYKTGPDKKFVIDENTAPTVKMIFTMYADGKTITEIVDKLNEMGLRTLRGGPFTKNSLHSILKNKKYIGIYEYQGREIKDGVPRIIEDDVFNKVQEMLKINKRAPAKTWSRADYILTDKLFCGKCGALMFGESGTSKTGVKHNYYICSNKKRFRSCDKKAVRQADIEDAVLNATHELLQDDELLDYIVDRTWEYYLAQDNSQEELRNLQRQLAQTDTAISNLIRAIEAGILTEETKKRMDELTQQKADLKASIADREIARGFHLQKSHIAFYLRSLRDADWSDKEAQKRLIQTFVNAVFVYDDHITLTYNFSGDKSTITLRDMQRFEDGEEFGCRASRSTKQVLDEHLFLQRRFRREMFALIHNRKAPSWE

SEQ ID NO: 3054 - protein, 533 aa, Unknown
  Description of Unknown: Integrase B3055 sequence
  PTHR30461:SF3,SM00857,G3DSA:1.10.10.2600,IPR036162,PF13408, PS51737,G3DSA:3.40.50.1390,IPR025827,IPR006119,IPR038109, PF07508,IPR011109,SSF53041,PTHR30461,Coil, PS51736,cd00338,PF00239
MAVFAQAVQPDFNDDVADVVIYSRYSSIGQNDQSIDGQIDACMKYAAQRGFHVVGQYIDRALSGTHADSRPEFQRMIRDSKKGVFRYVLVWKLDRFARNRYDSAIYKNELKKHGVKVLSVTEGIDAGNDSIILEAVLEAMAEEYSRQLSQNVRRGMHQNAEKQLTLGGHAPLGYRVENKRLVVDEKEAEMVRFVFRSYADGMTKTEIAKECNRRGWRTRPGRPFTVNSFSVMLKNQTYIGTYTFKDEITVEGAVPAIVDRATFDKVGTMLERNRRAPGRVKAKEEYQLQGKVFCGYCGAPMVGESGRGRRGATYHYYACATRKKAHTCQKKNEKKGFLEWYVVEQITTHILTDQRIHEIAAGVVAEYNRSFDAAGVRDLERKIRAMDKEMDALVDALIRTTAAPAVAKINERVELLAAQKEEAEVDLAKLKVASRITLSEEEIVAWLRQFVHGDPTDPVFRQRVIDIFVNSIYLYDDKVVMYFNIKDASQVSYIEMQEDLEGLDGSDLNCHGVPGKIPRTAMVLGIFPIIFYL

SEQ ID NO: 3055 - protein, 533 aa, Unknown
  Description of Unknown: Integrase B3056 sequence
  PTHR30461:SF3,cd00338,SM00857,G3DSA:1.10.10.2600,IPR036162, PF13408,PS51737,G3DSA:3.40.50.1390,IPR025827,IPR006119, IPR038109,PF07508,IPR011109,SSF53041,PTHR30461, PS51736,Coil,PF00239
MARKKNIAAGQNAVIYARYSSHNQREVSIEQQVRECMKHAAELGLHVVGTYEDRAISGKTDKRPNFQRMMRDAEKGKFQAVVAWKSNRIGRNMLQAMVNEAKLEDCGVKVFYAEEDFDDTAAGRFALRNMMNVNQFYSENMAEDITRGLYDNASKCMANGRQPLGYKRGEDGRVVLDEANAAVVREIFTRVAAGDLFVDIARDLNAQGIKTSKGANWNKGSFQSICQNERYRGIYIYGDVRVVDGIPRIVSDDLWYRVQEAMRMKKNPVGTRHRVGAEDYLLTGKLRCGHCGSYMTGVSGTSRNGELHYYYTCQKRRTEHACDKKNIRRDVIEPAVAQAIKMYCLTDDVIEWMADRTVEYWEKHDNDLQIEALEQQLEENKKATSNMLKAIEMGIITEATRTRMVELETEQSRLSVQLNAAKEDVVKIDREQIISYLELLQQGDIHDRDFQMELFKNFLVAVYVYDDNRMKLVFSCMGDQNSVEIPLETGEDPPDGGLSPDAKMFVLTPDSSTKKTLHSLCGVFLFCTFVSPA

SEQ ID NO: 3056 - protein, 533 aa, Unknown
  Description of Unknown: Integrase B3057 sequence
  PTHR30461:SF3,cd00338,SM00857,G3DSA:1.10.10.2600,IPR036162, PF13408,PS51737,G3DSA:3.40.50.1390,IPR025827,IPR006119, IPR038109,PF07508,IPR011109,SSF53041,PTHR30461, PS51736,Coil,PF00239
MAKKKKPAGGIAVIYARYSSHNQRDVSIEQQIEACRKHAAELGLTIIATYEDRAISGRTDNRPAFQRLMHDAEKGKFSYVLAWKSNRMGRNMMQAMVNESRLMDCGIKVYYAEEDFDDSAAGRFALRSMMNVNQFYSDNLAEDVRRGLMDNANKCMVNGRQPLGYKRGKDGKVVVDEPAAAIVREVYARVASGELFTDIARDLNRRGIKTADKGEWNKNSFHRLCSNEKYRGIYIYGDVRIEGGIPTIIDDTLWYKVQEALRVKKLKRNGRHRPGDEDYLLTGKLRCGKCGGYMIGMSGRSKTGDIHYYYACQNRRVGRTCDKKNIRRDVIEPAVAQAIKEYCLTDDAIEWIADKTVEYWEKADRNLQLDSIEGDLAAVQSSISNVMKAIEMGVVTETTRDRLIELEKQRTDLKSKLALAKEEVVHVDRKKLISSLLLFRNGDIHDRQYQEDLFKTFLISVYVYDDDDNGHLKIVFNAFGDNNTVDLPIDFGETDNQSAFSDGAEKFDYSLHRSTKKPSDLLRWLFCFVLGPV

SEQ ID NO: 3057 - protein, 533 aa, Unknown
  Description of Unknown: Integrase B3058 sequence
  PTHR30461:SF3,SM00857,G3DSA:1.10.10.2600,IPR036162,PF13408, IPR025827,PS51737,G3DSA:3.40.50.1390,IPR006119,IPR038109, PF07508,SSF53041,IPR011109,PF00239,PTHR30461, PS51736,Coil,cd00338
MKAIIYARYSSDNQREESIEGQIRECMEFAERNGITVFGTYIDRALSAKTDNRPEFQRMIKDSYRKLFDTVLVWKLDRFARNRYDSAYYKNILKKNGVKVISAKENISDGPEGVLLESMLEGWAEYYSVDLSEKIGRGLTENALKGKMNGGGLTFGYRMKDQRLEIDEMTAPVVVEIFTRYADGERMTDIAKDLTRRGIRTSQGNKITLNVVHYLLKNRRYIGEYKFREMIIPDAIPPIVSEELFNRVQEIMARNQKAPAMRKAEDDYILTTRLFCGKCGTFMVGESGKSHTGTIHRYYKCSHAKRKMGCDKKPVKKDWIEDAVIHYIMKIVMNDELIDHIADAILNILAQENSKLPQLNARLKEIETGIQNMLNAIQQGILTPSTKERLEALEQEREEIKVAIYSEELQKPKITKEHIAFWISKFRDVDLTDVTSRKRLVESFVNAVFVYDDKVVFTFNYKDGSKTATIDEITAELGSDLDGTTPPVSTEFEHHKDGIYFRRRCCGLCGIQVKKESNGKTVALFLYITRYKE

SEQ ID NO: 3058 - protein, 533 aa, Unknown
  Description of Unknown: Integrase B3059 sequence
  PTHR30461:SF3,IPR036162,PS51737,IPR011109,PTHR30461, PF00239,G3DSA:1.10.10.2600,cd14728,IPR006119,SSF53041, cd00338,SM00857,IPR025827,IPR038109,PS51736, PF13408,G3DSA:3.40.50.1390,G3DSA:3.40.50.300,PF07508,Coil
MAFQKIKSVPPENALNAVIYARYSSTQQTENSIDGQLRECNRFADLHGYRIIGTYIDRAKSGTSVEERTDFLRMIEDAKKQQFAYIIVYRFDRFARNRYDSVIYKKQLSAVGVRVISTAETVGDGDEAIILESIYEAMDEAYSRRLSTITKRGLKETARKNLWTSIPPFGYQLVDRRPEILPAEADGVKMIFEKYLEGATKKEIADELNRRGLKTKNGNAFDYKKLDSIMHNRLYTGVSEYMGVERTCPAIISIELFDAVQEKLKASAKFYGRKSENTHYALCGKLYCGYCGKAMVGDAGTSRTGTRYNYYSCPGRKKKKACRKKAERQDFIEWYICEQTLKYVLTDKRIKEIAAKVEELAKSEADTSELKEAERRQNELNKQLDELTAKFIQAKSQRVIDKLNEQADELDKQLTAVESDIARLRLRVQHTVSAEQVERYLRSFKTGDLLSEDFRGRVINTLIQCVYLYDDKIIVYFNIKGAKSITHIDAIRDAESLAGSDSSRCGELESNLSEHAYMIYAQGAIGCLIKIER

SEQ ID NO: 3059 - protein, 533 aa, Unknown
  Description of Unknown: Integrase B3060 sequence
  PTHR30461:SF3,cd00338,SM00857,G3DSA:1.10.10.2600,IPR036162, PF13408,PS51737,G3DSA:3.40.50.1390,IPR025827,IPR006119, IPR038109,PF07508,IPR011109,SSF53041,PTHR30461, PS51736,Coil,PF00239
MYEDIKTACLYVRFSSHNQTEQSIEGQTRVCRDFCKRHNIRIVEIYADRATSASKDIEKRVQFLKMIKDSEKGLFDAVIVYKLDRFARSRYDSATYKYRLKRNGVQLISATENISNDPEGIILESVLEGMAEFYSAELSQKINRGMRESAYKHNSIGGAIPLGYKIEDKKLVIDPKTAPIVKEAFEKYADGETVAEICRQFNARGYKTSKGTAFGKSSFTKIFRNERYIGVYTFHDYRAEDAIPAIIDKDLWDRVQLRVGKIKNAPARNKAKVVYLLSGKIFCGHCGSKMNGNCNAGNYYYYQCYGKKNGNVDCKKKNIRKEFIERLVAQDALSLLTDEYIEQIATIACEKNQHEIELDSALPTIRDRIHQVDLSLNNLLKAIESGSAPDMLVKRMGELEKEKKDLQAQAKKESEDIVELDKAQVIYWLEQFRDGSIEDEEFCRMLIDLFVNSVTVWDEDDNTYKVTVAYNLTSLPTKTYRLNKGGTLSDFTSNAPGMSANPTITGNLLIHTFHCRLKSHSRKRFWDYDTFVV

SEQ ID NO: 3060 - protein, 533 aa, Unknown
  Description of Unknown: Integrase B3061 sequence
  PTHR30461:SF3,cd00338,SM00857,G3DSA:1.10.10.2600,IPR036162, PF13408,PS51737,G3DSA:3.40.50.1390,IPR025827,IPR006119, IPR038109,PF07508,IPR011109,SSF53041,PTHR30461, PS51736,Coil,PF00239
MYEDIKTACLYVRFSSHNQTEQSIEGQTRVCRDFCKRHNIRIVEIYADRATSASKDIEKRVQFLKMIKDSEKGLFDAVIVYKLDRFARSRYDSATYKYRLKRNGVQLISATENISNDPEGIILESVLEGMAEFYSAELSQKINRGMRESAYKHNSIGGAIPLGYKIEDKKLVIDPKTAPIVKEAFEKYADGETVAEICRQFNARGYKTSKGTAFGKSSFTKIFRNERYIGVYTFHDYRAEDAIPAIIDKDLWDRVQLRVGKIKNAPARNKAKVVYLLSGKIFCGHCGSKMNGNCNAGNYYYYQCYGKKNGNVDCKKKNIRKEFIERLVAQDALSLLTDEYIEQIATIACEKNQHEIELDSALPTIRDRIHQVDLSLNNLLKAIESGSAPDMLVKRMGELEKEKKDLQAQAKKESEDIVELDKAQVIYWLEQFRGGSIEDEEFCRMLIDLFVNSVTVWDEDDNTYKVTVAYNLTSLPTKTYRLNKGGTLSDFASNAPGMSANPTITGNLLIHTFHCRLKSHSWKRFWDYDTFVV

SEQ ID NO: 3061 - protein, 533 aa, Unknown
  Description of Unknown: Integrase B3062 sequence
  PTHR30461:SF3,cd00338,SM00857,G3DSA:1.10.10.2600,IPR036162, PF13408,IPR025827,G3DSA:3.40.50.1390,PS51737,IPR006119, IPR038109,PF07508,SSF53041,IPR011109,PTHR30461, PS51736,Coil,PF00239
MKSKNKPFVRKAVAYARFSSNNQREESIDAQLRAISDYCERERIQLVDIYSDEAQSAKSDNRDDFKNMTDAIFKGNYDIDAVLVHKFNRFARNKYDSALYKKRLRDIGIKVVSVTQPIDDSPEGRILESMIEAMDEYYSENLALEVKKGLKENALKGKHTGGGKLLGLSVDSEGYYYPNEQAHIVRRIFSEFANGVPKTKIVERLNREGHRNQYGRKFNTRTILDLLQNEKYIGNFVYQHSVTETIRLDGIIKNPIVDYELWEQVQEKRKTHHKPKQRKRNYFMTGKLRCGICGFTYCGSGSKRTSKKGDKLAAYYKCSGKTKHKNSCTNTSLNKEFYEQLVVNTIIENVLTDNAINDIAVKTYKQLEKERKAPLIPTKKLKSQLEAVRKKQEKLMELFLDGGIDKDLLDTKNSSLKDEKRHIESQIDKNEYLENSNSLTVEDVSKFIKVFVNELKEMPDIEFSQIVYNTFVDNIVIYPDRLEIALKVDFSTLYRGDKVNFRGAICSLAPVIVDKTVKRKSHQQSAKQRGLKR

SEQ ID NO: 3062 - protein, 533 aa, Unknown
  Description of Unknown: Integrase B3063 sequence
  PTHR30461:SF3,SM00857,G3DSA:1.10.10.2600,IPR036162,PF13408, PS51737,G3DSA:3.40.50.1390,IPR025827,IPR006119,IPR038109, PF07508,IPR011109,SSF53041,PF00239,PTHR30461, PS51736,Coil,cd00338
MKKFPIDLSCLTEEEISQFQEDPYTLYNGDQDVALYLRYSSTGQSDQSIEGQLRDCRAFCKANHYRIVAIYVDRATTARKDVEKRVHLMEMVADSAKQNWEYVIVWKLDRFARNRNDSAIMKMRLRKNGVKVLSATEHLTDSPESIILESVLEGMAEFFSAELSQKVTRGMRESALKCHSVGGHIPLGYKVENHKLVVDPDTAHIVQEAFSLYANGESVADICRKFNSAGYKTAKNTEFNRSSFKAMFRNTRYIGTYTYKDIVIENGIPAIIDKELFETVQRRLSKTATAPARGKAKVDYLLSGKLFCGHCGASMNGESGAGRHGKVYHYYSCYTKKRKLGCDKRPLKKDYIEGIVARDALNLLTDQLIDEIADMAIRQSEQDLINDTHIPQLTAQLSEVEKSIMNITAAIEKGIASETLMNRLVQLEHEKKTLNKEIKAEEKFVYRIDRDQIVFWLSQFKYGNIEDEDFRRRLIDLLVNSVTVWDEPDGYKITTAYNLTSCKTKTFRVEKNPAAEEATGFDFGESECGLRLP

SEQ ID NO: 3063 - protein, 533 aa, Unknown
  Description of Unknown: Integrase B3064 sequence
  cd00338,SM00857,G3DSA:1.10.10.2600,IPR036162,PS51737, G3DSA:3.40.50.1390,IPR006119,IPR038109,PF07508,IPR011109, SSF53041,PTHR30461,PS51736,Coil,PF00239
MELNRTGRYVMYLRKSRKDDEYGAASNEDVLARHELLLRDTAKRNKIIVSAIYREVRSGDSISARPMMQQLLSELADGRWDGVLVVEIERLARGDTIDQGIVARAFQDSGAMIITPIKIYDPNDEYDEEYFEFGLFMSRREYKTIKRRMQRGRVAASKEGKFCGNKTPYGYKREKISGESGFQLVPDPEEAEVIRKIYDWYVNGIPQPSGSRTMAGMAAIAHQLTAEGYAPRFTSVWSHNTVSDLLKNPVYIGKITWGKNKAIDCLQEDGTLRFRDHRQSSANIFDGRHEPLITEDLYFAAQRRRHSSPHSHTHYVADCSNALTGLIRCKYCGRNLFYRKASARSPKDIMLCGNHECLNIGCFYDVLEARIIDAIRMYADQNSKPVKKPKHDGSLQTSINRIQKELDASATQLDRIYTAYERGVYADDVFLERSSSVKKKISDLQRTLKDLQDQEAKQKQADQEQVEMIPKMRHLVETYWTLSTPSDRNAALKEVIDHIEYEKHKKSPKGGPFDNFSLVIYPRLFSSPFYFNN

SEQ ID NO: 3064 - protein, 533 aa, Unknown
  Description of Unknown: Integrase B3065 sequence
  PTHR30461:SF3,cd00338,SM00857,G3DSA:1.10.10.2600,IPR036162, PF13408,IPR025827,PS51737,G3DSA:3.40.50.1390,IPR006119, IPR038109,PF07508,IPR011109,SSF53041, PTHR30461,PS51736,Coil,PF00239
MDAVAYIRVSTNKEEQELSLENQREFFEKYVGNRNDTLIRIYSDKGKSATKMKNRKDLQRLLSAARRGEFQRLYVKDISRLFRNTLDFITVSRELANLGVQLHLVNMGEGKDIDMFTLNLMAMIAENESQKISERTKFGKQFSKERGIVPNFVFGYDRTDKYTLVPNPEESRWVQKIFDLYTEEEWGMAKIAKFLYESHVKTKKLKDGQPNYNWSQISVGRILTNPIYIGTVINGKESMKDIFTSQRQKNPKEEWYVSERPEFRIISDEQFEKAQQIKEKNAKQYCQREKRSNKHLFSNLIKCNSCGFSYRRYQKQYSPNRPPKVWWTCSKRSSYGSGRCDSEYIRIDEDWLKSALNTLFKSLLDDRESFFTLVETRCNSIIKEYIRNTSGIVLEEVENRLDELKQERERLKTLAVKALITMDEAEHDMIPINEEIEKLSFRLNETNKTREITQKIKASIQAFLNIFSAFDFSGNITNEELKKVVKEIRVVSKNEIYVYFNIAEDIEGLNFPINISDVVEIDTDSDDRAQRCT

SEQ ID NO: 3065 - protein, 533 aa, Unknown
  Description of Unknown: Integrase B3066 sequence
  PTHR30461:SF3,IPR036162,PS51737,IPR011109,PTHR30461, PF00239,G3DSA:1.10.10.2600,cd14728,IPR006119,SSF53041, cd00338,SM00857,IPR025827,IPR038109,PS51736, PF13408,G3DSA:3.40.50.1390,G3DSA:3.40.50.300,PF07508,Coil
MAFQKIKSVPPENALNAVIYARYSSTQQTENSIDGQLRECNRFADLHGYRIIGTYIDRAKSGTSVEERTDFLRMIEDAKKQQFAYIIVYRFDRFARNRYDSVIYKKQLSAVGVRVISTAETVGDGDEAIILESIYEAMDEAYSRRLSTITKRGLKETARKNLWTSIPPFGYQLFDRRPEILPAEADGVKMIFEKYLEGATKKEIADELNRRGLKTKNGNAFDYKKLDSIMHNKLYTGVSEYMGIERTCPAIISTELFDAVQEKLKASAKYYGRKSENTHYALCGKLYCGYCGKAMVGDAGTSRTGTRYNYYSCPGRKKKKACRKKAERQDFIEWYICEQTLKYVLTDKRIKEIAAKVEELAKSEADTSELKEAERRQNELNKQLDELTAKFIQAKSQRVIDKLNEQADELDKQLTAVESDIARLRLRVQHTVSAEQVERYLRSFKTGDLLSEEFRGRVINTLIQCVYLYDDKIIVYFNIKGAKSITHIDAIRDAESLSGSDSSRCGELESNLSEHAYMIYARGAIGCIIKIER

SEQ ID NO: 3066 - protein, 533 aa, Unknown
  Description of Unknown: Integrase B3067 sequence
  PTHR30461:SF3,SM00857,G3DSA:1.10.10.2600,IPR036162,PF13408, IPR025827,PS51737,G3DSA:3.40.50.1390,IPR006119,IPR038109, PF07508,IPR011109,SSF53041,PTHR30461,Coil, PS51736,cd00338,PF00239
MAKPEVSELAVVYARYSSHSQGEQSIEGQLSNARDYAAAHGYTIVHEYVDRAKSGRTDNRAEFQQMLKDTAKRQFSVIILWKVDRFGRNREEIAINKMKCRKNGVRVEYVAETIPDSPEGVILESVLEGFAEYYSLQLSQNIRRGRAESAEKCQSLGGNRPLGYKTGPDKKFVIDENTAPTVKMIFTMYADGKTVTEIVDKLNELGLRTLRGGPFTKNSLHSILKNKKYIGIYEYQGREIKDGVPRIIEDDVFNKVQEMLKINKRAPAKTWSRADYILTDKLFCGKCGALMFGESGTSKTGAKHNYYICSNKKRFRSCDKKAVRQADIEDTVLNATHELLQDDELLDYIVDRTWEYYLAQDNSQEELRNLQRQLAQTDTAISNLIRAIEAGILTEETKKRMDELTQQKADLKASIADREIARGFHLQKSHIAFYLRSLRDADWSDKEAQKRLIQTFVNAVFVYDDHITLTYNFSGDKSTITLHDMQRFEDGEEFGCRASRSTKQVLDEHLFLQRRLRREVFALIHNRKAPSWE

SEQ ID NO: 3067 - protein, 533 aa, Unknown
  Description of Unknown: Integrase B3068 sequence
  cd03768,PTHR30461:SF3,SM00857,G3DSA:1.10.10.2600,IPR036162, PF13408,PS51737,G3DSA:3.40.50.1390,IPR025827,IPR006119, IPR038109,PF07508,IPR011109,SSF53041,PTHR30461, PS51736,Coil,PF00239
MIKIAIYSRKSVFTGKGESIENQIELCKNYCNTYVNSGSNLEYIIYEDEGFSGKNTNRPEFQHMIDDIKKNKIDTLICYRLDRISRNVADFSSTLELLQKYNVNFISIKERFDTSTPLGRAMIYIASVFAQLERETIAERVRDNMIQLAKSGRWLGGNIPYGFNIARKTYISDFKEKEFSILSPNKKELETVNFVYSYYIKTHSIRQVTRLLNVNSIIGKNGGSFDLTQIRRMLRNPLYVISDDKSHQYLIKKGLNVFGSPNGNGYITYNKSNQKNISADSNQWIVAVSNHKGIITSDNWLKVQYQLDNNKSKMPRIGTGKNHSLFSGILKCKKCGSNMIVKFSGKNKNNIPYEYYVCSGKQNKYLNKCTTKNIRVDKLDKLLTRKLKIHNKTALMKTLRDSIDNICCDFKNNQISSIEYEIHENKVSMDNLIKQLAKSASSTVSDRLMNEINLLDKNIVRLKKHLETIELEQSHDKKTNIDIKNIINVLNSFSDTIEYIDDTAQKRFLIQTLIKSAVWDSDNNNVEIIFNTH

SEQ ID NO: 3068 - protein, 533 aa, Unknown
  Description of Unknown: Integrase B3069 sequence
  cd00338,SM00857,G3DSA:1.10.10.2600,IPR036162,PF13408, IPR025827,PS51737,G3DSA:3.40.50.1390,IPR006119,IPR038109, PF07508,IPR011109,SSF53041,PTHR30461,PS51736, Coil,PF00239
MVQEKLRAVFYARVSTEEERQLNALEKQVAECKDAVLQKGWKLVDQYVDEGKSGTQIKRRDEYKRLFEDLENDKFDIVVIKSQDRLQRNTLDWYIWIDRLTTHGKRLYMYLEDTFYSPDNALISGIKAILAEEYSRELSKKINNSYKRRIEAAKNGEKISIVNNSRSLGYDKVNGELVINEKEAEVVRMIFNMYASGEGLRAISNTLYDMGYRNRSGNEIDPTTISRMLSSEKYKGVYVINQRHYDFDTKKTVLNPKSEWVHIPGAVPAIVEPELWDRVQEIKGSKVQSIKNEKRGRNCGKSIFSGKIYCAKCGAKYWRSLENGYVKFKCSSYSKYGKIPGKGCDNKSFSENALYSILQSLSEQIVEINTAEVRKSLLNWLKSLRERLRASQGDDTIKEEIRKQTARKEKLTDAYMDGIISKEDYSKRYKELEKTLEDLKDKLLTLEVNEDLQSIEEVIQNIDKEMEEYLQTQSFNENRVEFLNQHLTKVTVNKDSFLLEFDLIGGAILTGKDFYLFVDNPRGNCKSILDFWS

SEQ ID NO: 3069 - protein, 533 aa, Unknown
  Description of Unknown: Integrase B3070 sequence
  PTHR30461:SF3,cd00338,SM00857,G3DSA:1.10.10.2600,IPR036162, PF13408,PS51737,G3DSA:3.40.50.1390,IPR025827,IPR006119, IPR038109,PF07508,IPR011109,SSF53041,PTHR30461, PS51736,Coil,PF00239
MAKKKKPAGGIAVIYARYSSHNQRDVSIEQQIEACRKHAAELGLTIIATYEDRAISGRTDNRPAFQRLMHDAEKGKFSYVLAWKSNRMGRNMMQAMVNESRLMDCGIKVYYAEEDFDDSAAGRFALRSMMNVNQFYSDNLAEDVRRGLMDNANKCMVNGRQPLGYKRGKDGKVVVDEPAAAIVREVYTRVASGELFTDIARDLNRRGIKTADKGEWNKNSFHRLCSNEKYRGIYIYGDVRIEGGIPTIIDDPLWYKVQEALRVKKLKRNGRHRPGDEDYLLTGKLRCGKCGGYMIGMSGRSKTGDIHYYYACQNRRVGRTCDKKNIRRDVIEPAVAQAIKEYCLTDDAIEWIADKTVEYWEKADRNLQLDSIEGDLVAVQSSISNVMKAIEMGVVTETTRDRLIELEKQRTDLKSKLALAKEEVVHVDRKKLISSLLLFRNGDIHDRQYQEDLFKTFLISVYVYDDDNNGHLKIVFNAFGDNNTVDLPIDFGETDNQSAFSDGAEKFDYSLHRSTKKPSDSLRWLFCFAFGPV

SEQ ID NO: 3070 - protein, 533 aa, Unknown
  Description of Unknown: Integrase B3071 sequence
  PTHR30461:SF3,SM00857,G3DSA:1.10.10.2600,IPR036162,PF13408, IPR025827,G3DSA:3.40.50.1390,PS51737,IPR006119,IPR038109, PF07508,IPR011109,SSF53041,PF00239,PTHR30461, Coil,cd00338
MKKFKFPIDLSMLTEDEIDQFRQDPSTLFQGDTDVCLYLRFSSERQKEQSIEGQLRDCIAYCKRKNYRIVAIYVDRATTARKDVEKRVHFQEMITASVHQTWKLVVVWKLDRFARNREDSAVFKMRLRKNGVKVESATEGISKNPEGIILEAVLEGIAEYYSADLSQKITRGMRESALKCHSIGGHVPLGYKIEDHKLVINPDTAHIVQEAFELYANGETVADICRMFNAKGYRTAKGAEFNRNSFKSMFRNRRYIGVYRYKDFEKEGGVPPIIDKDLFETVQKRLSANAEAPARGKAKVDYLLAGKLFCGHCGGSMNGESGTSKTGAVHNYYACYTRKRQHSCDKKPLRKEWIEQIVAQDAMELLTDDAIQEMADMAISQTEKDLRENTRIPELSERMKETESGIANITKAVEKGIASDALMNRLVELEKEKKNLLRLIAEEEKYVCKIDRDQIVYWLTKFKDGNIDDENFKRIIIDLMVNSVTVWDEPDGFRITTAYNLTSCKNKTFRISSSSDKGFGFEGLESTKLKATF

SEQ ID NO: 3071 - protein, 533 aa, Unknown
  Description of Unknown: Integrase B3072 sequence
  PTHR30461:SF3,SM00857,G3DSA:1.10.10.2600,IPR036162,PS51737, G3DSA:3.40.50.1390,IPR006119,IPR038109,PF07508,IPR011109, SSF53041,PTHR30461,Coil,PS51736,cd00338, PF00239
MYRELPTFCPEEILVYLRKSRADDPSLSVDEVLARHEELLRDWIERNLVHAIPEENYFREVVSGENIKDRPEFQRVLRKIESPKIAAILVVEVQRLSRGDLEDAGRLIKLLRYTHTMVITPQKVYDLEDEYDRDLFERELKRGNDYLEYTKRILNRGRILSVQNGNYIGNTPPYGFDKCWSIDGKKRVPTLKENEKADIVRTIFRMVDSENMSPYAVAKYLDSIGEPAPSGKHWTYNSVLGILRNQHYDKKVIWGHRSTQQVVIDGHIQSTRPRQKEYLVAEGRQPRVIDHEVFERVQKAISGQPRTRRDLNPVNPFAGIVYCANCGRSLSFRFYRRAGRGETCPPRMLCSDQIHCKSSSCYFYEFSEAVQKVLQKHIHDFSIQLDNLLQEPESYAQDNIRLLENRLNELKQKELRQWEKYADGEMPKEIFDQLNERIQKNKQAAQIALDAAREAAPDTADEIQDKITRLSDALRALQDDTIPVSLKNQYLKAVIERIDYSRPASIRALQGTTDRRHGGWSTPPFELQVHMRF

SEQ ID NO: 3072 - protein, 533 aa, Unknown
  Description of Unknown: Integrase B3073 sequence
  SM00857,G3DSA:1.10.10.2600,IPR036162,PS51737,G3DSA:3.40.50.1390, IPR006119,IPR038109,PF07508,IPR011109,SSF53041, PTHR30461,Coil,PS51736,cd00338,PF00239
MEYYIYLRKSRKDREAEMQGEGETLARHQKTLLDLASKMHLNITRIYKEVVSGETIASRPEMQRLLHDIEDGNCAGVLVMEVERLARGDTKDQGVVAEAFKYSGTKIITPIKTYDPADEYDEEYFEFGLFMSRREYKTINRRIQRGRITSAKEGKFISSTAPYGYRKVKIKNGKGYTLEIVPDQANVVRMIYDWYTKGVTNENGICQPIGATSICRKLDMMHIQPMVNATWSKASVSDILKNPVYTGKIRWSYRKEVKKIKDGKVVKTRPDNHDDYILVDGLHQSIISEETFTAAQRMSAKNRKMPLKNNTQLQNPLSGVIRCSICGCTMTRLGPTSHTPYATLKCSNRYCKNISSPLYLVEQKLLIFLEDWLKNYSLDWSNCRSPFATDAEIKMKEHAINSVAESLNTLQEQLNNTYTFLEKGIYTTEIFLERNKLLTEQINSTKCNLDQLNQEYNDILLLQKSQNEFMPRVQNIIDTYWDVKNMKTRNDMLKEILEKVEYTKDKPNTRGKREVANFTLDIYPKIPRKLPMS

SEQ ID NO: 3073 - protein, 533 aa, Unknown
  Description of Unknown: Integrase B3074 sequence
  PTHR30461:SF3,SM00857,G3DSA:1.10.10.2600,IPR036162,PF13408, IPR025827,G3DSA:3.40.50.1390,PS51737,IPR006119,IPR038109, PF07508,SSF53041,IPR011109,PTHR30461, Coil,PS51736,cd00338,PF00239
MRKKFNIDLSMLTPEEQQQFRDDPTTLTKGEVDVALYLRFSSERQKEQSIEGQLRDCIAYCKRKSFRIVAIYVDRATTARKDVEKRVHFQEMISDSAHHLWNFVVVWKLDRFARNREDSAVFKMRLRKNGVRVKSATETISDNPEGIILESVLEGIAEYYSADLSQKITRGLRESAMKGHSVGGHVPLGYKIEDHRLVINPETAPIVQEAFQLYANGESVAEICRIFNGKGYRTAKNSEFNRSSFKSIFKNVRYIGTYIYKDIEKENAIPAIIDKDLFETVQRRLSLAADAPARGKAKVDSLLSGKLFCGHCGATMNGESGTSKTGAIHNYYTCYSRKRRKGCNKNPLKKDFIERVVAQDAMALLTDDVIEELADMAMSQADKDLKENTRIPELSARLTEVEQGINNITKAVEKGIASDALLNRLTELEKEKKDLTSQLREEEKYIYRIDRDQVVFWLTKFQGGDIEDEDCRRRIIDLLVNSVTVWDEPDGYKITTAYNLTSCKTKTFRVSNNADSPSGEGFGFGELSSTKAA

SEQ ID NO: 3074 - protein, 533 aa, Unknown
  Description of Unknown: Integrase B3075 sequence
  SM00857,G3DSA:1.10.10.2600,IPR036162,PF13408,PS51737, G3DSA:3.40.50.1390,IPR025827,mobidb-lite,IPR006119,IPR038109, PF07508,IPR011109,SSF53041,PTHR30461,Coil, PS51736,cd00338,PF00239
MKAVIYARYSSDNQREESIEGQVRECQSFAERKGYTVIRTYIDRALSGTRADNRPQFQQMISDSTLREFQYVIVWKIDRFSRDKFDSVKYKYALKSSGVSVISATEPIDGSPEGQMMESVFEGISVYYIKDLAQKTSRGMTENAIKGKFNGGTLTFGYTIDENHHFQLDPVNAPIVLDVFTRYSEGETIHSILDDINSKMSNNGRKFTYHFLNWMLNNRRYLGEYKFQDTVNNEAIPPIISQELFDKCQHRLNVNKHKAGSFKKNKEKYLLTGKIFCGICGATISGISGTGKCKSIYRYYKCMNVKKHKCNKKPVQKELIENIVLNAAMDIFKDKALIRKISKACFDLQSKESPMLPALKRRLRENQKEIKNLMNAIKAGIVLKTTRSELEKLETEQEQLETNIAMEKLVKPVIPQEKIQAWLMNFAYADLSDQSQKQRIIDIFVNSVYVYDDRVVIFFNYKDGERYVDFSTLDDLENPAGSNEKKTNTHENECSPLIKSGDPSGNRTRDTLIKSQRKIMPVNGSAMRFRCLN

SEQ ID NO: 3075 - protein, 533 aa, Unknown
  Description of Unknown: Integrase B3076 sequence
  PTHR30461:SF3,cd00338,SM00857,G3DSA:1.10.10.2600,IPR036162, PF13408,PS51737,IPR025827,G3DSA:3.40.50.1390,IPR006119, IPR038109,PF07508,IPR011109,SSF53041,PTHR30461, PS51736,Coil,PF00239
MYEDIKTACLYVRFSSHNQTEQSIEGQTRVCRDFCKRHNIRIVEIYADRATSASKDIEKRVQFLKMIKDSEKGLFDAVIVYKLDRFARSRYDSATYKYRLKRNGVQLISATENISNDPEGIILESVLEGMAEFYSAELSQKINRGMRESAYKHNSIGGAIPLGYKIEDKKLVIDPKTAPIVKEAFEKYADGETVAEICRQFNARGYKTSKGTAFGKSSFTKIFRNERYIGVYTFHDYRAEGAVPAIIDKDLWDRVQLRAGKIKSAPARHKAKVVYLLSGKLFCGHCGSRMNGNCNASNYYYYQCYGKKNGHVDCNKKNIRKEFIERLVAQDALSLLTDEYIEQIAAIACEKNQHEIELDSALPTIRDRIHQVDLSLNNLLKAIESGSAPDMLVKRMGELEKEKKDLQAQAKKESEDIVELDKAQVIYWLEQFRGGSIEDEEFCRMLIDLFVNSVTVWDEDDDTYKVTVAYNLTSLPTKTYRLNKGGTLSDFASNAPGMSANPTITGNLLIHTFHCRLKSHSWKRFWDYDTFLV

SEQ ID NO: 3076 - protein, 533 aa, Unknown
  Description of Unknown: Integrase B3077 sequence
  PTHR30461:SF3,cd00338,SM00857,G3DSA:1.10.10.2600,IPR036162, PF13408,IPR025827,PS51737,G3DSA:3.40.50.1390,IPR006119, IPR038109,PF07508,IPR011109,SSF53041,PTHR30461, PS51736,Coil,PF00239
MYEDIKTACLYVRFSSHNQTEQSIEGQTRVCHDFCKRHNIKIVEIYADRATSASKDIEKRVQFLKMIKDSEKGLFDAVIVYKLDRFARSRYDSATYKYRLKRNGVQLISATENISNDPEGIILESVLEGMAEFYSAELSQKINRGMRESAYKHNSIGGAVPLGYKIEDKKLVIDPKTAPIVKEAFEKYADGETVAEICRQFNARGYKTSKGTAFGKSSFTKIFRNERYIGVYTFHDYRAEDAIPAIIDKDLWDRVQVRVGKIKNAPARNKAKVVYLLSGKIFCGHCGSKMNGNCNAGNYYYYQCYGKKNGNVDCKKKNIRKEFIERLVAQDALSLLTDEYIEQIATIACKKNQHEIELDSALPTIRDRIHQVDLSLNNLLKAIESGSAPDMLVKRMGELEKEKKDLQAQAKKESEDIVELDKAQVIYWLEQFRGGSIEDEEFCRMLIDLFVNSVTVWDKDDNTYKVTVAYNLTSLPTKTYRLNKGGTLSDFTSNAPGMSANPTITGNLLIHTFHCRLKSHSWKRFWDYDTFVV

SEQ ID NO: 3077 - protein, 533 aa, Unknown
  Description of Unknown: Integrase B3078 sequence
  cd00338,SM00857,G3DSA:1.10.10.2600,IPR036162,PF13408, IPR025827,G3DSA:3.40.50.1390,PS51737,IPR006119,IPR038109, PF07508,IPR011109,SSF53041,PTHR30461,PS51736, Coil,PF00239
MVQEKLRAVFYARVSTEEEKQLNALEKQVAECKDAVLQKGWKLVDQYVDEGKSGTQIKRRDEYRRLFEDLENDKFDIVVIKSQDRLQRNTLDWYIWIDRLTTHGKRLYMYLEDTFYSPDNALISGIKAILAEEYSRELSKKINNSYKRRIEAAKNGEKISIVNNSRSLGYDKVNGELVINEKEAEVVRMIFNMYASGEGLRAISNTLYDMGYRNRSGNEIDPTTISRMLSSEKYKGVYVINQRHYDFDTKKTVLNPKSEWVHIPGAVPAIVEPELWDRVQEIKGSKVQSIKNEKRGRNCGKSIFSGKIYCAKCGAKYWRSLENGYVKFKCSSYSKYGKIPGKGCDNKSFSENALYSILQSLSEQIVEVNTAEVRKSLLNWLESLRERLRASQGDDTIKEEIRKQTARKEKLTDAYMDGIISKEDYSKRYKELEKTLEDLKDKLLTLEVNEDLQSIEEVIQNIDKEMEEYLQTQSFNESRVEFLNQHLTKVTVNKDSFLLEFDLIGGAILTGKDFYLFVDNPRRYCKSILDFWI

SEQ ID NO: 3078 - protein, 533 aa, Unknown
  Description of Unknown: Integrase B3079 sequence
  PTHR30461:SF3,cd00338,SM00857,G3DSA:1.10.10.2600,IPR036162, PF13408,IPR025827,G3DSA:3.40.50.1390,PS51737,IPR006119, IPR038109,PF07508,IPR011109,SSF53041,PTHR30461, PS51736,Coil,PF00239
MSVDIKWQVPKAQPEANELAVVYARYSSHSQGEQSIEGQLSNARDYAAAHGYTIVHEYVDRAKSGRTDNRAEFQQMLKDTAKRQFSVIILWKVDRFGRNREEIAINKMKCRKNGVRVEYVAETIPDSPEGVILESVLEGFAEYYSLQLSQNIRRGRAESAEKCQSLGGNRPLGYKTGPDKKFVIDENTAPTVKMIFTMYADGKTVTEIVDKLNEMGLRTLRGGPFTKNSLHSILKNKKYIGIYEYQGHEIKDGVPRIIEDDVFNKVQEMLKINKRAPAKTWSRADYILTDKLFCGKCGALMFGESGTSKTGAKHNYYICSNKKRFRSCDKKAVRQADIEDTVLNATHELLQDDELLDYIVDRTWEYYLAQDNSQEELRNLQRQLAQTDTAISNLIRAIEAGILTEETKKRMDELTQQKADLKASIADREIARGFHLKKSHIAYYLRSLRDADWSDKETQKRLIQTFVNAVFVYDDHITLTYNFSGDKNTITLRDMQRFEDGEEFGCRASRSTKGVLHEPFYFVGGFAVTIWFR

SEQ ID NO: 3079 - protein, 533 aa, Unknown
  Description of Unknown: Integrase B3080 sequence
  SM00857,G3DSA:1.10.10.2600,IPR036162,PF13408,PS51737, IPR025827,G3DSA:3.40.50.1390,IPR006119,IPR038109,PF07508, IPR011109,SSF53041,PF00239,PTHR30461,PS51736, Coil,cd00338
MTVKKFPIDLSCLTEEEISQFQEDPYTLYNGDQDVALYLRYSSTGQSDQSIEGQLRDCRAFCKANHYRIVAIYVDRATTARKDMEKRVHLMEMISDSAKQNWEYVIVWKLDRFARNRNDSAIMKMRLRKNGVKVLSATEHLTDSPESIILESVLEGMAEFFSAELSQKVTRGMRESALKCHSVGGHIPLGYKVENHKLVIDPDTAHIVQEAFSLYANGESVAAICRKFNSAGYKTAKNTEFNRSSFKAMFRNTRYIGTYTYKDIVIENGIPAIIDKELFETVQRRLSKTATAPARGKAKVDYLLSGKLFCGHCGASMNGESGAGRHGKVYHYYSCYTKKRKLGCDKRPLKKDYIEGIVARDALNLLTDQLIDEIADMAIRQSEQDLINDTHIPQLTAQLTEVEKSITNITAAIEKGIASETLMNRLVQLEHEKKTLNKEIKAEEKFVYRIDRDQIVFWLSQFKYGNIEDEDFRRRLIDLLVNSVTVWDEPDGYKITTAYNLTSCKTKTFRVEKNPAAEEATGFDFGESECTRI

SEQ ID NO: 3080 - protein, 533 aa, Unknown
  Description of Unknown: Integrase B3081 sequence
  PTHR30461:SF3,SM00857,IPR036162,PF13408,IPR025827, G3DSA:3.40.50.1390,IPR006119,PF07508,IPR011109,SSF53041, PTHR30461,Coil,PS51736,cd00338,PF00239
MLVFGIYARKSLHSDQSDSVENQVLLAEEYIAKHYPDVEKRLIYYIDEDRSGGDMFRPDWERLITDMRNRILDIIVCYKLDRVGRDVADLALFYREIVQYDLIVVPVRDNLEIKEDMTPIEKGMMYMNAVFSQIERENTIVRVSDNMIKLAEKGYWCGGRPPIGFQLQKVMADNSRMHTILVENPSTLPFYHKLVHDFLTEGLSLGGMETKYKKEKFTTPLGAALTGSQIWILLTNPNYVAADGIMYDYYAAMGCKMAKPRELFDGQHGIIAYCRGRGAGKGSHKRKRILNPPEKWIISVGHHLPILDSQTFLAIQNRFGQNVIDKTRKHKIGILKGVLRCSCGRLMRTKYKYDKQYDIEYRHYYCPTRDRLGPEYCTARMVRLDDLDDEVIRQLTAMSLDYELIDQYISPVIPLPNMRTRVTVEKELKSVQNKISNLTQALSNTDAIAAAKYIISSIEALDSQITKLKKELYDISSVESKTRKREVDKMERYRMVCHIIERLDDADYDEINGLIRELFSECVWDGKKLHIKI

SEQ ID NO: 3081 - protein, 533 aa, Unknown
  Description of Unknown: Integrase B3082 sequence
  PTHR30461:SF3,SM00857,G3DSA:1.10.10.2600,IPR036162,PF13408, IPR025827,G3DSA:3.40.50.1390,PS51737,IPR006119,IPR038109, PF07508,IPR011109,SSF53041,PTHR30461, Coil,PS51736,cd00338,PF00239
MSMDIKWQKPKANNGELAVVYARYSSHNQGEQSIEGQLAEAKKYATAHGYTIVHEYVDRAKTGRTDNRTEFQQMLKDTAKKQFSVIILWKVDRFGRNREEIAINKMKCRKNGVRVEYVAETIPNSPEGVILESVLEGFAEYYSLQLSQNIRRGRAESAEKCQSLGGNRPLGYKTGADKKFVIDENTAPTVKMIFTMYANGATVTEIVNKLNEMGLRTLRGGLFTKNSLYTILRNKKYIGIYEYQDHEVKDGVPRIIEDDVFNRVQEMLKINKRAPAKTWSRADYILTDKLFCGKCGALMFGESGTSKTGAKHNYYICSNKKRFRSCDKKAVRQADIEDAVLDATRKLLQDDELLDFIIDRTWECYLAQDNSQEELRNLQRQLAQTDTAISNLIRAIEAGILTEETKKRMDELTQQKADLKASIADREIARGFHLQKSHIAFYLHSLRDADWSDKETQRRLIQTFVNAVFVYDDHITLTYNFSGDNSIVTLRDMQRFEDGEEFGCRASRSTKTHRYELFWFKNVFGLTRKLPQR

SEQ ID NO: 3082 - protein, 533 aa, Unknown
  Description of Unknown: Integrase B3083 sequence
  PTHR30461:SF3,cd00338,SM00857,G3DSA:1.10.10.2600,IPR036162, PF13408,IPR025827,PS51737,G3DSA:3.40.50.1390,IPR006119, IPR038109,PF07508,IPR011109,SSF53041,PTHR30461, PS51736,Coil,PF00239
MDAVAYIRVSTNKEEQELSLENQREFFEKYVGNRNDTLIRIYSDKGKSATKMKNRKDLQRLLSAARRGEFQRLYVKDISRLFRNTLDFITVSRELANLGVQLHLVNMGEGKDIDMFTLNLMAMIAENESQKISERTKFGKQFSKERGIVPNFVFGYDRTDKYTLVPNPEESRWVQKIFDLYTEEEWGMAKIAKFLYESHVKTKKLKDGQPNYNWSQISVGRILTNPIYIGTVINGKESMKDIFTSQRQKNPKEEWYVSERPEFRIISDEQFEKAQQIKEKNAKQYCQREKRSNKHLFSNLIKCNSCGFSYRRYQKQYSPNRPPKVWWTCSKRSSYGSGRCDSEYIRIDEDWLKSALNTLFKSLLDDRESFFTLVETRCNSIIKEYIRNTSGIVLEEVENRLDELKQERERLKTLAVKALITMDEAEHDMIPINEEIEKLSFRLNETNKTREITQKIKASIQAFLNTFSAFDFSGNITNEELKKVVKEIRVVSKNEIYVYFNIAEDIEGLNFPINISDVVEIDTNSNNRAQRCT

SEQ ID NO: 3083 - protein, 533 aa, Unknown
  Description of Unknown: Integrase B3084 sequence
  PTHR30461:SF3,SM00857,G3DSA:1.10.10.2600,IPR036162,PF13408, PS51737,G3DSA:3.40.50.1390,IPR025827,IPR006119,IPR038109, PF07508,IPR011109,SSF53041,PF00239,PTHR30461, PS51736,Coil,cd00338
MYEDIKTACLYVRFSSHNQTEQSIEGQTRVCRDFCKRHNIRIVEIYADRATSASKDIEKRVQFLKMIKDSEKGLFDAVIVYKLDRFARSRYDSATYKYRLKRNGVQLISATENISNDPEGIILESVLEGMAEFYSAELSQKINRGMRESAYKHNSIGGAIPLGYKIEDKKLVIDPKTAPIVKEAFEKYADGETVAEICRQFNARGYKTSKGTAFGKSSFTKIFRNERYIGVYTFHDYRAEDAIPAIIDKDLWDRVQLRVGKIKNAPARNKAKVVYLLSGKIFCGHCGSKMNGNCNAGNYYYYQCYGKKNGNVDCKKKNIRKEFIERLVAQDALSLLTDEYIEQIATIACEKNQHEIELDSALPTIRDRIHQVDLSLNNLLKAIESGSAPDMLVKRIGELEKEKKDLQVQAKKESEDIVELDKAQVIYWLEQFRGGSIEDEEFCRMLIDLFVNSVTVWDEDDNTYKVTVAYNLTSLPTKTYRLNKGGTLSDFTSNAPGMSANPTITGNLLIHTFHCRLKSHSWKRFWDYDTFLV

SEQ ID NO: 3084 - protein, 533 aa, Unknown
  Description of Unknown: Integrase B3085 sequence
  PTHR30461:SF3,cd00338,SM00857,G3DSA:1.10.10.2600,IPR036162, PF13408,IPR025827,G3DSA:3.40.50.1390,PS51737,IPR006119, IPR038109,PF07508,IPR011109,SSF53041,PTHR30461, PS51736,Coil,PF00239
MYEDIKTACLYVRFSSHNQTEQSIEGQTRVCRDFCKRHNIRIVEIYADRATSASKDIEKRVQFLKMIKDSEKGLFDAVIVYKLDRFARSRYDSATYKYRLKRNGVQLISATENISNDPEGIILESVLEGMAEFYSAELSQKINRGMRESAYKHNSIGGAVPLGYKIEDKKLVIDPKTAPLVKEAFEKYADGETVAEICRQFNARGYKTSKGTAFGKSSFTKIFRNERYIGVYTFHDYRAEGAVPAIIDKDLWDRVQLRAGKIKSAPARHKAKVVYLLSGKLFCGHCGSRMNGNCNASNYYYYQCYGKKNGHVDCNKKNIRKEFIERLVAQDALSLLTDEYIEQIATIACEKNQHEIELDSALPTIRDRIHQVDLSLNNLLKAIESGSAPDMLVKRMGELEKEKKDLQAQAKKESEDIVELDKAQVIYWLEQFRGGSIEDEEFCRMLIDLFVNSVTVWDEDDDTYKVTVAYNLTSLPTKTYRLNKGGTLSDFASNASGMSANPTITGNLLIHTFHCRLKSHSWKRFWDYDTFVV

SEQ ID NO: 3085 - protein, 533 aa, Unknown
  Description of Unknown: Integrase B3086 sequence
  PTHR30461:SF3,cd00338,SM00857,G3DSA:1.10.10.2600,IPR036162, PF13408,IPR025827,G3DSA:3.40.50.1390,PS51737,IPR006119, IPR038109,PF07508,SSF53041,IPR011109,PTHR30461, PS51736,Coil,PF00239
MKSKNKQYIRKAVAYARFSSNNQREESIDAQLRAISDYCEREHIQLVDIFSDEAQSAKSDNRDDFKNMTDAIFKGNYDIDAVLVHKFNRFARNKYDSALYKKRLRDIGIKVVSVTQPIDDSPEGRILESMIEAMDEYYSENLALEVKKGLKENALKGKHTGGGKLLGLSVDSEGYYYPNEQAPIVRRIFSEFANGVPKTKIVERLNREGHRNQYGRKFNTRTILDLLQNEKYIGNFVYQHSVTETIRLDGIIKNPIVDYELWEQVQSKRKSHHKPKQRKRNYFMTGKLRCGICGFTYCGSGSKRTSKKGNSLAAYYKCSGKTKHKNSCTNTSLNKEFYEQLVINTIIENILTDNAINDIAVKTYEQLEKERKEPLIPTKKLKSQLEAIRKKQEKLMELFLDGGIDKDLLDTKNSSLKDEKRHIESQIDKNEYLENSNSLTVEDVSKFIKVFVNELKEMPDIEFSQIVYNTFVDNIVIYPDRLEIALKVDFSTLYRGDKVNFRGAICSLAPVIVDKTVKRKSHQQSAKQRGLKR

SEQ ID NO: 3086 - protein, 533 aa, Unknown
  Description of Unknown: Integrase B3087 sequence
  PTHR30461:SF3,cd00338,SM00857,G3DSA:1.10.10.2600,IPR036162, PF13408,IPR025827,G3DSA:3.40.50.1390,PS51737,IPR006119, IPR038109,PF07508,IPR011109,SSF53041,PTHR30461, PS51736,Coil,PF00239
MYEDIKTACLYVRFSSHNQTEQSIEGQTRVCRDFCKRHNIRIVEIYADRATSASKDIEKRVQFLKMIKDSEKGLFDAVIVYKLDRFARSRYDSATYKYRLKRNGVQLISATENISNDPEGIILESVLEGMAEFYSAELSQKINRGMRESAYKHNSIGGAIPLGYKIEDKKLVIDPKTAPIVKEAFEKYADGETVAEICRQFNARGYKTSKGTAFGKSSFTKIFRNERYIGVYTFHDYRAEDAIPAIIDKDLWDRVQLRVGKIKNAPARNKAKVVYLLSGKIFCGHCGSKMNGNCNAGNYCYYQCYGKKNGNVDCKKKNIRKEFIERLVAQDALSLLTDEYIEQIATIACEKNQHEIELDSALPTIRDRIHQVDLSLNHLLKAIESGSAPDMLVKRMGELEKEKKDLQAQAKKESEDIVELDKAQVIYWLEQFRGGSIEDEEFCRMLIDLFVNSVTVWDEDDNTYKVTVAYNLTSLPTKTYRLNKGGTLSDFASNAPGMSANPTITGNLLIHTFHCRLKSHSWKRFWDYDTFVV

SEQ ID NO: 3087 - protein, 533 aa, Unknown
  Description of Unknown: Integrase B3088 sequence
  PTHR30461:SF3,cd00338,SM00857,G3DSA:1.10.10.2600,IPR036162, PF13408,PS51737,G3DSA:3.40.50.1390,IPR025827,IPR006119, IPR038109,PF07508,IPR011109,SSF53041,PTHR30461, PS51736,Coil,PF00239
MYEDIKTACLYVRFSSHNQTEQSIEGQTRVCRDFCKRHNIRIVEIYADRATSASKDIEKRVQFLKMIKDSEKGLFDAVIVYKLDRFARSRYDSATYKYRLKRNGVQLISATENISNDPEGIILESVLEGMAEFYSAELSQKINRGMRESAYKHNSIGGAVPLGYKIEDKKLVIDPKTAPIVKEAFEKYADGETVAEICRQFNARGYKTSKGTAFGKSSFTKIFRNERYIGVYTFHDYRAEDAIPAIIDKDLWDRVQLRVGKIKNAPARNKAKVVYLLSGKIFCGHCGSKMNGNCNAGNYYYYQCYGKKNGNVDCKKKNIRKEFIERLVAQDALSLLTDEYIEQIATIACEKNQHEIELDSALPTIRDRIHQVDLSLNNLLKAIESGSAPDMLVKRMGELEKEKKDLQVQAKKESEDIIELDKAQVIYWLEQFRGGNIEDEEFCRMLIDLFVNSVTVWDEDDNTYKVTVAYNLTSLPTKTYRLNKGGTLSDFTSNAPGMSANPTITGNLLIHTFHCRLKSHSWKRFWDYDTFVV

SEQ ID NO: 3088 - protein, 533 aa, Unknown
  Description of Unknown: Integrase B3089 sequence
  SM00857,G3DSA:1.10.10.2600,IPR036162,PF13408,PS51737, G3DSA:3.40.50.1390,IPR025827,IPR006119,IPR038109,PF07508, SSF53041,IPR011109,PTHR30461,PS51736,cd00338, PF00239
MQQYCLYLRKSRADAEAEARGEGETLARHERTLLELAKRQQLNVTEIYKEIVSGESLAARPVMQRLLSEVEHGIWAGVLVMEVERLARGDTTDQGIVAQTFKFSNTLIITPTKTYDPENEFDEEYFEFGLFMSRREYKTINRRLQRGRIASIKEGKFVGNKSPYGYERVKIKGDKGFTLKIVPEEAEIVKLIYEWYTHGVLQEDGSYRKIGCELIAQKLNQMKAPTRTGADWILPTVRDMLRNPVYTGKVRWNWRQTVKKMVDGKITKTRPRNDNVLIFKALHEPIISDEVFEAAQNIMSKNPPRPVVDSKRIQNPLAGIVICGICGKPMVRRPYQRPYPDTLMCPRAKCPNVSSDLRRVEQRVISALEVWLEQYKLEWESKDVSPAVKQSEVLKKSFEAQQAEIDKLYKQLSKTHDFLEQGVYNTETFLERSRSISERINIAKESLPKIQSQIDAETAKENNLINVIPKAEKLLETYYTLPTAESKNTMLKEVLEKVVYVKTKRCRKKTDSRDDFEITIFPKIPSQDSRPPA

SEQ ID NO: 3089 - protein, 533 aa, Unknown
  Description of Unknown: Integrase B3090 sequence
  SM00857,G3DSA:1.10.10.2600,IPR036162,PF13408,PS51737, G3DSA:3.40.50.1390,IPR025827,IPR006119,IPR038109,PF07508, IPR011109,SSF53041,PTHR30461,Coil,PS51736, cd00338,PF00239
MAKPEVSELAVVYARYSSHSQGEQSIEGQLSNARDYAAAHGYTIVHEYVDRAKSGRTDNRAEFQQMLKDTAKRQFSVIILWKVDRFGRNREEIAINKMKCRKNGVRVEYVAETIPDSPEGVILESVLEGFAEYYSLQLSQNIRRGRAESAEKCQSLGGNRPLGYKTGPDKKFVIDENTAPTVKMIFTMYADGKTVTEIVDKLNEMGLRTLRGGPFTKNSLHSILKNKKYIGVYEYQGREIKDGVPRIIEDDVFNKVQEMLKINKRAPAKTWSRADYILTDKLFCGKCGALMFGESGTSKTGVKHNYYICSNKKRFRSCDKKAVRQADIEDAVLNATHELLQDDELLDYIVDRTWEYYLAQDNSQEELRNLQRQLAQTDTAISNLIRAIEAGILTEETKKRMDELTQQKADLKASIADREIARGFHLQKSHIAFYLRSLRDADWSDKEAQKRLIQTFVNAVFVYDDHITLTYNFSGDKSTITLRDMQRFEDGEEFGCRASRSTKQVLDEHLFLQRRLRREVFALIHNRKAPSWK

SEQ ID NO: 3090 - protein, 533 aa, Unknown
  Description of Unknown: Integrase B3091 sequence
  PTHR30461:SF3,cd00338,SM00857,G3DSA:1.10.10.2600,IPR036162, PF13408,IPR025827,G3DSA:3.40.50.1390,PS51737,IPR006119, IPR038109,PF07508,IPR011109,SSF53041,PTHR30461, PS51736,Coil,PF00239
MARKRINTPEATGVIYARFSSHNQREESIEQQVAECNTFALASGIKIVGVYSDSAKTGRTDRRPQFQKLQREAQKGEFDYIIAYKSNRIARNILNALMFENEMEKLGIKVVYAKEEFGNNAAGRFALRTMMNVNQFFSENMAEDIKRNQADNALNCRANGPAPYGYKTGADGKFVIDEMRAPIVQEIFNRTANAEKFVEISEDLNRRGIKTKNGNEWGKSSFFTILHNERYTGVYIFNDVRIEGGMPVIIERSLFDRVQKIMKTKKNPQGRKRADDGIYLLTGKLFCGKCKSHMIGMSGTSKNGDSHYYYICNEKRTNGTCDKKAVRRNFLENEIAKAIRRYILQPNVMEWIVQQVLSFQKGDVRQVEIANMQERHKEVKKAIANVMIAIDQGIITASTKEHLQDLESERAQLDARILVAQSEAGKAVTRESLLAYLEHFRAANVEDKECQKELFDTFVKAVYLYDDHITLIFDINDGTTEDVEISMDEVEQSLCENVRLNSVVGHQTASCRSQILGRASICLASFHDGVIRS

SEQ ID NO: 3091 - protein, 533 aa, Unknown
  Description of Unknown: Integrase B3092 sequence
  PTHR30461:SF3,IPR036162,PS51737,IPR011109,PTHR30461, PF00239,G3DSA:1.10.10.2600,IPR006119,SSF53041,cd00338, SM00857,IPR025827,IPR038109,PS51736,mobidb-lite, PF13408,G3DSA:3.40.50.1390,PF07508,Coil
MKKRINTNSAARAVIYARYSSANQRDCSIEQQVEKCRELAAREGVTVIEIYADRAISGKTDRRPNFQRMMKDASLRQFDVVLAWKSNRMGRNMLQAMMNEEQLRSNGIRTIYAEEDFDDTAAGRFALRNMMNVNQFYSENMAEDISRGLMDNASKCMSNGSLPLGYKTGKDQKVVLDEAEAAIVQEIFTRVSCYEPFIDIARDLNRRGIKTKKGAEWGRSSFHTICRNERYRGIYIYRDIRVEGGMPRIVSDELFYKVQEVLKVKKNPQGRRKRSGYEEYLLTGKLYCGHCGSPMTGIAGTSKTGAMHYYYTCQKRRTEHSCDKKAVRRDQIEKAVAIAIQQQLLTDENILWMVDQTMAYNAKTEIEYRLQGLRDQLNANKTATANLLKAIEMGIITDTTKARLLELEQEQGCLLAKIDAAKSEMVPIEREDLIAILTRYRKGSLDDKKYLAALFDTFLVRVDLYDDHLKITFDPTGGKTPVDIPIGVEDSPESPGDSPDSADFSVPSQDAEKVRFDSSQLHQTRAKRTQDNR

SEQ ID NO: 3092 - protein, 533 aa, Unknown
  Description of Unknown: Integrase B3093 sequence
  SM00857,G3DSA:1.10.10.2600,IPR036162,PF13408,PS51737, G3DSA:3.40.50.1390,IPR025827,IPR006119,IPR038109,PF07508, IPR011109,SSF53041,PTHR30461,Coil,PS51736, cd00338,PF00239
MAKPEVSELAVVYARYSSHSQGEQSIEGQLSNARDYAAAHGYTIVHEYVDRAKSGRTDNRAEFQQMLKDTAKRQFSVIILWKVDRFGRNREEIAINKMKCRKNGVRVEYVAETIPDSPEGVILESVLEGFAEYYSLQLSQNIRRGRAESAEKCQSLGGNRPLGYKTGPDKKFVIDENTAPTVKMIFTMYADGKTVTEIVDKLNEMGLRTLRGGPFTKNSLHSILKNKKYIGVYEYQGREIKDGVPRIIEDDVFNKVQEMLKINKRAPAKTWSRADYILTDKLFCGKCGALMFGESGTSKTGVKHNYYICSNKKRFRSCDKKAVRQADIEDTVLNATHELLQDDELLDYIVDRTWEYYLAQDNSQEELRNLQRQLAQTDTAISNLIRAIEAGILTEETKKRMDELTQQKADLKASIADREIARGFHLQKSHIAFYLRSLRDADWSDKEAQKRLIQTFVNAVFVYDDHITLTYNFSGDKSTITLRDMQRFEDGEEFGCRASRSTKQVLDEHLFLQRRLRREVFALIHSRKAPSWK

SEQ ID NO: 3093 - protein, 533 aa, Unknown
  Description of Unknown: Integrase B3094 sequence
  PTHR30461:SF3,SM00857,G3DSA:1.10.10.2600,IPR036162,PF13408, IPR025827,G3DSA:3.40.50.1390,PS51737,IPR006119,IPR038109, PF07508,SSF53041,IPR011109,PTHR30461,mobidb-lite, cd00338,PF00239
MPRKPAKHPAKPKRGKKLEVEEPGVLYGRYSSHNQKDISIEQQFEKCYELAAEYGIRIIDTYADRAVSGRTDKRVDFQRMMADAAKGKFRYVLAWKSNRIGRNMLEALVNEARFQELGVRVLYVEEDFDDTAAGRFAARSMMNVNQFYSENMAEDIKRGLYDNAANCMVTNGHLPYGYKADETLHYAIDEPRAAVIREIFTRVSCGEAFVDIMSSLNARGITTSYGRPWGRSSFQKILSNERYRGIYIYGDVRIEGGIPRIVSDELYFKVQEAITTKKNPQGRHRVNGDYLLTGKLFCGHCKSPMTGISGTGRAGKLHFYYVCQKRRTEKTCHKKNVRRDVIELKIAKAIRDYALKDDIIEWIADSCVEDHDRRVSESHLSVFEDQLAEVNRSIKNVMSAIEKGIITETTKGRLMELEAERTAIEGKICAAKAAIVPTNRERLVEWLRSLREGDVHDKKYQAGLFDTFLVAAYLYDDNRVKIVFSFAGDKNTIEIPLEDVIDSIDDEASCVRLSSTLSHQERVDESQLVLFVL

SEQ ID NO: 3094 - protein, 533 aa, Unknown
  Description of Unknown: Integrase B3095 sequence
  SM00857,G3DSA:1.10.10.2600,IPR036162,PF13408,PS51737, IPR025827,G3DSA:3.40.50.1390,mobidb-lite,IPR006119,IPR038109, PF07508,IPR011109,SSF53041,PTHR30461,Coil, PS51736,cd00338,PF00239
MKAVIYARYSSDNQREESIEGQVRECQSFAERKGYTVIRTYIDRALSGTRADNRPQFQQMISDSTLREFQYVIVWKIDRFSRDKFDSVKYKYALKSSGVSVISATEPIDGSPEGQMMESVFEGISVYYIKDLAQKTSRGMTENAIKGKFNGGTLTFGYTIDENHHFQLDPVNAPIVLDVFTRYSEGETIHSILDDINSKMSNNGRKFTYHFLNWMLNNRRYLGEYKFQDTVNNEAIPPIISQELFDKCQHRLNVNKHKAGSFKKNKEKYLLTGKIFCGICGATISGISGTGKCKSIYRYYKCMNVKKHKCNKKPVQKELIENIVLNAALDIFKDKALIRKISKACFDLQSKESPMLPALKRRLRENQKEIKNLMNAIKAGIVLKTTKSELEKLEAEQEQLEINIAMEKLVKPVIPQEKIQAWLMNFAAADLSDQSQKQRIIDIFVNSVYVYDDRVVIFFNYKDGERYVDFSTLDDLENPAGSNEKKTNTHENECSPLIKSGDPSGNRTRDTLIKSQRKIMPVNGSAMRFRCLN

SEQ ID NO: 3095 - protein, 533 aa, Unknown
  Description of Unknown: Integrase B3096 sequence
  SM00857,G3DSA:1.10.10.2600,IPR036162,PS51737,G3DSA:3.40.50.1390, IPR006119,IPR038109,PF07508,IPR011109,SSF53041, PF00239,PTHR30461,PS51736,Coil,cd00338
MELNRTGRYVMYLRKSRKDDEYGAASNEDVLARHEQLLRDTAKRNKIIVSAIYREVRSGDSISARPMMQQLLSELADGHWDGVLVVEIERLARGDTIDQGIVARAFQDSGAMIITPIKIYDPNDEYDEEYFEFGLFMSRREYKTIKRRMQRGRVAASKEGKFCGNKTPYGYKREKLSGESGFQLVPDPEEAEVIRKIYDWYVNGIPQPSGSRTMAGMAAIAHQLTAEGYAPRFTSVWSHNTVSDLLKNPVYIGKITWGKNKTIDCLQEDGTLRFRDHRQSSANVFDGRHEPLITEDLYFAAQRRRHSSPHSHTHYVADCSNALTGLIRCKYCGRNLFYRKASARSPKDIMLCGNHECLNIGCFYDVLEARIIDAIRMYADQNSKPVKKPKHDGSLQTSINRIQKELDASATQLDRIYTAYERGVYADDVFLERSSSVKKKISDLQRTLKDLQDQEAKQKQADQEQINMIPKMRHLVETYWTLSTPSDRNAALKEVIDHIEYEKHKKSPKGGPFDNFSLVIYPRLFSSPFYFNN

SEQ ID NO: 3096 - protein, 532 aa, Unknown
  Description of Unknown: Integrase B3097 sequence
  PTHR30461:SF3,SM00857,G3DSA:1.10.10.2600,IPR036162,PF13408, PS51737,G3DSA:3.40.50.1390,IPR025827,IPR006119,IPR038109, PF07508,IPR011109,SSF53041,PF00239, PTHR30461,PS51736,Coil,cd00338
MRVSVNLNAQKPDTTTNAVIYARYSSHGQTEQSIEGQLAKGHEYAAAQGYTVVHEYIDRAMTGRNDNREAFQKMLSDTGKHQFQVIIVWKVDRFGRNREEIAFNKHTCKKNGVRVEYVAESLPNSPEAVILESVLEGMAEYYSIQLSQNIRRGQLESAKKCQCVGGSVPLGYTLDSDKHFVIDPQTAPVVKKIFDLYAEGATISEITGQLNEQGIRTIRKQLFTKNSLTKLLKNEKYIGVYTYKDIVRVEGGVPAIVDKSTFDRVQELLKINRRAPSHTWTKVEYLLTDKLFCGHCGSPMVGESGFSHTGAKYSYYGCIKRRREKACDKKPVRQDWIEALVLDETVKLLHDDELMEYIIDRTWEYYQVTDKVQEEKAVLEAQLAEVDKAINNLVRAIEAGIFNAATKSRMDELDAQKAALTASLADLELTSGIRITRDHIEYFLLRLRDLDVKDRECQKRLVQTFVNAVFIYDDGRVKITYNYSGQSSTITLNQIASAEKGKGFVCCLPCSTSQEKSEPDSGWKRVRISLFL

SEQ ID NO: 3097 - protein, 532 aa, Unknown
  Description of Unknown: Integrase B3098 sequence
  PTHR30461:SF3,SM00857,G3DSA:1.10.10.2600,IPR036162,PF13408, PS51737,IPR025827,G3DSA:3.40.50.1390,IPR006119,IPR038109, PF07508,IPR011109,SSF53041,PTHR30461,Coil, PS51736,cd00338,PF00239
MQRPHGAYILARYSTDSQNPDSIEVQVDKCSEWCRTNRLPVLGVYADFAVSGMRDDRPQYRRMMEELRLGGADTVVVYDQSRMFRKMTAWFEFRDELASLGVSVASATQPMVGGDLRDPANFLAEGTTALFNQMWVLQTRQKVIAKMRYMARSAQHTGGTPPLGYCVKAGRLEIAPEEADVVRRIFGEYASGRSYREIIEGLNRDGIRTKRGGTFGSNSLHDLLRNPKYIGVLEYGHTCKRPDGKRNTHGSAPSDLIRVEGAVPAIVDHAIFEEVQRRMANNKRVQGGRPSERREYPLRGKVFCAECKTAMVVSISKGRYTYYSCGARHRLHTCDNMPIKVEDLESRVAEAVRTVLGDPSNSAALIRILREEAGAILAGAAGRLADLIARKSSVATQLGHAVDAILGGLDSPALRKKIEALEQEQAELERDMQVLRRQVDASAIPEDRLRELLATITASGDTAALLSVVARVEVSREDITVWTILDTDPGGKVHTDLTDAGISVPIIPGVAPPAPRVIITAAGALCIKFART

SEQ ID NO: 3098 - protein, 532 aa, Unknown
  Description of Unknown: Integrase B3099 sequence
  PTHR30461:SF3,SM00857,G3DSA:1.10.10.2600,IPR036162,PF13408, IPR025827,G3DSA:3.40.50.1390,PS51737,IPR006119,IPR038109, PF07508,SSF53041,IPR011109,PTHR30461,Coil, PS51736,cd00338,PF00239
MPQKFKIDLSMLTPEEQQQFRDDPTTLTKGEVDVALYLRFSSERQKEQSIEGQLRDCIAYCKRKSFRIVAIYVDRATTARKDVEKRVHFQEMISDSAHHLWNFVVVWKLDRFARNREDSAVFKMRLRKNGVRVKSATETISDNPEGIILESVLEGIAEYYSADLSQKITRGLRESAMKGHCVGGHVPLGYKIEDHRLVINPETAHIVQEAFQLYANGESVAEICRIFNGKGYRTAKNSEFNRSSFKSIFKNVRYIGTYIYKDIEKENAIPAIIDKDLFETVQRRLSLAADAPARGKAKVDYLLSGKLFCGHCGAAMHGESGTSKTGAIHNYYTCYSRKRRKGCNKKPLKKDFIERVVAQDAMALLTDDVIEELADMAMSQADRDLKENTRIPELSARLTEIEQGINNITKAVEKGIASDALLNRLTELEKEKKDLTSQLREEEKYIYRIDRDQVVFWLTKFQGGDIEDEDCRRRIIDLLVNSVTVWDEPDGYKITTAYNLTSCKTKTFRVSNNADSPSGGGFGFGELSSTRT

SEQ ID NO: 3099 - protein, 532 aa, Unknown
  Description of Unknown: Integrase B3100 sequence
  PTHR30461:SF3,SM00857,G3DSA:1.10.10.2600,IPR036162,PF13408, PS51737,G3DSA:3.40.50.1390,IPR025827,IPR006119,IPR038109, PF07508,IPR011109,SSF53041,PF00239,PTHR30461, Coil,cd00338
MTRNNNRVCCLYRVSTDKQVDFNSNHEADLPMQRKACHKFAESKGWVIVHEEQEEGVSGHKVRAAARDKLQIIKDYARKGKFDILLVFMFDRIGRIADETPFVVEWFVRNGIRVWSTQEGEQRFDNHTDKLLNYIRFWQADGESEKTSVRTRTSLRQLVEEGHFKGGNAPYGYDLVRSGRINKRKHELYELHINEQEAAVVRIVFDKYVYEGYGPQHIATYLNNSGYRARSGKCWHPSSIRGMVQNLTYTGVLRCGDARSELMPDLQIVPQEQFENAQRIRNERSVRSTAEAENRLPLNIHGKSLLAGNAYCGHCGAKLELTSSRKWRKMADGSLDDTLRIRYTCYGKLRKQTNCTGQTGYTVHILDEIIDKAVRQIFSKMRGIPKEQIVTKRYEKENAERKNHLQDLQTQRNKAEKDLFALKTEVLACIKGESVLPRETLAEMITAQEEKLTELENLCEAASEELEKTAELMDKVSRLYDELISYADLYDSANFEAKKMIVNQLIRRVDVYRGYQINISFNFDLTPYIEGE

SEQ ID NO: 3100 - protein, 532 aa, Unknown
  Description of Unknown: Integrase B3101 sequence
  PTHR30461:SF3,IPR036162,PS51737,IPR011109,PTHR30461, PF00239,G3DSA:1.10.10.2600,IPR006119,SSF53041,cd00338, SM00857,IPR025827,IPR038109,PS51736,mobidb-lite, PF13408,G3DSA:3.40.50.1390,PF07508,Coil
MQQALNAVIYARYSSHSQQEQSIEGQLRDCYAYAQREGLHVVGEYIDRAISGKTDERPDFQRMIVDASKKQFQRVIVWKLDRFARNRYDSAHYKAKLKKYGVKVVSATENISDEPEGIILEGLLESMAEYYSANLSKHVRRGQRESIINGTYLGGVPPIGYKVENKRLVIDERTAPTIRYMFEQYAKGVPKREIIAELNARGIRNKKGKPLTLSSMQAALRNEKYIGIYRYSGQEVTGGCEALIDEATFRKVQERLDKVKHAPAAAKAKIDYLLQGKAFCGYCGSRMVGESGRGKMGNTYHYYACGKRKKEHTCAKKNEKKDFIEWYVVEQTVEYVLTPDRMDYIAAALVAQYEKDFGDNRIKDYEKQLERINGEIRSLVDTLAVCPPSARQPIFDKMELLDVQKTDLEIDIAKLRVAARVQLTEEQIKVWLKQFCKGDLDDMEFRERIIDVFINSVYLYDDKTVIYYNIEGGKQVSYMEMLDSTEEPPFADDPQGSSGVRISNDTPRHYNSNPNAPRYIFVNGLFGIICKR

SEQ ID NO: 3101 - protein, 532 aa, Unknown
  Description of Unknown: Integrase B3102 sequence
  PTHR30461:SF3,SM00857,G3DSA:1.10.10.2600,IPR036162,PF13408, IPR025827,G3DSA:3.40.50.1390,PS51737,IPR006119,IPR038109, PF07508,SSF53041,IPR011109,PF00239,PTHR30461, PS51736,Coil,cd00338
MKAAIYARFSSHNQREESIEGQVRACKRFAKEHGMTIVEIYADRGLSGLHADNRPEFQRMIQDSDHHRFEALIMWNLDRFSRDKYDTAVYKTRLKKNGVSLYYSDQSIPDTPEGIILESLLEGFAQYYSANLARNAKRGLQENARKCLWNGGCVPLGYLIDEHQRFVLEPIGAACVRMIFELYASGQSIKSIVSTLNEKGYKTVKGNHFRLGSIQGILRNRKYIGEYHASGITVPNGIPAIVDVQLFNDVQARLGVIASAKAHNKADIPYLLTTKVFCGHCGSPMIGESGTGKGGATYRYYKCSCRKNRKGTCDKKTEPKDWLEENVVKQTVKNVLRPEVIKEISENCAAALKADASDESLVQALKAQLAETDKALRNLLKAIEAGIISSTTRERMAELESQKSELEAQIAREQLRKPEITAEQISFWLESFLAGDIHDPKYQERIINALVRRVDVYDDGPEKQKLTVFYNITKNNHSSSKISISKCSDIECIALPKRSVAKAADFFICFLHLPLPRRPLCNGAPNHAQPRC

SEQ ID NO: 3102 - protein, 532 aa, Unknown
  Description of Unknown: Integrase B3103 sequence
  PTHR30461:SF3,IPR036162,PS51737,IPR011109,PTHR30461, PF00239,G3DSA:1.10.10.2600,IPR006119,SSF53041,cd00338, SM00857,IPR025827,IPR038109,PS51736,mobidb-lite, PF13408,G3DSA:3.40.50.1390,PF07508,Coil
MQQALNAVIYARYSSHSQQEQSIEGQLRDCYAYAQREGLQVVGEYIDRAISGKTDERPDFQRMIADASKKQFQRVIVWKLDRFARNRYDSAHYKAKLKKYGVKVVSATENISDEPEGIILEGLLESMAEYYSANLSKHVRRGQRESIINGTYLGGVPPIGYKVENKRLVIDERTAPTIRYMFEQYAKGVPKREIIAELNARGIRNKKGKPLTLSSMQAALRNEKYIGIYRYSGQEVTGGCEALIDEATFRKVQERLDKVKHAPAAAKAKIDYLLQGKAFCGYCGSRMVGESGRGKMGNTYHYYACGKRKKEHTCAKKNEKKDFIEWYVVEQTVEYVLTPDRMDYIAAALVAQYEKDFGDNRIKDYEKQLERINGEIRSLVDTLAVCPPSARQPIFDKMELLDVQKTDLEIDIAKLRVAARVQLTEEQIKVWLKQFCKGDLDDMEFRERIIDVFINSVYLYDDKTVIYYNIEGGKQVSYMEMLDSAEEPPFADDPQGSSGVRISNDTPRHYNSNPNAPRYIFVNGLFGIICKR

SEQ ID NO: 3103 - protein, 532 aa, Unknown
  Description of Unknown: Integrase B3104 sequence
  PTHR30461:SF3,SM00857,G3DSA:1.10.10.2600,IPR036162,PF13408, IPR025827,G3DSA:3.40.50.1390,PS51737,IPR006119,IPR038109, PF07508,IPR011109,SSF53041,PTHR30461,Coil, PS51736,cd00338,PF00239
MKGVIYARYSSDKQTEQSIEGQIRECTKFAEENRIEIIKIYTDRALSGKTADREEFQQMISDSADGEFEAIVVYKLDRFARNRYDSAIYKSRLKSNGVKVLSAKENITDSPEGVILESLLEGMAEYYSLDLAQKTSRGMMENALKCRHTGGRPLLGYKLNPDKTYCIDETTAPIVRKIFEMYAQGSSYNQIIDALNKTGAKTGSGKTFGKNSIHDLLKNERYSGVYIYNRIPRDSTGKRNSHGTKEDGMIRIEGGMPAIIDRELWEEVQKKMEGNKKSPARNKAKIDYLLSGKLFCGHCGSAMVGQSSTTRGVVYPYYVCNHKVRLRTCDKKNVKKDDIEDLVIDETVHRVLADEAIDNIADQVAALSFQEGMDTSRMDHLKSQLKSTEEIIINICNAIAQGVLTPSTKKMLEEAEEKKEHLSLELEQEKVIQKNVITKEQVLFWLSQFQNGDTNDPEYRKKLVDVFINKIFVYDDKFVITYNFSGDNNTVELSDVNIALSDLSQSGPPAPQKPKIFVVKNIFGIVKRFIER

SEQ ID NO: 3104 - protein, 532 aa, Unknown
  Description of Unknown: Integrase B3105 sequence
  PTHR30461:SF3,IPR036162,PS51737,IPR011109,PTHR30461, PF00239,G3DSA:1.10.10.2600,IPR006119,SSF53041,cd00338, SM00857,IPR025827,IPR038109,mobidb-lite,PS51736, PF13408,G3DSA:3.40.50.1390,PF07508,Coil
MYEDIKTACLYVRFSSHNQTEQSIEGQTRVCRDFCKRHNIRIVEIYADRATSASKDIEKRVQFLKMIKDSEKGLFDAVIVYKLDRFARSRYDSATYKYRLKRNGVQLISATENISNDPEGIILESVLEGMAEFYSAELSQKINRGMRESAYKHNSIGGAIPLGYKIEDKKLVIDPKTAPIVKEAFEKYADGETVAEICRQFNARGYKTSKGTAFGKSSFTKIFRNERYIGVYTFHDYRAEDAIPAIIDKDLWDRVQLRVGKIKNAPARNKAKVVYLLSGKIFCGHCGSKMNGNCNAGNYCYYQCYGKKNGNVDCKKKNIRKEFIERLVAQDALSLLTDEYIEQIATIACEKNQHEIELDSALPTIRDRIHQVDLSLNHLLKAIESGSAPDMLVKRMGELEKEKKDLQAQAKKESEDIVELDKAQVIYWLEQFRGGSIEDEEFCRMLIDLFVNSVTVWDEDDNTYKVTVAYNLTSLPTKTYRLNKGGTLSDFASNAPETGAAQKSPDTPDRSRRRQSRRPIRWSGRAWASCFR

SEQ ID NO: 3105 - protein, 532 aa, Unknown
  Description of Unknown: Integrase B3106 sequence
  SM00857,G3DSA:1.10.10.2600,IPR036162,PS51737,G3DSA:3.40.50.1390, IPR006119,IPR038109,PF07508,IPR011109,SSF53041, PTHR30461,Coil,PS51736,cd00338,PF00239
MVLLDTYCIYLRKSRADAEAEARGEGETLARHEHTLCDLAKRQKLHISKIYREIVSGETIAARPQMQQLLQDVESGIYAGVLVMEVERLARGDTIDQGIVAQAFKYSGTKIVTPTKTYNPDNEFDEEYFEFSLFMSRREYKTIKRRMQAGRAAAAKEGKFVGNIPPYGYDRKKLDHDSGFMLVPNEKAKIVKIIFEWYTVGVVMPDGTRQRIGTTHIANRLHQMGIKTPRGGRWNNYSVRSILLNPVYCGVIRWGYRRGKSKLQNGVITKTRPTAEDGYIEAKGLHEPIISQDTYETAQELAHAAAKIPKVKLGGALKNPLAGIVVCRKCGKSMGRQPYTSEKYSGEMLICKNPDCRCVSSDIHIVEQRLLDSLAEWLHQYEVQWKEHTLQAAAAEPKDDQTAVLEDLRKEQAKAKAQLAKAYDLLEQEIYDTNTFVERSSILKAKIADLQDSIDHVEKSVREMSSRDDDMQKIIPKVKHILEVYSTLPDASAKNQLLKEVLEKAEYSKDHSTRWHGNPDDFDLVIFPKLPR

SEQ ID NO: 3106 - protein, 532 aa, Unknown
  Description of Unknown: Integrase B3107 sequence
  PTHR30461:SF3,cd00338,SM00857,IPR036162,PS51737, G3DSA:3.40.50.1390,IPR006119,PF07508,IPR011109,SSF53041, PTHR30461,Coil,PF00239
MEQKVAIYCRVSTQSNDQANSIDTQKSLLINYCREHGLAYDLYIDHGYSGTNIKRPKFLELMEKCSLVYVPKFDILTIDRTKEVQYKTILVKNTSRLGRDMYLLQILNMLKKVGVIVEYLEDGKSTATMDNAMDSFMIGLSTLLDRNFSEANSKKIITGMREGAKKGNLNFAKIFGYDKVDDHLVVNKAESKIVQTIFNMYTEEGKGFRRIAQELNEAGYRSKNNKPFSHNSIADIISQSKYYGNLTRNKQARSKLLKEKSVTIRPKDQWIQHNYGDIVNGEKWEKIPPLITKEQWLKAQQIRDNRAGDTRGIWKGIGNWAGKIHCKCGNNYVRNSYKDHHGKTHTYLVCYLKKTKGLRACNSINLSEEKILNVVTQDYINGLVLRQKLIQIQGITHKIRALHTEMNNYSQLDLDSVQNRLYKVKQRKQVLLDRLLDNTIDNTTYKEKAVELDEQINNLTTTINEITNNYNDINNKINQLQQKKKQVAQIKINKTYSKEDIIESIKNIYVDGNKLEIHIDINGVLFKDTLYI

SEQ ID NO: 3107 - protein, 532 aa, Unknown
  Description of Unknown: Integrase B3108 sequence
  PTHR30461:SF3,cd00338,SM00857,G3DSA:1.10.10.2600,IPR036162, PF13408,PS51737,G3DSA:3.40.50.1390,IPR025827,IPR006119, IPR038109,PF07508,SSF53041,IPR011109,PTHR30461, Coil,PF00239
MTENNNRVCCLYRVSTDKQVDFNSNHEADLPMQRKACHKFAESKGWVIVHEEQEEGVSGHKVRAAARDKLQIIKDYARKGKFDILLVFMFDRIGRIADETPFVVEWFVRNGIRVWSTQEGEQRFDNHTDKLLNYIRFWQADGESEKTSVRTRTSLRQLVEEGRFKGGNAPYGYDLTRNGRTNKRKHELYELHINEQEAAVVRIVFDKYVYEGYGPQHIATYLNNSGYRARSGKCWHPSSIRGMVQNLTYTGVLRCGDARSELMPDLQIISQQQFETAQRIRDNRSVRAAADAENRTPLNIHGKSLLSGNAYCGHCGAKLELTSSRKWRKLADGSLDDTLRVRYTCYGKLRKQTECTGQTGYTVHILDEIIDKAVRQIFSKMRGIPKEQIVTKRYEKENAERKNHLQALQAEKDKAEKDLLALKAEILACIKGESVLPRETLAEIITEQEEKLTELEALCESASDELVRKAELMDNVSKLYDELISYADLYDSANFEAKKMIVNQLIRRVDVCRGYQINISFNFDLTPYIEGE

SEQ ID NO: 3108 - protein, 532 aa, Unknown
  Description of Unknown: Integrase B3109 sequence
  PTHR30461:SF3,SM00857,G3DSA:1.10.10.2600,IPR036162,PF13408, IPR025827,PS51737,G3DSA:3.40.50.1390,IPR006119,IPR038109, PF07508,IPR011109,SSF53041,PTHR30461,Coil, PS51736,cd00338,PF00239
MTNNYTQQKKELLYDMVSGVTYVDAYCRYSSTMQDEGNSIEYQMEDIEKYCANNGLVVRKWYIDKAKSAKKVAGRDSFYEMIEDIKAGTSASALIVWKTNRAFRNAYESHKYRNFLRENNIKLISVTQNIDEDTSTGRLTTNILSDIDQYKSEETAEQVTAALRLMAKRGFYTGQPIPCGYKTVPADDNGKPRKRYAICEEESPKIIKVFKDFADGVPPSIILEYMRQEGLKTDRGKPFDYNALMRMLKNDFYIGTRRYDKKSDDPVIVENCHPALIDNKTFDGVQYMFTSRRNENSIKSRKNGKKRYYYCTGLLYCENCGGAYFGKSSGEHAYYHCSARVKRKACNGKAIRQDFLENYVLRVIKEHIFSPEAIEKIAEEALKDLQKPAGPVTSKKELTAQKTKLLTEIANLTQMRLDGEISKDVFAIMKKPKDDEIAEIEMRLHMMEQQQNAAIDKEFIVDYIGKMISHIESGDPELIKYVFENTVEKIIISDSKVEIHLAIYFNKKLHNKTLALPNYTLCKKIDRKKIIK

SEQ ID NO: 3109 - protein, 532 aa, Unknown
  Description of Unknown: Integrase B3110 sequence
  PTHR30461:SF3,SM00857,G3DSA:1.10.10.2600,IPR036162,PF13408, IPR025827,G3DSA:3.40.50.1390,PS51737,IPR006119,IPR038109, PF07508,IPR011109,SSF53041,PTHR30461,Coil, PS51736,cd00338,PF00239
MKGVIYARYSSDKQTEQSIEGQIRECTKFAEENRIEIIKIYTDRALSGKTADREEFQQMISDSADGEFEAIVVYKLDRFARNRYDSAIYKSRLKSNGVKVLSAKENITDSPEGVILESLLEGMAEYYSLDLAQKTSRGMMENALKCRYTGGRPLLGYKLNPDKTYCIDETTAPIVRKIFEMYAQGSSYNQIIDALNKTGAKTGSGKTFGKNSIHDLLKNERYSGVYIYNRIPRDSTGKRNSHGTKEDGMIRIEGGMPAIIDRELWEEVQKKMEGNKKSPARNKAKIDYLLSGKLFCGHCGSAMVGQSSTTRGVVYPYYVCNHKVRLRTCDKKNVKKDDIEDLVIDETVHRVLADEAIDNIADQVAALSFQEGMDTSRMDHLKSQLKSTEEIIINICNAIAQGVLTPSTKKMLEEAEEKKEHLSLELEQEKVIQKNVITKEQVLFWLSQFQNGDTNDPEYRKKLVDVFINKIFVYDDKFVITYNFSGDNNTVELSDVNIALSDLSQSGPPAPQKPKIFVVKNIFGIVKRFIER

SEQ ID NO: 3110 - protein, 532 aa, Unknown
  Description of Unknown: Integrase B3111 sequence
  cd00338,SM00857,G3DSA:1.10.10.2600,IPR036162,PF13408, PS51737,G3DSA:3.40.50.1390,IPR025827,IPR006119,IPR038109, PF07508,IPR011109,SSF53041,PTHR30461,PS51736, Coil,PF00239
MGKTMTEGSSALKEKRVIVIEATEQQEAKKLRVAAYARVSSDSSDQLNSFMAQMNYYSDLISTHEGWAMADIYADEGITGTSAEKRLEFQRLLSDCHKGRIDKILVKSISRFARNTKECLETIRSLKAIGVGVYFEEQNIDTAAMSGELLTAVFASIAQKESESISGNMRWSYEHRMKSGTYLPSSMPYGYTIKDKKIVVDEDQAKIVRLIFSSYLAGTNMVEIAKILNDAGVSVKNGDPQQKWSKSSISYILSNEKYIGDSLWQKTYSTDTFPVRRYVNNGEREKYYAQNTHPAIIDFKTYDAVQKLKAARKEILDNSPKKTSPLSHSIYCGHCGALFRRKMCRGIQYWECSKHAQSKNNCIIHQIPETEFHNAFLRLYHKLKLHGRPILKQMITDLQTVRERRMLWSVDIIELNKRISDLTDQDHTLSEMNKLGLVDPDIYISQSNELARKIAAAKQEKERLIGLSQDTTIPQTRELMEIIEFSPDFLPTFDSESFTGLVEKITVESNESLRITLKNGLELREKIERTIR

SEQ ID NO: 3111 - protein, 532 aa, Unknown
  Description of Unknown: Integrase B3112 sequence
  PTHR30461:SF3,SM00857,G3DSA:1.10.10.2600,IPR036162,PF13408, IPR025827,G3DSA:3.40.50.1390,PS51737,IPR006119,IPR038109, PF07508,IPR011109,SSF53041,PTHR30461,Coil, cd00338,PF00239
MTGRNDNRDEFQQMLSDCAKKQFQVVIVWKVDRIGRNREEITFNKYRMKKHGVRVEYVAENIPDSPEAVILESVLEGMAEYYSLQLSQNIRRGYRENAKKCKYAGGRVPLGYKLAEDKSFEIDPATAPIVKDIFNRYASGQTITEIITDLNAQGLRTATGSEFTKNSLRALLKNEKYIGIFDFKNGEIRIEDGVPALTDKSTFDKVQKLLVTNQRAPAHKWSKAEYLLTDKLFCGSCGGLMAGESGTSKTGAKYSYYLCTNHKRKRGCTQKAIRADWLEKYVLDTAKSIILDDKTIEFIADGTWEYYQQHERRREKVEALKGQLAEVDKALTNIMRAIESGLPFTETAKARVEELDGQKTALTSAIAEAELAYDSGLTRDHILFFLKQFQEFDYSQPQYQKRLIDTFINSIYVYPDEMTFNFNFGNESRTIKFEEMEAAKDGEVFARCAPCSTIKGLLLDRITIKARALFCCILCENKSISEHFKHLRLFRLFRRGGLFCFRGKRLFDAFHFMGIRFILVMFVERIVSYRNN

SEQ ID NO: 3112 - protein, 532 aa, Unknown
  Description of Unknown: Integrase B3113 sequence
  PTHR30461:SF3,SM00857,G3DSA:1.10.10.2600,IPR036162,PF13408, PS51737,IPR025827,G3DSA:3.40.50.1390,IPR006119,IPR038109, PF07508,IPR011109,SSF53041,PF00239,PTHR30461, Coil,cd00338
MTENNNRVCCLYRVSTDKQVDFTSNHEADLPMQRKACHKFAESKGWVIVHEEQEEGVSGHKVRAAARDKLQIIKDYARRGKFDILLVFMFDRIGRIADETPFVVEWFVRNGIRVWSTQEGEQRFDNHTDKLLNYIRFWQADGESEKTSVRTRTSLRQLVEEGHFKGGNAPYGYDLVRSGRINKRKHELYELHINEQEAAVVRIVFDKYVYEGYGPQHIATYLNNSGYRARSGKCWHPSSIRGMVQNLTYTGVLRCGDARSELMPDLQIVPQEQFENAQRIRNERSVRSTAEAENRLPLNIHGKSLLAGNAYCGHCGAKLELTSSRKWRKMADGSLDDTLRIRYTCYGKLRKQTNCTGQTGYTVHILDEIIDKAVRQIFSKMRGIPKEQIVTKRYEKENAERKNHLQDLQTQRNKAEKDLLALKTEVLACIKGESVLPRETLAEMITAQEEKLTELENLCEAASEELEKTAELMDKVSRLYDELISYADLYDSANFEAKKMIVNQLIRRVDVYRGYQINISFNFDLTPYIEGE

SEQ ID NO: 3113 - protein, 532 aa, Unknown
  Description of Unknown: Integrase B3114 sequence
  PTHR30461:SF3,SM00857,G3DSA:1.10.10.2600,IPR036162,PF13408, PS51737,G3DSA:3.40.50.1390,IPR025827,IPR006119,IPR038109, PF07508,IPR011109,SSF53041,PTHR30461,Coil, cd00338,PF00239
MTENNNRVCCLYRVSTDKQVDFNSNHEADLPMQRKACHKFAESKGWVIVHEEQEEGVSGHKVRAAARDKLQIIKDYARKGKFDILLVFMFDRIGRIADETPFVVEWFVRNGIRVWSTQEGEQRFDNHTDKLLNYIRFWQADGESEKTSVRTRTSLRQLVEEGHFKGGNAPYGYDLVRNGRINKRKHELYELHINEQEAAVVRIVFDKYVYEGYGPQHIATYLNNSGYRARSGKCWHPSSIRGMVQNLTYTGVLRCGDARSELMPDLQIVPQEQFENAQRIRNERSVRSTAEAENRLPLNIHGKSLLAGNAYCGHCGAKLELTSSRKWRKMADGSLDDTLRIRYTCYGKLRKQTNCTGQTGYTVHILDEIIDKAVRQIFSKMRGIPKEQIVTKRYEKETTERKNHLQDLQTQRDKAEKDLLSLKAEILACIKGESVFPRETLAEMITEQEEKLKELEDLCESASEELERTAELMDKVSRLYDELISYADLYDSANFEAKKMVVNQLIRRVDVYRGYQINISFNFDLTPYIEGE

SEQ ID NO: 3114 - protein, 532 aa, Unknown
  Description of Unknown: Integrase B3115 sequence
  PTHR30461:SF3,SM00857,G3DSA:1.10.10.2600,IPR036162,PF13408, PS51737,IPR025827,G3DSA:3.40.50.1390,IPR006119,IPR038109, PF07508,IPR011109,SSF53041,PTHR30461,Coil, cd00338,PF00239
MTENNNRVCCLYRVSTDKQVDFNSNHEADLPMQRKACHKFAESKGWVIVHEEQEEGVSGHKVRAAARDKLQIIKDYARKGKFDILLVFMFDRIGRIADETPFVVEWFVRNGIRVWSTQEGEQRFDNHTDKLLNYIRFWQADGESEKTSVRTRTSLRQLVEEGHFKGGNAPYGYDLVRSGRINKRKHELYELHINEQEAAVVRIVFDKYVYEGYGPQHIATYLNNSGYRARSGKCWHPSSIRGMVQNLTYTGVLRCGDARSELMPDLQIVPQEQFENAQRIRNERSVRSTAEAENRLPLNIHGKSLLAGNAYCGHCGAKLELTSSRKWRKMADGSLDDTLRIRYTCYGKLRKQTNCTGQTGYTVHILDEIIDKAVRQIFSKMRGIPKEQIVTKRYEKETTERKNHLQDLQTQRDKAEKDLLSLKAEILACIKGESVLPRETLAEMITEQEEKLKELEDLCESASEELERTAELMDKVSRLYDELISYADLYDSANFEAKKMVVNQLIRRVDVYRGYQINISFNFDLTPYIEGE

SEQ ID NO: 3115 - protein, 532 aa, Unknown
  Description of Unknown: Integrase B3116 sequence
  PTHR30461:SF3,SM00857,G3DSA:1.10.10.2600,IPR036162,PF13408, IPR025827,G3DSA:3.40.50.1390,PS51737,IPR006119,IPR038109, PF07508,IPR011109,SSF53041,PTHR30461,Coil, cd00338,PF00239
MIVTKPTQEKTLKTVYCLYRVSTKGQVDKNDIPMQKQSCREFAEHQPGWVIKKEFQEKGVSGFKVSANDRDAVQELKTAAENKEFDILLVFMFDRIGRIDNETPFVVEWFIQHGIEVWSVNEGEQRMDSHVDKLMNYIRFWQANGESQKTSMRVKTRLHQLVEDGIYTGGCAPFGYRLVKSGVVNKRGKELLTLEIDPIEKEMVKTIFEKTVKDGYGSYVMAQYVNDRKTLTHNGAKFQSNTIKRILQNPIYCGYYNRGGVTSKRVKELQIIDDAVFDEAQKILEQRKYTNEKKTQLARTAKSSTMLGGNIYCAHCGKKLCANSFVDRYTTKDGTTHDGGRRFRYLCSGKAMKRNECDGQSVYSAAKVDEIVLDALHKCFDKIKATPKDAAIEKKYRTQISQIKTEIKRLNKETETLKRKLGELTEEIANSLMGDSKFTPDVLSMAIETTKGKIADNVQRIAEKQNQLNDKETDMSKIDYYYEEFVSWADEFDNAPAERQRMIICKLFKEILVGKGYSVQILMDSSYEQFLI

SEQ ID NO: 3116 - protein, 532 aa, Unknown
  Description of Unknown: Integrase B3117 sequence
  PTHR30461:SF3,SM00857,G3DSA:1.10.10.2600,IPR036162,PF13408, PS51737,G3DSA:3.40.50.1390,IPR025827,IPR006119,IPR038109, PF07508,SSF53041,IPR011109,PTHR30461,Coil, PS51736,cd00338,PF00239
MPQKFKIDLSMLTPEEQQQFRDDPTTLTKGEVDVALYLRFSSERQKEQSIEGQLRDCIAYCKRKSFRIVAIYVDRATTARKDVEKRVHFQEMISDSAHHLWNFVVVWKLDRFARNREDSAVFKMRLRKNGVRVKSATETISDNPEGIILESVLEGIAEYYSADLSQKITRGLRESAMKGHCVGGHVPLGYKIEDHRLVINPETAHIVQEAFQLYANGESVAEICRIFNGKGYRTAKNSEFNRSSFKSIFKNVRYIGTYIYKDIEKENAIPAIIDKDLFETVQRRLSLAADAPARGKAKVDYLLSGKLFCGHCGAAMHGESGTSKTGAIHNYYTCYSRKRRKGCNKKPLKKDFIERVVAQDAMALLTDDVIEELADMAMSQANRDLKENTRIPELSARLTEIKQGINNITKAVEKGIASDALLNRLTELEKEKKDLTSQLREEEKYIYRIDRDQVVFWLTKFQGGDIEDEDCRRRIIDLLVNSVTVWDEPDGYKITTAYNLTSCKTKTFRVSNNADSPSGEGFGFGELSSTRT

SEQ ID NO: 3117 - protein, 532 aa, Unknown
  Description of Unknown: Integrase B3118 sequence
  PTHR30461:SF3,IPR036162,PS51737,IPR011109,PTHR30461, PF00239,G3DSA:1.10.10.2600,IPR006119,SSF53041,cd00338, SM00857,IPR025827,IPR038109,PS51736,mobidb-lite, PF13408,G3DSA:3.40.50.1390,PF07508,Coil
MQQALNAVIYARYSSHSQQEQSIEGQLRDCYAYAQREGLHVVGEYIDRAISGKTDDRPDFQKMIADASKQQFQRVIVWKLDRFARNRYDSAHYKAKLKKYGVKVISATENITDAPEGIILEGLLESMAEYYSANLSKHVRRGQRESIINGTYLGGVPPIGYKVENKRLVIDERTAPTIRYMFEQYAKGVSKREIIAELNARGIRNKKGKPLTLSSMQAALRNKKYIGVYLYNGQEVAGGCEALIDEATFYKVQERLDKVKHAPAASKAKIDYLLQGKAFCGYCGTRMVGESGRGKMGNTYHYYACGKRKKEHTCNKKNEKKDFIEWYVVEQTVEYVLTPDRMDYIAAALVAQYEKDFGDNHIKDYEKQLERVNAEISSLVDTLAVCPPAARKPIFDKMELLDVQKTDLEIDIAKLHVAARVQLTEEQIKTWLKTFCKGDLDDMEFRERIIDVFINSVYLYDDKTVIYYNIEGGKQVSYMEMLDSTEEPPFADDLQGSSGVRISNDTPRHYNSNPNAPRFIFVNGLFGIICKR

SEQ ID NO: 3118 - protein, 532 aa, Unknown
  Description of Unknown: Integrase B3119 sequence
  PTHR30461:SF3,cd00338,SM00857,G3DSA:1.10.10.2600,IPR036162, PF13408,PS51737,G3DSA:3.40.50.1390,IPR025827,IPR006119, IPR038109,PF07508,IPR011109,SSF53041,PTHR30461, PS51736,Coil,PF00239
MYEDIKTACLYVRFSSHNQTEQSIEGQTRVCRDFCKRHNIRIVEIYADRATSASKDIEKRVQFLKMIKDSEKGLFDAVIVYKLDRFARSRYDSATYKYRLKRNGVQLISATENISNDPEGIILESVLEGMAEFYSAELSQKINRGMRESAYKHNSIGGAVPLGYKIEDKKLVIDPKTAPIVKEAFEKYADGETVAEICRQFNARGYKTSKGTAFGKSSFTKIFRNERYIGVYTFHDYRAEDAIPAIIDKDLWNRVQLRVGKIKNAPARNKAKVVYLLSGKIFCGHCGSKMNGNCNAGNYYYYQCYGKKNGNVDCKKKNIRKEFIERLVAQDALSLLTDEYIEQIATIACEKNQHEIELDSALPTIRDRIHQVDLSLNNLLKAIESGSAPDMLVKRMGELEKEKKDLQVQAKKESEDIIELDKVQVIYWLEQFRGGNIEDEEFCRMLIDLFVNSVTVWDEDDNTYKVTVAYNLTSLPTKTYRLNKGGTLSDFTSNAPAKQGIKACTVCPTVLGRHPEPGLCFHFPWNQRWNNI

SEQ ID NO: 3119 - protein, 532 aa, Unknown
  Description of Unknown: Integrase B3120 sequence
  PTHR30461:SF3,SM00857,G3DSA:1.10.10.2600,IPR036162,PF13408, IPR025827,G3DSA:3.40.50.1390,PS51737,IPR006119,IPR038109, PF07508,SSF53041,IPR011109,PF00239,PTHR30461, PS51736,Coil,cd00338
MRVSVNLNAQKPDTTTNAVIYARYSSHGQTEQSIEGQLAKGHEYAAAQGYTVVHEYIDRAMTGRNDNREAFQKMLSDTGKHQFQVVIVWKVDRFGRNREEIAFNKHTCKKNGVRVEYVAESLPNSPEAVILESVLEGMAEYYSIQLSQNIRRGQLESAKKCQCVGGSVPLGYTLDSDKHFVIDPQTAPVVKKIFDLYAEGATISEITGQLNEQGIRTARKQLFTKNSLTKLLKNEKYIGVYTYKDIVRVEGGVPAIVDKSTFDRVQELLKINRRAPSHTWTKVEYLLTDKLFCGHCGSPMVGESGFSHTGAKYSYYGCIKRRREKACDKKPVRQDWIEALVLDETVKLLHDDELMEYIIDRTWEYYQVTDKVQEEKAVLEAQLAEVDKAINNLVRAIEAGIFNAATKSRMDELDAQKAALTASLADLELTSGIRITRDHIEYFLLRLRDLDVKDRECQKRLVQTFVNAVFIYDDGRVKITYNYSGQSSTITLNQIASAEKGKGFVCCLPCSTSSPRFPRGVAAFFCFGENRV

SEQ ID NO: 3120 - protein, 532 aa, Unknown
  Description of Unknown: Integrase B3121 sequence
  PTHR30461:SF3,cd00338,SM00857,G3DSA:1.10.10.2600,IPR036162, PF13408,IPR025827,PS51737,G3DSA:3.40.50.1390,IPR006119, IPR038109,PF07508,IPR011109,SSF53041,PTHR30461, PS51736,Coil,PF00239
MKKKQPNTRHGRAAIYARYSSHNQREASIEQQVKACRELAVRLGLDVVETYEDKAISGKSDRRPSFQRLLRDAEKGYFDCVLAWKSNRMGRNMLQAMTNEARLKDWGVRTFYAEEDFDDTAAGRFALRNMMNVNQFYSENMAEDITRGMMDNASKCLSNGALPLGYKAGENGRIVLDKAQAAVVQEIYTRVACREPFVDIAADLNRRGIKTKRGGPWTKSSFYTICRNERYRGIYIYDDVRVEGGVPRIVSDGLFYRVQEVLKVKKTPQSARHHTGAEDYLLTGKLFCGKCGRPMTGVSGTSRSGEMHYYYTCQKRRREHACDKKNVIREQIEKSVAQAIKQYMLTDEMIQHMADATMAYNARQEKDLHLQDLQGQLAAVKTSAANLLKAIEMGVITETTKARMVELEQEQGRLNAQIENARAELVPITRDNFVSLLHIYRDGDINDSKYLASLFETFLVRVDLYDDHFLIWFNPLGQKTPADIPITSIENGDVDEFFDECRSKNVFDWGGKWSTKIKHPPYPGGCFCFGAL

SEQ ID NO: 3121 - protein, 532 aa, Unknown
  Description of Unknown: Integrase B3122 sequence
  PTHR30461:SF3,SM00857,G3DSA:1.10.10.2600,IPR036162,PF13408, IPR025827,G3DSA:3.40.50.1390,PS51737,IPR006119,IPR038109, PF07508,IPR011109,SSF53041,PTHR30461,Coil, PS51736,cd00338,PF00239
MQRPHGAYILARYSTDNQNPDSIEVQVDKCSEWCRANRLPVLGVYADFAVSGMRDDRPQYRRMMEELRLGGADTVVVYDQSRMFRKMTAWFEFRDELAALGVAVASATQPMVGGDLRDPANFLAEGATALFNQIWVLQTRQKVIAKMRYMARSAQHTGGTPPLGYCVKDGRLEVVPEEAGVVRRIFGEYASGRSYREIIDGLNRDGIRTKRGGTFGSNSLHDLLRNPKYIGVLEYGHTCKRPDGKRNTHGSAPSDLIRVEGAVPAIVDQAIFEEVQRRMAKNKRAQGGRPPELREYPLRGKVFCAECKTAMVVSISKGRYTYYSCGARHRLHTCDNMPIKVEDLEARVAEAVRTVLDEPSNSAALIRILREEAVAIQTGAAGRLADLIVRKNSVAAQLGHAVDAILGGLDSPALRKKIEALEQEQAELERDMQALRRQVDASAIPEDRLRELLAIITASGDTAALLSVVARVEVGRDEITVWTILDTDPGGKVHTDPTDAGISVPITPGAAPPAPRVIITAAGALCIKFART

SEQ ID NO: 3122 - protein, 532 aa, Unknown
  Description of Unknown: Integrase B3123 sequence
  PTHR30461:SF3,cd00338,SM00857,G3DSA:1.10.10.2600,IPR036162, PF13408,IPR025827,PS51737,G3DSA:3.40.50.1390,IPR006119, IPR038109,PF07508,SSF53041,IPR011109,PTHR30461, PS51736,Coil,PF00239
MARKKNTAAGLDAVIYARYSSHNQREVSIEQQVSECMKHAADLGLHIIGTYEDRAISGKTDKRPRFQMMMRDAEKGKFQAVVAWKSNRMGRNMLQAMVNEAKLEDHGVKVFYAEEDFDDTAAGRFALRNMMNVNQFYSENMAEDISRGLYDNASKCMANGKQPLGYKRGEDGRVVLDEANAVVVREIYARVAAGELFVDIARDLNARGVKTNTGGVWNKGSFRSICENERYKGIYIYGDVRVVDGIPRIVSDDLWYKVQEAMKMKKNPVGARHRTGAEDYLLTGKLRCGHCGSYMTGISGTSRNGELHYYYTCQKRRAEHACDKKAVRRDVIEPAIAQAIKMYCLTDEVIEWVADRTVEYWERHDNNLHIEALEQQLDENKKATSNMLKAIEMGIITDATRSRMIELETEQSKLTVQLNAAKEDVVKVDRDEIASYLELLRQGDVNNRDFQMELFKNFLVAAYLYDDNRLKLVFSFAGKESSVEIPLETGEDPPDDASSENAKMFVLTPQCSTRKKSTTRKRVVLFSLRPTE

SEQ ID NO: 3123 - protein, 532 aa, Unknown
  Description of Unknown: Integrase B3124 sequence
  PTHR30461:SF3,cd00338,SM00857,G3DSA:1.10.10.2600,IPR036162, PF13408,IPR025827,G3DSA:3.40.50.1390,PS51737,IPR006119, IPR038109,PF07508,SSF53041,IPR011109,PTHR30461, PS51736,Coil,PF00239
MAKAKQKAATNDISKLAVIYARYSSHNQTEQSIEGQLAAGHRYADLKGYTVVHEYIDRAMTGRNDNRDDFQKMLSDTSKKQFGAIIVWKVDRFGRNREEITFNKYRCKKNGVRVEYVAENLPDSPEGVILESVLEGMAEYYSLQLSQNVQRGLLESAKKHQVIGGNVPLGLMMDAHKKYVPDPKTAPTVKLIFDMYAEGSTTSEIINHLNSIGMRTKAGKPFTKSSLTTVLKNEKYIGVYKYKDIIRDEGVIPPIVDKEIFYKVQELLKVNRRMPSHKWSYSDYILTDKLFCGKCGTAMVGESGFGKMGVKYSYYICAKRRKDKTCDKKPVRQEWIEEIVLQRVQGILQNEELLEFIAENTWQYYLAQDESMEKLKGLQTELDKVEKSAANLMKAIEAGIFNDMTKARMDELDDQRAVIKKAMAEIEIEKGFKLTKDHILYFLEQFKKLDYKDRDCQRRLIDVFVNSIFVYDDKLRIAFNFGGSDSTITLNEVDKADRGEGFVCCASCPAKYLKPVHSWKHDVPAFSLYIFI

SEQ ID NO: 3124 - protein, 532 aa, Unknown
  Description of Unknown: Integrase B3125 sequence
  PTHR30461:SF3,SM00857,G3DSA:1.10.10.2600,IPR036162,PF13408, PS51737,G3DSA:3.40.50.1390,IPR025827,IPR006119,IPR038109, PF07508,SSF53041,IPR011109,PTHR30461,Coil, PS51736,cd00338,PF00239
MAKRKITVIPSTINPLTQTPVGSVQKRKVAAYARVSTDSDEQYTSYETQKTYYENYIKSKPEWEFVRVYADEGISGTNTKKREGFKSMITDALDGKIDLIVTKSISRFARNTLDTISYIRKLKSAGVEVYFEKENLWSLDSKSEFVLTIMASIAQEESRSISMNVTLGKRWQMQEGKVSFAYSRMLGFKKTENGYAIDKEQAKIVKEIYTDFLIWGMTSTGIANKLTKRGVKTPSGKSEWSKNNIESILTNEKYKGDALLQKTYVVDYLEHKVAMNKGEITQYYVKDSHEAIIDKAEWDMVQDEIKRRKELGATYSASSIFISKLVCGDCGGIYGKKLWHSNDDYRSERYLCNNKYKDKNKRCTTPALTEKTIIDAFIKAYNSVMVDKNSLIEDAEAIKLLLSDTSKIDNEMDKLNTELQVINGLVDHLVRDNSSRLQSQEEYQKKYDELVTRYQNAKTRYEELSIEKSRKEFQSLRLDMFISKIKESPSLISEWNMEIWSILVDKAIVNSNCSITFRFRNGVEKTIKVKKC

SEQ ID NO: 3125 - protein, 532 aa, Unknown
  Description of Unknown: Integrase B3126 sequence
  PTHR30461:SF3,cd00338,SM00857,G3DSA:1.10.10.2600,IPR036162, PF13408,PS51737,IPR025827,G3DSA:3.40.50.1390,IPR006119, IPR038109,PF07508,IPR011109,SSF53041,PTHR30461, PS51736,Coil,PF00239
MARKKNIAAGQDAVIYARYSSHNQREVSIEQQIAECTKYAAALGLRIVGTYEDRAISGKTDNRPRFQQMMRDAGKGKFQAVVAWKSNRIGRNMLQAMVNEAKLDDYGVKVFYAEEDFDDTAAGRFALRNMMNVNQFYSENMAEDITRGLYDNASKCMANGRQPLGYKRGEDGRVVLDEANAAVVREIFTRVAAGDLFVDIARDLNAQGIKTSKGANWNKGSFQSICQNERYRGIYIYGDVRVADGIPRIVSDDLWYRVQEAMRMKKNPVGTRHRVGAEDYLLTGKLRCGHCGSYMTGVSGTSRNGELHYYYTCQKRRTEHACDKKNIRRDVIEPAVAQAIKMYCLTDDVIEWMADRTVEYWEKHDNDLQIEALEQQLAENKKATSNMLKAIEMGIITEATRTRMVELETEQSRLSVQLNAAKEDVVKIDREQIISYLELLQQGDIHDRDFQMELFKNFLVAVYVYDDNRMKLVFSCMGDQNSVEIPLETGEDPPDGGLSPDAKMFVLTPDSSTRRKKHYTETCGVFLLLPNE

SEQ ID NO: 3126 - protein, 532 aa, Unknown
  Description of Unknown: Integrase B3127 sequence
  PTHR30461:SF3,SM00857,G3DSA:1.10.10.2600,IPR036162,PF13408, PS51737,G3DSA:3.40.50.1390,IPR025827,IPR006119,IPR038109, PF07508,IPR011109,SSF53041,PTHR30461,Coil, PS51736,cd00338,PF00239
MNAVIYARYSSYNQTERSIEGQLEDCTEYADRNGLTIVGTYCDRAKSGTKAETRPEFLKMIKDSEKQKFQIVLVWKLDRFARNRYDSAMFRAKLKKNGVGLKSVTENISDEPDGIILQGVIEAMAEYYSANLSQNVKRGLRVARERGTFTGGRVMLGYQIIDKKPVPHPQEAKLVRSIFERIADGQTVRQIIDDFNARGLRTRSGQPFTRTSFQTLLKSPRVAGYEIIDGERSPSIYPAIVSEELFGAVQARLAVNAHLGGREKAKDRYLLQGKAFCGHCGAPMVGESGVGRRGTLYRYYTCATRKATHACKKKNVPKHELENLVVNSIVEKILSSDRIKSICAAVSDYFADNDAVAKIKELEAQLREVEDSIRKTADLMLANADLPALIKPLREKAVALSARAEDIKADLSATRAEAGSEITPESVHEWVCSFAKKDFTVPENRIALIETFLNSVYVFDDHLLIFCNSSKDTEQIPYADALKIPFSSPSESTAAPPGGSDSGCQTQPFPQIRTAFICFGCFGLFIPLHQDG

SEQ ID NO: 3127 - protein, 532 aa, Unknown
  Description of Unknown: Integrase B3128 sequence
  PTHR30461:SF3,cd00338,SM00857,G3DSA:1.10.10.2600,IPR036162, PF13408,PS51737,IPR025827,G3DSA:3.40.50.1390,IPR006119, IPR038109,PF07508,IPR011109,SSF53041,PTHR30461, PS51736,Coil,PF00239
MIKIRAAIYVRKSRLSEKGESINNQIELCKKYFSNLHLDDNIEFIIYQDEGFSGGNINRPKFQKLIKDVKKKRFNYLVCYKLDRISRNVADFTSTLKILEENNVNFISITEQFDTTSVMGRAMINISATFAQMERETIAERIKDNMLELSKTGRWLGGTCPLGFKSIPITYESNGHKKKMYSLEIIEEEMEIVRLIYDMYIEKHSCSPIARYLCSNSIKGKNGGDFSRNTVLQILTNPVYCTADKKAFEYFKSKGSIVEGNINSNKGLMAYNKRKNGRKDNPIDEWIISTGEHLGAIPSAKWIQCQQILDDVRKKSNNKSGTGNKFLLSGLLKCEHCGSSMCSWSRNNPKSNKYERYYRCELKNRASKRCTCKMLNADKAETFVIDLLKNFNIKYLDNIKSKSSSINAANIEREKNMLNKTLTENNKIISGLIKKLALLDDIDVLKAIQSEIKTLKNDNENIEKNINDLSIKSFIVEDETENKKAFIESLNLFKNTIDFIDDVEIKRNMIKNLVEYFTYNSDTKQIKFKIRL

SEQ ID NO: 3128 - protein, 532 aa, Unknown
  Description of Unknown: Integrase B3129 sequence
  PTHR30461:SF3,cd00338,SM00857,G3DSA:1.10.10.2600,IPR036162, PF13408,PS51737,G3DSA:3.40.50.1390,IPR025827,IPR006119, IPR038109,PF07508,IPR011109,SSF53041,PTHR30461, Coil,PF00239
MTENNNRVCCLYRVSTDKQVDFNSNHEADLPMQRKACHKFAEAKGRVIVHEEREEGVSGHKVRAATRDKLQIIKDYARKGKFDILLVFMFDRIGRIADETPFVVEWFVRNGIRVWSTQEGEQRFDNHTDKLLNYIRFWQADGESEKTSVRTRTSLRQLVEEGHFKGGNAPYGYDLVRSGRINKRKHELYELHINEQEAAVVRIVFDKYVYEGYGPQHIATYLNNSGYRARSGKCWHPSSIRGMVQNLTYTGVLRCGDARSELMPDLQIVPQEQFENAQRIRNERSVRSTAEAENRLPLNIHGKSLLAGNAYCGHCGAKLELTSSRKWRKMADGSLDDTLRIRYTCYGKLRKQTNCTGQTGYTVHILDEIIDKAVRQIFSKMRGIPKEQIVTKRYEKENTERKNHLQDLQTQRDKAEKDLLSLKAEILACIKGESVLPRETLAEMITEQEEKLKELEDLCESASEELERTAELMDKVSRLYDELISYADLYDSASFEAKKMIVNQLIRRVDVYRGYQINISFNFDLTPYIEGE

SEQ ID NO: 3129 - protein, 532 aa, Unknown
  Description of Unknown: Integrase B3130 sequence
  PTHR30461:SF3,cd00338,SM00857,G3DSA:1.10.10.2600,IPR036162, PF13408,PS51737,IPR025827,G3DSA:3.40.50.1390,IPR006119, IPR038109,PF07508,IPR011109,SSF53041,PTHR30461, PS51736,Coil,PF00239
MNVVIYARFSSSGQREESIEGQVKVCTEYAENNDYTVIGTYVDRALTGRNDKRPDLQRLLSDSNNNNFQAVIVYSIDRFGRNLQQCLTNENKLKQNGVALFSATEHFTNDPAGIFYRNLMMAHSQYYCDELSQKIRRGMDINAEKCLSTGGNIALGFKVDDKKNFQIDPDTAPIVQYIFESYASGKTVTEIINQLNSQGLKTSRGVPFNKNSLHSMLKNKRYIGIYTYKGTEKIGGMPRIISDELFNKVAEIMNKNRKAPARARAKVEYLLTTKIFCGYCKEMMTGFSGTGKSGKVYRYYVCNGTKKKACKKKKVNKEYIEDLVVNECRKLLTNENIKKIANSISKISESEKDTAHLKFLKKALSENERKHKNALNAIIECDLESVRKSLYEQIPILEKEHSELQKQIALEEKNFPVLTVPMVHFFLRKLKDGNVDDIKYRKTLINVFINKIYLYDDKLTIIFNSGDNPVTINDFLLSEIEDNSKKAEGLFLDGVAPPIESLYEHLSSPSREENELLCSYCAIFFPPSRYHN

SEQ ID NO: 3130 - protein, 532 aa, Unknown
  Description of Unknown: Integrase B3131 sequence
  PTHR30461:SF3,SM00857,G3DSA:1.10.10.2600,IPR036162,PF13408, PS51737,G3DSA:3.40.50.1390,IPR025827,IPR006119,IPR038109, PF07508,IPR011109,SSF53041,PTHR30461,Coil, cd00338,PF00239
MIATKPTQEKTVKTVYCLYRVSTKGQVDKNDIPMQKQSCREFAEHQPGWVIKKEFQEKGVSGFKVSANDRDAVQELKTAAENKEFDILLVFMFDRIGRIDNETPFVVEWFIQHGIEVWSVNEGEQRMDSHVDKLMNYIRFWQANGESQKTSMRVKTRLHQLVEDGIYTGGCAPFGYRLVKSGVVNKRGKELLTLEIDPIEKEMVKTIFEKTVKDGYGSYVMAQYVNDRKMLTHNGAKFQSNTIKRILQNPIYCGYYNRGGVTSKRVKELQIIDDAVFDEAQKILEQRKYTNEEKTQLSRTAKSSTMLGGNIYCAHCGKKLCANSFVDRYTTKDGTTHDGGRRFRYLCSGKAMKRNECDGQSVYSAAKVDEIVLDALHKCFDKIKATPKDAAIEKKYRTQISQIKTEIKRLNKETETLKRKLGELTEEIANSLLGDSKFTPDVLSMAIETTKTKIADNVQRIAEKQNQLNDKETDMNKIDYYYEEFVSWADEFDNAPAERQRMIICKLFKEILVGRGYSVQILMDSSYEQFLI

SEQ ID NO: 3131 - protein, 532 aa, Unknown
  Description of Unknown: Integrase B3132 sequence
  PTHR30461:SF3,cd00338,SM00857,G3DSA:1.10.10.2600,IPR036162, PF13408,PS51737,G3DSA:3.40.50.1390,IPR025827,IPR006119, IPR038109,PF07508,IPR011109,SSF53041,PTHR30461, PS51736,Coil,PF00239
MIKIRAAIYVRKSRLSEKGESINNQIELCKKYFSNLHLEDNIEFIIYQDEGFSGGNINRPEFQKLIKDVKKRRFNYLVCYKLDRISRNVADFTSTLKILEENNVNFISITEQFDTTSVMGRAMINISATFAQMERETIAERIKDNMLELSKTGRWLGGTSPLGFKSIPITYESNGHKKKMYSLEIVEEEMEIVRLIYDMYIEKHSCSPIARYLCSNSIKGKNGGDFSRNTVLQILTNPVYCTADKKAFEYFKSKGSSVKGNINSNKGLMAYNKRKNGKKDNPMDEWIISTGEHLGAIPSAKWIQCQQILDDVRKKSNNKSGTGNKFLLSGLLKCEHCGSSMCSWSRNNPKTNKYERYYRCELKNRASKRCTCKMLNADKAETFVIDLLKNFNIKYLDNIKSKSSSINAANIEREKNMLNKTLSENNKIISGLIKKLALIDDIDVIKAIQSEIKNLKTDNENIEKNINDLSIKSFIVEDETENKKAFIESLNLFKNTIDYIDDTEIKRNMIKNLVNHFTYNSDTKQIKFKISL

SEQ ID NO: 3132 - protein, 532 aa, Unknown
  Description of Unknown: Integrase B3133 sequence
  SM00857,G3DSA:1.10.10.2600,IPR036162,PS51737,G3DSA:3.40.50.1390, IPR006119,IPR038109,PF07508,IPR011109,SSF53041, PF00239,PTHR30461,PS51736,Coil,cd00338
MSEKYAIYLRKSRADMEAEARGEGETLARHLAMLQNLSRRNGHDIGHVYREIVSGESIDNRPQMQQLLHDVAAGMWAGIYCTEVERLARGNTTDQGRVAEAFQFSGTKIITLAKTYDPNNEFDTEYFEFGLFMARREYKSINRRIQAGRKQSVMEGRYIYSRPAYGYRKVKIQGDKGYTLAIDEQEALVVRRIFEQYAATDDGLVVIARQLREEGTPTGQYGSVWGESRIHRMITNEVYLGMIRDGHDKQIKVMQNGVILKKRAITRDYTLVQGLHPAIISRELYDACQRKLHSPRPRGTAASPGFNHAQGIPKNDGQYCANSLAGLLVCAECGHIMRRKAACGRQRDRLFCHTPGCPTVATYFEDVEQSILSTLRQWMEAAETDWQPDPNPAIASALARIDALKKEKAATAAQLDKLYDLLERGLYSEELFTARRIALKQRMAALDGEIAEANRQAKTQYVPIAQLYDQIKSLLDVYDHSSAGQKNRMLKSCISKIVYHKSQRGNIINGRTVVDGNQFELEVYPRLASQDE

SEQ ID NO: 3133 - protein, 532 aa, Unknown
  Description of Unknown: Integrase B3134 sequence
  PTHR30461:SF3,SM00857,G3DSA:1.10.10.2600,IPR036162,PF13408, PS51737,G3DSA:3.40.50.1390,IPR025827,IPR006119,IPR038109, PF07508,IPR011109,SSF53041,PF00239, PTHR30461,PS51736,Coil,cd00338
MKKFPIDLSCLTEEEISQFQEDPYTLYNGDQDVALYLRYSSTGQSDQSIEGQLRDCRTFCKANHYRIVAIYVDRATTARKDVEKRVHLMEMISDSAKQNWEYVIVWKLDRFARNRNDSAIMKMRLRKNGVKVLSATEHLTDSPESIILESVLEGMAEFFSAELSQKVTRGMRESALKCHSVGGHIPLGYKVENHKLVVDPDTAHIVQEAFSLYANGESVADICRKFNSAGYKTAKNTEFNRSSFKAMFRNTRYIGTYTYKDIVIENGIPAIIDKELFETVQRRLSKTATAPARGKAKVDYLLSGKLFCGHCGASMNGESGAGRHGKVYHYYSCYTKKRKLGCDKRPLKKDYIEGIVARDALNLLTDQLIDEIADMAIRQSEQDLINDTHIPQLTAQLSEVEKSITNITAAIEKGIASETLMNRLVQLEHEKKTINKEIKAEEKFVYRIDRDQIVFWLSQFKYGNIEDENFRRRLIDLLVNSVTVWDEPDGYKITTAYNLTSCKTKTFRVEKNPAAEEATGFDFGESECTKSP

SEQ ID NO: 3134 - protein, 532 aa, Unknown
  Description of Unknown: Integrase B3135 sequence
  cd03768,PTHR30461:SF3,SM00857,G3DSA:1.10.10.2600,IPR036162, PF13408,IPR025827,G3DSA:3.40.50.1390,PS51737,IPR006119, IPR038109,PF07508,IPR011109,SSF53041,PTHR30461, PS51736,Coil,PF00239
MKVAIYSRKSVFTGKGESIENQIELCKEYCNRNYDEKIEFVVYEDEGFSGGNINRPQFKAMIKDIKAKEYDALICYRLDRISRNVADFSATLELLQANNCDFISIKEQFDTSTPMGRAMVYISSVFAQLERETIAERVRDNMVQLAKTGRWLGGITPLGFDSERIIYYDENFKERSMSKLTVNDSEMELVKEIYELYYELKSATQVSKRLADKRIKGKRGGFLNSSRILDIISNPAYVKSDKKTHEYLKSIGINVFGESNGNGYLSYNKARNGIETDIETWIAAVSRHEGIIDSDKWIAVQKNRHKMKGSQIKAVASKSETLLNGILKCSVCGSKMYAKKGKLSPVTGKHNYYYICSKKDSQFGVTCDNKNINSQKIDKLVLNELETYDKEYLKTHLLSTAKNFKRNLTENNFIELINEKESQIGNLVKNLSLAPNPEVSGYIMNEITKLQSEVQNLKEKQKNCDKDSYDISVDIDQIEILNDLLTNMLNTIDKVDYTEKRKLLHSVVEEVIWNGKGYTVEINLIGSKKKLI

SEQ ID NO: 3135 - protein, 532 aa, Unknown
  Description of Unknown: Integrase B3136 sequence
  PTHR30461:SF3,SM00857,G3DSA:1.10.10.2600,IPR036162,PF13408, IPR025827,G3DSA:3.40.50.1390,PS51737,IPR006119,IPR038109, PF07508,IPR011109,SSF53041,PF00239,PTHR30461, PS51736,Coil,cd00338
MRAFIYCRFSSHKQQELSIEGQRDICQEYADKHNITVVGQYADRARSGKTENRADFRRLMRDAATGVVDCVLVWRYDRFFRNRAESALYRKQLEAAGVHLISVTEYIPEGSAGIITQGMIETVAEYFSAKLSEDVSRGMNKAAQHCQIVGRAPLGYRAGPNKRWQIDPVGAELVRRIFEWYASGKAMGQLAAQLNEEGRRTTNGTLYTRSSFNSILRNEKYIGVYSYGGEVRIEGGCPRIIEDELFFTVQRRLSANRHRPGAYKAEVPYLLSGKLFCGLCGAPMTGTAGTSHTGARHYYYICNNRRAKTCKKKNVRLDLIEEAVLQSALDILTDENIAYISTEVERRCAENSDSAALLASLNAQLEEVQRRLKNIGNAIAQGIITETTKELLEEAEADRTALRQQIDRAKVQAALVVKAEAVACWLDGFRRGDRTDPDFRRQVFGALVHSVFVYDDYLKIIFNVDSAGAAVVPYEAAQAVTPSEAPPGSYLDTLGAPRKAATNVAAFLLHHSLWDGLALRASARVRLAGTGR

SEQ ID NO: 3136 - protein, 532 aa, Unknown
  Description of Unknown: Integrase B3137 sequence
  PTHR30461:SF3,cd00338,SM00857,G3DSA:1.10.10.2600,IPR036162, PF13408,PS51737,G3DSA:3.40.50.1390,IPR025827,IPR006119, IPR038109,PF07508,IPR011109,SSF53041,PTHR30461, PS51736,Coil,PF00239
MARKKNIAAGQNAVIYARYSSHNQREVSIEQQVRECMKHAAELGLHVVGTYEDRAISGKTDKRPNFQRMMRDAEKGKFQAVVAWKSNRIGRNMLQAMVNEAKLEDCGVKVFYAEEDFDDTAAGRFALRNMMNVNQFYSENMAEDITRGLYDNASKCMANGRQPLGYKRGEDGRVVLDEANAAVVREIFTRVAAGDLFVDIARDLNAQGIKTSKGANWNKGSFQSICQNERYRGIYIYGDVRVADGIPRIVSDDLWYRVQEAMRMKKNPVGTRHRVGAEDYLLTGKLRCGHCGSYMTGVSGTSRNGELHYYYTCQKRRTEHACDKKNIRRDVIEPAVAQAIKMYCLTDDVIEWMADRTVEYWKKHDNDLQIEALEQQLEENKKATSNMLKAIEMGIITEATRTRMVELETEQSRLSVQLNAAKEDVVKIDREQIISYLELLQQGDIHDRDFQMELFKNFLVAVYVYDDNRMKLVFSCMGDQNSVEIPLETGEDPPDGGLSPDAKMFVLTPDSSTRRKKHYTETCGVFLLLPNE

SEQ ID NO: 3137 - protein, 532 aa, Unknown
  Description of Unknown: Integrase B3138 sequence
  SM00857,G3DSA:1.10.10.2600,IPR036162,PF13408,PS51737, G3DSA:3.40.50.1390,IPR025827,IPR006119,IPR038109,PF07508, IPR011109,SSF53041,PTHR30461,Coil,PS51736, cd00338,PF00239
MIYARYSSGAQKDVSIDQQVRACRDFADRQALEIVAVYDDRALTGTNDHRPNFQRMISDSSAERWRYVIVYSLDRFARNRYDSAIYKRELRDHGIRVLSATEYLSDDPTGVLLESMLEGYAEYYSKELSRKTQRGMKDNARRCKINGPIPAGYMRGPDGRYAIYEPDAAVIRDLFRRVSDGEAVASVVRDISARDLRRVKGQPWSRSCLYAALSNERYAGVYIYGDIRIDGGIPPIISRELFDSVQLLLESKPNPRKELHSPVRRKNDNGLFLLTGKLFCGDCGSPMIGTSGRGKYGSVYYYYACRGQKAHGCKKAPIRREQIEYEIAAALKANFLNPEVIPQLADAFMAARGQNDAQLELQSLLDRQADVRRSLKNIMAAIEQGIFAPTVQTRLTQLESESQQIDARIAILSRQLKDLPTRDDIIALLDFYRQGDLDDSRYRETLLDAFLRAAYVYSDHYDLVCAIGKDGQSITVPTASALSAALSDGPKSSDSGLSGSPNRAIRTLSGKIVVFDVFFVFRCPAMRIKKHL

SEQ ID NO: 3138 - protein, 532 aa, Unknown
  Description of Unknown: Integrase B3139 sequence
  SM00857,G3DSA:1.10.10.2600,IPR036162,PS51737,G3DSA:3.40.50.1390, mobidb-lite,IPR006119,IPR038109,PF07508,IPR011109, SSF53041,PF00239,PTHR30461,PS51736,Coil, cd00338
MPEKYAIYLRKSRADMEAEARGEGETLARHLAMLQNLARRNGHDIGQVYREIVSGESIDNRPQMQQLLHDVAAGMWAGIYCTEVERLARGNTTDQGRVAEAFQFSGTKIITLAKTYDPNNEFDTEYFEFGLFMARREYKSINRRIQAGRKQSVMEGRYIYSRPAYGYRKVKIHGDKGYTLAIDEQEAIVVRRIFEQYATTDDGLVVIARQLREEGTPTGQYGSVWGESRVHRMITNEVYLGMIRDGHDKQIKVMQNGVILKKRAITRDYTLVQGLHPAIISRELYDACQRKLHSPRPRGTAASPGFNHAQGIPKNDGQYRANSLAGLLVCAECGHIMRRKASCGRQRDRLFCHTPGCPTVATYFEDVEQSILSTLRQWMEAAETDGQPDPNPAIASALARIEALKKEKAATAAQLDKLYDLLERGLYSEELFTARRIALKQRMAALDGEIAEANRQAKTQYVPIAQLYDQIKSLLDVYDHSSAGQKNRMLKSCISKIVYHKSQRGNIINGRTVVDGNQFELEVYPRLASQDE

SEQ ID NO: 3139 - protein, 532 aa, Unknown
  Description of Unknown: Integrase B3140 sequence
  PTHR30461:SF3,SM00857,G3DSA:1.10.10.2600,IPR036162,PF13408, PS51737,G3DSA:3.40.50.1390,IPR025827,IPR006119,IPR038109, PF07508,IPR011109,SSF53041,PF00239,PTHR30461, PS51736,Coil,cd00338
MARKKNIAAGQDAVIYARYSSHNQREVSIEQQVSECMKHAAELGLHVVGTYEDRAISGKTDNRPRFQQMMRDAEKGKFQAVVSWKSNRIGRNMLQAMVNEAKLDDYGVKVFYAEEDFDDTAAGRFALRNMMNVNQFYSENMAEDITRGLYDNASKCMANGRQPLGYKRGEDGRVVLDEANAAVVREIFTRVAAGDLFVDIARDLNAQGIKTSKGANWNKGSFQSICQNERYRGIYIYGDVRVADGIPRIVSDDLWYRVQEAMRMKKNPVGTRHRVGAEDYLLTGKLRCGHCGSYMTGVSGTSRNGELHYYYTCQKRRTEHACDKKNIRRDVIEPAVAQAIKMYCLTDDVIAWIADRTVEYWEKHDNDLQIEALEQQLEENKKATSNMLKAIEMGIITEATRTRMVELETEQSRLSVQLNAAKEDVVKIDREQIISYLELLQQGDIHDRDFQMELFKNFLVAVYVYDDNRMKLVFSCMGDQNSVEIPLETGEDPPDGGLSPDAKMFVLTPDSSTRNKKHYTEMCGAFLLTPNE

SEQ ID NO: 3140 - protein, 532 aa, Unknown
  Description of Unknown: Integrase B3141 sequence
  PTHR30461:SF3,IPR036162,PS51737,IPR011109,PTHR30461, PF00239,G3DSA:1.10.10.2600,IPR006119,SSF53041,cd00338, SM00857,IPR025827,IPR038109,PS51736,mobidb-lite, PF13408,G3DSA:3.40.50.1390,PF07508,Coil
MPRKKKLQEVGGLRLVAYYRYSNGGQQTEQSIEGQRRDCEAYAKAHGYKIVHEYIDRHISGKSDSRPAFQQMISDSDSHLFDAVICWKTDRLARSRYDSIIYKTRLRKNGVKILYAAETVVDGPEGIIIEGLMESLAEYYSAELAQKLRRGQRESALKCIALGGNRSFGYDIGPDKHYCINEKQAPAVRYIFEQYAAGATAADIVRELTARGYRTSRGNPFNKNSICRIITNEMYLGVYKYADIRIEGGVPAMIDRELFNRCQTQLAFNRAHGGGKGAPRADYVLVGKLDCGLCGHAMKGASATGHTGSKHYYYTCTQHVEKKCPKTSIEKNYLEQVIVDGVAKYVLTPEKISQIVDCMMELQAKEQEPKGNPERDALEAELVECRRKQNNILEAIEEGGSARLAARLRTLEEQEAQLTFALGEINNAPSPPQFSREALTFMFEQFRREEDEVDEEYRRRILDTFVSSILLYEDRAEVKFNITDQKTGDFERVILPISVNKKPPEDDDATSNSEGSTALRLVEAMGVEQWKS

SEQ ID NO: 3141 - protein, 532 aa, Unknown
  Description of Unknown: Integrase B3142 sequence
  SM00857,G3DSA:1.10.10.2600,IPR036162,PF13408,IPR025827, PS51737,G3DSA:3.40.50.1390,IPR006119,IPR038109,PF07508, IPR011109,SSF53041,PTHR30461,PS51736,cd00338, PF00239
MVKNRAAIYARFSSHNQRSESIEIQVENSRRYCEQEGLQVVREYCDYAQTGRNVDRAEFQRMMRDAKLGLFDYVVIYKVTRIMRNRDEMALARIMLRKSGVEILYAGEEIASGSSGVLQLGMLEVLAEWESAIDSERIRDGIQKNAQRCMANGRTLYGWDIVDGRYVVNEREAAVMRRMKNMLFSGSSVADIVRAVSAERSKRGAKFTNDTVSKLLRRVQNAGVYKYAGNEVEDGMPALWPQCEQYMINSILDDRHRPRRKIDSAREFPLTGKFYCSTCGAPMFGTSGTSKNGSAYHYYKCRECRRTVRRDLIEGAVADMTYEAVKRNDVRARIAETLAGYEAEQGSDEKPESYFIKKEIRRIETTFERIWHAIEDGIAPPGGKERIEELNRQKSELEARLCAIEKSESCEVSVDDVLLWLDSLANDTTPLEILNEWVRFVDIDGKDISVYFMFDDLPDDFNPTKKKAEHPCYQRCSTNSLMVELMRETANSREFSERDNHAIQLDTCIVQATNSWFVIVGLLENNNQHFSK

SEQ ID NO: 3142 - protein, 532 aa, Unknown
  Description of Unknown: Integrase B3143 sequence
  SM00857,G3DSA:1.10.10.2600,IPR036162,PF13408,PS51737, IPR025827,G3DSA:3.40.50.1390,IPR006119,IPR038109,PF07508, IPR011109,SSF53041,PTHR30461,Coil,PS51736, cd00338,PF00239
MIYARYSSGAQKDVSIDQQVRACRDFADRQALEIVAVYDDRALTGTNDHRPNFQRMISDSSAERWRYVIVYSLDRFARNRYDSAIYKRELRDHGIRVLSATEYLSDDPTGVLLESMLEGYAEYYSKELSRKTQRGMKDNARRCKINGPIPAGYMRGPDGRYAIYEPDAAVIRDLFRRVSDGEAVASVVRDISARDLRRVKGQPWSRSCLYAALSNERYAGVYIYGDIRIDGGIPPIISRELFDSVQLLLESKPNPRKELHSPVRRKNDNGLFLLTGKLFCGDCGSPMIGTSGRGKYGSVYYYYACRGQKAHGCKKAPIRREQIEYEIAAALKANFLNPEVIPQLADAFMAARGQNDAQLELQSLLDRQADVRRSLKNIMAAIEQGIFAPTVQTRLTQLESESQQIDARIAILSRQLKDLPTRDDIIALLDFYRQGDLDDSRYRETLLDAFLRAAYVYSDHYDLVCAIGKDGQSITVPTASALSAALSDGPKSSDSGLSGSPIRAIRTLNSKIVVFDVFFAFRCSAMRIKKHL

SEQ ID NO: 3143 - protein, 532 aa, Unknown
  Description of Unknown: Integrase B3144 sequence
  PTHR30461:SF3,SM00857,G3DSA:1.10.10.2600,IPR036162,PF13408, PS51737,G3DSA:3.40.50.1390,IPR025827,IPR006119,IPR038109, PF07508,IPR011109,SSF53041,PF00239,PTHR30461, PS51736,Coil,cd00338
MKKFPIDLSCLTEEEISQFQEDPYTLYNGDQNVAIYLRYSSTGQSDQSIEGQLRDCRAFCKANHYRIVAIYVDRATTARKDVEKRVHLMEMISDSAKQNWEYVIVWKLDRFARNRNDSAIMKMRLRKNGVKVLSATEHLTDSPESIILESVLEGMAEFFSAELSQKVTRGMRESALKCHSVGGHIPLGYKVENHKLVVDPDTAHIVQEAFSLYANGESVADICRKFNSAGYKTAKNTEFNRSSFKAMFRNTRYIGTYTYKDIVIENGIPAIIDKELFETVQRRVSKTATAPARGKAKVDYLLSGKLFCGHCGASMNGESGAGRHGKVYHYYSCYTKKRKLGCDKRPLKKDYIEGIVARDALNLLTDQLIDEIADMAIRQSEQDLINDTHIPQLTAQLSEVEKSITNITAAIEKGIASETLMNRLVQLEHEKKTLNKEIKAEEKFVYRIDRDQIVFWLSQFKYGNIEDENFRRRLIDLLVNSVTVWDEPDGYKITTAYNLTSCKTKTFRVEKNPAAEEATGFDFGESECTKSP

SEQ ID NO: 3144 - protein, 531 aa, Unknown
  Description of Unknown: Integrase B3145 sequence
  cd00338,SM00857,G3DSA:1.10.10.2600,IPR036162,PS51737, G3DSA:3.40.50.1390,IPR006119,IPR038109,PF07508,IPR011109, SSF53041,PTHR30461,PS51736,Coil,PF00239
MDEYFIYLRKSRADMEAEAHGEGETLARHERALLELAKRLHLNVTQIYREVVSGETIAARPVMQRILSEVEQGVWAGGLVMEIERLARGDTIDQGIIAQTFKFSDTKIITPMKIYDPNNEYDEEYFEFGLFMSRREYKVINRRLQRGKLAAAKEGKWVPCRAPYGYRRIKLKNEKGWSLEPVEEEADVVRLIFQLYTRGAQAEDGSFQRMPLGAIARHLDDLGIPSPQGGLWGRPALAAMVQNPAYIGKVRWGQHPSKKKVVDGKVVRQRVQADADEVHVFEGRHPAIIEQEVFDIANEMVKRRVNSSTHIDLSVKNPLTRVVFCACCGHAMGRATSAARPDAGSLVCRTHGCPTVSTRLDIVEERILAGLAEWLSGYELEWAEANSPEHRVASNAEVKQKALQRAEGDLARLQKQLERTHDLLEQGVYDVDTFLDRSRSLAEKINAAKELAASLRQEVVVEEEREANRKNIIPKVKNLIEVYHSLPSAEEKNEMLKDIVEKVVYKKIAVPGKRLKPDDFEIEIYPRIPRK

SEQ ID NO: 3145 - protein, 531 aa, Unknown
  Description of Unknown: Integrase B3146 sequence
  cd00338,SM00857,G3DSA:1.10.10.2600,IPR036162, PS51737,G3DSA:3.40.50.1390,IPR006119,IPR038109, PF07508,SSF53041,IPR011109,PTHR30461, PS51736,Coil,PF00239
MEQYCLYLRKSRSDVEAENHGEEETLARHEKILLELAKSREYNVTQIYREVVSGETIAARPVMQQLLSEVEHGIWSGVLVVEVERLARGDTIDQGIVAQTFKYSDTQIITPMKTYNPNNEYDEEYFEFGLFMSRREYKTINRRLQRGRLSSVKEGKCVCSIAPYGYDKVKLKGDKGFTLAPNPNEADVIKMIFELYTKGELQPDGTYKRIGVALIARKLNEMKIPARKSEYWVPASIKDMLRNPVYAGKIRWNWRSQNKRMQSGSISISRPRSEEDNCIIVNGLHPALITEETFDLAQEYLAKNPPRPTKRNAPTKNPLAGIVVCAFCGRKLVRRPYTSASCPPTLICSVPHCPNVSSFLHLVEERILKSLEEWLRNYKLQWNLSNNKPSELISESEILRQSLNDINSQIAKLNKQMIKAHELLEQDIYTTEVFLERSRAITERLNQLSYDKAEIEKRLGVETIREKSMKEIIPKVEKLLDVYHELPSAKEKNDMLKDVLEKVVYKKTQNTRWSGSPDDFEITIYPKLPKS

SEQ ID NO: 3146 - protein, 531 aa, Unknown
  Description of Unknown: Integrase B3147 sequence
  cd00338,SM00857,G3DSA:1.10.10.2600,IPR036162,PS51737, G3DSA:3.40.50.1390,IPR006119,IPR038109,PF07508,IPR011109, SSF53041,PTHR30461,PS51736,Coil,PF00239
MEQYCLYLRKSRSDVEAENHGEEETLARHEKILLELAKRREYNVTQIYREVVSGETIAARPVMQQLLSEVEHGIWSGVLVVEVERLARGDTIDQGIVAQTFKYSDTQIITPMKTYNPNNEYDEEYFEFGLFMSRREYKTINRRLQRGRLSSVKEGKCVCSIAPYGYDKVKLKGDKGFTLAPNPNEADVIKMIFELYTKGELQPDGTYKRIGVALIARKLNEMKIPARKSEYWVPASIKDMLRNPVYAGKIRWNWRSQNKRMQSGSISISRPRSEEDNCIIVNGLHPALITEETFDLAQEYLAKNPPRPTKRNAPTKNPLAGIAVCAFCGRKLVRRPYTSASCPPTLICSVPHCPNVSSFLHLVEERILKSLEEWLRNYKLQWNLSNNKPSELISESEILRQSLNDINSQIAKLNKQMIKAHELLEQDIYTTDVFLERSRTITERLNQLSYDKAEIEKRLGVETIREKSMKEIIPKVEKLLDVYHELPSAKEKNDMLKDVLEKVVYKKTQNTRWSGSPDDFEITIYPKLPKS

SEQ ID NO: 3147 - protein, 531 aa, Unknown
  Description of Unknown: Integrase B3148 sequence
  cd00338,SM00857,G3DSA:1.10.10.2600,IPR036162, PS51737,G3DSA:3.40.50.1390,IPR006119,IPR038109, PF07508,IPR011109,SSF53041,PTHR30461, PS51736,Coil,PF00239
MEQYCLYLRKSRSDIEAENHGEEETLARHEKILLELAKKREYNVTQIYREVVSGETIAARPVMQQLLSEVEHGMWSGVLVVEVERLARGDTIDQGIVAQTFKYSDTQIITPMKTYNPNNEYDEEYFEFGLFMSRREYKTINRRLQRGRLSSVKEGKCVCSIAPYGYDKVKLKGDKGFTLAPNPNEADVIKMIFELYTKGELQPDGTYKRIGVALIARKLNEMKIPARKSEYWVPASIKDMLRNPVYAGKIRWNWRSQNKRMQSGSISISRPRSEEDNCIIVNGLHPALITEETFDLVQEYLAKNPPRPTKRNAPTKNPLAGIAVCAFCGRKLVRRPYTSASCPPTLICSVPHCPNVSSFLHLVEERILKSLEEWLRNYKLQWNLSNNKPSELISESEILRQSLNDINSQIAKLNKQMIKAHELLEQDIYTTDVFLERSRTITERLNQLSYDKAEIEKRLGVETIREKSMKEIIPKVEKLLDVYHELPSAKEKNDMLKDVLEKVVYKKTQNTRWSGSPDDFEITIYPKLPKS

SEQ ID NO: 3148 - protein, 531 aa, Unknown
  Description of Unknown: Integrase B3149 sequence
  cd00338,SM00857,G3DSA:1.10.10.2600,IPR036162,PS51737, G3DSA:3.40.50.1390,IPR006119,IPR038109,PF07508,IPR011109, SSF53041,PTHR30461,PS51736,Coil,PF00239
MEQYCLYLRKSRSDIEAENHGEEETLARHEKILLELAKKREYNVTQIYREVVSGETIAARPVMQQLLSEVEHGIWSGVLVVEVERLARGDTIDQGIVAQTFKYSDTQIITPMKTYNPNNEYDEEYFEFGLFMSRREYKTINRRLQRGRLSSVKEGKCVCSIAPYGYDKVKLKGDKGFTLAPNPNEADVIKMIFELYTKGELQPDGTYKRIGVALIARKLNEMKIPARKSEYWVPASIKDMLRNPVYAGKIRWNWRSQNKRMQSGSISISRPRSEEDNCIIVNGLHPALITEETFDLAQEYLAKNPPRPTKRNAPTKNPLAGIVVCAFCGRKLVRRPYTSASCPPTLICSVPHCPNVSSFLHLVEERILKSLEEWLRNYKLQWNLSNNKPSELISESEILRQSLNDINSQIAKLNKQMIKAHELLEQDIYTTDVFLERSRTITERLNQLSYDKAEIEKRLGVETIREKSMKEIIPKVEKLLDVYHELPSAKEKNDMLKDVLEKVVYKKTQNTRWSGSPDDFEITIYPKLPKS

SEQ ID NO: 3149 - protein, 531 aa, Unknown
  Description of Unknown: Integrase B3150 sequence
  cd00338,SM00857,G3DSA:1.10.10.2600,IPR036162, PS51737,G3DSA:3.40.50.1390,IPR006119,IPR038109, PF07508,IPR011109,SSF53041,PTHR30461, PS51736,Coil,PF00239
MDEYFIYLRKSRADMEAEAHGEGETLARHERALLELAKRLHLNVTQIYREVVSGETIAARPVMQRILSEVEQGVWAGGLVMEIERLARGDTIDQGIIAQTFKFSDTKIITPMKIYDPNNEYDEEYFEFGLFMSRREYKVINRRLQRGKLAAAKEGKWVPCRAPYGYRRIKLKNEKGWSLEPVEEEADVVRLIFQLYTRGAQAEDGSFQRMPLGAIARHLDDLGIPSPQGGLWGRPALAAMVQNPAYIGKVRWGQHPSKKKVVDGKVVRQRVQADADEVHVFEGRHPAIIEQEVFDIANEMVKRRVNSSTHIDLSVKNPLTRVVFCACCGHAMGRATSAARPDAGSLVCRTHGCPTVSTRLDIVEERILAGLTEWLSGYELEWTEANSPEHRVASNAEIKQKALQRAEGDLARLQKQLERTHDLLEQGVYDVDTFLDRSRSLAEKINAAKELAASLRQEVVVEEEREANRKNIIPKVKNLIEVYHSLPSAEEKNEMLKDVVEKVVYKKIAVPGKRLKPDDFEIEIYPRIPRK

SEQ ID NO: 3150 - protein, 531 aa, Unknown
  Description of Unknown: Integrase B3151 sequence
  SM00857,G3DSA:1.10.10.2600,IPR036162,PS51737,G3DSA:3.40.50.1390, IPR006119,IPR038109,PF07508,IPR011109,SSF53041, PF00239,PTHR30461,PS51736,Coil,cd00338
MEQYCLYLRKSRSDIEAENHGEEETLARHEKILLELAKKREYNVTQIYREVVSGETIAARPVMQQLLSEVEHGIWSGVLVVEVERLARGDTIDQGIVAQTFKYSDTQIITPMKTYNPNNEYDEEYFEFGLFMSRREYKTINRRLQRGRLSSVKEGKCVCSISPYGYDKVKLKGDKGFTLAPNPNEADVIKMIFELYTKGELQPDGTYKRIGVALIARKLNEMKIPARKSEYWVPASIKDMLRNPVYAGKIRWNWRSQSKRMQSGSISISRPRSEEDNCIIVNGLHPALITEETFDLVQEYLAKNPPRPTKRNAPTKNPLAGIVVCAFCGRKLVRRPYTSASCPPTLICSVPHCPNVSSFLHLVEERILKSLEEWLRNYKLQWNLSNNKPSELISESEILRQSLNDINSQITKLNKQMIKAHELLEQDIYTTEVFLERSRAITERLNQLSYDKAEIEKRLGTETIREKSMKEIIPKVEKLLDVYHELPSAKEKNDMLKDVLEKVVYKKTQNTRWSGSPDDFEITIYPKLPKS

SEQ ID NO: 3151 - protein, 531 aa, Unknown
  Description of Unknown: Integrase B3152 sequence
  PTHR30461:SF3,cd00338,SM00857,G3DSA:1.10.10.2600,IPR036162, PF13408,PS51737,G3DSA:3.40.50.1390,IPR025827,IPR006119, IPR038109,PF07508,IPR011109,SSF53041, PTHR30461,PS51736,Coil,PF00239
MYEEIKTVCLYVRYSSSNQTEQSIEGQIRVCKDFCNRYGFRIVEIYTDRATSASKDIEKRVNFLKMIKDSEKQTFDAVVVYKLDRFARSRYDSATYKYRLKKNGVQLISATENISDDPEGIILESVLEGMAEFYSAELSQKINRGLRESAYKHNSIGGSIPLGYKTVDKKLVIDEETAPIVRQAFEMYAEGHTVADICRTFNARGYKTSKGTRFGKSSFSKIFRNERYIGVYQFHDYRAEGVIPAIIDKKLFDQVQARLKITGQAPGQYKAKRIYLLSGKLFCGHCGSKMNANSNGHGGYSYYECYGKKNLHKDCHKRNLRKDFIEEVVAKDAMSLLTDERIEEIATIAVQTNTHEVETSTDIPTIRSRLHETKLSLENITKAIETGLTPETLVKRMVELEKEKKTLEAELKKEESGVVYLDKVQVIYWLEQFKYGDIEDDDFRRLLIDLFVNSVTVWDEPDDYFKITIAYNLTSLQEKTYRLPKGGTLSDLALNPPALESNPIVEGTLMFHTIHHQLKPHEWKKFRATER

SEQ ID NO: 3152 - protein, 531 aa, Unknown
  Description of Unknown: Integrase B3153 sequence
  PTHR30461:SF3,SM00857,G3DSA:1.10.10.2600,IPR036162,PF13408, IPR025827,G3DSA:3.40.50.1390,PS51737,IPR006119,IPR038109, PF07508,IPR011109,SSF53041,PF00239,PTHR30461, PS51736,Coil,cd00338
MNVVIYARYSCERQTEQSIEGQLRECEEFAEKHDMTIVDTYIDRAISGTSTNHREAFLKMIADSEKHTFEGVLMYKMDRFARNRYDSAVYKAKLKKNGVRVYYAKEQIPEGPEGIILESLLEGMAEYYSAELSQKIKRGMRENALKGKATGGSTAIGYKITPDKTFAIDEDYADVVRHIFRSYARGERVEDICKDLNEKGIRTPKGYLFNQSTMRKMLQNEKYIGVYICKDVRLEDAIPPIIDKSLFHEVQQILAKNRKAPARAKAKVDYLLSGKAYCGKCGNGLVGESSNPNSDSRPHYYYKCANRKKGLGCDKKTIRKEELENLVAQKVAEVVLRPEKIKEIAQRCEEMQRDMVRTIRNPEADMLKKQLEKTKKSIANIMLAMEQGIFTKSTKEHLEALEQRKETLEIEIQRTSMVEKVDIITADQIEFMLLQFLPEANTDVTAYADDIISCFVHSVYLWDDSCAIWLNLSNQQPKPHKNRCAKVTPESTQRLQLSVDLLSGNVKKNLVQKNVGENSHLETSPPPHKNT

SEQ ID NO: 3153 - protein, 531 aa, Unknown
  Description of Unknown: Integrase B3154 sequence
  PTHR30461:SF3,cd00338,SM00857,G3DSA:1.10.10.2600,IPR036162, PF13408,PS51737,G3DSA:3.40.50.1390,IPR025827,IPR006119, IPR038109,PF07508,IPR011109,SSF53041,PTHR30461, PS51736,Coil,PF00239
MARKKNIAAGLDAVIYARYSSHNQREVSIEQQIAECTKHAAALGLRIVGTYEDRAISGKTDNRPRFQQMMRDAEKGKFQAVVAWKSNRIGRNMLQAMVNEAKLDDYGVKVFYAEEDFDDTAAGRFALRNMMNVNQFYSENMAEDITRGLYDNASKCMANGRQPLGYKRGEDGRVVLDEANAAVVREIFTRVAAGDLFVDIARDLNAQGIKTSKGANWNKGSFQSICQNERYRGIYIYGDVRVADGIPRIVSDDLWYRVQEAMRMKKNPVGTRHRVGAEDYLLTGKLRCGHCGSYMTGVSGTSRNGELHYYYTCQKRRTEHACDKKNIRRDVIEPAVAQAIKMYCLTDDVIAWIADRTVEYWEKHDNDLQIEALEQQLEENKKATSNMLKAIEMGIITEATRTRMVELETEQSRLSVQLNAAKEDVVKIDREQIISYLELLQQGDIHDRDFQMELFKNFLVAVYVYDDNRMKLVFSCMGDQNSVEIPLETGEDPPDGGLSPDAKMFVLTPDSSTKKTLHSLCSVFLFCTFAA

SEQ ID NO: 3154 - protein, 531 aa, Unknown
  Description of Unknown: Integrase B3155 sequence
  PTHR30461:SF3,cd00338,SM00857,G3DSA:1.10.10.2600,IPR036162, PF13408,PS51737,IPR025827,G3DSA:3.40.50.1390,IPR006119, IPR038109,PF07508,SSF53041,IPR011109,PTHR30461, PS51736,Coil,PF00239
MLYDIKSVDLENIIIYLRKSRSDDPSMSVEEVLASHERQLQEYSKTMFGEKIPEEHIFREVVSGETIADRPVMKEIMKLLETGMVKAVLVIEPQRLSRGDLEDCGRIVNTFRYTNTLIVTPPKTYNLSDEYDRKFFEMELTRGNDYLEYTKKILNRGRYASVKQGNFIGSIAPYGYKKVKNVSSHSKSYTLEIIPEEADAVKMMYHLYVDEGFGFARIARQLDELGIKPRHASHWSSSALKDMIENPVYIGKIRWNWRKTEKIMVDGQIVKTRPKTKDPSQWIYVDGKHEPIIDEETYNKAIGKRRINVSVRKSKEIVNPFAGLLFCGKCGKAMSYKRTYNRKKDGSKAYCLSMLCNDQAVCKTKSVKYDALEDRVIQVLKDSIADFELKLENDDGNAHKIQMDLIQDLQNTITNLKQKDARQKDAYEDGIYTKQEYAVRNAKVQEEIAEAKKALANAQNTLPPSVDYNEKIIKFTDCLNAFQSPDVSPREKNNLLKACVSKILYYNDGVSKVGIGRHVENKFNIEVTLRL

SEQ ID NO: 3155 - protein, 531 aa, Unknown
  Description of Unknown: Integrase B3156 sequence
  cd00338,SM00857,G3DSA:1.10.10.2600,IPR036162,PS51737, G3DSA:3.40.50.1390,IPR006119,IPR038109,PF07508,IPR011109, SSF53041,PTHR30461,PS51736,Coil,PF00239
MDTYCIYLRKSRADAEAEARGEGETLARHEHTLCDVAKRQKLHISKIYREIVSGETIAARPQMQQLLQDVESGIYAGVLVMEVERLARGDTIDQGIVAQAFKYSGTKIVTPTKTYDPDNEFDEEYFEFSLFMSRREYKTIKRRMQAGRAAAAKEGKYVGNKPPYGYDRKKLDHDSGFTLVPNPEEAKVVKLIFEWYVHGVVMDDGTKQRIGSTTIANRLHLMGCKTRYGGRWSLNTVRGILTNPVYAGIIRWGYLAEKKVLSDGVVTKSRPIAKDDYIMAKGLHEPLITLEEWETAQELGHQKRTIPKVNCNFKLQNPLAGILVCKKCGRSMTRRPYGKKNRQDTILCKTPDCPNVASDLCLVEQRLLDSLAEWLHQYEVQWQEHTLQAPATEPEDDQTAVLEDLRKEQAKVKAQLEKAYDLLEQDIYDTNTFVERSGTLKAKIADLQDSIDRIEESVREMSSRDDDMQKIMPKVKHLLEVYDTLPDASAKNQLLKEVLEKAEYSKEHGTRWHGNPDDFEVVIYPKLPKMR

SEQ ID NO: 3156 - protein, 531 aa, Unknown
  Description of Unknown: Integrase B3157 sequence
  cd00338,SM00857,G3DSA:1.10.10.2600,IPR036162, PS51737,G3DSA:3.40.50.1390,IPR006119,IPR038109, PF07508,IPR011109,SSF53041,PTHR30461, PS51736,Coil,PF00239
MEQYCLYLRKSRSDIEAENHGEEETLARHEKILLDLAKKREYNVTQIYREVVSGETIAARPVMQQLLSEVEHGIWSGVLVVEVERLARGDTIDQGIVAQTFKYSDTQIITPMKTYNPNNEYDEEYFEFGLFMSRREYKTINRRLQRGRLSSVKEGKCVCSIAPYGYDKVKLKGDKGFTLAPNPNEADVIKMIFELYTKGELQPDGTYKRIGVALIARKLNEMKIPARKSEYWVPASIKDMLRNPVYAGKIRWNWRSQNKRMQSGSISISRPRSEEDNCIIVNGLHPALITEETFDLVQEYLAKNPPRPTKRNAPTKNPLAGIVVCAFCGRKLVRRPYTSASCPPTLICSVPHCPNVSSFLHLVEERILKSLEEWLRNYKLQWNLSNNKPSELISESEILRQSLNDINSQITKLNKQMIKAHELLEQDIYTTEVFLERSRTITERLNQLSYDKAEIEKRLGTETIREKSMKEIIPKVEKLLDVYHELPSAKEKNDMLKDVLEKVVYKKTQNTRWSGSPDDFEITIYPKLPKS

SEQ ID NO: 3157 - protein, 531 aa, Unknown
  Description of Unknown: Integrase B3158 sequence
  cd00338,SM00857,G3DSA:1.10.10.2600,IPR036162,PS51737, G3DSA:3.40.50.1390,IPR006119,IPR038109,PF07508,IPR011109, SSF53041,PTHR30461,PS51736,Coil,PF00239
MEQYCLYLRKSRSDVEAENHGEEETLARHEKILLELAKRREYNVTQIYREVVSGETIAARPVMQQLLSEVEHGIWSGVLVVEVERLARGDTIDQGIVAQTFKYSDTQIITPMKTYNPNNEYDEEYFEFGLFMSRREYKTINRRLQRGRLSSVKEGKCVCSIAPYGYDKVKLKGDKGFTLAPNPNEADVIKMIFELYTKGELQPDGTYKRIGVALIARKLNEMKIPARKSEYWVPASIKDMLRNPVYAGKIRWNWRSQNKRMQSGSISISRPRSEEDNCIIVNGLHPALITEETFDLAQEYLAKNPPRPTKRNAPTKNPLAGIVVCAFCGRKLVRRPYTSASCPPTLICSVPHCPNVSSFLHLVEERILKSLEEWLRNYKLQWNLSNNKPSELISESEILRQSLNDINSQIAKLNKQMIKAHELLEQDIYTTEVFLERSRAITERLNQLSYDKAEIEKRLGIETIREKSMKEIIPKVEKLLDVYHELPSAKEKNDMLKDVLEKVVYKKTQNTRWSGSPDDFEITIYPKLPKS

SEQ ID NO: 3158 - protein, 531 aa, Unknown
  Description of Unknown: Integrase B3159 sequence
  PTHR30461:SF3,cd00338,SM00857,G3DSA:1.10.10.2600,IPR036162, PF13408,IPR025827,G3DSA:3.40.50.1390,PS51737,IPR006119, IPR038109,PF07508,IPR011109,SSF53041, PTHR30461,PS51736,Coil,PF00239
MKKENEIRAVVYARYSSHSQTEQSIEGQISAAQVYAKAKGYTIVKEYVDRAKTGKNDNREAFQQMLSDTAKHEFSVIIVWKVDRFGRNREEITFNKYRCKKNDVRVEYIAEAVPDSPEGVILESVLEGMAEYYSLQLAQNIRRGIRASAEKCQAIGGHCSLGYAIDPKTKKYVIDPDTAPTVQLIFEKYAEGYTGMDIVRLLNEKGLRTVRGKPFTKNSLWTILKNERYAGVYLFKDEVRVEGGIPALVSRETFDKVQEMLEINHRSPVNTWNRATYLLTDKLFCGHCGSKMVGECGTSRTGATYNYYICAGKKRERNCSKKAVRQDWIEKVVLQQIRRVLFDQEFLEFIAHKAYTYYLEEKKKLDQSAAIKAQLSSVESSIDNLIRAMEAGIFSASTKSRLDDLENQKAALTRTLAEIKLSEESFDLTEDRILFFLESMRGLDMDDVDSRKRLVKTFVNAVYLYDDKITLAFNFTDSCEKPEIIELADIADGVVEKFVHRASCSTITRTYELNVRLIKMCFVMTVERPVG

SEQ ID NO: 3159 - protein, 531 aa, Unknown
  Description of Unknown: Integrase B3160 sequence
  cd00338,SM00857,G3DSA:1.10.10.2600,IPR036162,PS51737, G3DSA:3.40.50.1390,IPR006119,IPR038109,PF07508,IPR011109, SSF53041,PTHR30461,PS51736,Coil,PF00239
MEQYCLYLRKSRSDVEAENHGEEETLARHEKILLELAKRREYNVTQIYREVVSGETIAARPVMQQLLSEVEHGIWSGVLVVEVERLARGDTIDQGIVAQTFKYSDTQIITPMKTYNPNNEYDEEYFEFGLFMSRREYKTINRRLQRGRLSSVKEGKCVCSIAPYGYDKVKLKGDKGFTLAPNPNEADVIKMIFELYTKGELQPDGTYKRIGVALIARKLNEMKIPARKSEYWVPASIKDMLRNPVYAGKIRWNWRSQNKRMQSGSISISRPRSEEDNCIIVNGLHPALITEETFDLAQEYLAKNPPRPTKRNAPTKNPLAGIVVCAFCGRKLVRRPYTSASCPPTLICSVPHCPNVSSFLHLVEERILKSLEEWLRNYKLQWNLSNNKPSELISESEILRQSLNDINSQITKLNKQMIKAHELLEQDIYTTDVFLERSRTITERLNQLSYDKAEIEKRLGVETIREKSMKEIIPKVEKLLDVYHELPSAKEKNDMLKNVLEKVVYKKTQNTRWSGSPDDFEITIYPKLPKS

SEQ ID NO: 3160 - protein, 531 aa, Unknown
  Description of Unknown: Integrase B3161 sequence
  cd00338,SM00857,G3DSA:1.10.10.2600,IPR036162, PS51737,G3DSA:3.40.50.1390,IPR006119,IPR038109, PF07508,IPR011109,SSF53041,PTHR30461, PS51736,Coil,PF00239
MDTYCIYLRKSRADAEAEARGEGETLARHEHTLCDVAKRQKLHISKIYREIVSGETIAARPQMQQLLQDVESGIYAGVLVMEVERLARGDTIDQGIVAQAFKYSGTKIVTPTKTYDPDNEFDEEYFEFSLFMSRREYKTIKRRMQAGRAAAAKEGKYVGNKPPYGYDRKKLDHDSGFTLVPNPEEAKVVKLIFEWYVHGVVMDDGTKQRIGSTTIANRLHLMGCKTRYGGRWSLNTVRGILTNPVYAGVIRWGYLAEKKVLSDGVVTKSRPISKGGYIMAKGLHEPLITLEEWETAQELGHQKRTIPKVNCNFKLQNPLAGILVCKKCGRSMTRRPYGKKNRQDTILCKTPGCPNVASDLCLVEKRLLDSLAEWLHQYEVQWQEHTLQAPATEPEDDHTAVLEDLRKEQAKVKAQLAKAYDLLEQEIYDTNTFIERSGTLKAKIADLQDSIDRIEESVREMSSRDDDMQKIMPKVKHLLEVYDTLPDASAKNQLLKEVLEKSEYSKENGTRWHGNPDDFEVVIYPKLPKMH

SEQ ID NO: 3161 - protein, 531 aa, Unknown
  Description of Unknown: Integrase B3162 sequence
  SM00857,G3DSA:1.10.10.2600,IPR036162,PS51737,G3DSA:3.40.50.1390, IPR006119,IPR038109,PF07508,IPR011109,SSF53041, PF00239,PTHR30461,PS51736,Coil,cd00338
MEQYCLYLRKSRSDIEAENHGEEETLARHEKILLDLAKKREYNVTQIYREVVSGETIAARPVMQQLLSEVEHGIWSGVLVVEVERLARGDTIDQGIVAQTFKYSDTQIITPMKTYNPNNEYDEEYFEFGLFMSRREYKTINRRLQRGRLSSVKEGKCVCSIAPYGYDKVKLKGDKGFTLAPNPNEADVIKMIFELYTKGEMQPDGTYKRLGVALIARKLNEMKIPARKSEYWVPASIKDMLRNPVYAGKIRWNWRSQNKRMQSGSISISRPRSEEDNCIIVNGLHPALITEETFDLAQEYLAKNPPRPTKRNAPTKNPLAGIVVCAFCGRKLVRRPYTSASCPPTLICSVPHCPNVSSFLHLVEERILKSLEEWLRNYKLQWNLSNNKPSELISESEILRQSLNDINSQIAKLNKQMIKAHELLEQDIYTTDVFLERSRTITERLNQLSYDKAEIEKRLGVETIREKSMKEIIPKVEKLLDVYHELPSAKEKNDMLKDVLEKVVYKKTQNTRWSGSPDDFEITIYPKLPKS

SEQ ID NO: 3162 - protein, 531 aa, Unknown
  Description of Unknown: Integrase B3163 sequence
  SM00857,G3DSA:1.10.10.2600,IPR036162,PS51737, G3DSA:3.40.50.1390,IPR006119,IPR038109,PF07508, IPR011109,SSF53041,PTHR30461,PS51736, cd00338,PF00239
MEQYCLYLRKSRSDIEAENHGEEETLARHEKILLELAKKREYNVTQIYREVVSGETIAARPVMQQLLSEVEHGIWSGVLVVEVERLARGDTIDQGIVAQTFKYSDTQIITPMKTYNPNNEYDEEYFEFGLFMSRREYKTINRRLQRGRLSSVKEGKCVCSIAPYGYDKVKLKGDKGFTLAPNPNEADVIKMIFELYTKGELQPDGTYKRIGVALIARKLNEMKIPARKSEYWVPASIKDMLRNPVYAGKIRWNWRSQNKRMQSGSISISRPRSEEDNCIIVNGLHPALITEETFDLVQEYLAKNPPRPTKRNAPTKNPLAGIVVCAFCGRKLVRRPYTSASCPPTLICSVPHCPNVSSFLHLVEERILKSLEEWLRNYKLQWNLSNNKPSELISESEILRQSLNDINSQTTKLNKQMIKAHELLEQDIYTTEVFLERSRTITERLNQLSYDKAEIEKRLGVETIREKSMKEIIPKVEKLLDVYHELPSAKEKNDMLKDVLEKVVYKKTQNTRWSGSPDDFEITIYPKLPKS

SEQ ID NO: 3163 - protein, 531 aa, Unknown
  Description of Unknown: Integrase B3164 sequence
  cd00338,SM00857,G3DSA:1.10.10.2600,IPR036162,PS51737, G3DSA:3.40.50.1390,IPR006119,IPR038109,PF07508,IPR011109, SSF53041,PTHR30461,PS51736,Coil,PF00239
MDTYCIYLRKSRADAEAEARGEGETLARHEHTLCDVAKRQKLHISKIYREIVSGETIAARPQMQQLLQDVESGIYAGVLVMEVERLARGDTIDQGIVAQAFKYSGTKIVTPTKTYDPDNEFDEEYFEFSLFMSRREYKTIKRRMQAGRAAAAKEGKYVGNKPPYGYDRKKLDHDSGFTLVPNPEEAKVVKLIFEWYVHGVVMDDGTKQRIGSTTIANRLHLMGCKTRYGGRWSLNTVRGILTNPVYAGIIRWGYLAEKKVLSDGVVTKSRPIAKDDYIMAKGLHEPLITLEEWETAQELGHQKRTIPKVNCSFKLQNPLAGILVCKKCGRSMTRRPYGKKNRQDTILCKTPDCPNVASDLCLVEQRLLDSLAEWLHQYEVQWQEHTLQAPATEPEDDQTAVLEDLRKEQAKVKAQLEKAYDLLEQDIYDTNTFVERSGTLKAKIADLQDSIDRIEKNVREMSSRDDDMQKIMPKVKHLLEVYDTLPDASAKNQLLKEVLEKAEYSKEHGTRWHGNPDDFEVVIYPKLPKMR

SEQ ID NO: 3164 - protein, 531 aa, Unknown
  Description of Unknown: Integrase B3165 sequence
  SM00857,G3DSA:1.10.10.2600,IPR036162,PF13408, IPR025827,G3DSA:3.40.50.1390,PS51737,IPR006119, IPR038109,PF07508,SSF53041,IPR011109, PF00239,PTHR30461,PS51736,Coil,cd00338
MARKKKQASGDAVIYARYSSHNQRDVSIEQQIEACRKYAASLGLKITVTYEDRAISGRTDNRPAFQRMMNDAEDGKFCYVLAWKSNRMGRNMMQAMVNEARLVDCGVKVYYAEEDFDDSAAGRFALRSMMNVNQFYSDNLAEDVRRGLMDNASKCIANGKQPFGYKRGSDGKVVLDEPAAAVVREVFTRVASGETNTSIARDLNRRGIKTGSNGEWNKCSFHGLCTNERYRGIYIYGETRIEGGIPRIIDDRLWHKVQEAIRMRNRRKNGRHRPGEDDYLLTGKLRCGHCGGYMIGMSGTSKTGTIHHYYACQNRRVGRTCDKKNIRRDIIEPAVAQAIKQYCLTDDVIEWIADKTIEYWEDEDRKLQITSLENELADIKSSISNVMKAIEQGVITSTTRDRLIELEAQQSDLSAKLNSAKEDLVHVDRKNLISSLLLFRNGDVYDRQYQEDLFNTFLVAAYVYDDGNRLKLVFNCFGDSNTVDLDLCSDENNDNSSISNEANCGNLFAQALKQSTRLKPSEEAQVAFLFV

SEQ ID NO: 3165 - protein, 531 aa, Unknown
  Description of Unknown: Integrase B3166 sequence
  PTHR30461:SF3,SM00857,G3DSA:1.10.10.2600,IPR036162,PF13408, IPR025827,G3DSA:3.40.50.1390,PS51737,IPR006119,IPR038109, PF07508,SSF53041,IPR011109,PF00239,PTHR30461, PS51736,Coil,cd00338
MKAAIYARFSSHNQREESIEGQVRACKRFAKEHGMTIVEIYADRGLSGLHADNRPEFQRMIQDSDHHRFEALIMWNLDRFSRDKYDTAVYKTRLKKNGVSLYYSDQSIPDTPEGIILESLLEGFAQYYSANLARNAKRGLQENARKCLWNGGCVPLGYLIDEHQRFVLEPIGAACVRMIFELYASGQSIKSIVCTLNEKGYKTVKGNRFRLGSIQGILRNRKYIGEYHASGITVPNGIPAIVDVQLFNDVQARLGVVASAKAHNKADIPYLLTTKVFCGHCGSPMIGESGTGKGGATYRYYKCSCRKNRKGTCDKKTEPKDWLEENVVRQTVKNVLRPEVIKEISENCAAALKADASDESLVQALKAQLAETDKALRNLLKAIEAGIISSTTRERMAELESQKSELEAQIAREQLRKPEITAEQISFWLESFLAGDIHDPKYQERIINALVRRVDVYDDGPEKQKLTIFYNITKNNRSFSKISISKCSDIECIALPKRSVAKATDFFLCFLQKDENRTAVNTVPFGTVEPS

SEQ ID NO: 3166 - protein, 531 aa, Unknown
  Description of Unknown: Integrase B3167 sequence
  PTHR30461:SF3,SM00857,G3DSA:1.10.10.2600,IPR036162,PS51737, G3DSA:3.40.50.1390,IPR006119,IPR038109,PF07508,IPR011109, SSF53041,PF00239,PTHR30461,PS51736,Coil, cd00338
MLYEINREDFENVIIYLRKSRADDPCMTVEEVLASHERQLQEYSMTFFGAKIPEDRIFREVVSGETIADRPVMKEVMTLLETGIIKGVLVIEPQRLSRGDLEDCGKIINTFRYTNTLVITPSKTYNISDEYDRKFFEMELTRGNDYLEYTKRILSRGKLASVKQGNFIGSVAPYGYKKVTKGTGKDTYHTLEIIPEQAEAVRLMFKLYLEGNGFTNISICLDRLGYKPLKSQHWSPAAISDILENPVYTGKIRWNYFKTVKKMQNGQIIKSRPINRDTSDVIIVPGKHEAIIDQKIFDAALERRGSTPKVKKGNELKNPFAGLLFCGTAGCGRSMSFKQYKDYRSKTDKRSEYMLCTNQRICHTKSVQYSAFVAKVKESLQASIKDFEVKLKAEQENADDLRQNIIKNLEAEISRLKIKDARQKDAYEDGLYSKEEYAKRNAKLQEQLYNAMNTLQQEKSATAPSVDYEEKIMRFKDCLAIIDDTTVSAGKKNELLKSCIERINYYNNCESKPGLGRYVDNPFHLEVILRL

SEQ ID NO: 3167 - protein, 531 aa, Unknown
  Description of Unknown: Integrase B3168 sequence
  PTHR30461:SF3,cd00338,SM00857,G3DSA:1.10.10.2600,IPR036162, PF13408,PS51737,G3DSA:3.40.50.1390,IPR025827,IPR006119, IPR038109,PF07508,IPR011109,SSF53041,PTHR30461, PS51736,Coil,PF00239
MARKKNIAAGQNAVIYARYSSHNQREVSIEQQVRECMKHAAELGLHVVGTYEDRAISGKTDKRPNFQRMMRDAEKGKFQAVVAWKSNRIGRNMLQAMVNEAKLEDCGVKVFYAEEDFDDTAAGRFALRNMMNVNQFYSENMAEDITRGLYDNASKCMANGRQPLGYKRGEDGRVVLDEANAAVVREIFTRVAAGDLFVDIARDLNAQGIKTSKGANWNKGSFQSICQNERYRGIYIYGDVRVVDGIPRIVSDDLWYRVQEAMRMKKNPVGTRHRVGAEDYLLTGKLRCGHCGSYMTGVSGTSRNGELHYYYTCQKRRTEHACDKKNIRRDVIEPAVAQAIKMYCLTDDVIEWMADRTVEYWEKHDNDLQIEALEQQLEENKKATSNMLKAIEMGIITEATRTRMVELETEQSRLSVQLNAAKEDVVKIDREQIISYLELLQQGDIHDRDFQMELFKNFLVAVYVYDDNRMKLVFSCMGDQNSVEIPLETGEDPPDGGLSPDAKMFVLTPDSSTKKTLHSLCGVFLFCTFVA

SEQ ID NO: 3168 - protein, 531 aa, Unknown
  Description of Unknown: Integrase B3169 sequence
  SM00857,G3DSA:1.10.10.2600,IPR036162,PF13408,PS51737, G3DSA:3.40.50.1390,IPR025827,IPR006119,IPR038109,PF07508, IPR011109,SSF53041,PTHR30461,Coil,PS51736, cd00338,PF00239
MAKPEVSELAVVYARYSSHSQGEQSIEGQLSNARDYAAAHGYTIVHEYVDRAKSGRTDNRAEFQQMLKDTAKRQFSVIILWKVDRFGRNREEIAINKMKCRKNGVRVEYVAETIPDSPEGVILESVLEGFAEYYSLQLSQNIRRGRAESAEKCQSLGGNRPLGYKTGPDKKFVIDENTAPTVKMIFTMYADGKTVTEIVDKLNEMGLRTLRGGPFTKNSLHSILKNKKYIGVYEYQGREIKDGVPRIIEDDVFNKVQEMLKINKRAPAKTWSRADYILTDKLFCGKCGALMFGESGTSKTGVKHNYYICSNKKRFRSCDKKAVRQADIEDTVLNATHELLQDDELLDYIVDRTWEYYLAQDNSQEKLRNLQRQLAQTDTAISNLIRAIEAGILTEETKKRMDELTQQKADLKASIADREIARGFHLQKSHIAFYLRSLRDADWSDKEAQKRLIQTFVNAVFVYDDHITLTYNFSGDKSTITLHDMQRFEDGEEFGCRASRSTKTTLDELKSSMVTSEWLSCVLYRTVILSS

SEQ ID NO: 3169 - protein, 531 aa, Unknown
  Description of Unknown: Integrase B3170 sequence
  SM00857,G3DSA:1.10.10.2600,IPR036162,PF13408,PS51737, G3DSA:3.40.50.1390,IPR025827,IPR006119,IPR038109,PF07508, IPR011109,SSF53041,PTHR30461,Coil,PS51736, cd00338,PF00239
MDTYCIYLRKSRADAEAEARGEGETLARHEHTLCDVAKRQKLHISKIYREIVSGETIAARPQMQQLLQDVENGIYAGVLVMEVERLARGDTIDQGIVAQAFKYSGTKIVTPTKTYDPDNEFDEEYFEFSLFMSRREYKTIKRRMQAGRAAAAKEGKYVGNKPPYGYDRKKLDHDSGFTLVPNPEEAKVVKLIFEWYVHGVVMDDGTKQRIGSTTIANRLHLMGCKTRYGGRWSLNTVRGILTNPVYAGIIRWGYLAEKKVLSDGVVTKSRPIAKDDYIMAKGLHEPLITLEEWETAQELGHQKRTIPKVNCNFKLQNPLAGILVCKKCGRSMTRRPYGKKNRQDTILCKTPGCPNVASDLYLVEQRLLDSLAEWLHQYEVQWQEHTLQAPATEPEDDQTAVLENLRKEQAKVKAQLAKAYDLLEQEIYDTNTFVERSGTLKAKIADLQDSIDRIEESVREMSSRDDDMQKIMPKVKHLLEVYDTLPDASAKNQLLKEVLEKAEYSKEHGTRWHGNPDDFEVVIYPKLPKMR

SEQ ID NO: 3170 - protein, 531 aa, Unknown
  Description of Unknown: Integrase B3171 sequence
  cd00338,SM00857,G3DSA:1.10.10.2600,IPR036162,PS51737, G3DSA:3.40.50.1390,IPR006119,IPR038109,PF07508,IPR011109, SSF53041,PTHR30461,PS51736,Coil,PF00239
MEQYCLYLRKSRSDIEAENHGEEETLARHEKILLDLAKKREYNVTQIYREVVSGETIAARPVMQQLLSEVEHGIWSGVLVVEVERLARGDTIDQGIVAQTFKYSDTQIITPMKTYNPNNEYDEEYFEFGLFMSRREYKTINRRLQRGRLSSVKEGKCVCSIAPYGYDKVKLKGDKGFTLAPNPNEADVIKMIFELYTKGELQPDGTYKRIGVALIARKLNEMKIPARKSEYWVPASIKDMLRNPVYAGKIRWNWRSQSKRMQSGSISISRPRSEEDNCIIVNGLHPALITEETFDLVQEYLAKNPPRPTKRNAPTKNPLAGIVVCAFCGRKLVRRPYTSASCPPTLICSVPHCPNVSSFLHLVEERILKSLEEWLRNYKLQWNLSNNKPSELISESEILRQSLNDINSQITKLNKQMIKAHELLEQDIYTTEVFLERSRAITERLNQLSYDKAEIEKRLGTETIREKSMKEIIPKVEKLLDVYHELPSAKEKNDMLKDVLEKVVYKKTQNTRWSGSPDDFEITIYPKLPKS

SEQ ID NO: 3171 - protein, 531 aa, Unknown
  Description of Unknown: Integrase B3172 sequence
  cd00338,SM00857,G3DSA:1.10.10.2600,IPR036162, PS51737,G3DSA:3.40.50.1390,IPR006119,IPR038109, PF07508,IPR011109,SSF53041,PTHR30461, PS51736,Coil,PF00239
MEQYCLYLRKSRSDIEAENHGEEETLARHEKILLELAKKREYNVTQIYREVVSGETIAARPVMQQLLSEVEHGMWSGVLVVEVERLARGDTIDQGIVAQTFKYSDTQIITPMKTYNPNNEYDEEYFEFGLFMSRREYKTINRRLQRGRLSSVKEGKCVCSIAPYGYDKVKLKGDKGFTLAPNPNEADVIKMIFELYTKGELQPDGTYKRIGVALIARKLNEMKIPARKSEYWVPASIKDMLRNPVYAGKIRWNWRSQNKRMQSGSISISRPRSEEDNCIIVNGLHPALITEETFGLAQEYLAKNPPRPTKRNAPTKNPLAGIVVCAFCGRKLVRRPYTSASCPPTLICSVPHCPNVSSFLHLVEERILKSLEEWLRNYKLQWNLSNNKPSELISESEILRQSLNDINSQIAKLNKQMIKAHELLEQDIYTTDVFLERSRTITERLNQLSYDKAEIEKRLGVETIREKSMKEIIPKVEKLLDVYHELPSAKEKNDMLKDVLEKVVYRKTQNTRWSGSPDDFEITIYPKLPKS

SEQ ID NO: 3172 - protein, 531 aa, Unknown
  Description of Unknown: Integrase B3173 sequence
  SM00857,G3DSA:1.10.10.2600,IPR036162,PS51737,G3DSA:3.40.50.1390, IPR006119,IPR038109,PF07508,IPR011109,SSF53041, PTHR30461,PS51736,cd00338,PF00239
MEQYCLYLRKSRSDVEAENHGEEETLARHEKILLELAKRREYNVTQIYREVVSGETIAARPVMQQLLSEVEHGIWSGVLVVEVERLARGDTVDQGIVAQTFKYSDTQIITPMKTYNPNNEYDEEYFEFGLFMSRREYKTINRRLQRGRLSSVKEGKCVCSIAPYGYDKVKLKGDKGFTLAPNPNEADVIKMIFELYTKGELQPDGTYKRIGVALIARKLNEMKIPARKSEYWVPASIKDMLRNPVYAGKIRWNWRSQNKRMQSGNISISRPRSEEDSCIIVNGLHPALITEETFDLVQEYLAKNPPRPTKRNAPTKNPLAGIVVCAFCGRKLVRRPYTSASCPPTLICSVPHCPNVSSFLHLVEERILKSLEEWLRNYKLQWNLSNNKPSELISESEILRQSLNDINSQTTKLNKQMIKAHELLEQDIYTTEVFLERSRAITERLNQLSYDKAEIEKRLGVETIREKSMKEIIPKVEKLLDVYHELPSAKEKNDMLKDVLEKVVYKKTQNTRWSGSPDDFEITIYPKLPKS

SEQ ID NO: 3173 - protein, 531 aa, Unknown
  Description of Unknown: Integrase B3174 sequence
  SM00857,G3DSA:1.10.10.2600,IPR036162,PF13408, PS51737,G3DSA:3.40.50.1390,IPR025827,IPR006119, IPR038109,PF07508,IPR011109,SSF53041, PF00239,PTHR30461,PS51736,Coil,cd00338
MARKKKQASGDAVIYARYSSHNQRDVSIEQQIEACRKYAASLGLKITVTYEDRAISGRTDNRPAFQRMMNDAEDGKFCYVLAWKSNRMGRNMMQAMVNEARLVDCGVKVYYAEEDFDDSAAGRFALRSMMNVNQFYSDNLAEDVRRGLMDNASKCIANGKQPFGYKRGSDGKVVLDEPAAAVVREVFTRVASGETNTSIARDLNRRGIKTGSNGEWNKCSFHGLCTNERYRGIYIYGETRIEGGVPRIIDDRLWHKVQEAIRMRNRRKNGRHRPGEDDYLLTGKLRCGHCGGYMIGMSGTSKTGTIHHYYACQNRRVGRTCDKKNIRRDIIEPAVAQAIKQYCLTDDVIEWIADKTIEYWEDEDRKLQITSLENELADIKSSISNVMKAIEQGVITSTTRDRLIELEAQQSDLSAKLNSAKEDLVHVDRKNLISSLLLFRNGDVYDRQYQEDLFNTFLVAAYVYDDGNRLKLVFNCFGDSNTVDLDLCSDENNDNSSISNEANCGNLFAQALKQSTRTKPSEETQVAFLFV

SEQ ID NO: 3174 - protein, 531 aa, Unknown
  Description of Unknown: Integrase B3175 sequence
  PTHR30461:SF3,cd00338,SM00857,G3DSA:1.10.10.2600,IPR036162, PF13408,PS51737,G3DSA:3.40.50.1390,IPR025827,IPR006119, IPR038109,PF07508,IPR011109,SSF53041,PTHR30461, PS51736,Coil,PF00239
MKKENEIRAVVYARYSSHSQTEQSIEGQISAAQIYAKAKGYTIVKEYVDRAKTGKNDNREAFQQMLSDTAKHEFSVIIVWKVDRFGRNREEITFNKYRCKKNDVRVEYIAEAVPDSPEGVILESVLEGMAEYYSLQLAQNIRRGIRASAEKCQAIGGHCSLGYAIDPKTKKYVIDPDTAPTVQLIFEKYAEGYTGMDIVRLLNEKGLRTVRGKPFTKNSLWTILKNERYAGVYLFKDEVRVEGGIPALVSRETFDKVQEMLEINHRSPVNTWNRATYLLTDKLFCGHCGSKMVGECGTSRTGATYNYYICAGKKRERNCSKKAVRQGWLEKVVLKQICRVLFDQEFLEFIAHKAYTYYLDEKKKLDQSAAIKAQLSSVESSIDNLIRAMEAGIFSASTKSRLDDLENQKAALTRTLAEIKLSEESFDLTEDRILFFLESMRGLDMDDVDSRKRLVKTFVNAVYLYDDKITLAFNFTDSCEKPEIIELADIADGVVEKFVHRASCSTITRTYELNVRLIKMCFVMTVERPVG

SEQ ID NO: 3175 - protein, 531 aa, Unknown
  Description of Unknown: Integrase B3176 sequence
  SM00857,G3DSA:1.10.10.2600,IPR036162,PF13408,PS51737, G3DSA:3.40.50.1390,IPR025827,IPR006119,IPR038109,PF07508, IPR011109,SSF53041,PF00239,PTHR30461,PS51736, Coil,cd00338
MARKKKQASGDAVIYARYSSHNQRDVSIEQQIEACRKYAASLGLKITVTYEDRAISGRTDNRPAFQRMMNDAEDGKFCYVLAWKSNRMGRNMMQAMVNEARLVDCGVKVYYAEEDFDDSAAGRFALRSMMNVNQFYSDNLAEDVRRGLMDNASKCIANGKQPFGYKRGSDGKVVLDEPAAAVVREVFTRVASGETNTSIARDLNRRGIKTGSNGEWNKCSFHGLCTNERYRGIYIYGETRIEGGVPRIIDDRLWHKVQEAIRMRNRRKNGRHRPDEDDYLLTGKLRCGHCGGYMIGMSGTSKTGTIHHYYACQNRRVGRTCDKKNIRRDIIEPAVAQAIKQYCLTDDVIEWIADKTIEYWEDEDRKLQITSLENELADIKSSISNVMKAIEQGVITSTTRDRLIELEAQQSDLSAKLNSAKEDLVHVDRKNLISSLLLFRNGDVYDRQYQEDLFNTFLVAAYVYDDGNRLKLVFNCFGDSNTVDLDLCSDENNDNSSISNEANCGNLFAQALKQSTRLKPSEEAQVAFLFV

SEQ ID NO: 3176 - protein, 531 aa, Unknown
  Description of Unknown: Integrase B3177 sequence
  cd00338,SM00857,G3DSA:1.10.10.2600,IPR036162,PS51737, G3DSA:3.40.50.1390,IPR006119,IPR038109,PF07508,SSF53041, IPR011109,PTHR30461,PS51736,Coil,PF00239
MEQYCLYLRKSRSDVEAENHGEEETLARHEKILLELAKRREYNVTQIYREVVSGETIAARPVMQQLLSEVEHGIWSGVLVVEVERLARGDTIDQGIVAQTFKYSDTQIITPMKTYNPNNEYDEEYFEFGLFMSRREYKTINRRLQRGRLSSVKEGKCVCSIAPYGYDKVKLKGDKGFTLAPNPNEADVIKLIFELYTKGELQPDGTYKRLGVALIARKLNEMKRPARKSEYWVPASIKDMLRNPVYAGKIRWNWRSQNKRMQSGSISISRPRSEEDNCIIVNGLHPALITEETFDLAQEYLAKNPPRPTKRNAPTKNPLAGIVVCDFCGRKLVRRPYTSASCPPTLICSVPHCPNVSSFLHLVEERILKSLEEWLRNYKLQWNLSNNKPSELISESEILRQSLNDINSQIAKLNKQMIKAHELLEQDIYTTDVFLERSRTITERLNQLSYDKAEIEKRLGVETIREKSMKEIIPKVEKLLDVYHELPSAKEKNDMLKDVLEKVVYKKTQNTRWSGSPDDFEITIYPKLPKS

SEQ ID NO: 3177 - protein, 531 aa, Unknown
  Description of Unknown: Integrase B3178 sequence
  PTHR30461:SF3,SM00857,G3DSA:1.10.10.2600,IPR036162,PF13408, IPR025827,PS51737,G3DSA:3.40.50.1390,IPR006119,IPR038109, PF07508,SSF53041,IPR011109,PTHR30461, Coil,PS51736,cd00338,PF00239
MKKENEIRAVVYARYSSHSQTEQSIEGQLAAAQTYAKAKGYTIVKEYVDRAKTGKNDNREAFQQMLSDTAKHEFSVIIVWKVDRFGRNREEITFNKYRCKKNDVRVEYIAEAVPDSPEGVILESVLEGMAEYYSLQLAQNIRRGIRASAEKCQAIGGHCSLGYAIDPKTKKYVIDPDTAPTVQLIFEKYAEGYTGMDIVRLLNEKGLRTVRGKPFTKNSLWTILKNERYAGVYLFKDEVRVEGGIPALVSRETFDKVQEMLEINHRSPVNTWNRATYLLTDKLFCGHCGSKMVGECGTSRTGATYNYYICAGKKRERNCSKKAVRQDWIEKVVLQQIRRVLFDQEFLEFIAHKAYTYYLEEKKKLDQSAAIKAQLSSVESSIDNLIRAMEAGIFSASTKSRLDDLENQKAALTRTLAEIKLSEESFDLTEDRILFFLESMRGLDMDDVDSRKRLVKTFVNAVYLYDDKITLAFNFTDSCEKPEIIELADIADGVVEKFVHRASCSTITRTYELNVRLVKMCFVMTVERPVG

SEQ ID NO: 3178 - protein, 531 aa, Unknown
  Description of Unknown: Integrase B3179 sequence
  SM00857,G3DSA:1.10.10.2600,IPR036162,PS51737,G3DSA:3.40.50.1390, IPR006119,IPR038109,PF07508,IPR011109,SSF53041, PF00239,PTHR30461,PS51736,Coil,cd00338
MEQYCLYLRKSRSDIEAENHGEEETLARHEKILLDLAKKREYNVTQIYREVVSGETIAARPVMQQLLSEVEHGIWSGVLVVEVERLARGDTIDQGIVAQTFKYSDTQIITPMKTYNPNNEYDEEYFEFGLFMSRREYKTINRRLQRGRLSSVKEGKCVCSIAPYGYDKVKLKGDKGFTLAPNPNEADVIKMIFELYTKGELQPDGTYKRLGVALIARKLNEMKIPARKSEYWVPASIKDMLRNPVYAGKIRWNWRSQNKRMQSGSISISRPRSEEDNCIIVNGLHPALITEETFDLAQEYLAKNPPRPTKRNAPTKNPLAGIVVCAFCGRKLVRRPYTSASCPPTLICSVPHCPNVSSFLHLVEERILKSLEEWLRNYKLQWNLSNNKPSELISESEILRQSLNDINSQIAKLNKQMIKAHELLEQDIYTTDVFLERSRTITERLNQLSYDKAEIEKRLGVETIREKSMKEIIPKVEKLLDVYHELPSAKEKNDMLKDVLEKVVYKKTQNTRWSGSPDDFEITIYPKLPKS

SEQ ID NO: 3179 - protein, 531 aa, Unknown
  Description of Unknown: Integrase B3180 sequence
  SM00857,G3DSA:1.10.10.2600,IPR036162,PF13408, IPR025827,PS51737,G3DSA:3.40.50.1390,IPR006119, IPR038109,PF07508,IPR011109,SSF53041, PTHR30461,cd00338,PF00239
MPRVPSHKQQSFAVIYARYSSDSQRDASIEDQLRECHAWADAHGYTIIEEYCDYAMTGRNDDRPAFQRMIADSDKGHFTAVITYQTSRFARNRYDAAVYKHRLKRAGVTVHYAASDIPEGPEGILLEALMEGMDEYYSANLSKNIRRGQEGNARKALFSGGAIPVGLRISPDRTYEPDPLTAPHVLRAFQMIDEGKMQKDVIDYFNTCGLRTNKGNPYTKDSVAHMFSNRKYLGEYRYRDVVIPGAFPAIVPEDLFERVQQRLAQNLHVKGGHARAMVDFLLTGKLFCGHCGSPMVGDSGTSRNGTTHYYYSCSCRKRGESCTKKSERRRPLEIAIVEETVRHVLQPDIITAVVDRVMEIYEREQREDHVLASLQAEEKTITTALTNLMAAIEMGIFTPTTRDRMLELEAQKKDVAARITIHQATRPRIDRDRVEFFLHSFRLGDPASTDYRRKVISSLIDRVTITDLPTPDGTPTHRRLDLVYNLTEHRTSTASLCSDAGGYPPLYPPHPNTIYIIDGQLRMWTTIEAPI

SEQ ID NO: 3180 - protein, 531 aa, Unknown
  Description of Unknown: Integrase B3181 sequence
  cd00338,SM00857,G3DSA:1.10.10.2600,IPR036162,PS51737, G3DSA:3.40.50.1390,IPR006119,IPR038109,PF07508,SSF53041, IPR011109,PTHR30461,PS51736,Coil,PF00239
MEQYCLYLRKSRSDVEAENHGEEETLARHEKILLELAKRREYNVTQIYREVVSGETIAARPVMQQLLSEVEHGIWSGVLVVEVERLARGDTIDQGIVAQTFKYSDTQIITPMKTYNPNNEYDEEYFEFGLFMSRREYKTINRRLQRGRLSSVKEGKCVCSIAPYGYDKVKLKGDKGFTLAPNPNEADVIKLIFELYTKGELQPDGTYKRLGVALIARKLNEMKIPARKSEYWVPASIKDMLRNPVYAGKIRWNWRSQNKRMQSGSISISRPRSEEDNCIIVNGLHPALITEVTFDLAQEYLAKNPPRPTKRNAPTKNPLAGIVVCAFCGRKLVRRPYTSASCPPTLICSVPHCPNVSSFLHLVEERILKSLEEWLRNYKLQWNLSNNKPSELISESEILRQSLNDINSQIAKLNKQMIKAHELLEQDIYTTEVFLERSRAITERLNQLSYDKAEIEKRLGIETIREKSMKEIIPKVEKLLDVYHELPSAKEKNDMLKDVLEKVVYKKTQNTRWSGSPDDFEITIYPKLPKS

SEQ ID NO: 3181 - protein, 531 aa, Unknown
  Description of Unknown: Integrase B3182 sequence
  cd00338,SM00857,G3DSA:1.10.10.2600,IPR036162, PS51737,G3DSA:3.40.50.1390,IPR006119,IPR038109, PF07508,IPR011109,SSF53041,PTHR30461, PS51736,Coil,PF00239
MEQYCLYLRKSRSDIEAENHGEEETLARHEKILLELAKKREYNVTQIYREVVSGETIAARPVMQQLLSEVEHGIWSGVLVVEVERLARGDTIDQGIVAQTFKYSDTQIITPMKTYNPNNEYDEEYFEFGLFMSRREYKTINRRLQRGRLSSVKEGKCVCSIAPYGYDKVKLKGDKGFTLAPNPNEADVIKLIFELYTKGELQPDGTYKRLGVALIARKLNEMKIPTRKSEYWVPASIKDMLRNPVYAGKIRWNWRSQNKRMQSGSISISRPRSEEDNCIIVNGLHPALITEETFDLAQEYLAKNPPRPTKRNAPTKNPLAGIVVCAFCGRKLVRRPYTSASCPPTLICSVPHCPNVSSFLHLVEERILKSLEEWLRNYKLQWNLSNNKPSELISESEILRQSLNDINSQIAKLNKQMIKAHELLEQDIYTTDVFLERSRTITERLNQLSYDKAEIEKRLGVETIREKSMKEIIPKVEKLLDVYHELPSAKEKNDMLKDVLEKVVYKKTQNTRWSGSPDDFEITIYPKLPKS

SEQ ID NO: 3182 - protein, 531 aa, Unknown
  Description of Unknown: Integrase B3183 sequence
  PTHR30461:SF3,SM00857,G3DSA:1.10.10.2600,IPR036162,PF13408, IPR025827,PS51737,G3DSA:3.40.50.1390,IPR006119,IPR038109, PF07508,SSF53041,IPR011109,PF00239,PTHR30461, PS51736,Coil,cd00338
MKAAIYARFSSHNQREESIEGQVRACKRFAKEHGMTIVEIYADRGLSGLHADNRPEFQRMIQDSDHHRFEALIMWNLDRFSRDKYDTAVYKTRLKKNGVSLYYSDQSIPDTPEGIILESLLEGFAQYYSANLARNAKRGLQENARKCLWNGGCVPLGYLIDEHQRFVLEPIGAACVRMIFELYASGQSIKSIVCTLNEKGYKTVKGNRFRLGSIQGILRNRKYIGEYHASGITVPNGIPAIVDVQLFNDVQARLGVVASAKAHNKADIPYLLTTKVFCGHCGSPMIGESGTGKGGATYRYYKCSCRKNRKGTCDKKTEPKDWLEENVVRQTVKNVLRPEVIKEISENCAAALKADASDESLVQALKAQLAETDKALRNLLKAIEAGIISSTTRERMAELESQKSELEAQIAREQLRKPEITAEQISFWLESFLAGDIHDPKYQERIINALVRRVDVYDDEPEKQKLTIFYNITKNNRSSSKISISKCSDIECIALPKRSVAKAADFFIRFLQKDENRTAVNTVPFGTVEPS

SEQ ID NO: 3183 - protein, 531 aa, Unknown
  Description of Unknown: Integrase B3184 sequence
  cd00338,SM00857,G3DSA:1.10.10.2600,IPR036162,PS51737, G3DSA:3.40.50.1390,IPR006119,IPR038109,PF07508,IPR011109, SSF53041,PTHR30461,PS51736,Coil,PF00239
MEQYCLYLRKSRSDVEAENHGEEETLARHEKILLELAKRREYNVTQIYREVVSGETIAARPVMQQLLSEVEHGLWSGVLVVEVERLARGDTIDQGIVAQTFKYSDTQIITPMKTYNPNNEYDEEYFEFGLFMSRREYKTINRRLQRGRLSSVKEGKCVCSIAPYGYDKVKLKGDKGFTLAPNPNEADVIKLIFELYTKGELQPDGTYKRLGVALIARKLNEMKIPARKSEYWVPASIKDMLRNPVYAGKIRWNWRSQSKRMQSGSISISRPRSEEDNCIIVNGLHPALITEETFDLVQEYLAKNPPRPTKRNAPTKNPLAGIVVCAFCGRKLVRRPYTSASCPPTLICSVPHCPNVSSFLHLVEERILKSLEEWLRNYKLQWNLSNSKPSELISESEILRQSLNDINSQITKLNKQMIKAHELLEQDIYTTEVFLERSRAITERLNQLSYDKAEIEKRLGVETIREKSMKEIIPKVEKLLDVYHELPSAKEKNDMLKDVLEKVVYKKTQNTRWSGSPDDFEITIYPKLPKS

SEQ ID NO: 3184 - protein, 531 aa, Unknown
  Description of Unknown: Integrase B3185 sequence
  PTHR30461:SF3,SM00857,G3DSA:1.10.10.2600,IPR036162,PS51737, G3DSA:3.40.50.1390,IPR006119,IPR038109,PF07508,SSF53041, IPR011109,PTHR30461,Coil,PS51736, cd00338,PF00239
MLYEINREDFENVIIYLRKSRADDPCMTVEEVLASHERQLQEYSMTFFGAKIPEERIFREVVSGETIADRPVMKEVMTLLETGIIKGVLVIEPQRLSRGDLEDCGKIINTFRYTNTLVITPSKTYNISDEYDRKFFEMELTRGNDYLEYTKRILSRGKLASVKQGNFIGSVAPYGYKKVTKGTGKDTYHTLEIIPEQAEAVRLMFKLYLEGNGFTNISICLDRLGYKPLKSQHWSPAAISDILENPVYTGKIRWNYFKTVKKMQNGQIIKSRPINRDTSDVIIVPGKHEAIIDQKIFDAALERRGSTPKVKKGNELKNPFAGLLFCGTAGCGRSMSFKQYKDYRSKTDKRSEYMLCTNQRICHTKSVQYSAFVAKVKESLQASIKDFEVKLKAEQENADDLRQNIIKNLEAEVSRLKIKDARQKDAYEDGLYSKEEYAKRNAKLQEQLYNTMNTLQQEKSATAPSVDYEEKIMRFKDCLAIIDDTTVSAGKKNELLKSCIERINYYNNCESKPGLGRYVDNPFHLEVILRL

SEQ ID NO: 3185 - protein, 531 aa, Unknown
  Description of Unknown: Integrase B3186 sequence
  SM00857,G3DSA:1.10.10.2600,IPR036162,PF13408,PS51737, IPR025827,G3DSA:3.40.50.1390,IPR006119,IPR038109,PF07508, IPR011109,SSF53041,PF00239,PTHR30461,PS51736, Coil,cd00338
MARKKKQASGDAVIYARYSSHNQRDVSIEQQIEACRKYAASLGLKITVTYEDRAISGRTDNRPAFQRMMNDAEDGKFCYVLAWKSNRMGRNMMQAMVNEARLVDCGVKVYYAEEDFDDSAAGRFALRSMMNVNQFYSDNLAEDVRRGLMDNASKCIANGKQPFGYKRGSDGKVVLDEPAAAVVREVFTRVASGETNTSIARDLNRRGIKTGSNGEWNKCSFHGLCTNERYRGIYIYGETRIEGGVPRIIDDRLWHKVQEAIRMRNRRKNGRHRPGEDDYLLTGKLRCGHCGGYMIGMSGTSKTGTIHHYYACQNRRVGRTCDKKNIRRDIIEPAVAQAIKQYCLTDDVIEWIADKTIEYWEDDDRKLQITSLENELADIKSSISNVMKAIEQGVITSTTRDRLIELETQQSDLSAKLNSAKEDLVHVDRKNLISSLLLFRNGDVYDRQYQEDLFNTFLVAAYVYDDGNRLKLVFNCFGDSNTVDLDLCSDENNDNSSISNEANCGNLFAQALKQSTRTKPSEEAQVAFLFV

SEQ ID NO: 3186 - protein, 531 aa, Unknown
  Description of Unknown: Integrase B3187 sequence
  cd00338,SM00857,G3DSA:1.10.10.2600,IPR036162,PS51737, G3DSA:3.40.50.1390,IPR006119,IPR038109,PF07508,IPR011109, SSF53041,PTHR30461,PS51736,Coil,PF00239
MEQYCLYLRKSRSDIEAENHGEEETLARHEKILLELAKKREYNVTQIYREVVSGETIAARPVMQQLLSEVEHGIWSGVLVVEVERLARGDTIDQGIVAQTFKYSDTQIITPMKTYNPNNEYDEEYFEFGLFMSRREYKTINRRLQRGRLSSVKEGKCVCSIAPYGYDKVKLKGDKGFTLAPNPNEADVIKLIFELYTKGELQPDGTYKRLGVALITRKLNEMKRPARKSEYWVPASIKDMLRNPVYAGKIRWNWRSQNKRMQSGSISISRPRSEEDNCIIVNGLHPALITEETFDLAQEYLAKNPPRPTKRNAPTKNPLAGIVVCAFCGRKLVRRPYTSASRPPTLICSVPHCPNVSSFLHLVEERILKSLEEWLRNYKLQWNLSNNKPSELISESEILRQSLNDINSQIAKLNKQMIKAHELLEQDIYTTDVFLERSRTITERLNQLSYDKAEIEKRLGVETIREKSMKEIIPKVEKLLDVYHELPSAKEKNDMLKDVLEKVVYKKTQNTRWSGSPDDFEITIYPKLPKS

SEQ ID NO: 3187 - protein, 531 aa, Unknown
  Description of Unknown: Integrase B3188 sequence
  SM00857,G3DSA:1.10.10.2600,IPR036162,PF13408, IPR025827,PS51737,G3DSA:3.40.50.1390,IPR006119, IPR038109,PF07508,IPR011109,SSF53041, PTHR30461,Coil,PS51736,cd00338,PF00239
MAKPEVSELAVVYARYSSHSQGEQSIEGQLSNARDYAAAHGYTIVHEYVDRAKSGRTDNRAEFQQMLKDTAKRQFSVIILWKVDRFGRNREEIAINKMKCRKNGVRVEYVAETIPDSPEGVILESVLEGFAEYYSLQLSQNIRRGRAESAEKCQSLGGNRPLGYKTGPDKKFVIDENTAPTVKMIFTMYADGKTVTEIVDKLNEMGLRTLRGGPFTKNSLHSILKNKKYIGVYEYQGREIKDGVPRIIEDDVFNKVQEMLKINKRAPAKTWSRADYILTDKLFCGKCGALMFGESGTSKTGVKHNYYICSNKKRFRSCDKKAVRQADIEDTVLNATHELLQDDELLDYIVDRTWEYYLAQDNSQEELRNLQRQLAQTDTAISNLIRAIEAGILTEETKTRMDELTQQKADLKASIADREIARGFHLQKSHIAFYLRSLRDADWSDKEAQKRLIQTFVNAVFVYDDHITLTYNFSGDKSTITLRDMQRFEDGEEFGCRASRSTKTTLDELKSSMVTSEWLSCVLYRTVILSS

SEQ ID NO: 3188 - protein, 531 aa, Unknown
  Description of Unknown: Integrase B3189 sequence
  PTHR30461:SF3,SM00857,G3DSA:1.10.10.2600,IPR036162,PS51737, G3DSA:3.40.50.1390,IPR006119,IPR038109,PF07508,IPR011109, SSF53041,PF00239,PTHR30461,PS51736,Coil, cd00338
MLYEINREDFENVIIYLRKSRADDPCMTVEEVLASHERQLQEYSMTFFGAKIPEERIFREVVSGETIADRPVMKEVMTLLETGIIKGVLVIEPQRLSRGDLEDCGKIINTFRYTNTLVITPSKTYNISDEYDRKFFEMELTRGNDYLEYTKRILSRGKLASVKQGNFIGSVAPYGYKKVTKGTGKDTYHTLEIIPEQAEAVRLMFKLYLEGNGFTNISICLDRLGYKPLKSQHWSPAAISDILENPVYTGKIRWNYFKTVKKMQNGQIIKSRPINRDTSDVIIVPGKHEAIIDQKIFDAALERRGSTPKVKKGNELKNPFAGLLFCGTAGCGRSMSFKQYKDYRSKTDKRSEYMLCTNQRICHTKSVQYSAFVAKVKESLQASIKDFEVKLKAEQENADDLRQNIIKNLEAEISRLKIKDARQKDAYEDGLYSKEEYAKRNAKLQEQLYNAMNTLQQEKSATAPSVDYEEKIMRFKDCLAIIDDTTVSAGKKNELLKSCIERINYYNNCESKPGLGRYVDNPFHLEVILRL

SEQ ID NO: 3189 - protein, 531 aa, Unknown
  Description of Unknown: Integrase B3190 sequence
  SM00857,G3DSA:1.10.10.2600,IPR036162,PF13408,PS51737, G3DSA:3.40.50.1390,IPR025827,IPR006119,IPR038109,PF07508, IPR011109,SSF53041,PF00239,PTHR30461,PS51736, Coil,cd00338
MARKKKQASGDAVIYARYSSHNQRDVSIEQQIEACRKYAASLGLKITVTYEDRAISGRTDNRPAFQRMMNDAEDGKFCYVLAWKSNRMGRNMMQAMVNEARLVDCGVKVYYAEEDFDDSAAGRFALRSMMNVNQFYSDNLAEDVRRGLMDNASKCIANGKQPFGYKRGSDGKVVLDEPAAAVVREVFTRVASGETNTSIARDLNRRGIKTGSNGEWNKCSFHGLCTNERYRGIYIYGETRIEGGVPRIIDDRLWHKVQEAIRMRNRRKNGRHRPGEDDYLLTGKLRCGHCGGYMIGMSGTSKTGTIHHYYACQNRRVGRTCDKKNIRRDIIEPAVAQAIKQYCLTDDVIEWIADKTIEYWEDEDRKLQITSLENELADIKSSISNVMKAIEQGVITSTTRDRLIELEAQQSDLSAKLNSAKEDLVHVDRKNLISSLLLFRNGDVYDRQYQEDLFNTFLVAAYVYDDGNRLKLVFNCFGDSNTIDLDLCSDENNDNSSISNEANCGNLFAQALKQSTRLKPSEETQVAFLFV

SEQ ID NO: 3190 - protein, 531 aa, Unknown
  Description of Unknown: Integrase B3191 sequence
  SM00857,G3DSA:1.10.10.2600,IPR036162,PF13408,PS51737, IPR025827,G3DSA:3.40.50.1390,IPR006119,IPR038109,PF07508, IPR011109,SSF53041,PF00239,PTHR30461,PS51736, Coil,cd00338
MARKKKQASGDAVIYARYSSHNQRDVSIEQQIEACRKYAASLGLKITVTYEDRAISGRTDNRPAFQRMMNDAEDGKFCYVLAWKSNRMGRNMMQAMVNEARLVDCGVKVYYAEEDFDDSAAGRFALRSMMNVNQFYSDNLAEDVRRGLMDNASKCIANGKQPFGYKRGSDGKVVLDEPAAAVVREVFTRVASGETNTSIARDLNRRGIKTGSNGEWNKCSFHGLCTNERYRGIYIYGETRIEGGVPRIIDDRLWHKVQEAIRMRNRRKNGRHRPGEDDYLLTGKLRCGHCGGYMIGMSGTSKTGTIHHYYACQNRRVGRTCDKKNIRRDIIEPAVAQAIKQYCLTDDVIEWIADKTIEYWEDEDRKLQITSLENELADIKSSISNVMKAIEQGVITSTTRDRLIELEAQQSDLSAKLNSAKEDLVHVDRKNLISSLLLFRNGDVYDRQYQEDLFNTFLVAAYVYDDGNRLKLVFNCFGDSNTVDLDLCSDENNDNSSILNEANCGNLFAQALKQSTRLKPSEEAQVAFLFV

SEQ ID NO: 3191 - protein, 531 aa, Unknown
  Description of Unknown: Integrase B3192 sequence
  PTHR30461:SF3,cd00338,SM00857,G3DSA:1.10.10.2600,IPR036162, PF13408,IPR025827,G3DSA:3.40.50.1390,PS51737,IPR006119, IPR038109,PF07508,SSF53041,IPR011109,PTHR30461, PS51736,Coil,PF00239
MLYDIKSVDLENIIIYLRKSRSDDPSMSVEEVLASHERQLQEYSKTMFGEKIPEEHIFREVVSGETIADRPVMKEIMKLLETGMVKAVLVIEPQRLSRGDLEDCGRIVNTFRYTNTLIVTPPKTYNLSDEYDRKFFEMELTRGNDYLEYTKKILNRGRYASVKQGNFIGSIAPYGYKKVKNVSSHSKSYTLEIIPEEADAVKMMYHLYVDEGFGFARIARQLDELGIKPRHASHWSSSALKDMIENPVYIGKIRWNWRKTEKIMVDGQIVKTRPKTKDPSQWIYVDGKHEPIIDEETYNKAIGKRRINVSVRKSKEIVNPFAGLLFCGKCGKAMSYKRTYNRKKDGSKAYCLSMLCNDQAVCKTKSVKYDALEDRVIQVLKDSIADFELKLENDDGNAHKIQMDLIQDLQNTITNLKQKDARQKDAYEDGIYTKQEYAVRNAKVQEEIAEAKKALANAQNTLPPSVDYNEKIIKFTDCLNAFHSPDVSPREKNNLLKACVSKILYYNDGVSKVGIGRHVENKFNIEVTLRL

SEQ ID NO: 3192 - protein, 531 aa, Unknown
  Description of Unknown: Integrase B3193 sequence
  PTHR30461:SF3,SM00857,G3DSA:1.10.10.2600,IPR036162,PF13408, IPR025827,G3DSA:3.40.50.1390,PS51737,IPR006119,IPR038109, PF07508,SSF53041,IPR011109,PTHR30461,Coil, PS51736,cd00338,PF00239
MKAAIYARFSSHNQREESIEGQVRACKRFAKEHGMTVIEIYADRGLSGLHADNRPEFQRMIQDSDHHRFEALIMWNLDRFSRDKYDTAVYKTRLKKNGVSLYYSDQSIPDTPEGIILESLLEGFAQYYSANLARNAKRGLQENARKCLWNGGCVPLGYLIDEHQRFVLEPIGAACVRMIFELYASGQSIKSIVCTLNEKGYKTVKGNRFRLGSIQGILRNRKYIGEYHASGITVPNGIPAIVDVQLFNDVQARLGVVASAKAHNKADIPYLLTTKVFCGHCGSPMIGESGTGKGGATYRYYKCSCRKNRKGTCDKKTEPKDWLEENVVRQTVKNVLRPEVIKEISENCAAALKADASDESLVQALKAQLAETDKGLRNLLKAIEAGIISSTTRERMAELESQKSELEAQIAREQLRKPEITAEQISFWLESFLAGDIHDPKYQERIINALVRRVDVYDDGPEKQKLTIFYNITKNNHSSSKISISKCSDIECIALPKRSVAKAADFFIRFLQKDENRTAVNTVPFGTVEPS

SEQ ID NO: 3193 - protein, 531 aa, Unknown
  Description of Unknown: Integrase B3194 sequence
  PTHR30461:SF3,SM00857,G3DSA:1.10.10.2600,IPR036162,PF13408, IPR025827,G3DSA:3.40.50.1390,PS51737,IPR006119,IPR038109, PF07508,IPR011109,SSF53041,PF00239,PTHR30461, Coil,cd00338
MKKFKFPIDLSMLTEEEINQFREDPSTLFQGDTDVCLYLRFSSERQKEQSIEGQLRDCIAYCKRKNYRIVAIYVDRATTARKDVEKRVHFQEMITASVHQTWKLVIVWKLDRFARNREDSAIFKMRLRRNGVKVESATEGISKNPEGIILEAVLEGMAEYYSADLSQKITRGMRESALKCHSIGGHVPLGYKIEDHKLVINPDTAHIVQEAFELYANGETVADICRMFNAKGYRTAKGAEFNRNSFKSMFRNRRYIGVYRYKDFEKEGGVPAIIDKELFETVQRRLSTNAEAPARGKAKVDYLLAGKLFCGHCGGSMNGESGTSKTGAVHNYYTCYTRKRHHSCDKKPLRKEWIEQIVAQDAMELLTDDAIQEMADMAISQTEKDLRENTRIPELSERMKETESGISNITKAVEKGIASDALMNRLVELEKEKKNLLRLIAEEEKYVCKIDRDQIVYWLTKFKDGNIEDENFKRIIIDLMVNSVTVWDEPDGFRITTAYNLTSCKNKTFRIPSSSDKGFGFEGLESTKKGG

SEQ ID NO: 3194 - protein, 531 aa, Unknown
  Description of Unknown: Integrase B3195 sequence
  PTHR30461:SF3,cd00338,SM00857,G3DSA:1.10.10.2600,IPR036162, PF13408,PS51737,IPR025827,G3DSA:3.40.50.1390,IPR006119, IPR038109,PF07508,IPR011109,SSF53041,PTHR30461, PS51736,Coil,PF00239
MKKDNEIRAVVYARYSSHSQTEQSIEGQISAAQVYAKAKGYTIVKEYVDRAKTGKNDNREAFQQMLSDTAKHEFSVIIVWKVDRFGRNREEITFNKYRCKKNDVRVEYIAEAVPDSPEGVILESVLEGMAEYYSLQLAQNIRRGIRASAEKCQAIGGHCSLGYAIDPKTKKYVIDPDTAPTVQLIFEKYAEGYTGMDIVRLLNEKGLRTVRGKPFTKNSLWTILKNERYAGVYLFKNEVRVEGGIPALVSRETFDKVQEMLEINHRSPVNTWNRATYLLTDKLFCGHCGSKMVGECGTSRTGATYNYYICAGKKRERNCSKKAVRQDWIEKVVLQQIRRVLFDQEFLEFIAHKAYTYYLDEKKKLDQSAAIKAQLSSVESSIDNLIRAMEAGIFSASTKSRLDDLENQKAALTRTLAEIKLSEESFDLTEDRILFFLESMRGLDMDDVDSRKRLVKTFVNAVYLYDDKITLAFNFTDSCEKPEIIELADIADGVVEKFVHRASCSTITRTYELNVQLIKMCFVMTVERPVG

SEQ ID NO: 3195 - protein, 531 aa, Unknown
  Description of Unknown: Integrase B3196 sequence
  cd00338,SM00857,G3DSA:1.10.10.2600,IPR036162,PS51737, G3DSA:3.40.50.1390,IPR006119,IPR038109,PF07508,IPR011109, SSF53041,PTHR30461,PS51736,Coil,PF00239
MEQYCLYLRKSRSDVEAENHGEEETLARHEKILLELAKRREYNVTQIYREVVSGETIAARPVMQQLLSEVEHGIWSGVLVVEVERLARGDTIDQGIVAQTFKYSDTQIITPMKTYNPNNEYDEEYFEFGLFMSRREYKTINRRLQRGRLSSVKEGKCVCSIAPYGYDKVKLKGDKGFTLAPNPNEADVIKMIFELYTKGELQPDGTYKRIGVALIARKLNEMKIPARKSEYWVPASIKDMLRNPVYAGKIRWNWRSQNKRMQSGSISISRPRSEEDNCIIVNGLHPALITEETFDLVQEYLAKNPPRPTKRNAPTKNPLAGIVVCAFCGRKLVRRPYTSASCPPTLICSVPHCPNVSSFLHLVEERILKSLEEWLRNYKLQWNLSNNKPSELISESEILRQSLNDINSQIAKLNKQMIKAHELLEQDIYTTDVFLERSRTITERLNQLSYDKAEIEKRLGVETIREKSMKEIIPKVEKLLDVYHELPSAKEKNDMLKDVLEKVVYKKTQNTRWSGSPDDFEITIYPKLPKS

SEQ ID NO: 3196 - protein, 531 aa, Unknown
  Description of Unknown: Integrase B3197 sequence
  PTHR30461:SF3,SM00857,G3DSA:1.10.10.2600,IPR036162,PF13408, PS51737,G3DSA:3.40.50.1390,IPR025827,IPR006119,IPR038109, PF07508,IPR011109,SSF53041,PF00239, PTHR30461,PS51736,Coil,cd00338
MENAVIYARYSSDKQTEQSIEGQLRICTAYAEQNNFNIVHHYIDRAMSGTNDRRPEFQQMISDSSGKQFRYIIVYKFDRFARNMYDSAIYEHKLEQNGVKVLSATEQVGDGNESLIIKAVLRAMAEMYSRQLSDNVKRGMKESALKANSTGGTIPFGYRLEDKKLVLDDRTAPFAKYIFEEYAAGKAKMDIVRDLKDKGCRKNNGKVLTIQNITYILSNIKYTGVFKFKDIEVEDGCPALVGKEIFDRCKERAERERRKYGKSAQEVDYLLVGKLYCGYCKKPMIGDSGTSRNGDKHHYYTCYTRKSRRRTGETCKKKSEQKEFLEWYVVQQVKEYILDNRRIEIITDAIIKKFKEMFDSSGEEAFLRRLRSIDHEVDDAVDALLKTKNPAALDKINARLEDLQMERNNVEAELSKFRITKDVIPDREDLLEWLKSFQGDALDPEYQKKMIDTFINAIYLYDDKVVICFNLKGGKQVSGIEELEHSDELDECSSSLLNGSPCWTRTNDPAVNSGCVWYTIWHHTIPYSVKR

SEQ ID NO: 3197 - protein, 531 aa, Unknown
  Description of Unknown: Integrase B3198 sequence
  PTHR30461:SF3,SM00857,G3DSA:1.10.10.2600,IPR036162,PF13408, PS51737,G3DSA:3.40.50.1390,IPR025827,IPR006119,IPR038109, PF07508,SSF53041,IPR011109,PF00239,PTHR30461, PS51736,Coil,cd00338
MKNGFTIINEYCDRALSGKTDNRPMFQKLIRDSEKRQFEAVVMYTLDRFARNRYDSAIYKAKLKKNGVKVFYAKQPMPDTPEGIILESVLEGYAEYYSENLARNIRRGLKENALQGIAVGGANLALGYTVGPDRKYVVEPIGAKIVQEIFQMYADGHSASQIIDYCNEKGYKTARGNPFNKNSLKTILRNEKYIGTYKYMDVVIPHGVPAIIEDTLFEKVQAMLKHNSTARAKSKAHEDYLLTSKVFCGHCGSPMIGESGTSKTGKVYYYYKCAARKRSLACRKAPERKDWLEEVVVRFTVQKVLTDENIARIAKKAMELIEGDSADNSYLMALQGELKGIHIKINNLVSAIEQGIITPSTKNRLTELEGEKNEVEGKIAAEEMKKPLLTRERIEYWLTSFKSGDIDDVEYRRRVIDTLVNSIYVYDEDDGSKTIVFTFNLSGQNTATLKSSDFGCFAPPSANKANTMVFFVGHVFGVILRNERSPAREKSLAGFWHYLASISCGISQNNSSKGTFSTFAMIYSSISRTHR

SEQ ID NO: 3198 - protein, 531 aa, Unknown
  Description of Unknown: Integrase B3199 sequence
  SM00857,G3DSA:1.10.10.2600,IPR036162,PS51737,G3DSA:3.40.50.1390, IPR006119,IPR038109,PF07508,IPR011109,SSF53041, PF00239,PTHR30461,PS51736,Coil,cd00338
MEQYCLYLRKSRSDVEAENHGEEETLARHEKILLELAKKREYNVTQIYREVVSGETIAARPVMQQLLSEVEHGIWSGVLVVEVERLARGDTIDQGIVAQTFKYSDTQIITPMKTYNPNNEYDEEYFEFGLFMSRREYKTINRRLQRGRLSSVKEGKCVCSIAPYGYDKVKLKGDKGFTLAPNPNEADVIKMIFELYTKGELQPDGTYKRIGVALIARKLNEMKIPARKSEYWVPASIKDMLRNPVYAGKIRWNWRSQNKSMQSGSISISRPRSEEDNCIIVNGLHPALITEETFDLAQEYLAKNPPRPTKRNAPTKNPLAGIVVCAFCGRKLVRRPYTSASCPPTLICSVPHCPNVSSFLHLVEERILKSLEEWLRNYKLQWNLSNNKPSELISESEILRQSLNDINSQITKLNKQMIKAHELLEQDIYTTEVFLERSRAITERLNQLSYDKAEIEKRLGVETIREKSMKEIIPKVEKLLDVYHELPSAKEKNDMLKDVLEKVVYKKTQNTRWSGSPDDFEITIYPKLPKS

SEQ ID NO: 3199 - protein, 531 aa, Unknown
  Description of Unknown: Integrase B3200 sequence
  PTHR30461:SF3,cd00338,SM00857,G3DSA:1.10.10.2600,IPR036162, PF13408,IPR025827,G3DSA:3.40.50.1390,PS51737,IPR006119, IPR038109,PF07508,IPR011109,SSF53041, PTHR30461,PS51736,Coil,PF00239
MKKENEIRAVVYARYSSHSQTEQSIEGQISAAQVYAKAKGYTIVKEYVDRAKTGKNDNREAFQQMLSDTAKHEFSVIIVWKVDRFGRNREEITFNKYRCKKNDVRVEYIAEAVPDSPEGVILESVLEGMAEYYSLQLAQNIRRGIRASAEKCQAIGGHCSLGYAIDPKTKKYVIDPDTAPTVQLIFEKYAEGYTGMDIVRLLNEKGLRTVRGKPFTKNSLWTILKNERYAGVYLFKDEVRVEGGIPALVSRETFDKVQEMLEINHRSPVNTWNRATYLLTDKLFCGHCGSKMVGECGTSRTGATYNYYICAGKKRERNCSKKAVRQDWIEKVVLQQIRRVLFDQEFLEFIAHKAYTYYLEEKKKLDQSAAIKAQLSSVESSIDNLIRAMEAGIFSASTKSRLDDLENQKAALTRTLAEIKLSEESFDLTEDRILFFLESMRGLDMDDVDSRKRLVKTFVNAVYLYDDKITLAFNFTDSCEKPEIIELADIADGVVEKFVHRSSCSTITRTYELNVRLIKMCFVMTVERPVG

SEQ ID NO: 3200 - protein, 531 aa, Unknown
  Description of Unknown: Integrase B3201 sequence
  PTHR30461:SF3,cd00338,SM00857,G3DSA:1.10.10.2600,IPR036162, PF13408,IPR025827,G3DSA:3.40.50.1390,PS51737,IPR006119, IPR038109,PF07508,IPR011109,SSF53041,PTHR30461, PS51736,Coil,PF00239
MKKENEIRAVVYARYSSHSQTEQSIEGQISAAQIYAKAKGYTIVKEYVDRAKTGKNDNREAFQQMLSDTAKHEFSVIIVWKVDRFGRNREEITFNKYRCKKNDVRVEYIAEAVPDSPEGVILESVLEGMAEYYSLQLAQNIRRGIRASAEKCQAIGGHCSLGYAIDPKTKKYVIDPDTAPTVQLIFEKYAEGYTGMDIVRLLNEKGLRTVRGKPFTKNSLWTILKNERYAGVYLFKDEVRVEGGIPALVSRETFDKVQEMLEINHRSPVNTWNRATYLLTDKLFCGHCGSKMVGECGTSRTGATYNYYICAGKKRERNCSKKAVRQDWIEKVVLQQIRRVLFDQEFLGFIAHKAYTYYLEEKKKLDQSAAIKAQLSSVESSIDNLIRAMEAGIFSASTKSRLDDLENQKAALTRTLAEIKLSEESFDLTEDRILFFLESMRGLDMDDVDSRKRLVKTFVNAVYLYDDKITLAFNFTDSCEKPEIIELADIADGVVEKFVHRASCSTKTRTYELNVRLIKMCFVMTVERPVG

SEQ ID NO: 3201 - protein, 531 aa, Unknown
  Description of Unknown: Integrase B3202 sequence
  PTHR30461:SF3,SM00857,G3DSA:1.10.10.2600,IPR036162,PF13408, IPR025827,G3DSA:3.40.50.1390,PS51737,IPR006119,IPR038109, PF07508,SSF53041,IPR011109,PF00239,PTHR30461, PS51736,Coil,cd00338
MTAVIYARYSSDNQREESIEGQIRECTAYAEKNGITVVKHYIDRAISAKTDNRPEFQQMIKDSDKKLFDIVLVWKLDRFARNRYDSARYKTQLKKNGVKLMSATEIISEGPEGIILESVLEGYAEYYSADLAEKVVRGQTENILKGRCNGGRGTFGYTLDSERKFHIDPLTSPFVLESFKKYNEGSTMKEIRDWLNENGIKNPVGGAFTYNSVEHMLKNRRYIGELKFRDVVVPDAIPPIIPLELFEDVQEKIAKNKKAPARRKAEDDYLLTTKLFCGYCGALMFGESGTSRTGEVHRYYKCATAKKHRGCKKKTVRKQWLEDLVVNQTMQLVKDDAAMESIIAKVMELQNKENTNIPLYEKQLRDAESGIQNMLNAIQAGILTSSTKERLEQLEETKRELEARIAEEKLAKPKVTEEFIRFWLLRFRKLDMSLKDQRQALVDTFINAIYLYDDKVLITFNYKEGTQTVTFGEATEVASEGNGSDLDCFTAPRSIHGMPMKSRYFVDFFVICVYRILPDTARYCLLLPGTL

SEQ ID NO: 3202 - protein, 531 aa, Unknown
  Description of Unknown: Integrase B3203 sequence
  PTHR30461:SF3,cd00338,SM00857,G3DSA:1.10.10.2600,IPR036162, PF13408,IPR025827,G3DSA:3.40.50.1390,PS51737,IPR006119, IPR038109,PF07508,IPR011109,SSF53041,PTHR30461, Coil,PF00239
MKKFKFPIDLSMLTEEEINQFREDPSTLFQGEIDVCLYLRFSSERQKEQSIEGQLRDCIAHCKRKSYRIVAIFVDRATTARKDVEKRVHFQEMITASVHQTWKLVIVWKLDRFARNREDSAVFKMRLRKNGVKVESATEGISKNPEGIILEAVLEGIAEYYSADLSQKITRGMRESALKCHSIGGHVPLGYKIEDHRLVINPNTAHIVQEAFELYANGETVADICRMFNTKGYRTAKGAEFNRNSFKSMFRNKRYIGVYTYKEIEKEGGVPAIIDKELFETVQRRLSANAEAPARGKAKVDYLLAGKLFCGHCGGSMNGESGTSKTGAIHHYYSCYSRKRHHSCDKKPLRKEWIEQIVAQDAMELLTDDAIQEMADMAISQTEKDLRENTRIPELSERMKETESGIANITKAVEKGIASDALMSRLVELEKEKKNLLRLIAEEEKYVCKIDRDQIVYWLTKFKDGNIEDENFKRIIIDLMVNSVTVWDEPDSFRITTAYNLTSCKNKTFRISSSSDKGFGFEGLESTMKKA

SEQ ID NO: 3203 - protein, 531 aa, Unknown
  Description of Unknown: Integrase B3204 sequence
  PTHR30461:SF3,SM00857,G3DSA:1.10.10.2600,IPR036162,PF13408, IPR025827,PS51737,G3DSA:3.40.50.1390,IPR006119,IPR038109, PF07508,IPR011109,SSF53041,PTHR30461,Coil, PS51736,cd00338,PF00239
MGKKQKTNGGDAVIYARYSSHNQRDVSIEQQVEACRKHAAELGLTVTATYEDRAISGKTDKRPSFQRMMRDAEQHKFAYVLAWKSNRIGRNMMQALVNESRLVDCGVKVFYAEEDFDDNAAGRFALRSMMNVNQFYIENMAEDVKRGLYDNAKKGLVNGSLPLGYKRGADGKPEIDEPKAAIVREIYTRVAAGELFASIADDLNARGIKTARGREWNKGSFHVLCHNDRYRGIYMYGDIRIPGGMPRIISDELFYDAQEAYSMKKDNRYGRARHGAENYLLTGKLYCGHCGGYMVGISGTSKTGEMHYYYACQKHRLEHTCEKKAIRRDVIENAVARAIMMYCLDDETIDFIVDSTIAYFKQKDHELHIEAMENELAAVQQAISNLMKAIEAGIITPTTRTRLLDLEEQQAKLSAKINTAKAERVEIDRDNLIAGLQLFRTGDIKNKKFLAKLFNTFLIAVYLYDDNRLKIVFSFTGNHNSVEIPLELDNDCPDSEIVSDETEVRMSHLECGRSGTLHIPHKNPCGSRKAF

SEQ ID NO: 3204 - protein, 531 aa, Unknown
  Description of Unknown: Integrase B3205 sequence
  SM00857,G3DSA:1.10.10.2600,IPR036162,PF13408,PS51737, G3DSA:3.40.50.1390,IPR025827,IPR006119,IPR038109,PF07508, IPR011109,SSF53041,PF00239,PTHR30461,PS51736, Coil,cd00338
MARKKKQASGDAVIYARYSSHNQRDVSIEQQIEACRKYAASLGLKITVTYEDRAISGRTDNRPAFQRMMNDAEDGKFCYVLAWKSNRMGRNMMQAMVNEARLVDCGVKVYYAEEDFDDSAAGRFALRSMMNVNQFYSDNLAEDVRRGLMDNASKCIANGKQPFGYKRGSDGKVVLDEPAAAVVREVFTRVASGETNTSIARDLNRRGIKTGSNGEWNKCSFHGLCTNERYRGIYIYGETRIEGGVPRIIDDRLWHKVQEAIRMRNRRKNGRHRPGEDDYLLTGKLRCGHCGGYMIGMSGTSKTGTIHHYYACQNRRVGRTCDKKNIRRDIIEPAVAQAIKQYCLTDDVIEWIADKTIEYWEDEDRKLQITSLENELADIKSSISNVMKAIEQGVITSTTRDRLIELEAQQSDLSAKLNSAKEDLVHVDRKNLISSLLLFRNGDVYDRQYQEDLFNTFLVAAYVYDDGNRLKLVFNCFGDSNTVDLDLCSDENNDNSSISNEANCGNLFAQALKQSTRLKPSEEAQVAFLFV

SEQ ID NO: 3205 - protein, 531 aa, Unknown
  Description of Unknown: Integrase B3206 sequence
  SM00857,G3DSA:1.10.10.2600,IPR036162,PS51737,G3DSA:3.40.50.1390, IPR006119,IPR038109,PF07508,IPR011109,SSF53041, PTHR30461,PS51736,cd00338,PF00239
MEQYCLYLRKSRSDIEAENHGEEETLARHEKILLELAKKREYNVTQIYREVVSGETIAARPVMQQLLSEVEHGIWSGVLVVEVERLARGDTIDQGIVAQTFKYSDTQIITPMKTYNPNNEYDEEYFEFGLFMSRREYKTINRRLQRGRLSSVKEGKCVCSIAPYGYDKVKLKGDKGFTLAPNPNEADVIKMIFELYTKGELQPDGTYKRIGVALIARKLNEMKIPARKSEYWVPASIKDMLRNPVYAGKIRWNWRSQSKRMQSGSISISRPRSEEDNCIIVNGLHPALITEETFDLVQEYLAKNPPRPTKRNAPTKNPLAGIVVCAFCGRKLVRRPYTSASCPPTLICSVPHCPNVSSFLHLVEERILKSLEEWLRNYKLQWNLSNNKPSKLISESEILRQSLNDINSHIAKLNKQMIKAHELLEQDIYTTDVFLERSRTITERLNQLSYDKAEIEKRLGVETIREKSMKEIIPKVEKLLDVYHELPSAKEKNDMLKDVLEKVVYKKTQNTRWSGSPDDFEITIYPKLPKS

SEQ ID NO: 3206 - protein, 531 aa, Unknown
  Description of Unknown: Integrase B3207 sequence
  PTHR30461:SF3,cd00338,SM00857,G3DSA:1.10.10.2600, IPR036162,PF13408,IPR025827,PS51737, G3DSA:3.40.50.1390,IPR006119,IPR038109,PF07508, IPR011109,SSF53041,PTHR30461,PS51736,Coil,PF00239
MKKENEIRAVVYARYSSHSQTEQSIEGQISAAQVYAKAKGYTIVKEYVDRAKTGKNDNREAFQQMLSDTAKHEFSVIIVWKVDRFGRNREEITFNKYRCKKNDVRVEYIAEAVPDSPEGVILESVLEGMAEYYSLQLAQNIRRGIRASAEKCQAIGGHCSLGYAIDPKTKKYVIDPDTAPTVQLIFEKYAEGYTGMDIVRLLNEKGLRTVQGKPFTKNSLWTILKNERYAGVYLFKDEVRVEGGIPALVSRETFDKVQEMLEINHRSPVNTWNRATYLLTDKLFCGHCGSKMVGECGTSRTGATYNYYICAGKKRERNCSKKAVRQGWIEKVVLQQIRRVLFDQEFLEFIAHKAYTYYLDEKKKLDQSAAIKAQLSSVESSIDNLIRAMEAGIFSASTKSRLDDLENQKAALTRTLAEIKLSEESFDLTEDRILFFLESMRGLDMDDVDSRKRLVKTFVNAVYLYDDKITLAFNFTDSCEKPEIIELADIADGVVEKFVHRASCSTITRTYELNVQFIKMCFVMTVERPVG

SEQ ID NO: 3207 - protein, 530 aa, Unknown
  Description of Unknown: Integrase B3208 sequence
  SM00857,G3DSA:1.10.10.2600,IPR036162,PS51737,G3DSA:3.40.50.1390, IPR006119,IPR038109,PF07508,IPR011109,SSF53041, PF00239,PTHR30461,PS51736,Coil,cd00338
MEQYLIYLRKSRSDLEAEAHGEGETLSRHEHTLLELAKRQHLNVTDIYREVVSGDTIAARPMMQRVLSEVEQGVWSGVLVMEVERLARGDTIDQGIIAQTFKFSGTKIITPIKTYDPDNEFDEEYFEFGLFMSRREYKIINRRLQRGRLASAKEGKWPSGLAPFGYRRVKLKNEKGCSLEPIEEQAAIVRMIFDLYTVGLQDEDGSARPLSLGSIATRLNDMHIPSPSGSQWARITIRGIIKNPTYIGMVRWGSRETKKKVVDGKVVSVRGPADPEKECVFKGIHPPLIPKETFELANDKLTRSENTSTHKEKVVRNPLAGLLVCSECGRQMMRMINPVHPDMPVVRCPRRGCPNCSSYLPIVEERVIQGLSEWMKGYELEWSSAAVSSSVSSVGVREKALASAEAELRKLQQQLERTHDFLEQGIYDTDTFLSRSRMLSDKITAAKESAARCSRELTEEKLRETSRRDIIPKVKNLLDVYPLLETAEEKNALLKDVLEKVVYQKLNEKRKKSPDGFIIEIYPRIPKSEK

SEQ ID NO: 3208 - protein, 530 aa, Unknown
  Description of Unknown: Integrase B3209 sequence
  PTHR30461:SF3,cd00338,SM00857,G3DSA:1.10.10.2600,IPR036162, PF13408,IPR025827,G3DSA:3.40.50.1390,PS51737,IPR006119, IPR038109,PF07508,SSF53041,IPR011109, PTHR30461,PS51736,Coil,PF00239
MQTIPIDLSALTPEERQQFADNPSVLSSDCEAVCCLYMRYSSDRQTEQSIEGQLRELIAYCKHHSYRVAAIYVDRAISAHASMDKRPAFQQMLADSARSSWKTVLVYKLDRFARNREDSAIARMRLRKNGCNVESAKEGISKNPEGVILEALLEGMAEYYSLELSQKITRGMRESAIKGNCLGGQIPLGYKIENKKYVIDPLTAPLVKEAFSRYGDGETAASICADFNARGYRTASGAEFNKSSFKNIFRNEKYIGVYKYKEMRREGIIPRIIADDAWIAVQSRLKVNEAAPARGKAKVAYLLAGKIFCGHCGAPMTGECGRGKSGKMYNYYSCATRKHHNSCEKKPVPKDWLEDVVAQDALDVLTDEIIEFVAEVAAQQSEEDIQKNTQIPVIRKKISEIENKIRNLTKALECASVAPDAIVERLAELEAQKKGLSTQLSDEERGVIPLTKESVVVYLKAVREKAVPLETQKAMLIEMLVNSVTVYDDEPGFLKLVYAYRLTQIPTRTYRVPIPAKVPCSDFRTQPAPK

SEQ ID NO: 3209 - protein, 530 aa, Unknown
  Description of Unknown: Integrase B3210 sequence
  cd00338,SM00857,G3DSA:1.10.10.2600,IPR036162,PS51737, G3DSA:3.40.50.1390,IPR006119,IPR038109,PF07508,SSF53041, IPR011109,PTHR30461,PS51736,Coil,PF00239
MEQYLIYLRKSRSDLEAEAHGEGETLSRHEHTLLELAKRQHLNVTDIYREVVSGDTIAARPMMQRVLSEVEQGVWSGVLVMEVERLARGDTIDQGIIAQTFKFSGTKIITPIKTYDPDNEFDEEYFEFGLFMSRREYKIINRRLQRGRLASAKEGKWPSGLAPFGYRRVKLKNEKGCSLEPIEEQAAIVRMIFDLYTVGLQDEDGSARPLSLGSIATRLNDMHIPSPSGSQWARITIRGIIKNPTYIGMVRWGSRETKKKVVDGKVVSVRGPADPEKECVFKGIHPPLVPKETFELANDKLARSENTSTHKEKVVRNPLAGLLVCSECGRQMMRMINPVHPDMPVVRCPRRGCPNCSSYLPIVEERVIQGLSEWMKGYELEWSSAAASSSVSSVGVREKALASAEAELRKLQQQLERTHDFLEQGIYDTDTFLSRSRMLSDKIAAAKDSVTRCSRELTEEKLRETSRRDIIPKVKNLLDVYPLLETAEEKNALLKEVLEKVVYQKLNEKRKKSPDGFTIEIYPRIPKSEK

SEQ ID NO: 3210 - protein, 530 aa, Unknown
  Description of Unknown: Integrase B3211 sequence
  SM00857,G3DSA:1.10.10.2600,IPR036162,PS51737, G3DSA:3.40.50.1390,IPR006119,IPR038109,PF07508, IPR011109,SSF53041,PF00239,PTHR30461, PS51736,Coil,cd00338
MEQYLIYLRKSRSDLEAEAHGEGETLSRHEHTLLELAKRQHLNVTDIYREVVSGDTIAARPMMQRVLSEVEQGVWSGVLVMEVERLARGDTIDQGIIAQTFKFSGTKIITPIKTYDPDNEFDEEYFEFGLFMSRREYKIINRRLQRGRLASAKEGKWPSGLAPFGYRRVKLKNEKGCSLEPIEEQAAIVRMIFDLYTVGLQDEDGSARPLSLGSIATRLNDMHIPSPSGSQWARITIRGIIKNPTYIGMVRWGSRETKKKVVDGKVVSVRGPADPEKECVFKGIHPPLIPKETFELANDKLTRSENTSTHKEKVVRNPLAGLLVCSECGRQMMRMINPVHPDMPVVRCPRRGCPNCSSYLPIVEERVMQGLSEWMKGYELEWSSVAASSSVSSVGVREKALASAEAELRKLQQQLERTHDFLEQGIYDTDTFLSRSRMLSDKIAAAKDSVARCSRELTEEKLRETSRRDIIPKVKNLLDVYPLLETAEEKNALLKEVLEKVVYQKLNEKRKKSPDGFTIEIYPRIPKSEK

SEQ ID NO: 3211 - protein, 530 aa, Unknown
  Description of Unknown: Integrase B3212 sequence
  SM00857,G3DSA:1.10.10.2600,IPR036162,PS51737,G3DSA:3.40.50.1390, IPR006119,IPR038109,PF07508,SSF53041,IPR011109, PTHR30461,Coil,PS51736,cd00338,PF00239
MEQYLIYLRKSRSDLEAEAHGEGETLSRHEHTLLELAKRQHLNVTDIYREVVSGDTIAARPMMQRVLSEVEQGVWSGVLVMEVERLARGDTIDQGIIAQTFKFSGTKIITPIKTYDPDNEFDEEYFEFGLFMSRREYKIINRRLQRGRLASAKEGKWPSGLAPFGYRRVKLKNEKGCSLEPIEEQAAIVRMIFDLYTVGLQDEDGSARPLSLGSIATRLNDMHIPSPSGSQWARITIRGIIKNPTYIGMVRWGSRETKKKVVDGKVVSVRGPADPEKECVFKGIHPPLVPKETFELANDKLTRSENTSTHKEKVVRNPLAGLLVCSECGRQMMRMINPVHPDMPVVRCPRRGCPNCSSYLPIVEERVIQGLSEWMKGYELEWSSAAASSSVSSVGVREKALASAEAELRKLQQQLERTHDFLEQDIYDTDTFLSRSRMLSDKIAAAKDSVTRCSRELTEEKLRETSRRDIIPKVKNLLDVYPLLETAEEKNALLKEVLEKVVYQKLNEKRKKSPDGFTIEIYPRIPKSEK

SEQ ID NO: 3212 - protein, 530 aa, Unknown
  Description of Unknown: Integrase B3213 sequence
  cd00338,SM00857,G3DSA:1.10.10.2600,IPR036162, PS51737,G3DSA:3.40.50.1390,IPR006119,IPR038109, PF07508,IPR011109,SSF53041,PTHR30461, PS51736,Coil,PF00239
MEQYLIYLRKSRSDLEAEAHGEGETLSRHEHTLLELAKRQHLNVTDIYREVVSGDTIAARPMMQRVLSEVEQGVWSGVLVMEVERLARGDTIDQGIIAQTFKFSGTKIITPIKTYDPDNEFDEEYFEFGLFMSRREYKIINRRLQRGRLASAKEGKWPSGLAPFGYRRVKLKNEKGCSLEPIEEQAAIVRMIFDLYTVGLQDEDGSAHPLSLGSIATRLNDMHIPSPSGSQWARITIRGIIKNPTYIGMVRWGSRETKKKVVDGKVVSVRGPADPEKECVFKGIHPPLIPKETFELANDKLTRSENTSTHTEKVVRNPLAGLLVCSECGRQMMRMINPVHPDMPVVRCPRRGCPNCSSYLPIVEERVIQGLSEWMKGYELEWSSAAASSSVSSVGVREKALASAEAELRKLQQQLERTHDFLEQGIYDTDTFLSRSRMLSDKIAAAKDSVARCSRELTEEKLRETSRRDIIPKVKNLLDVYPLLETAEEKNALLKEVLEKVVYQKLNEKRKKSPDGFTIEIYPRIPKSEK

SEQ ID NO: 3213 - protein, 530 aa, Unknown
  Description of Unknown: Integrase B3214 sequence
  cd00338,SM00857,G3DSA:1.10.10.2600,IPR036162,PS51737, G3DSA:3.40.50.1390,IPR006119,IPR038109,PF07508,IPR011109, SSF53041,PTHR30461,PS51736,Coil,PF00239
MEQYLIYLRKSRSDLEAEAHGEGETLSRHEHTLLELAKRQHLNVTDIYREVVSGDTIAARPMMQRVLSEVEQGVWSGVLVMEVERLARGDTIDQGIIAQTFKFSGTKIITPIKTYDPDNEFDEEYFEFGLFMSRREYKIINRRLQRGRLASAKEGKWPSGLAPFGYRRVKLKNEKGCSLEPIEEQAAIVRMIFDLYTVGLQDEDGSARPLSLGSIATRLNDMHIPSPSGSQWARITIRGIIKNPTYIGMVRWGSRETKKKVVDGKVVSVRGPADPEKECVFKGIHPPLVPKETFELANDKLTRSENTSTHKEKVVRNPLAGLLVCSECGRQMMRMINPVHPDMPVVRCPRRGCPNCSSYLPIVEERVIQGLSEWMKGYELEWSSAAASSSVSSVGVREKALASAETELRKLQQQLERTHDFLEQGIYDTDTFLSRSRMLSDKIAAAKDSVTRCSRELTEEKLRETSRRDIIPKVKNLLDVYPLLETAEEKNALLKEVLEKVVYQKLNEKRKKSPDGFTIEIYPRIPKSEK

SEQ ID NO: 3214 - protein, 530 aa, Unknown
  Description of Unknown: Integrase B3215 sequence
  SM00857,G3DSA:1.10.10.2600,IPR036162,PS51737, G3DSA:3.40.50.1390,IPR006119,IPR038109,PF07508, IPR011109,SSF53041,PTHR30461,Coil, PS51736,cd00338,PF00239
MEQYLIYLRKSRSDIEAEAHGEGETLSRHEHTLLELAKRQHLNVTDIYREVVSGDTIAARPMMQRVLSEVEQGVWSGVLVMEVERLARGDTIDQGIIAQTFKFSGTKIITPIKTYDPDNEFDEEYFEFGLFMSRREYKIINRRLQRGRLASAKEGKWPSGLAPFGYRRVKLKNEKGCSLEPIEEQAAIVRMIFDLYTVGLQDEDGSARPLSLGSIATRLNDMHIPSPSGSQWARITIRGIIKNPTYIGMVRWGSRETKKKVVDGKVVSVRGPADPEKECVFKGIHPPLIPKETFELANDKLTRSENTSTHKEKVVRNPLAGLLVCSECGRQMMRMINPVHPDMPVVRCPRRGCPNCSSYLPIVEERVIQGLSEWMKGYELEWSSAAASSSVSSVGVREKALASAEAELRKLQQQLERTHDFLEQGVYDTDTFLSRSRMLSDKIAAAKDSVARCSRELTEEKLRETSRRDIIPKVKNLLDVYPLLETAEEKNALLKEVLEKVVYQKLNEKRKKSPDGFTIEIYPRIPKSEK

SEQ ID NO: 3215 - protein, 530 aa, Unknown
  Description of Unknown: Integrase B3216 sequence
  SM00857,G3DSA:1.10.10.2600,IPR036162,PS51737,G3DSA:3.40.50.1390, IPR006119,IPR038109,PF07508,IPR011109,SSF53041, PTHR30461,Coil,PS51736,cd00338,PF00239
MEQYLIYLRKSRSDLEAEAHGEGETLSRHEHTLLELAKRQHLNVTDIYREVVSGDTIAARPMMQRVLSEVEQGVWSGVLVMEVERLARGDTIDQGIIAQTFKFSGTKIITPIKTYDPDNEFDEEYFEFGLFMSRREYKIINRRLQRGRLASAKEGKWPSGLAPFGYRRVKLKNEKGCSLEPIEEQAAIVRMIFDLYTVGLQDEDGSARPLSLGSIATRLNDMHIPSPSGSQWARITIRGIIKNPTYIGMVRWGSRETKKKVVDGKVVSVRGPADPEKECIFKGIHPPLIPKETFELANDKLTRSENTSTHKEKVVRNPLAGLLVCSECGRQMMRMINPVHPDMPVVRCPRRGCPNCSSYLPIVEERVIQGLSEWMKGYELEWSSAAASSSVSSVGVREKALASAEAELRKLQQQLERTHDFLEQGIYDTDTFLSRSRMLSDKIAAAKDSVARCSRELTEEKLRETSRRDIIPKVKNLLDVYPLLETAEEKNALLKEVLEKVVYQKLNEKRKKSPDGFTIEIYPRIPKSEK

SEQ ID NO: 3216 - protein, 530 aa, Unknown
  Description of Unknown: Integrase B3217 sequence
  SM00857,G3DSA:1.10.10.2600,IPR036162,PS51737, G3DSA:3.40.50.1390,IPR006119,IPR038109,PF07508, SSF53041,IPR011109,PF00239,PTHR30461, PS51736,Coil,cd00338
MEQYLIYLRKSRSDLEAEAHGEGETLSRHEHTLLELAKRQHLNVTDIYREVVSGDTIAARPMMQRVLSEVEQSVWSGVLVMEVERLARGDTIDQGIIAQTFKFSGTKIITPIKTYDPDNEFDEEYFEFGLFMSRREYKIINRRLQRGRLASAKEGKWPSGLAPFGYRRVKLKNEKGCSLEPIEEQAAIVRMIFDLYTVGLQDEDGSARPLSLGSIATRLNDMHIPSPSGSQWARITIRGIIKNPTYIGMVRWGSRETKKKVVDGKVVSVRGPADPEKECVFKGIHPPLVPKETFELANDKLTRSENTSTHKEKVVRNPLAGLLVCSECGRQMMRMINPVHPDMPVVRCPRRGCPNCSSYLPIVEERVIQGLSEWMKGYELEWSSAAASSSVSSVGVREKALASAETELRKLQQQLERTHDFLEQGIYDTDTFLSRSRMLSDKIAAAKDSVTRCSRELTEEKLRETSRRDIIPKVKNLLDVYPLLETAEEKNALLKEVLEKVVYQKLNEKRKKSPDGFTIEIYPRIPKSEK

SEQ ID NO: 3217 - protein, 530 aa, Unknown
  Description of Unknown: Integrase B3218 sequence
  cd00338,SM00857,G3DSA:1.10.10.2600,IPR036162,PS51737, G3DSA:3.40.50.1390,IPR006119,IPR038109,PF07508,IPR011109, SSF53041,PTHR30461,PS51736,Coil,PF00239
MEQYLIYLRKSRSDLEAEAHGEGETLSRHEHTLLELAKRQHLNVTDIYREVVSGDTIAARPMMQRVLSEVEQGVWSGVLVMEVERLARGDTIDQGIIAQTFKFSGTKIITPIKTYDPDNEFDEEYFEFGLFMSRREYKIINRRLQRGRLASAKEGKWPSGLAPFGYRRVKLKNEKGCSLEPIEEQAAIVRMIFDLYTVGLQDEDGSARPLSLGSIATRLNDMRIPSPSGSQWARITIRGIIKNPTYIGMVRWGSRETKKKVVDGKVVSVRGPADPEKECVFKGIHPPLIPKETFELANDKLTRSENTSTRKEKVVRNPLAGLLVCSECGRQMMRMINPVHPDMPVVRCPRRGCPNCSSYLPIVEERVIQGLSEWMKGYELEWSSAAASSSVSSVGVREKALTSAEAELRKLQQQLERTHDFLEQGIYDTDTFLSRSRMLSDKIASAKDSVTRCSRELTEEKLRETSRRDIIPKVKNLLDVYPLLETAEEKNALLKEVLEKVVYQKLNEKRKKSPDGFTIEIYPRIPKSEK

SEQ ID NO: 3218 - protein, 530 aa, Unknown
  Description of Unknown: Integrase B3219 sequence
  SM00857,G3DSA:1.10.10.2600,IPR036162,PS51737, G3DSA:3.40.50.1390,IPR006119,IPR038109,PF07508, IPR011109,SSF53041,PTHR30461,Coil, PS51736,cd00338,PF00239
MEQYLIYLRKSRSDLEAEAHGEGETLSRHEHTLLELAKRQHLNVTDIYREVVSGDTIAARPMMQRVLSEVEQGVWSGVLVMEVERLARGDTIDQGIIAQTFKFSGTKIITPIKTYDPDNEFDEEYFEFGLFMSRREYKIINRRLQRGRLASAKEGKWPSGLAPFGYRRVKLKNEKGCSLEPIEEQAAIVRMIFDLYTVGLQDEDGSARPLSLGSIATRLNDMHIPSPSGSQWARITIRGIIKNPTYIGMVRWGSRETKKKVVDGKVVSVRGPADPEKECIFKGIHPPLIPKETFELANDKLTRSENTSTHKEKVVRNPLAGLLVCSECGRQMMRMINPAHPDMPVVRCPRRGCPNCSSYLPIVEERVIQGLSEWMKGYELEWSSAAASSSVSSVGVREKALASAEAELRKLQQQLERTHDFLEQGIYDTDTFLSRSRMLSDKIAAAKDSVTRCSRELTEEKLRETSRRDIIPKVKNLLDVYPLLETAEEKNALLKEVLEKVVYQKLNEKRKKSPDGFTIEIYPRIPKSEK

SEQ ID NO: 3219 - protein, 530 aa, Unknown
  Description of Unknown: Integrase B3220 sequence
  cd00338,SM00857,G3DSA:1.10.10.2600,IPR036162,PS51737, G3DSA:3.40.50.1390,IPR006119,IPR038109,PF07508,IPR011109, SSF53041,PTHR30461,PS51736,Coil,PF00239
MEQYLIYLRKSRSDLEAEAHGEGETLSRHEHTLLELAKRQHLNVTDIYREVVSGDTIAARPMMQRVLSEVEQGVWSGVLVMEVERLARGDTIDQGIIAQTFKFSGTKIITPIKTYDPDNEFDEEYFEFGLFMSRREYKIINRRLQRGRLASAKEGKWPSGLAPFGYRRVKLKNEKGCSLEPIEEQAAIVRMIFDLYTVGLQDEDGSARPLSLGSIATRLNDMHIPSPSGSQWARITIRGIIKNPTYIGMVRWGSRETKKKVVDGKVVSVRGPADPEKECVFKGIHPPLVPKETFELANDKLTRSENTSTHKEKVVRNPLAGLLVCSECGRQMMRMINPVHPDMPVVRCPRRGCPNCSSYLPIVEERVIQGLSEWMKGYELEWSSAAASSSVSSVGVREKALASAETELRKLQQQLERTHDFLEQGIYDTDTFLSRSRMLSDKIAAAKDSVTRCSRELTEEKLRETSRRDIIPKVKNLLDVYPLLETAEEKNALLKEVLEKVAYQKLNEKRKKSPDGFTIEIYPRIPKSEK

SEQ ID NO: 3220 - protein, 530 aa, Unknown
  Description of Unknown: Integrase B3221 sequence
  cd00338,SM00857,G3DSA:1.10.10.2600,IPR036162, PS51737,G3DSA:3.40.50.1390,IPR006119,IPR038109, PF07508,IPR011109,SSF53041,PTHR30461, PS51736,Coil,PF00239
MEQYLIYLRKSRSDLEAEAHGEGETLSRHEHTLLELAKRQHLNVTDIYREVVSGDTIAARPMMQRVLSEVEQGVWSGVLVMEVERLARGDTIDQGIIAQTFKFSGTKIITPIKTYDPDNEFDEEYFEFGLFMSRREYKIINRRLQRGRLASAKEGKWPSGLAPFGYRRVKLKNEKGCSLEPIEEQAAIVRMIFDLYTVGLQDEDGSARPLSLGSIATRLNDMHIPSPSGSQWARITIRGIIKNPTYIGMVRWGSRETKKKVVDGKVVSVRGPADPEKECIFKGIHPPLIPKETFELANDKLTRSENTSTHKEKVVRNPLAGLLVCSECGRQMMRMINPVHPDMPVVRCPRRGCPNCSSYLPIVEERVIQGLSEWMKGYELEWSSAAASSSVSSVGVREKALASAEAELRKLQQQLERTHDFLEQGIYDTDTFLSRSRMLSDKIAAAKDSVTRCSRELTEEKLRETSRRDIIPKVKNLLDVYPLLETAEEKNALLKEVLEKVVYQKLNEKRKKSPDGFTIEIYPRIPKSEK

SEQ ID NO: 3221 - protein, 530 aa, Unknown
  Description of Unknown: Integrase B3222 sequence
  PTHR30461:SF3,cd00338,SM00857,G3DSA:1.10.10.2600,IPR036162, PF13408,PS51737,G3DSA:3.40.50.1390,IPR025827,IPR006119, IPR038109,PF07508,IPR011109,SSF53041,PTHR30461, PS51736,Coil,PF00239
MARKKNIAAGQNAVIYARYSSHNQREVSIEQQVRECMKHAAELGLHVVGTYEDRAISGKTDKRPNFQRMMRDAEKGKFQAVVAWKSNRIGRNMLQAMVNEAKLEDCGVKVFYAEEDFDDTAAGRFALRNMMNVNQFYSENMAEDITRGLYDNASKCMANGRQPLGYKRGEDGRVVLDDANAAVVREIFTRVAAGDLFVDIARDLNAQGIKTSKGANWNKGSFQSICQNERYRGIYIYGDVRVVDGIPRIVSDDLWYRVQEAMRMKKNPVGTRHRVGAEDYLLTGKLRCGHCGSYMTGVSGTSRNGELHYYYTCQKRRTEHACDKKNIRRDVIEPAVAQAIKMYCLTDDVIEWMADRTVEYWEKHDNDLQIEALEQQLEENKKATSNMLKAIEMGIITEATRTRMVELETEQSRLSVQLNAAKEDVVKIDREQIISYLELLQQGDIHDRDFQMELFKNFLVAVYVYDGNRMKLVFSCMGDQNSVEIPLETGEDPPDGGLSPDAKMFVLTPDSSTKKALYFVGSTVLFFLLS

SEQ ID NO: 3222 - protein, 530 aa, Unknown
  Description of Unknown: Integrase B3223 sequence
  cd00338,SM00857,G3DSA:1.10.10.2600,IPR036162,PS51737, G3DSA:3.40.50.1390,IPR006119,IPR038109,PF07508,IPR011109, SSF53041,PTHR30461,PS51736,Coil,PF00239
MEQYLIYLRKSRSDLEAEAHGEGETLSRHEHTLLELAKRQHLNVTDIYREVVSGDTIAARPMMQRVLSEVEQGVWSGVLVMEVERLARGDTIDQGIIAQTFKFSGTKIITPIKTYDPDNEFDEEYFEFGLFMSRREYKIINRRLQRGRLASAKEGKWPSGLAPFGYRRVKLKNEKGCSLEPIEEQAAIVRMIFDLYTVGLQDEDGSARPLSLGSIATRLNDMHIPSPSGSQWARITIRGIIKNPTYIGMVRWGSRETKKKVVDGKVVSVRGPADPEKECIFKGIHPPLIPKETFELANDKLARSENTSTHKEKVVRNPLAGLLVCSECGRQMMRMINPVHPDMPVVRCPRRGCPNCSSYLPVVEERVIQGLSEWMKGYELEWSSAAVSSSVSSVGVREKALASAEAELRKLQQQLERTHDFLEQGIYDTDTFLSRSRMLSDKIAAAKESVTRCSRELTEEKLRETSRRDIIPKVKNLLDVYPLLETAEEKNALLKEVLEKVVYQKLNEKRKKSPDGFTIEIYPRIPKSEK

SEQ ID NO: 3223 - protein, 530 aa, Unknown
  Description of Unknown: Integrase B3224 sequence
  PTHR30461:SF3,SM00857,G3DSA:1.10.10.2600,IPR036162,PF13408, IPR025827,G3DSA:3.40.50.1390,PS51737,IPR006119,IPR038109, PF07508,IPR011109,SSF53041,PTHR30461, Coil,PS51736,cd00338,PF00239
MQTIPIDLSALTPEERQQFADNPSVLSSDCEAVCCLYMRYSSDRQTEQSIEGQLRELIAYCKHHSYRVAAIYVDRAISAHASMDKRPAFQQMLSDSARSSWKTVLVYKLDRFARNREDSAIARMRLRKNGCNVESAKEGISKNPEGVILEALLEGMAEYYSLELSQKITRGMRESAIKGNCLGGQIPLGYKIENKKYVIDPLTAPLVKEAFSRYGDGETAASICADFNARGYRTASGAEFNKSSFKNIFRNEKYIGVYKYKEMRREGIIPRIIADDAWIAVQSRLKDNEAAPARGKAKVAYLLAGKIFCGHCGAPMTGECGRGKSGKMYNYYSCATRKHHNSCEKKPVPKDWLEDVVAQDALDVLTDEIIEFVAEVAAQQSEEDIQKNTQIPVIRKKISEIENKIHNLTKALECASVAPDAIVERLAELEAQKKGLATQLSDEERGVVPLTKESVVVYLKAVRENAVPLETQKAMLIDMLVNSVTVYDDEPGFLKLIYAYRLTQIPARTYRVPISEKVPCSDFRTQPAPK

SEQ ID NO: 3224 - protein, 530 aa, Unknown
  Description of Unknown: Integrase B3225 sequence
  PTHR30461:SF3,SM00857,G3DSA:1.10.10.2600,IPR036162,PF13408, IPR025827,PS51737,G3DSA:3.40.50.1390,IPR006119,IPR038109, PF07508,IPR011109,SSF53041,PTHR30461,cd00338, PF00239
MPTSKNTARKYAAGGSSDNSCGVEPLRAVIYARYSSSGQREESIEGQLRDCYEFAKKHGIIVIGEYIDKAMTGRVDRRPDFQRMMKDSEKGRFNCVLLWKMDRFARNRYDSAMYKYKLKKNGIRIFYAKETIPDGPEGIILESVMEGYAEYYSENLAQNVKRGNYDSALELKTLGKTCLGLKTGPDGRYMIDQAEAAIVRRIFEEYAEGERAKDIYERLNSEGYRTSRGGKFNKNSLRRILSNKKYIGVYEYEDIYVENGIPAIITDRDLFERVQKMLKINHDAPARGKAQNFLLTTKLFCGLCGSPMIGDGGTSHTGKAYAYYSCTKRKRGRSCKKESVPKDWIEDLVVGELVKIVHNDELIEQIADRVMEYQKREKDQSGLHALEIRQKENEKAISNMLAAIEAGIITPSTKTRLMELEADRADIEKGIAHELLAEPEFERDQIIYFLERFRSGDINDEAYRIMLVDTFLNSVYLYDDDHLVLVMNYSGENCKVDLKLVEGAVSGDDCKGSAFAPSSALQHRFCKKWC

SEQ ID NO: 3225 - protein, 530 aa, Unknown
  Description of Unknown: Integrase B3226 sequence
  cd00338,SM00857,G3DSA:1.10.10.2600,IPR036162,PS51737, G3DSA:3.40.50.1390,IPR006119,IPR038109,PF07508,IPR011109, SSF53041,PTHR30461,PS51736,Coil,PF00239
MEQYLIYLRKSRSDLEAEAHGEGETLSRHEHTLLELAKRQHLNVTDIYREVVSGDTIAARPMMQRVLSEVEQGVWSGVLVMEVERLARGDTIDQGIIAQTFKFSGTKIITPIKTYDPDNEFDEEYFEFGLFMSRREYKIINRRLQRGRLASAKEGKWPSGLAPFGYRRVKLKNEKGCSLEPIEEQAAIVRMIFDLYTVGLQDEDGSARPLSLGSIATRLNDMHIPSPSGSQWARITIRGIIKNPTYIGMVRWGSRETKKKVVDGKVVSVRGPADPEKECVFKGIHPPLIPKETFELANDKLTRSENTSTHKEKVVRNPLAGLLVCSECGRQMMRMINPVHPDMPVVRCPRRGCPNCSSYLPIVEERVIQGLSEWMKGYELEWSSAAASSSVSSVGVREKALASAEAELRKLQQQLERTHDFLEQGIYDTDTFLSRSRMLSDKIAAAKDSVTRCSRELTEEKLRETSRRDIIPKVKNLLDVYPLLETAEEKNALLKEVLEKVVYQKLNEKHKKSPDGFTIEIYPRIPKSEK

SEQ ID NO: 3226 - protein, 530 aa, Unknown
  Description of Unknown: Integrase B3227 sequence
  cd00338,SM00857,G3DSA:1.10.10.2600,IPR036162, PS51737,G3DSA:3.40.50.1390,IPR006119,IPR038109, PF07508,IPR011109,SSF53041,PTHR30461, PS51736,Coil,PF00239
MEQYLIYLRKSRSDLEAEAHGEGETLSRHEHTLLELAKRQHLNVTDIYREVVSGDTIAARPMMQRVLSEVEQGVWSGVLVMEVERLARGDTIDQGIIAQTFKFSGTKIITPIKTYDPDNEFDEEYFEFGLFMSRREYKIINRRLQRGRLASAKEGKWPSGLAPFGYRRVKLKNEKGCSLEPIEEQAAIVRMIFDLYTVGLQDEDGSAHPLSLGSIATRLNDMHIPSPSGSQWARITIRGIIKNPTYIGMVRWGSRETKKKVVDGKVVSVRGPADPEKECIFKGIHPPLIPKETFELANDKLARSENTSTHKEKVVRNPLAGLLVCSECGRQMMRMINPVHPDMPVVRCPRRGCPNCSSYLPIVEERVIQGLSEWMKGYELEWSSATASSSVSSVGVREKALASAEAELRKLQQQLERTHDFLEQGIYDTDTFLSRSRMLSDKIAAAKDSVARCSRELTEEKLRETSRRDIIPKVKNLLDVYPLLETAEEKNALLKEVLEKVVYQKLNEKRKKSPDGFTIEIYPRIPKSEK

SEQ ID NO: 3227 - protein, 530 aa, Unknown
  Description of Unknown: Integrase B3228 sequence
  SM00857,G3DSA:1.10.10.2600,IPR036162,PS51737,G3DSA:3.40.50.1390, IPR006119,IPR038109,PF07508,IPR011109,SSF53041, PTHR30461,Coil,PS51736,cd00338,PF00239
MPYCLYVRKSRADAEAEARGEGETLTRHINALLDLAKRRHLDITQIYREIVSGETIAARPVMQQLLSEVEQGLWDGVLVMEVERLARGDTVDQGIVAQTFKFSDTKIITPIKDYDPNNEFDEEYFEFGLFMSRREYKTINRRLQRGRIASVKEGKYVGSQSPYGYQREKLVGDKGYTLAPLPAEADIVRLIFQLYTKGEEQEDGSYKRLGVSRIVRRLNDMRIPPRKSTHWSPATIRDILINPVYIGKIRWNWRKDSKKMVDGRVVIARPRSSIDDCVLADGKHPPLIDDATFALAQEYMAQNPPHPIGERNKVKNPLSGLVVCAKCGKKMVRRPYNDRNQADTLLCADTACDNISSALFYVEERVLQALSDWLAEYRLQWETADDTSENASAVNLKEKALRRLDTEYDTLNKQLDNAHDLLEQGVYTTEQFLDRSRKLSERIKKNEADRSTLGADIAADKKREQGRKQIIPKVEKLLDVYDSLPSAKAKNDMLKEVLEKVVYLKTKNGRWNNAPDDFEITLYPKIPKSD

SEQ ID NO: 3228 - protein, 530 aa, Unknown
  Description of Unknown: Integrase B3229 sequence
  cd00338,SM00857,G3DSA:1.10.10.2600,IPR036162, PF13408,IPR025827,PS51737,G3DSA:3.40.50.1390, IPR006119,IPR038109,PF07508,IPR011109, SSF53041,PTHR30461,PS51736,Coil,PF00239
MAQENYIIYLRKSRADAEAEARGEGETLARHEKALLELARRQKLNVTDIYREIVSGETIAARPVMQRVLAEVEQGRWVGVLVMEVERLARGDTMDQGLVAQTFKFSGAKIITPMKTYDPSNEFDEEYFEFGLFMARREYKVINRRMQRGREASAREGKFLGNHPPYGYVRKKLEREKGYTLEPHPGQADVIRMIFDLYTIGYPLEDGAYRRLGVSLIARRLNEMAIPPQKGGAWSESSIRDILINPVYAGMIRWNTRPHVKRMVDGQITVTRPRARPEDRICVKGLHEPLISTDTFDAAQKLMSCNRPAPIGRAKGVKNPLAGIVVCGVCGRKLVRRPYPAGRGQPDTLMCPNASCSNVSSALHYVEEHILSALRDWLAEYKLKLLTQGETLSPSALASKKMTLRVVEAELSKLNKQMERLHDLLEQGVYDVDVFLNRSRILGEQIAKAKASIEALNEEIKLEEARSGAYKNIIPKVQHLLDSYHDLSNPKAQNDLLREVLDKAVYTKTIKGRWHAAPDDFEITIFPRLS

SEQ ID NO: 3229 - protein, 530 aa, Unknown
  Description of Unknown: Integrase B3230 sequence
  SM00857,G3DSA:1.10.10.2600,IPR036162,PS51737,G3DSA:3.40.50.1390, IPR006119,IPR038109,PF07508,IPR011109,SSF53041, PF00239,PTHR30461,PS51736,Coil,cd00338
MEQYLIYLRKSRSDLEAEAHGEGETLSRHEHTLLELAKRQHLNVTDIYREVVSGDTIAARPMMQRVLSEVEQGVWSGVLVMEVERLARGDTIDQGIIAQTFKFSGTKIITPIKTYDPDNEFDEEYFEFGLFMSRREYKIINRRLQRGRLASAKEGKWPSGLAPFGYRRVKLKNEKGCSLEPIEEQAAIVRMIFDLYTVGLQDEDGSARPLSLGSIATRLNDMHIPSPSGSQWARITIRGIIKNPTYIGMVRWGSRETKKKVVDGKVVSVRGPADPEKECVFKGIHPPLIPKETFELANDKLTRSENTSTHTEKVVRNPLAGLLVCSECGRQMMRMINPVRPDMPVVRCPRRGCPNCSSYLPIVEERVIQGLSEWMKGYELEWSSAAASSSVSSVGVREKALASAEAELRKLQQQLERTHDFLEQGIYDTDTFLSRSRMLSDKIAAAKDSVARCSRELTEEKLRETSRRDIIPKVKNLLDVYPLLETAEEKNALLKEVLEKVVYQKLNEKRKKSPDGFTIEIYPRIPKSEK

SEQ ID NO: 3230 - protein, 530 aa, Unknown
  Description of Unknown: Integrase B3231 sequence
  cd00338,SM00857,G3DSA:1.10.10.2600,IPR036162, PS51737,G3DSA:3.40.50.1390,IPR006119,IPR038109, PF07508,IPR011109,SSF53041,PTHR30461, PS51736,Coil,PF00239
MEQYLIYLRKSRSDLEAEAHGEGETLSRHEHTLLELAKRQHLNVTDIYREVVSGDTIAARPMMQRVLSEVEQGVWSGVLVMEVERLARGDTIDQGIIAQTFKFSGTKIITPIKTYDPDNEFDEEYFEFGLFMSRREYKIINRRLQRGRLASAKEGKWPSGLAPFGYRRVKLKNEKGCSLEPIEEQAAIVRMIFDLYTVGLQDEDGSARPLSLGSIATRLNDMRIPSPSGSQWARITIRGIIKNPTYIGMVRWGSRETKKKVVDGKVVSVRGPADPEKECVFKGIHPPLIPKETFELANDKLTRSENTSTHKEKVVRNPLAGLLVCSECGRQMMRMINPVNPDMPVVRCPRRGCPNCSSYLPIVEERVIQGLSEWMKGYELEWSSTAASSSVSSVGVREKALASAEAELRKLQQQLERTHDFLEQGIYDTDTFLSRSRMLSDKIAAAKDSVTRCSRELTEEKLRETSRRDIIPKVKNLLDVYPLLETAEEKNALLKEVLEKVVYQKLNEKRKKSPDGFIIEIYPRIPKSEK

SEQ ID NO: 3231 - protein, 530 aa, Unknown
  Description of Unknown: Integrase B3232 sequence
  SM00857,G3DSA:1.10.10.2600,IPR036162,PS51737,G3DSA:3.40.50.1390, IPR006119,IPR038109,PF07508,IPR011109,SSF53041, PF00239,PTHR30461,PS51736,Coil,cd00338
MEQYLIYLRKSRSDLEAEAHGEGETLSRHEHTLLELAKRQHLNVTDIYREVVSGDTIAARPMMQRVLSEVEQGVWSGVLVMEVERLARGDTIDQGIIAQTFKFSGTKIITPIKTYDPDNEFDEEYFEFGLFMSRREYKIINRRLQRGRLASAKEGKWPSGLAPFGYRRVKLKNEKGCSLEPIEEQAAIVRMIFDLYTVGLQDEDGSARPLSLGSIAARLNDMRIPSPSGSQWTRITIRGIIKNPTYIGMVRWGSRETKKKVVDGKVVSVRGPADPEKECVFKGIHPPLIPKETFELANDKLTRSENTSTHKEKVVRNPLAGLLVCSECGRLMMRMINPVRPDMPVVRCPRRGCPNCSSYLPIVEERVIQGLSEWMKGYELEWSSAAASSSVSSVGVREKALASAEAELRKLQQQLERTHDFLEQGIYDTDTFLSRSRMLSDKIAAAKDSVARCSRELTEEKLRETSRRDIIPKVKNLLDVYPLLETAEEKNALLKEVLEKVVYQKLNEKRKKSPDGFTIEIYPRIPKSEK

SEQ ID NO: 3232 - protein, 530 aa, Unknown
  Description of Unknown: Integrase B3233 sequence
  SM00857,G3DSA:1.10.10.2600,IPR036162,PS51737, G3DSA:3.40.50.1390,IPR006119,IPR038109,PF07508, IPR011109,SSF53041,PF00239,PTHR30461, PS51736,Coil,cd00338
MEQYLIYLRKSRSDLEAEAHGEGETLSRHEHTLLELAKRQHLNVTDIYREVVSGDTIAARPMMQRVLSEVEQGVWSGVLVMEVERLARGDTIDQGIIAQTFKFSGTKIITPIKTYDPDNEFDEEYFEFGLFMSRREYKIINRRLQRGRLASAKEGKWPSGLAPFGYRRVKLKNEKGCSLEPIEEQAAIVRMIFDLYTVGLQDEDGSARPLSLGSIATRLNDMHIPSPSGSQWARITIRGIIKNPTYIGMVRWGSRETKKKVVDGKVVSVRGPADPEKECIFKGIHPPLIPKETFELANDKLTRSENTSTHKEKVVRNPLAGLLVCSECGRQMMRMINPVRPDMPVVRCPRRGCPNCSSYLPIVEERVIQGLSEWMKGYELEWSSAAASSSVSSVGVREKALASAEAELRKLQQQLERTHDFLEQGIYDTDTFLSRSRMLSDKIAAAKDSVARCSRELTEEKLRETSRRDIIPKVKNLLDVYPLLETAEEKNALLKEVLEKVVYQKLNEKRKKSPDGFTIEIYPRIPKSEK

SEQ ID NO: 3233 - protein, 530 aa, Unknown
  Description of Unknown: Integrase B3234 sequence
  cd00338,SM00857,G3DSA:1.10.10.2600,IPR036162,PS51737, G3DSA:3.40.50.1390,IPR006119,IPR038109,PF07508,IPR011109, SSF53041,PTHR30461,PS51736,Coil,PF00239
MEQYLIYLRKSRSDIEAEAHGEGETLSRHEHTLLELAKRQHLNVTDIYREVVSGDTIAARPMMQRVLSEVEQGVWSGVLVMEVERLARGDTIDQGIIAQTFKFSGTKIITPIKTYDPDNEFDEEYFEFGLFMSRREYKIINRRLQRGRLASAKEGKWPSGLAPFGYRRVKLKNEKGCSLEPIEEQAAIVRMIFDLYTVGLQDEDGSARPLSLGSIATRLNDMHIPSPSGSQWARITIRGIIKNPTYIGMVRWGSRETKKKVVDGKVVSVRGPADPEKECVFKGIHPPLIPKETFELANDKLTRSENTSTHKEKVVRNPLAGLLVCSECGRQMMRMINPVHPDMPVVRCPRRGCPNCSSYLPIVEERVIQGLSEWMKGYELEWSSAAASSSVSSVGVREKALASAEAELRKLQQQLERTHDFLEQGVYDTDTFLSRSRMLSDKIAAAKDSVARCSRELTEEKLRETSRREIIPKVKNLLDVYPLLETAEEKNALLKEVLEKVVYQKLNEKRKKSPDGFTIEIYPRIPKSEK

SEQ ID NO: 3234 - protein, 530 aa, Unknown
  Description of Unknown: Integrase B3235 sequence
  cd00338,SM00857,G3DSA:1.10.10.2600,IPR036162, PS51737,G3DSA:3.40.50.1390,IPR006119,IPR038109, PF07508,IPR011109,SSF53041,PTHR30461, PS51736,Coil,PF00239
MEQYLIYLRKSRSDLEAEAHGEGETLSRHEHTLLELAKRQHLNVTDIYREVVSGDTIAARPMMQRVLSEVEQGVWSGVLVMEVERLARGDTIDQGIIAQTFKFSGTKIITPIKTYDPDNEFDEEYFEFGLFMSRREYKIINRRLQRGRLASAKEGKWPSGLAPFGYRRVKLKNEKGCSLEPIEEQAAIVRMIFDLYTVGLRDEDGSSRPLSLGSIATRLNDMHIPSPSGSQWARITIRGIVKNPTYIGMVRWGSRETKKKVVDGKVVSVRGPADPEKECVFKGIHPPLVPKEIFELANDKLTRSENTSTRKEKVVRNPLAGLLVCSECGRQMMRMINPVHPDMPVVRCPRRGCPNCSSYLPIVEERVMQGLSEWMKGYELEWSSAAASSSVSSVGVREKAFASAEAELRKLQQQLERTHDFLEQGIYDTDTFLSRSRMLSDKIAAAKDSVTRCSRELTEEKLRETSRRDIIPKVKNLLDVYPLLETAEEKNALLKEVLEKVVYQKLNEKRKKSPDGFTIEIYPRIPKSEK

SEQ ID NO: 3235 - protein, 530 aa, Unknown
  Description of Unknown: Integrase B3236 sequence
  cd00338,SM00857,G3DSA:1.10.10.2600,IPR036162,PS51737, G3DSA:3.40.50.1390,IPR006119,IPR038109,PF07508,SSF53041, IPR011109,PTHR30461,PS51736,Coil,PF00239
MEQYLIYLRKSRSDLEAEAHGEGETLSRHEHTLLELAKRQHLNVTDIYREVVSGDTIAARPMMQRVLSEVEQSVWSGVLVMEVERLARGDTIDQGIIAQTFKFSGTKIITPIKTYDPDNEFDEEYFEFGLFMSRREYKIINRRLQRGRLASAKEGKWPSGLAPFGYRRVKLKNEKGCSLEPIEEQAAIVRMIFDLYTVGLQDEDGSARPLSLGSIATRLNDMHIPSPSGSQWARITIRGIIKNPTYIGMVRWGSRETKKKVVDGKVVSVRGPADPEKECVFKGIHPPLVPKETFELANDKLTRSENTSTHKEKVVRNPLAGLLVCSECGRQMMRMINPVHPDMPVVRCPRRGCPNCSSYLPIVEERVIQGLSEWMKGYELEWSSAAASSSVSSVGVREKALASAEAELRKLQQQLERTHDFLEQGIYDTDTFLSRSRMLSDKIAAAKDSVTRCSRELTEEKLRETSRRDIIPKVKNLLDVYPLLETAEEKNALLKEVLEKVVYQKLNEKRKKSPDGFTIEIYPRIPKSEK

SEQ ID NO: 3236 - protein, 530 aa, Unknown
  Description of Unknown: Integrase B3237 sequence
  cd00338,SM00857,G3DSA:1.10.10.2600,IPR036162, PS51737,G3DSA:3.40.50.1390,IPR006119,IPR038109, PF07508,IPR011109,SSF53041,PTHR30461, PS51736,Coil,PF00239
MEQYLIYLRKSRSDLEAEAHGEGETLSRHEHTLLELAKRQHLNVTDIYREVVSGDTIAARPMMQRVLSEVEQGVWSGVLVMEVERLARGDTIDQGIIAQTFKFSGTKIITPIKTYDPDNEFDEEYFEFGLFMSRREYKIINRRLQRGRLASAKEGKWPSGLAPFGYRRVKLKNEKGCSLEPIEEQAAIVRMIFDLYTVGLQDEDGSARPLSLGSIATRLNDMRVPSPSGSQWTRITIRGIIKNPTYIGMVRWGSRETKKKVVDGKVVSVRGPADPEKECVFKGIHPPLIPKETFELANDKLTRSENTSTHKEKVVRNPLAGLLVCSECGRQMMRMINPVHPDMPVVRCPRRGCPNCSSYLPIVEERVIQGLAEWMKGYELEWSSAAASSSVSSVGVREKALAGAEAELRKLQQQLERTHDFLEQGIYDTDTFLSRSRMLSDKIAAAKESVARCSRELTEEKLRETSRRDIIPKVKNLLDVYPLLETAEEKNALLKEVLEKVVYQKLNEKRKKSPDGFTIEIYPRIPKSEK

SEQ ID NO: 3237 - protein, 530 aa, Unknown
  Description of Unknown: Integrase B3238 sequence
  PTHR30461:SF3,cd00338,SM00857,G3DSA:1.10.10.2600,IPR036162, PF13408,PS51737,IPR025827,G3DSA:3.40.50.1390,IPR006119, IPR038109,PF07508,IPR011109,SSF53041,PTHR30461, PS51736,Coil,PF00239
MSSVDKTAVIYARYSSHGQTEQSIDGQIAAAQKYAEGKGYTIIHIYADRAMTGRNDDREQFQKMLSDTATHQFGVILLWKIDRFGRNREEIAFNRYRCKKNGVRVERVAEDVPDGPEGVILDSVLEGMAEYYSLQLAQNVRRGQRESAKKSQSNGGTRMIGYKVNPDTKRYEVDPDTAPFITEVFRRYAGGQTMAEIAAWLNAQGLRATRGGMFTVNSLHRLLKNEKYTGVYIFRDIRNEGGMPALIDRATFDKVQEMLKVNRRAPSRVWSRAEYLLTDKLFCGHCGAPMAGVSGHGHTGVKHNYYTCLNRKRKKSCTKKSVRQDVLEPLVLKSIRNLLQDDATLKYIADRVWAEYERSDTSGDTIRALDRQIADVDRALSNVMKAIEMGIINEMTKARMDELTEQKQALSAARADAGLARGFKLTRNMVLYFLRKMAAMDISDRDSQKRLIKTFVNAIYLYDDHFDIAFNYTENGKVIVKMQEIDDASTGGAFGCCAQCPTINHQDEHTTFITMIGNVFVLFCPFPGLK

SEQ ID NO: 3238 - protein, 530 aa, Unknown
  Description of Unknown: Integrase B3239 sequence
  cd00338,SM00857,G3DSA:1.10.10.2600,IPR036162,PS51737, G3DSA:3.40.50.1390,IPR006119,IPR038109,PF07508,IPR011109, SSF53041,PTHR30461,PS51736,Coil,PF00239
MEQYLIYLRKSRSDLEAEAHGEGETLSRHEHTLLELAKRQHLNVTDIYREVVSGDTIAARPMMQRVLSEVEQGVWSGVLVMEVERLARGDTIDQGIIAQTFKFSGTKIITPIKTYDPDNEFDEEYFEFGLFMSRREYKIINRRLQRGRLASAKEGKWPSGLAPFGYRRVKLKNEKGCSLEPIEEQAAIVRMIFDLYTVGLQDEDGSARPLSLGSIATRLNDMHIPSPSGSQWARITIRGIIKNPTYIGMVRWGSRETKKKVVDGKVVSVRGPADPEKECVFKGIHPPLVPKETFELANDKLTRSENTSTHKEKVVRNPLAGLLVCSECGRQMMRMINPVHPDMPVVRCPRRGCPNCSSYLPIVEERVIQGLSEWMKGYELEWSSAAASSSVSSVGVREKALASAEAELRKLQQQLERTHDFLEQGVYDTDTFLSRSRMLSDKIAAAKDSVARCSRELTEEKLRETSRREIIPKVKNLLDVYPLLETAEEKNALLKEVLEKVVYQKLNEKRKKSPDGFTIEIYPRIPKSEK

SEQ ID NO: 3239 - protein, 530 aa, Unknown
  Description of Unknown: Integrase B3240 sequence
  cd00338,SM00857,G3DSA:1.10.10.2600,IPR036162, PS51737,G3DSA:3.40.50.1390,IPR006119,IPR038109, PF07508,IPR011109,SSF53041,PTHR30461, PS51736,Coil,PF00239
MEQYLIYLRKSRSDLEAEAHGEGETLSRHEHTLLELAKRQHLNVTDIYREVVSGDTIAARPMMQRVLSEVEQGVWSGVLVMEVERLARGDTIDQGIIAQTFKFSGTKIITPIKTYDPDNEFDEEYFEFGLFMSRREYKIINRRLQRGRLASAKEGKWPSGLAPFGYRRVKLKNEKGCSLEPIEEQAAIVRMIFDLYTVGLQDEDGSARPLSLGSIATRLNDMHIPSPSGSQWARITIRGIIKNPTYIGMVRWGSRETKKKVVDGKVVSVRGPADPEKECIFKGIHPPLIPKETFELANDKLTRSENTSTHKEKVVRNPLAGLLVCSECGRQMMRMINPVRPDMPVVRCPRRGCPNCSSYLPIVEERVIQGLSEWMKGYELEWSSAAASSSVSLVGVREKALASAEAELRKLQQQLERTHDFLEQGIYDTDTFLSRSRMLSDKIAAAKDSVARCSRELTEEKLRETSRRDIIPKVKNLLDVYPLLETAEEKNALLKEVLEKVVYQKLNEKRKKSPDGFTIEIYPRIPKSEK

SEQ ID NO: 3240 - protein, 530 aa, Unknown
  Description of Unknown: Integrase B3241 sequence
  PTHR30461:SF3,SM00857,G3DSA:1.10.10.2600,IPR036162,PF13408, IPR025827,PS51737,G3DSA:3.40.50.1390,IPR006119,IPR038109, PF07508,IPR011109,SSF53041,PTHR30461,Coil, PS51736,cd00338,PF00239
MQTIPIDLSALTPEERQQFAENPSVLSTGCETVCCLYMRYSSDRQTEQSIEGQLRELIAYCKHHSYRVAAIYVDRAISAHASMDKRPAFQQMLSDSARSSWKTVLVYKLDRFARNREDSAIARMRLRKNGCNVESAKEGISKNPEGVILEALLEGMAEYYSLELSQKITRGMRESAIKGNCLGGQIPLGYKIENKKYVIDPLTAPLVKEAFSRYGDGETAASICEDFNARGYRTASGAEFNKSSFKNIFRNEKYIGVYKYKEMRREGIIPRIIADDAWIAVQSRLKVNEAAPARGKAKVPYLLAGKLFCGHCGAPMTGECGRGKSGKMYNYYSCATRKHHNSCEKKPVPKDWLEDVVAQDALDVLTDEIIEFVAEVAAQQSEEDIQKNTQIPVIRKKISEIENKIRNLTKALECASVAPDAIVERLAELEAQKKGLSTQLSDEERGVIPLTKESVVVYLKAVREKAVPLETQKAMLIEMLVNSVTVYDDEPGFLKLVYAYRLTQIPTRTYRVPIPAKVPCSDFRTQPAPK

SEQ ID NO: 3241 - protein, 530 aa, Unknown
  Description of Unknown: Integrase B3242 sequence
  SM00857,G3DSA:1.10.10.2600,IPR036162,PS51737,G3DSA:3.40.50.1390, IPR006119,IPR038109,PF07508,IPR011109,SSF53041, PTHR30461,Coil,PS51736,cd00338,PF00239
MEQYLIYLRKSRSDLEAEAHGEGETLSRHEHTLLELAKRQHLNVTDIYREVVSGDTIAARPMMQRVLSEVEQGVWSGVLVMEVERLARGDTIDQGIIAQTFKFSGTKIITPIKTYDPDNEFDEEYFEFGLFMSRREYKIINRRLQRGRLASAKEGKWPSGLAPFGYRRVKLKNEKGCSLEPIEEQAAIVRMIFDLYTVGLQDEDGSARPLSLGSIATRLNDMRIPSPSGSQWARITIRGIIKNPTYIGMVRWGSRETKKKVVDGKVVSVRGPADPEKECVFKGIHPPLIPKETFELANDKLTRSENTSTRKEKVVRNPLAGLLVCSECGRQMMRMINPVHPDMPVVRCPRRGCPNCSSYLPIVEERVIQGLSEWMKGYELEWSSAAASSSVSSVGVREKALTSAEAELRKLQQQLERTHDFLEQGIYDTDTFLSRSRMLSDKIAAAKDSVTRCSRELTEEKLRETSRRDIIPKVKNLLDVYPLLETAEEKNALLKEVLEKVVYQKLNEKRKKSPDGFTIEIYPRIPKSEK

SEQ ID NO: 3242 - protein, 530 aa, Unknown
  Description of Unknown: Integrase B3243 sequence
  cd00338,SM00857,G3DSA:1.10.10.2600,IPR036162, PS51737,G3DSA:3.40.50.1390,IPR006119,IPR038109, PF07508,IPR011109,SSF53041,PTHR30461, PS51736,Coil,PF00239
MEQYLIYLRKSRSDLEAEAHGEGETLSRHEHTLLELAKRQHLNVTDIYREVVSGDTIAARPMMQRVLSEVEQGVWSGVLVMEVERLARGDTIDQGIIAQTFKFSGTKIITPIKTYDPDNEFDEEYFEFGLFMSRREYKIINRRLQRGRLASAKEGKWPSGLAPFGYRRVKLKNEKGCSLEPIEEQAAIVRMIFDLYTVGLQDEDGSARPLSLGSIATRLNDMHIPSPSGSQWARITIRGIIKNPTYIGMVRWGSRETKKKVVDGKVVSVRGPADPEKECVFKGIHPPLIPKETFELANGKLTRSENTSTHKEKVVRNPLAGLLVCSECGRQMMRMINPVHPDMPVVRCPRRGCPNCSSYLPIVEERVIQGLSEWMKGYELEWSSAAASSSVSSVGVREKALASAEAELRKLQQQLERTHDFLEQGVYDTDTFLSRSRMLSDKIAAAKDSVARCSRELTEEKLRETSRREIIPKVKNLLDVYPLLETAEEKNALLKEVLEKIVYQKLNEKRKKSPDGFTIEIYPRIPKSEK

SEQ ID NO: 3243 - protein, 530 aa, Unknown
  Description of Unknown: Integrase B3244 sequence
  SM00857,G3DSA:1.10.10.2600,IPR036162,PS51737,G3DSA:3.40.50.1390, IPR006119,IPR038109,PF07508,IPR011109,SSF53041, PF00239,PTHR30461,PS51736,Coil,cd00338
MEQYLIYLRKSRSDLEAEAHGEGETLSRHEHTLLELAKRQHLNVTDIYREVVSGDTIAARPMMQRVLSEVEQGVWSGVLVMEVERLARGDTIDQGIIAQTFKFSGTKIITPIKTYDPDNEFDEEYFEFGLFMSRREYKIINRRLQRGRLASAKEGKWPSGLAPFGYRRVKLKNEKGCSLEPIEEQAAIVRMIFDLYTVGLQDKDGSARPLSLGSIATRLNDMRIPSPSGSQWARITIRGIIKNPTYIGMVRWGSRETKKKVVDGKVVSVRGPADPEKECVFKGIHPPLIPKETFELANDKLARSENTSTRKEKVVRNPLAGLLVCSECGRQMMRMINPVHPDMPVVRCPRRGCPNCSSYLPIVEERVIQGLSEWMKGYELEWSSAAASSSVSSVGVREKALASAEAELRKLQQQLERTHDFLEQGVYDTDTFLSRSRMLSDKIAVAKDSVARCSRELTEEKLRETSRRDIIPKVRNLLDVYPLLETAEEKNALLKEVLEKVVYQKLNEKRKKSPDGFTIEIYPRIPKSEK

SEQ ID NO: 3244 - protein, 530 aa, Unknown
  Description of Unknown: Integrase B3245 sequence
  cd00338,SM00857,G3DSA:1.10.10.2600,IPR036162, PS51737,G3DSA:3.40.50.1390,IPR006119,IPR038109, PF07508,IPR011109,SSF53041,PTHR30461, PS51736,Coil,PF00239
MEQYLIYLRKSRSDLEAEAHGEGETLSRHEHTLLELAKRQHLNVTDIYREVVSGDTIAARPMMQRVLSEVEQGVWSGVLVMEVERLARGDTIDQGIIAQTFKFSGTKIITPIKTYDPDNEFDEEYFEFGLFMSRREYKIINRRLQRGRLASAKEGKWPSGLAPFGYRRVKLKNEKGCSLEPIEEQAAIVRMIFDLYTVGLQDEDGSARPLSLGSIATRLNDMRIPSPSGSQWARITIRGIIKNPTYIGMVRWGSRETKKKVVDGKVVSVRGPADPEKECVFKGIHPPLIPKETFELANDKLTRSENTSTHKEKVVRNPLAGLLVCSECGRQMMRMINPVHPDMPVVRCPRRGCPNCSSYLPIVEERVIQGLSEWMKGYELEWSSAAASSSVSSVGVREKALASAEAELRKLQQQLERTHDFLEQGIYDTDTFLSRSRMLSDKIAAAKDSVTRCSRELTEEKLRETSRRDIIPKVKNLLDVYPLLETAEEKNALLKEVLEKVVYQKLNEKRKKSPDGFIIEIYPRIPKSEK

SEQ ID NO: 3245 - protein, 530 aa, Unknown
  Description of Unknown: Integrase B3246 sequence
  cd00338,SM00857,G3DSA:1.10.10.2600,IPR036162,PS51737, G3DSA:3.40.50.1390,IPR006119,IPR038109,PF07508,SSF53041, IPR011109,PTHR30461,PS51736,Coil,PF00239
MEQYLIYLRKSRSDLEAEAHGEGETLSRHEHTLLELAKRQHLNVTDIYREVVSGDTIAARPMMQRVLSEVEQGVWSGVLVMEVERLARGDTIDQGIIAQTFKFSGTKIITPIKTYDPDNEFDEEYFEFGLFMSRREYKIINRRLQRGRLASAKEGKWPSGLAPFGYRRVKLKNEKGCSLEPIEEQAAIVRMIFDLYTVGLQDEDGSARPLSLGSIATRLNDMHIPSPSGSQWARITIRGIIKNPTYIGMVRWGSRETKKKVVDGKVVSVRGPADPEKECVFKGIHPPLVPKETFELANDKLARSENTSTHKEKVVRNPLAGLLVCSECGRQMMRMINPVHPDMPVVRCPRRGCPNCSSYLPIVEERVIQGLSEWMKGYELEWSSAAASSSVSSVGVREKALASAEAELRKLQQQLERTHDFLEQGIYDTDTFLSRSRMLSDKIAAAKDSVTRCSRELTEEKLRETSRRDIIPKVKNLLDVYPLLETAEEKNALLKEVLEKVVYQKLNEKRKKNPDGFTIEIYPRIPKSEK

SEQ ID NO: 3246 - protein, 530 aa, Unknown
  Description of Unknown: Integrase B3247 sequence
  cd00338,SM00857,G3DSA:1.10.10.2600,IPR036162, PS51737,G3DSA:3.40.50.1390,IPR006119,IPR038109, PF07508,IPR011109,SSF53041,PTHR30461, PS51736,Coil,PF00239
MEQYLIYLRKSRSDLEAEAHGEGETLSRHEHTLLELAKRQHLNVTDIYREVVSGDTIAARPMMQRVLSEVEQGVWSGVLVMEVERLARGDTIDQGIIAQTFKFSGTKIITPIKTYDPDNEFDEEYFEFGLFMSRREYKIINRRLQRGRLASAKEGKWPSGLAPFGYRRVKLKNEKGCSLEPIEEQAAIVRMIFDLYTVGLRDEDGSARPLSLGSIATRLNDMHIPSPSGSQWARITIRGIIKNPTYIGMVRWGSRETKKKVVDGKVVSVRGPADPEKECIFKGIHPPLIPKETFELANDKLARSENTSTHKEKVVRNPLAGLLVCSECGRQMMRMINPVHPDMPVVRCPRRGCPNCSSYLPIVEERVIQGLSEWMKGYELEWSSAAASSSVSSVGVREKALASAEAELRKLQQQLERTHDFLEQGIYDTDTFLSRSRMLSDKIAAAKDSVARCSRELTEEKLRETSRRDIIPKVKNLLDVYPLLETAEEKNALLKEVLEKVVYKKLNEKRKKSPDGFTIEIYPRIPKSEK

SEQ ID NO: 3247 - protein, 530 aa, Unknown
  Description of Unknown: Integrase B3248 sequence
  PTHR30461:SF3,cd00338,SM00857,G3DSA:1.10.10.2600,IPR036162, PF13408,IPR025827,G3DSA:3.40.50.1390,PS51737,IPR006119, IPR038109,PF07508,SSF53041,IPR011109,PTHR30461, PS51736,Coil,PF00239
MQTIPIDLSALTPEERQQFADNPSVLSSDCEAVCCLYMRYSSDRQTEQSIEGQLRELIAYCKHHSYRVAAIYVDRAISAHASMDKRPAFQQMLADSARSSWKTVLVYKLDRFARNREDSAIARMRLRKNGCNVESAKEGISKNPEGVILEALLEGMAEYYSLELSQKITRGMRESAIKGNCLGGQIPLGYKIENKKYVIDPLTAPLVKEAFSRYGDGETAASICADFNARGYRTASGAEFNKSSFKNIFRNEKYIGVYKYKEMRREGIIPRIIADDAWIAVQSRLKVNEAAPARGKAKVPYLLAGKLFCGHCGAPMTGECGRGKSGKMYNYYSCATRKHHNSCEKKPVPKDWLEDVVAQDALDVLTDEIIEFVAEVAAQQSEEDIQKNTQIPVIRKKISEIENKIRNLTKALECASVAPDAIVERLAELEAQKKGLSTQLSDEERGVIPLTKESVVVYLKAVREKAVPLETQKAMLIEMLVNSVTVYDDEPGFLKLVYAYRLTQIPTRTYRVPIPAKVPCSDFRTQPAPK

SEQ ID NO: 3248 - protein, 530 aa, Unknown
  Description of Unknown: Integrase B3249 sequence
  cd00338,SM00857,G3DSA:1.10.10.2600,IPR036162,PS51737, G3DSA:3.40.50.1390,IPR006119,IPR038109,PF07508,IPR011109, SSF53041,PTHR30461,PS51736,Coil,PF00239
MEQYLIYLRKSRSDIEAEAHGEGETLSRHEHTLLELAKRQHLNVTDIYREVVSGDTIAARPMMQRVLSEVEQGVWSGVLVMEVERLARGDTIDQGIIAQTFKFSGTKIITPIKTYDPDNEFDEEYFEFGLFMSRREYKIINRRLQRGRLASAKEGKWPSGLAPFGYRRVKLKNEKGCSLEPIEEQAAIVRMIFDLYTVGFQDEDGSARPLSLGSIATRLNDMHIPSPSGSQWARITIRGIIKNPTYIGMVRWGSRETKKKVVDGKVVSVRGPADPEKECVFKGIHPPLIPKETFELANDKLTRSENTSTHKEKVVRNPLAGLLVCSECGRQMMRMINPVHPDMPVVRCPRRGCPNCSSYLPIVEERVIQGLSEWMKGYELEWSSAAASSSVSSVGVREKALASAEAELRKLQQQLERTHDFLEQGIYDTDTFLSRSRMLSDKIAAAKDSVTRCSRELTEEKLRETSRRDIIPKVKNLLDVYPLLETAEEKNALLKEVLEKVVYQKLNEKRKKSPDGFTIEIYPRIPKSEK

SEQ ID NO: 3249 - protein, 530 aa, Unknown
  Description of Unknown: Integrase B3250 sequence
  SM00857,G3DSA:1.10.10.2600,IPR036162,PS51737, G3DSA:3.40.50.1390,IPR006119,IPR038109,PF07508, IPR011109,SSF53041,PF00239,PTHR30461, PS51736,Coil,cd00338
MEQYLIYLRKSRSDLEAEAHGEGETLSRHEHTLLELAKRQHLNVTDIYREVVSGDTIAARPMMQRVLSEVEQGVWSGVLVMEVERLARGDTIDQGIIAQTFKFSGTKIITPIKTYDPDNEFDEEYFEFGLFMSRREYKIINRRLQRGRLASAKEGKWPSGLAPFGYRRVKLKNEKGCSLEPIEEQAAIVRMIFDLYTVGLQNEDGSARPLSLGSIAARLNDMRIPSPSGSQWTRITIRGIVKNPTYIGMVRWGSRETKKKVVDGKVVSVRGPADPEKECVFKGIHPPLIPKETFELANDKLTRSENTSTHKEKVVRNPLAGLLVCSECGRQMMRMINPVHPDMPVVRCPRRGCPNCSSYLPIVEERVIQGLSEWMKGYELEWSSAAASSSVSSVGVREKALASAEAELRKLQQQLERTHDFLEQGIYDTDTFLSRSRMLSDKIAAAKDSVAHCSRELTEEKLRETSRRDIIPKVKNLLDVYPLLETAEEKNALLKEVLEKVVYQKLNEKRKKSPDGFTIEIYPRIPKSEK

SEQ ID NO: 3250 - protein, 530 aa, Unknown
  Description of Unknown: Integrase B3251 sequence
  SM00857,G3DSA:1.10.10.2600,IPR036162,PS51737,G3DSA:3.40.50.1390, IPR006119,IPR038109,PF07508,IPR011109,SSF53041, PTHR30461,Coil,PS51736,cd00338,PF00239
MPYCLYVRKSRADAEAEARGEGETLTRHINALLDLAKRRHLDITQIYREIVSGETIAARPVMQQLLSEVEQGLWDGVLVMEVERLARGDTVDQGIVAQTFKFSDTKIITPIKDYDPNNEFDEEYFEFGLFMSRREYKTINRRLQRGRIASVKEGKYVGSQSPYGYQREKLVGDKGYTLAPLPAEADIVRLIFQLYTKGEEQEDGSYKRLGVSRIVRRLNDMRIPPRKSNHWSPATIRDILINPVYIGKIRWNWRKDSKKMVDGRVVIARPRSSIDDCVLADGKHPPLIDDATFALAQEYMAQNPPHPIGERNKVKNPLSGLVVCAKCGKKMVRRPYNDRNQADTLLCADTACDNISSALFYVEERVLQALSDWLAEYRLQWETADDTADNASAVNLKEKALRRLATEYDTLNKQLDNAHDLLEQGVYTTEQFLDRSRKLSERIKKNEADRSTLGADIAADKKREQGRKQIIPKVEKLLDVYDSLPSAKAKNDMLKEVLEKVVYLKTKNGRWNNAPDDFEITLYPKIPKSD

SEQ ID NO: 3251 - protein, 530 aa, Unknown
  Description of Unknown: Integrase B3252 sequence
  cd00338,SM00857,G3DSA:1.10.10.2600,IPR036162, PS51737,G3DSA:3.40.50.1390,IPR006119,IPR038109, PF07508,IPR011109,SSF53041,PTHR30461, PS51736,Coil,PF00239
MEQYLIYLRKSRSDLEAEAHGEGETLSRHEHTLLELAKRQHLNVTDIYREVVSGDTIAARPMMQRVLSEVEQGVWSGVLVMEVERLARGDTIDQGIIAQTFKFSGTKIITPIKTYDPDNEFDEEYFEFGLFMSRREYKIINRRLQRGRLASAKEGKWPSGLAPFGYRRVKLKNEKGCSLEPIEEQAAIVRMIFDLYTVGLQDEDGSARPLSLGSIATRLNDMHIPSPSGSQWARITIRGIIKNPTYIGMVRWGSRETKKKVVDGKVVSVRGPADPEKECVFKGIHPPLVSKETFELANDKLARSENTSTHKEKVVRNPLAGLLVCSECGRQMMRMINPVHPDMPVVRCPRRGCPNCSSYLPIVEERVIQGLSEWMKGYELEWSSAAASSSVSSVGVREKALASAEAELRKLQQQLERAHDFLEQGIYDTDTFLSRSRMLSDKIAAAKDSVTRCSRELTEEKLRETSRRDIIPKVKNLLDVYPLLETAEEKNALLKEVLEKVVYQKLNEKRKKSPDGFTIEIYPRIPKSEK

SEQ ID NO: 3252 - protein, 530 aa, Unknown
  Description of Unknown: Integrase B3253 sequence
  SM00857,G3DSA:1.10.10.2600,IPR036162,PS51737,G3DSA:3.40.50.1390, IPR006119,IPR038109,PF07508,IPR011109,SSF53041, PF00239,PTHR30461,PS51736,Coil,cd00338
MEQYLIYLRKSRSDLEAEAHGEGETLSRHEHTLLELAKRQHLNVTDIYREVVSGDTIAARPMMQRVLSEVEQGVWSGVLVMEVERLARGDTIDQGIIAQTFKFSGTKIITPIKTYDPDNEFDEEYFEFGLFMSRREYKIINRRLQRGRLASAKEGKWPSGLAPFGYRRVKLKNEKGCSLEPIEEQAAIVRMIFDLYTVGLRDEDGSARPLSLGSIATRLNDMRIPSPSGSQWARITIRGIIKNPTYIGMVRWGSRETKKKVVDGKVVSVRGPADPEKECIFKGIHPPLIPKETFELANDKLARSENTSTHKEKVVRNPLAGLLVCSECGRQMMRMINPVHPDMPVVRCPRRGCPNCSSYLPIVEERVIQGLSEWMKGYELEWSSAAASSSVSSVGVREKALASAEAELRKLQQQLERTHDFLEQGVYDTDTFLSRSRMLSDKIAAAKDSVTRCSRELTEEKLRETSRRDIIPKVKNLLDVYPLLETAEEKNALLKEVLEKVVYQKLNEKRKKSPDGFTIEIYPRIPKSEK

SEQ ID NO: 3253 - protein, 530 aa, Unknown
  Description of Unknown: Integrase B3254 sequence
  PTHR30461:SF3,cd00338,SM00857,G3DSA:1.10.10.2600,IPR036162, PF13408,IPR025827,PS51737,G3DSA:3.40.50.1390,IPR006119, IPR038109,PF07508,IPR011109,SSF53041, PTHR30461,PS51736,Coil,PF00239
MKKFPIDLSCLTEEEISQFQEDPYTLYNGDQDVALYLRYSSTGQSDQSIEGQLRDCRAFCKANHYRIVAIYVDRATTARKDVEKRVHLMEMISDSAKQNWEYVIVWKLDRFARNRNDSAIMKMRLRKNGVKVLSATEHLTDSPESIILESVLEGMAEFFSAELSQKVTRGMRESALKCHSVGGHIPLGYKVENHKLVVDPDTAHIVQEAFSLYANGESVADICRKFNSAGYKTAKNTEFNRSSFKAMFRNTRYIGTYTYKDIVIENGIPAIIDKELFETVQRRLSKTATAPARGKAKVDYLLSGKLFCGHCGASMNGESGAGRHGKVYHYYSCYTKKRKLGCDKRPLKKDYIEGIVARDALNLLTDQLIDEIADMAIRQSEQDLINDTHIPQLTAQLSEVEKSITNITAAIEKGIASETLMNRLVQLEHEKKTLNKEIKAEEKFVYRIDRDQIVFWLSQFKYGNIEDENFRRRLIDLLVNSVTVWDEPDGYKITTAYNLTSCKTKTFRVEKNPAAEEATGFDFGESECTK

SEQ ID NO: 3254 - protein, 530 aa, Unknown
  Description of Unknown: Integrase B3255 sequence
  cd00338,SM00857,G3DSA:1.10.10.2600,IPR036162,PS51737, G3DSA:3.40.50.1390,IPR006119,IPR038109,PF07508,IPR011109, SSF53041,PTHR30461,PS51736,Coil,PF00239
MEQYLIYLRKSRSDLEAEAHGEGETLSRHEHTLLELAKRQHLNVTDIYREVVSGDTIAARPMMQRVLSEVEQGVWSGVIVMEVERLARGDTIDQGIIAQTFKFSGTKIITPIKTYDPDNEFDEEYFEFGLFMSRREYKIINRRLQRGRLASAKEGKWPSGLAPFGYRRVKLKNEKGCSLEPIEEQAAIVRMIFDLYTVGLQDEDGSARPLSLGSIATRLNDMHIPSPSGSQWARITIRGIIKNPTYIGMVRWGSRETKKKVVDGKVVSVRGPADPEKECIFKGIHPPLIPKETFELANDKLTRSENTSTHKEKVVRNPLAGLLVCSECGRQMMRMINPVRPDMPVVRCPRRGCPTCSSYLPIVEERVIQGLSEWMKGYELEWSSAAASSSVSSVGVREKALSSAEAELRKLQQQLERTHDFLEQGIYDTDTFLSRSRMLSDKIAAAKDSVARCSRELTEEKLRETSRRDIIPKVKNLLDVYPLLETAEEKNALLKEVLEKVVYQKLNEKRKKSPDGFTIEIYPRIPKSEK

SEQ ID NO: 3255 - protein, 530 aa, Unknown
  Description of Unknown: Integrase B3256 sequence
  SM00857,G3DSA:1.10.10.2600,IPR036162,PS51737, G3DSA:3.40.50.1390,IPR006119,IPR038109,PF07508, IPR011109,SSF53041,PF00239,PTHR30461, PS51736,Coil,cd00338
MEQYLIYLRKSRSDLEAEAHGEGETLSRHEHTLLELAKRQHLNVTDIYREVVSGDTIAARPMMQRVLSEVEQGVWSGVLVMEVERLARGDTIDQGIIAQTFKFSGTKIITPIKTYDPDNEFDEEYFEFGLFMSRREYKIINRRLQRGRLASAKEGKWPSGLAPFGYRRVKLKNEKGCSLEPIEEQAAIVRMIFDLYTVGLQDEDGSARPLSLGSIATRLNDMHIPSPSGSQWARITIRGIIKNPTYIGMVRWGSRETKKKVVDGKVVSVRGPADPEKECVFKGIHPPLIPKETFELANDKLTRSENTSTHKEKVVRNPLAGLLVCSECGRQMMRMINPVHPDMPVVRCPRRGCPNCSSYLPIVEERVIQGLSEWMKGYELEWSSAAASSSVSSVGVREKALASAEAELRKLQQQLERTHDFLEQGVYDTDTFLSRSRMLSDKIAAAKDSVTRCSRELTEEKLRETSRRDIIPKVKNLLDVYPLLETAEEKNALLKEVLEKVVYQKLNEKRKKSPDGFTIEIYPRIPKSEK

SEQ ID NO: 3256 - protein, 530 aa, Unknown
  Description of Unknown: Integrase B3257 sequence
  PTHR30461:SF3,SM00857,G3DSA:1.10.10.2600,IPR036162,PF13408, IPR025827,PS51737,G3DSA:3.40.50.1390,IPR006119,IPR038109, PF07508,IPR011109,SSF53041,PTHR30461,Coil, PS51736,cd00338,PF00239
MTVINEYCDRAISGKTDNRPSFQRLIKDSEKGQFEAVIMYTLDRFARNRYDSAIYKAKLKKHGVRVFYAKQPMPDTPEGIILESVLEGYAEYYSENLSRNIKRGLKENALQCIATGGAGVALGYTVGEDRKYQIDPVGAKIVQEVFEMYADGMSATQIINVCNERGYKTSRGNPFNKNSLRTMLKNDKYIGVYRFMDVVVEGGVPAIISKELFDKVQAKLQHNYTARARNKAKEDYLLTTKLFCGHCGSPMVGESGTSKTGKLHFYYKCIDRKRKHVCTKKVEKKDWIEELVTRFTVQEVLTDENIDRIATKAMEIIEKESADTTYLEGLQNELKEVQKKIKNIMTAIEQGIITSTTKDRLEELESEKNEIEGRIAREEIKKPLLTKERIVYWLLSFKSGDINDIEYRRRVIDTLVNSVYIYDDGDKGRRIVLTFNVSGQNTATISCSDIACSAPPKREAKKDIEDKTSVFSRLPRPVDQQIYGPYFSDILPCAIHSGRSRTHTIFTLSGISFEAGILLLQDLGLFYSAV

SEQ ID NO: 3257 - protein, 530 aa, Unknown
  Description of Unknown: Integrase B3258 sequence
  SM00857,G3DSA:1.10.10.2600,IPR036162,PF13408,PS51737, G3DSA:3.40.50.1390,IPR025827,IPR006119,IPR038109,PF07508, IPR011109,SSF53041,PTHR30461,Coil,PS51736, cd00338,PF00239
MEQYCIYLRKSRADAEAEARGEGETLARHEKMLLAVAKRDRYHISKIYREIVSGETIAARPQMQQLLQDVEQGLYAGVLVMEVERLARGDTIDQGIMAQTFRYSDTKIITPMKVYDPNNEFDEEYFEFGLFMSRREYKTINRRLQRGRAASAKEGKYAGNITPYGYTRVKLEHDKGFRLVPDPEEAKIVQLVYDWYLNGEPQEDGSRKRLGSTYIARKLNAAHVPTRHGGKWGVNSVRGILINPVYTGKIRWNYRPAKKSMENGAVVKTRSEAEEGDYILADGLHEALISEEAYHAVQEDMHHKAVSGTHDGKKLCNPLAGLVYCACCKHVMVRRPHNKRFHTDTLMCNTLDCPNVSADLEAVERRVLSGIRDWLEQYEVEWSKNHQEPDAMDAQIATKKAAIQAAEKEQDVLKKQLDNAYDFLEQGIYDTDVFLFRSQALNDRIQDTQNSIKALQEELHREQMRKEGIEEIIPKAKHVLEVYGSLTDAKSKNELLKTVLERVEYYKGKSARWSGNPDNFEVVLFPKLPK

SEQ ID NO: 3258 - protein, 530 aa, Unknown
  Description of Unknown: Integrase B3259 sequence
  cd00338,SM00857,G3DSA:1.10.10.2600,IPR036162,PS51737, G3DSA:3.40.50.1390,IPR006119,IPR038109,PF07508,IPR011109, SSF53041,PTHR30461,PS51736,Coil,PF00239
MEQYLIYLRKSRSDLEAEAHGEGETLSRHEHTLLELAKRQHLNVTDIYREVVSGDTIAARPMMQRVLSEVEQGVWSGVLVMEVERLARGDTIDQGIIAQTFKFSGTKIITPIKTYDPDNEFDEEYFEFGLFMSRREYKIINRRLQRGRLASAKEGKWPSGLAPFGYRRVKLKNEKGCSLEPIEEQAAIVRMIFDLYTVGLQDEDGSARPLSLGSIATRLNDMHIPSPSGSQWARITIRGIIKNPTYIGMVRWGSRETKKKVVDGKVVSVRGPADPEKECVFKGIHPPLIPKETFELANDKLTRSENTSTHKEKVVRNPLAGLLVCSECGRQMMRTINPVHPDMPVVRCPRRGCPNCSSYLPIVEERVIQGLSEWMKGYELEWSSAAASSSVSSVGVREKALASAEAELRKLQQQLERTHDFLEQGIYDTDTFLSRSRMLSDKIAAAKDSVTRCSRELTEEKLRETSRRDIIPKVKNLLDVYPLLETAEEKNALLKEVLEKVVYQKLNEKRKKSPDGFTIEIYPRIPKSEK

SEQ ID NO: 3259 - protein, 530 aa, Unknown
  Description of Unknown: Integrase B3260 sequence
  cd00338,SM00857,G3DSA:1.10.10.2600,IPR036162, PS51737,G3DSA:3.40.50.1390,IPR006119,IPR038109, PF07508,IPR011109,SSF53041,PTHR30461, PS51736,Coil,PF00239
MEQYLIYLRKSRSDLEAEAHGEGETLSRHEHTLLELAKRQHLNVTDIYREVVSGDTIAARPMMQRVLSEVEQGVWSGVLVMEVERLARGDTIDQGIIAQTFKFSGTKIITPIKTYDPDNEFDEEYFEFGLFMSRREYKIINRRLQRGRLASAKEGKWPSGLAPFGYRRVKLKNEKGCSLEPIEEQAAIVRMIFDLYTVGLQDEDGSARPLSLGSIATRLNDMHIPSPSGSQWARITIRGIIKNPTYIGMVRWGSRETKKKVVDGKVVSVRGPADPEKECIFKGIHPPLIPKETFELANDKLTRSENTSTHKEKVVRNPLAGLLVCSECGRQMMRMINPVNPDMPVVRCPRRGCPNCSSYLPIVEERVIQGLSEWMKGYELEWSSAAASSSVSSVGVREKALASAEAELRKLQQQLERTHDFLEQGIYDTDTFLSRSRMLSDKIASAKDSVTRCSRELTEEKLRETSRRDIIPKVKNLLDVYPLLETAAEKNALLKEVLEKVVYQKLNEKRKKSPDGFTIEIYPRIPKSEK

SEQ ID NO: 3260 - protein, 530 aa, Unknown
  Description of Unknown: Integrase B3261 sequence
  SM00857,G3DSA:1.10.10.2600,IPR036162,PS51737,G3DSA:3.40.50.1390, IPR006119,IPR038109,PF07508,IPR011109,SSF53041, PF00239,PTHR30461,PS51736,Coil,cd00338
MEQYLIYLRKSRSDLEAEAHGEGETLSRHEHTLLELAKRQHLNVTDIYREVVSGDTIAARPMMQRVLSEVEQGVWSGVLVMEVERLARGDTIDQGIIAQTFKFSGTKIITPIKTYDPDNEFDEEYFEFGLFMSRREYKIINRRLQRGRLASAKEGKWPSGLAPFGYRRVKLKNEKGCSLEPIEEQAAIVRMIFDLYTVGLQDEDGSARPLSLGSIATRLNDMHIPSPSGSQWARITIRGIIKNPTYIGMVRWGSRETKKKVVDGKVVSVRGPADPEKECVFKGIHPPLIPKETFELANDKLTRSENTSTHKEKVVRNPLAGLLVCSECGRQMMRMINPVHPDMPVVRCPRRGCPNCSSYLPIVEERVIQGLSEWMKGYELEWSSAAASSFVSSVGVREKVLASAEAELRKLQQQLERTHDFLEQGIYDTDTFLSRSRMLSDKIAAAKDSVTRCSRELTEEKLRETSRRDIIPKVKNLLDVYPLLETAEEKNALLKEVLEKVVYQKLNEKRKKSPDGFTIEIYPRIPKSEK

SEQ ID NO: 3261 - protein, 530 aa, Unknown
  Description of Unknown: Integrase B3262 sequence
  cd00338,SM00857,G3DSA:1.10.10.2600,IPR036162, PS51737,G3DSA:3.40.50.1390,IPR006119,IPR038109, PF07508,IPR011109,SSF53041,PTHR30461, PS51736,Coil,PF00239
MEQYLIYLRKSRSDLEAEAHGEGETLSRHEHTLLELAKRQHLNVTDIYREVVSGDTIAARPMMQRVLSEVEQGVWSGVLVMEVERLARGDTIDQGIIAQTFKFSGTKIITPIKTYDPDNEFDEEYFEFGLFMSRREYKIINRRLQRGRLASAKEGKWPSGLAPFGYRRVKLKNEKGCSLEPIEEQAAIVRMIFDLYTVGLQDEDGSARPLSLGSIATRLNDMHIPSPSGSQWARITIRGIIKNPTYIGMVRWGSRETKKKVVDGKVVSVRGPADPEKECIFKGIHPPLIPKETFELANDKLTRSENTSTHKEKVVRNPLAGLLVCSECGRQMMRMINPVRPDMPVVRCPRRGCPNCSSYLPIVEERVIQGLSEWMKGYELEWSSAAASSSVSSVGVRKKALASAEAELRKLQQQLERTHDFLEQGIYDTDTFLSRSRMLSDKIAAAKDSVTRCSRELTEEKLRETSRRDIIPKVKNLLDVYPLLETAEEKNALLKEVLEKVVYQKLNEKRKKSPDGFTIEIYPRIPKSEK

SEQ ID NO: 3262 - protein, 530 aa, Unknown
  Description of Unknown: Integrase B3263 sequence
  cd00338,SM00857,G3DSA:1.10.10.2600,IPR036162,PS51737, G3DSA:3.40.50.1390,IPR006119,IPR038109,PF07508,IPR011109, SSF53041,PTHR30461,PS51736,Coil,PF00239
MEQYLIYLRKSRSDLEAEAHGEGETLSRHEHTLLELAKRQHLNVTDIYREVVSGDTIAARPMMQRVLSEVEQGVWSGVLVMEVERLARGDTIDQGIIAQTFKFSGTKIITPIKTYDPDNEFDEEYFEFGLFMSRREYKIINRRLQRGRLASAKEGKWPSGLAPFGYRRVKLKNEKGCSLEPIEEQAAIVRMIFDLYTVGLQDEDGSARPLSLGSIATRLNDMHIPSPSGSQWARITIRGIIKNPTYIGMVRWGSRETKKKVVDGKVVSVRGPADPEKECVFKGIHPPLIPKETFELANDKLIRSENTSTHKEKVVRNPLAGLLVCSECGRQMMRMINPVHPDMPVVRCPRRGCPNCSSYLPIVEERVIQGLSEWMKGYELEWSSAAASSSVSSVGVREKALASAEAELRKLQQQLERTHDFLEQGIYDTDTFLSRSRMLSDKIAAAKDSVARCSRELTEEKLRETSRRDIIPKVKNLLDVYPLLETAEEKNALLKEVLEKVVYQKLNEKRKKSPDGFTIEIYPRIPKSEK

SEQ ID NO: 3263 - protein, 530 aa, Unknown
  Description of Unknown: Integrase B3264 sequence
  cd00338,SM00857,G3DSA:1.10.10.2600,IPR036162, PS51737,G3DSA:3.40.50.1390,IPR006119,IPR038109, PF07508,IPR011109,SSF53041,PTHR30461, PS51736,Coil,PF00239
MEQYLIYLRKSRSDLEAEAHGEGETLSRHEHTLLELAKRQHLNVTDIYREVVSGDTIAARPMMQRVLSEVEQGVWSGVLVMEVERLARGDTIDQGIIAQTFKFSGTKIITPIKTYDPDNEFDEEYFEFGLFMSRREYKIINRRLQRGRLASAKEGKWPSGLAPFGYRRVKLKNEKGCSLEPIEEQAAIVRMIFDLYTVGLQDEDGSARPLSLGSIAARLNDMRVPSPSGSQWTRITIRGIIKNPTYIGMVRWGSRETKKKVVDGKVVSVRGPADPEKECVFKGIHPPLIPKETFELANDKLTRSENTSTHKEKVVRNPLAGLLVCSECGRQMMRMINPVHPDMPVVRCPRRGCPNCSSYLPIVEERVIQGLSEWMKGYELEWSSAAASSSVSSVGVREKALASAEAELRKLQQQLERTHDFLEQGIYDTDTFLSRSRMLSDKIAAAKDSVARCSRELTEEKLRETSRRDIIPKVKNLLDVYPLLETAEEKNALLKEVLEKVVYQKLNEKRKKSPDGFTIEIYPRIPKSEK

SEQ ID NO: 3264 - protein, 530 aa, Unknown
  Description of Unknown: Integrase B3265 sequence
  cd00338,SM00857,G3DSA:1.10.10.2600,IPR036162,PS51737, G3DSA:3.40.50.1390,IPR006119,IPR038109,PF07508,IPR011109, SSF53041,PTHR30461,PS51736,Coil,PF00239
MEQYLIYLRKSRSDLEAEAHGEGETLSRHEHTLLELAKRQHLNVTDIYREVVSGDTIAARPMMQRVLSEVEQGVWSGVLVMEVERLARGDTIDQGIIAQTFKFSGTKIITPIKTYDPDNEFDEEYFEFGLFMSRREYKIINRRLQRGRLASAKEGKWPSGLAPFGYRRVKLKNEKGCSLEPIEEQAAIVRMIFDLYTVGLQDEDGSARPLSLGSIATRLNDMHIPSPSGSQWARITIRGIIKNPTYIGMVRWGSRETKKKVVDGKVVSVRGPAGPEKECVFKGIHPPLIPKETFELANDKLTRSENTSTRKEKVVRNPLAGLLVCSECGRQMMRMINPVHPDMPVVRCPRRGCPNCSSYLPIVEERVIQGLSEWMKGYELEWSSAAASSSVSSVGVREKALASAEAELRKLQQQLERTHDFLEQGIYDTDTFLSRSRMLSDKIAAAKDSVTRCSRELTEEKLRETSRRDIIPKVKNLLDVYPLLETAEEKNALLKEVLEKVVYQKLNEKRKKSPDGFTIEIYPRIPKSEK

SEQ ID NO: 3265 - protein, 530 aa, Unknown
  Description of Unknown: Integrase B3266 sequence
  PTHR30461:SF3,cd00338,SM00857,G3DSA:1.10.10.2600,IPR036162, PF13408,IPR025827,G3DSA:3.40.50.1390,PS51737,IPR006119, IPR038109,PF07508,SSF53041,IPR011109, PTHR30461,PS51736,Coil,PF00239
MYEEIKQVVLYVRYSSANQTEQSIEGQVRVCSDFCQRHGFRIIEIYADRATSASKDIEKRVEFLRMIKDAEKKNFQAVIVYKLDRFARSRYDSANYKYRLRKNGVQLISATENISNDPEGIILESVLEGMAEFYSAELSQKITRGLKESAYKHNSIGGAIPLGYKSEGKKLVIDEETAPIVRQAFEMYAEGHSVADICRLFNSRGYKTSKGTNFGKSSFSKMFHNERYIGVYQFHDYRAEDAIPAIIDKKLFYQVQARMKSSGKAPGQFKARHIYLLSGKLYCGHCGSKMNANSNGTAGYSYYECYGKKNLHKDCHKRNLRKDFIEDIVINDAMSLLTDENINQIAEVTIRTNLHDIEHCTDIPAIKDKLHETKLSLSNITKAIENGLAPETLVKRMVELEKDKKALEEELKKEEKKVSYLDKEQVIFWLNQFKNGDIEDADFRRQLIDLFVNHVTVWDEDDNHFKVTIAYNLTSLHEKTYHLKRGGRLSDLSSMHQDSVSNPIIQGTLLYHTTHCHLKPHQWRKFNQEV

SEQ ID NO: 3266 - protein, 530 aa, Unknown
  Description of Unknown: Integrase B3267 sequence
  cd00338,SM00857,G3DSA:1.10.10.2600,IPR036162,PS51737, G3DSA:3.40.50.1390,IPR006119,IPR038109,PF07508,SSF53041, IPR011109,PTHR30461,PS51736,Coil,PF00239
MEQYLIYLRKSRSDLEAEAHGEGETLSRHEHTLLELAKRQHLNVTDIYREVVSGDTIAARPMMQRVLSEVEQGVWSGVLVMEVERLARGDTIDQGIIAQTFKFSGTKIITPIKTYDPDNEFDEEYFEFGLFMSRREYKIINRRLQRGRLASAKEGKWPSGLAPFGYRRVKLKNEKGCSLEPIEEQAAIVRMIFDLYTVGLQDEDGSAHPLSLGSIATRLNDMHIPSPSGSQWARITIRGIIKNPTYIGMVRWGSRETKKKVVDGKVVSVRGPADPEKECVFKGIHPPLVPKETFELANDKLARSENTSTHKEKVVRNPLAGLLVCSECGRQMMRMINPVHPDMPVVRCPRRGCPNCSSYLPIVEERVIQGLSEWMKGYELEWSSAAASSSVSSVGVREKALASAEAELRKLQQQLERTHDFLEQGIYDTDTFLSRSRMLSDKIAAAKDSVTRCSRELTEEKLRETSRRDIIPKVKNLLDVYPLLETAEEKNALLKEVLEKVVYQKLNEKRKKSPDGFTIEIYPRIPKSEK

SEQ ID NO: 3267 - protein, 530 aa, Unknown
  Description of Unknown: Integrase B3268 sequence
  SM00857,G3DSA:1.10.10.2600,IPR036162,PF13408, IPR025827,G3DSA:3.40.50.1390,PS51737,IPR006119, IPR038109,PF07508,IPR011109,SSF53041, PF00239,PTHR30461,PS51736,Coil,cd00338
MKKQLNLYGHYCAYLRKSRADRDNMYATDEDVLARHESILADLSKRLGIVIEKTYREVVSGDTIAARPEVQQLLEQVEDGLWDGVLVVEVERLARGDSIDQGTISRSFALSHTLIITPNKIYDPDDEFDSEYFEFGLFMSRREYKTINRRLNRGRDQSAEEGKYIGNKPPYGYERVKLQGEKGFTLSPDPNKADIVRMIFDMYVKGEDSGSTGVSKIVRKLNAMHIPAAMGGDWTTSTVQDMLSNPVYIGKIRHKWRPAVKSVKDGVLSVSRPRDKERVTIYEGRHPGIISPDIYAAAQEKRKKNPGKTVPSRYIIQNPLSGLVVCGKCGRKMIRRPYKPPQKDTLLCYHTNCSQIGSPLYLVEQEILNALRAIVDDTINPSISLPETSDNTLKTKLKILNEKEKELDDLQLQKDRIYNFLEQGIYSIDEFRERSTRNTDEMEKIQTTVEVLKTEIKKLNSYQKKKKEFIPRCEHLLEHYEELTVEQKNDCLKELLDKVEYDKNERNKHGEGDKPNFKLHLYPKFFSDNY

SEQ ID NO: 3268 - protein, 530 aa, Unknown
  Description of Unknown: Integrase B3269 sequence
  SM00857,G3DSA:1.10.10.2600,IPR036162,PS51737,G3DSA:3.40.50.1390, IPR006119,IPR038109,PF07508,IPR011109,SSF53041, PF00239,PTHR30461,PS51736,Coil,cd00338
MEQYLIYLRKSRSDLEAEAHGEGETLSRHEHTLLELAKRQHLNVTDIYREVVSGDTIAARPMMQRVLSEVEQGVWSGVLVMEVERLARGDTIDQGIIAQTFKFSGTKIITPIKTYDPDNEFDEEYFEFGLFMSRREYKIINRRLQRGRLASAKEGKWPSGLAPFGYRRVKLKNEKGCSLEPIEEQAAIVRMIFDLYTVGLQDEDGSTRPLSLGSIATRLNDMHIPSPSGSQWARITIRGIIKNPTYIGMVRWGSRETKKKVVDGKVVSVRGPADPEKECIFKGIHPPLIPKETFELANDKLARSENTSTHKEKVVRNPLAGLLVCSECGRQMMRMINPVHPDMPVVRCPRRGCPNCSSYLPIVEERVIQGLSEWMKGYELEWSSAAASSSVSSVGVREKALASAEAELRKLQQQLERTHDFLEQGVYDTDTFLSRSRMLSDKIAAAKESTARCSRELTEEKLRETSRRDIIPKVKNLLDVYPMLETAEEKNALLKEVLEKVVYQKLNEKRKKSPDGFTIEIYPRIPKSEK

SEQ ID NO: 3269 - protein, 530 aa, Unknown
  Description of Unknown: Integrase B3270 sequence
  SM00857,G3DSA:1.10.10.2600,IPR036162,PS51737, G3DSA:3.40.50.1390,IPR006119,IPR038109,PF07508, IPR011109,SSF53041,PF00239,PTHR30461, PS51736,Coil,cd00338
MEQYLIYLRKSRSDLEAEAHGEGETLSRHEHTLLELAKRQHLNVTDIYREVVSGDTIAARPMMQRVLSEVEQGVWSGVLVMEVERLARGDTIDQGIIAQTFKFSGTKIITPIKTYDPDNEFDEEYFEFGLFMSRREYKIINRRLQRGRLASAKEGKWPSGLAPFGYRRVKLKNEKGCSLEPIEEQAAIVRMIFDLYTVGLQDEDGSARPLSLGSIATRLNDMHIPSPSGSQWARITIRGIIKNPTYIGMVRWGSRETKKKVVDGKVVSVRGPADPEKECIFKGIHPPLIPKETFELANDKLTRSENTSTHKEKVVRNPLAGLLVCSECGRQMMRMINPVHPDMPVVRCPRRGCPNCSSYLPIVEERVIQGLSEWMKGYELEWSSAAASSSVSSVGVREKALASAEAELRKLQQQLERTHDFLEQGVYDTDTFLSRSRMLSDKIAAAKESTARCSRELTEEKLRETSRRDIIPKVKNLLDVYPLLETAEEKNALLKEVLEKVVYQKLNEKRKKSPDGFTIEIYPRIPKSEK

SEQ ID NO: 3270 - protein, 530 aa, Unknown
  Description of Unknown: Integrase B3271 sequence
  PTHR30461:SF3,cd00338,SM00857,G3DSA:1.10.10.2600,IPR036162, PF13408,PS51737,G3DSA:3.40.50.1390,IPR025827,IPR006119, IPR038109,PF07508,IPR011109,SSF53041,PTHR30461, PS51736,Coil,PF00239
MARKKNIAAGQDAVIYARYSSHNQREVSIEQQIAECTKYAAALGLRIVGTYEDRAISGKTDNRPRFQQMMRDAGKGKFQAVVAWKSNRIGRNMLQAMVNEAKLDDYGVKVFYAEEDFDDTAAGRFALRNMMNVNQFYSENMAEDITRGLYDNASKCMANGRQPLGYKRGEDGRVVLDEANAAVVREIFTRVAAGDLFVDIARDLNAQGIKTSKGANWNKGSFQSICQNERYRGIYIYGDVRVADGIPRIVSDDLWYRVQEAMRMKKNPVGTRHRVGAEDYLLTGKLRCGHCGSYMTGVSGTSRNGELHYYYTCQKRRTEHACDKKNIRRDVIEPAVAQAIKMYCLTDDVIEWMADRTVEYWEKHDNDLQIEALEQQLAENKKATSNMLKAIEMGIITEATRTRMVELETEQSRLSVQLNAAKEDVVKIDREQIISYLELLQQGDIHDRDFQMELFKNFLVAVYVYDDNRMKLVFSCMGDQNSVEIPLETGEDPPDGGLSPDAKMFVLTPDSSTKKALYFVGSMVLFFLLS

SEQ ID NO: 3271 - protein, 530 aa, Unknown
  Description of Unknown: Integrase B3272 sequence
  SM00857,G3DSA:1.10.10.2600,IPR036162,PS51737,G3DSA:3.40.50.1390, IPR006119,IPR038109,PF07508,IPR011109,SSF53041, PTHR30461,PS51736,cd00338,PF00239
MEQYLIYLRKSRSDLEAEAHGEGETLSRHEHTLLELAKRQHLNVTDIYREVVSGDTIAARPMMQRVLSEVEQGVWSGVLVMEVERLARGDTIDQGIIAQTFKFSGTKIITPIKTYDPDNEFDEEYFEFGLFMSRREYKIINRRLQRGRLASAKEGKWPSGLAPFGYRRVKLKNEKGCSLEPIEEQAAIVRMIFDLYTVGLQDEDGSARPLSLGSIATRLNDMHIPSPSGSQWARITIRGIIKNPTYIGMVRWGSRETKKKVVDGKVVSVRGPADPEKECIFKGIHPPLIPKETFELANDKLTRSENTSTHKEKVVRNPLAGLLVCSECGRQMMRMINPVHPDMPVVRCPRRGCPNCSSYLPIVEERVIQGLSEWMKGYELEWSSAAASSSVSSVGVREKALASAEVELHKLQQQLERTHDFLEQGIYDTDTFLSRSRMLSDKIAAAKDSVARCSRELTEEKLRETSRRDIIPKVKNLLDVYPLLETAEEKNALLKEVLEKVVYQKLNEKRKKSPDGFTIEIYPRIPKSEK

SEQ ID NO: 3272 - protein, 530 aa, Unknown
  Description of Unknown: Integrase B3273 sequence
  SM00857,G3DSA:1.10.10.2600,IPR036162,PS51737, G3DSA:3.40.50.1390,IPR006119,IPR038109,PF07508, IPR011109,SSF53041,PF00239,PTHR30461, PS51736,Coil,cd00338
MEQYLIYLRKSRSDLEAEAHGEGETLSRHEHTLLELAKRQHLNVTDIYREVVSGDTIAARPMMQRVLSEVEQGVWSGVLVMEVERLARGDTIDQGIIAQTFKFSGTKIITPIKTYDPDNEFDEEYFEFGLFMSRREYKIINRRLQRGRLASAKEGKWPSGLAPFGYRRVKLKNEKGCSLEPIEEQAAIVRMIFDLYTVGLQDEDGSARPLSLGSIATRLNDMHIPSPSGSQWARITIRGIIKNPTYIGMVRWGSRETKKKVVDGKVVSVRGPADPEKECIFKGIHPPLIPKETFELANDKLARSENTSTHKEKVVRNPLAGMLVCSECGRQMMRMINPVHPDMPVVRCPRRGCPNCSSYLPIVEERVIQGLSEWMKGYELEWSSAAASSSVSSVGVREKALASAEAELRKLQQQLERTHDFLEQGIYDTDTFLSRSRMLSDKIAAAKESVARCSRELTEEKLREASRREIIPKVKNLLDVYPLLETAEEKNALLKEVLEKVVYQKLNEKRKKSPDGFTIEIYPRIPKSEK

SEQ ID NO: 3273 - protein, 530 aa, Unknown
  Description of Unknown: Integrase B3274 sequence
  cd00338,SM00857,G3DSA:1.10.10.2600,IPR036162,PF13408, PS51737,G3DSA:3.40.50.1390,IPR025827,IPR006119,IPR038109, PF07508,IPR011109,SSF53041,PTHR30461,PS51736, Coil,PF00239
MNDQSTKGVLYCRYSSHAQRDVSIDQQIKECEKFAERNNIDIIKVYDDRAMSGTNDRRPMFQAMLAEAARLDYQYIIVYSLDRFARDRYDSAVYKRQLKSCGKKVLSATENISDDPSGVLMESLLEGLAEYYSKELSRKIRRGMDDNAERCMANGSLPYGYRRGKDGKYEIVPDQAAVVQEVFLRVSNGESMVSIYNSLNARGLRTKRGHIWNKNSFNRLLSNIRYTGVYVYRDKQIPGGIPAIIDKELFDAVQHHLHTKSNPRISGDMPTRRRRENSVYLLTGKLFCGKCKSPMVGISGKSGVPTPYYYYACKAHRQTKLCDMKAVRRDAIEREVAAAIKRYILVDDTISQLADYAVKAQNEMAKDTALDTLQEQLTATTASIGNIVSAIERGAFSEAMQLRLSELEAVKKSLEEEIAYSKLRRAPSFTRDDFVAMLHLYRDGDIDDKDYQEKLIDTFLIAAYVYSDHLHLVFDFGQNAMDHDIDIALVQNADRQADEQNLFKGCKAPPNEVRTNTYFFSGGFAVTCSL

SEQ ID NO: 3274 - protein, 530 aa, Unknown
  Description of Unknown: Integrase B3275 sequence
  cd00338,SM00857,G3DSA:1.10.10.2600,IPR036162,PS51737, G3DSA:3.40.50.1390,IPR006119,IPR038109,PF07508,SSF53041, IPR011109,PTHR30461,PS51736,Coil,PF00239
MEQYLIYLRKSRSDLEAEAHGEGETLSRHEHTLLELAKRQHLNVTDIYREVVSGDTIAARPMMQRVLSEVEQGVWSGVLVMEVERLARGDTIDQGIIAQTFKFSGTKIITPIKTYDPDNEFDEEYFEFGLFMSRREYKIINRRLQRGRLASAKEGKWPSGLAPFGYRRVKLKNEKGCSLEPIEEQAAIVRMIFDLYTVGLQDEDGSARPLSLGSIATRLNDMRIPSPSGSQWARITIRGIIKNPTYIGMVRWGSRETKKKVVDGKVVSVRGPADPEKECVFKGIHPPLISKETFELANDKLTRSENTSTHKEKVVRNPLAGLLVCSECGRQMMRMINPVNPDMPVVRCPRRGCPNCSSYLPIVEERVIQGLSEWMKGYELEWSSTAASSSVSSVGVREKALASAEAELRKLQQQLERTHDFLEQGIYDTDTFLSRSRMLSDKIAAAKDSVTRCSRELTEEKLRETSRRDIIPKVKNLLDVYPLLETAEEKNALLKEVLEKVVYQKLNEKRKKSPDGFIIEIYPRIPKSEK

SEQ ID NO: 3275 - protein, 530 aa, Unknown
  Description of Unknown: Integrase B3276 sequence
  PTHR30461:SF3,IPR036162,PS51737,IPR011109,PTHR30461, PF00239,G3DSA:1.10.10.2600,IPR006119,SSF53041,cd00338, SM00857,IPR025827,IPR038109,PS51736, mobidb-lite,PF13408,G3DSA:3.40.50.1390,PF07508,Coil
MYEEIKTACLYLRYSSSSQTEQSIEGQMHVCQDFCKRHNIRIVEMYIDRATSASKDIEKRVQFLKMIKDSEKGNFDAVIVYKLDRFARSRYDSANYKYRLKRNGVQLISATENISNDPEGIILESVLEGMAEFYSAELSQKINRGMRESAMKHNSIGGAIPLGYKTVDKKLVIDETTAPIVREAFQMYADGESVAEICRTFNNRGYKTSKGTRFGKSSFTKIFRNEKYIGVYKYHDYRAEDVIPPIIDKDLWDRVQVRIGKIKKAPARNKARHTYLLTGKLFCGHCGSAMNADGNSQGYLYYRCYGKKNLDKQCNKRNMEKNLIERLVAQDAMSFLTDEYIEKIATIACDRNKQEIESDSPIPVIRDRIRQVDVSLNNLLKAIETGSAPDMLVKRMGELETEKKDMEVQLKKEMAHQVYIDKEQVIFWLEKFREGDINDEEFCQTVIDLFVNSVTVWDEPDDKFRITIAYNLTSIPQKTYRLSKDGRLSDYASNTPALQCKPSDRRMHFCPGRPDDHDSEKCSAGLPDHY

SEQ ID NO: 3276 - protein, 530 aa, Unknown
  Description of Unknown: Integrase B3277 sequence
  cd00338,SM00857,G3DSA:1.10.10.2600,IPR036162,PS51737, G3DSA:3.40.50.1390,IPR006119,IPR038109,PF07508,SSF53041, IPR011109,PTHR30461,PS51736,Coil,PF00239
MEQYLIYLRKSRSDLEAEAHGEGETLSRHEHTLLELAKRQHLNVTDIYREVVSGDTIAARPMMQRVLSEVEQGVWSGVLVMEVERLARGGTIDQGIIAQTFKFSGTKIITPIKTYDPDNEFDEEYFEFGLFMSRREYKIINRRLQRGRLASAKEGKWPSGLAPFGYRRVKLKNEKGCSLEPIEEQAAIVRMIFDLYTVGLQDEDGSSRPLSLGSIATRLNDMHIPSPSGSQWARITIRGIIKNPTYIGMVRWGSRETKKKVVDGKVVSVRGPADPEKECVFKGIHPPLVPKETFELANDKLTRSENTSTRKEKVVRNPLAGLLVCSECGRQMMRMINPVHPDMPVVRCPRRGCPNCSSYLPIVEERVMQGLSEWMKGYELEWSSAAASSSVSSVGVREKALASAEAELRKLQQQLERTHDFLEQGIYDTDTFLSRSRMLSDKIAAAKDSVTRCSRELTEEKLRETSRRDIIPKVKNLLDVYPLLETAEEKNALLKEVLEKVVYQKLNEKRKKSPDGFTIEIYPRIPKSEK

SEQ ID NO: 3277 - protein, 530 aa, Unknown
  Description of Unknown: Integrase B3278 sequence
  cd00338,SM00857,G3DSA:1.10.10.2600,IPR036162, PS51737,G3DSA:3.40.50.1390,IPR006119,IPR038109, PF07508,IPR011109,SSF53041,PTHR30461, PS51736,Coil,PF00239
MEQYLIYLRKSRSDLEAEAHGEGETLSRHEHTLLELAKRQHLNVTDIYREVVSGDTIAARPMMQRVLSEVEQGVWSGVLVMEVERLARGDTIDQGIIAQTFKFSGTKIITPIKTYDPDNEFDEEYFEFGLFMSRREYKIINRRLQRGRLASAKEGKWPSGLAPFGYRRVKLKNEKGCSLEPIEEQAAIVRMIFDLYTVGLQDEDGSARPLSLGSIATRLNDMHIPSPSGSQWARITIRGIIKNPTYIGMVRWGSRETKKKVVDGKVVSVRGPADPEKECVFKGIHPPLIPKETFELANDKLTRSENTSTRKEKVVRNPLAGLLVCSECGRQMMRMINPVHPDMPVVRCPRRGCPNCSSYLPIVEERVIQGLSEWMKGYELEWSSAAASSSVSSVGVREKALTSAEAELRKLQQQLERTHDFLEQGIYDTDTFLSRSRMLSDKIASAKDSVTRCSRELTEEKLRETSRRDIIPKVKNLLDVYPLLETAEEKNALLKEVLEKVVYQKLNEKRKKSPDGFTIEIYPRIPKSEK

SEQ ID NO: 3278 - protein, 530 aa, Unknown
  Description of Unknown: Integrase B3279 sequence
  PTHR30461:SF3,cd00338,SM00857,G3DSA:1.10.10.2600,IPR036162, PF13408,IPR025827,PS51737,G3DSA:3.40.50.1390,IPR006119, IPR038109,PF07508,IPR011109,SSF53041,PTHR30461, PS51736,Coil,PF00239
MSSVDKTAVIYARYSSHGQTEQSIDGQIAAAQKYAEGKGYTIIHIYADRAMTGRNDDREQFQKMLSDTATHQFGVILLWKIDRFGRNREEIAFNRYRCKKNGVRVERVAEDVPDGPEGVILDSVLEGMAEYYSLQLAQNVRRGQRESAKKSQSNGGTRMIGYKVNPDTKRYEIDPDTAPFITEVFRRYAGGQTMAEIAAWLNAQGLRATRGGMFTVNSLHRLLKNEKYTGVYIFRDIRNEGGMPALIDRATFDKVQEMLKVNRRAPSRVWSRAEYLLTDKLFCGHCGAPMAGVSGHGHTGVKHNYYTCLNRKRKKSCTKKSVRQDVLEPLVLKSIRNLLQDDATLKYIADRVWAEYERSDTSGDTIRALDRQIADVDRALSNVMKAIEMGIINEMTKARMDELTEQKQALSAARADAGLARGFKLTRNMILYFLRKMAAMDISDRDSQKRLIKTFVNAIYLYDDHFDIAFNYTENGKVIVKMQEIDDASTGGAFGCCAQCPTINHQDEHTTFITMIGNVFVLFCPFPGLK

SEQ ID NO: 3279 - protein, 530 aa, Unknown
  Description of Unknown: Integrase B3280 sequence
  SM00857,G3DSA:1.10.10.2600,IPR036162,PS51737,G3DSA:3.40.50.1390, IPR006119,IPR038109,PF07508,IPR011109,SSF53041, PF00239,PTHR30461,PS51736,Coil,cd00338
MEQYLIYLRKSRSDLEAEAHGEGETLSRHEHTLLELAKRQHLNVTDIYREVVSGDTIAARPMMQRVLSEVEQGVWSGVLVMEVERLARGDTIDQGIIAQTFKFSGTKIITPIKTYDPDNEFDEEYFEFGLFMSRREYKIINRRLQRGRLASAKEGKWPSGLAPFGYRRVKLKNEKGCSLEPIEEQAAIVRMIFDLYTVGLQDEDGSARPLSLGSIATRLNDMRIPSPSGSQWARITIRGIIKNPTYIGMVRWGSRETKKKVVDGKVVSVRGPADPEKECVFKGIHPPLIPKETFELANDKLARSENTSTHKEKVVRNPLAGLLVCSECGRQMMRMINPVHPDMPVVRCPRRGCPNCSSYLPIVEERVIQGLSEWMKGYELEWSSAAESSSVSSVGVREKALASAEAELRKLQQQLERTHDFLEQGVYDTDTFLSRSRMLSDKIAVAKDSVARCSRELTEEKLRETSRRDIIPKVRNLLDVYPLLETAEEKNALLKEVLEKVVYQKLNEKRKKSPDGFTIEIYPRIPKSEK

SEQ ID NO: 3280 - protein, 530 aa, Unknown
  Description of Unknown: Integrase B3281 sequence
  cd00338,SM00857,G3DSA:1.10.10.2600,IPR036162, PS51737,G3DSA:3.40.50.1390,IPR006119,IPR038109, PF07508,IPR011109,SSF53041,PTHR30461, PS51736,Coil,PF00239
MEQYLIYLRKSRSDLEAEAHGEGETLSRHEHTLLELAKRQHLNVTDIYREVVSGDTIAARPMMQRVLSEVEQGVWSGVLVMEVERLARGDTIDQGIIAQTFKFSGTKIITPIKTYDPDNEFDEEYFEFGLFMSRREYKIINRRLQRGRLASAKEGKWPSGLAPFGYRRVKLKNEKGCSLEPIEEQAAIVRMIFDLYTVGLQDEDGSARPLSLGSIATRLNDMHIPSPSGSQWARITIRGIIKNPTYIGMVRWGSRETKKKVVDGKVVSVRGPADPEKECIFKGIHPPLIPKETFELANDKLTRSENTSTHKEKVVRNPLAGLLVCSECGRQMMRMINPVRPDMPVVRCPRRGCPNCSSYLPIVEERVIQGLSEWMKGYELEWSSAAASSSVSLVGVREKALASAEAELRKLQQQLERTHDFLEQGIYDTDTFLSRSRMLSDKIAAAKDSVARCSRELTEEKLRETSRRDIIPKVENLLDVYPLLETAEEKNALLKEVLEKVVYQKLNEKRKKSPDGFTIEIYPRIPKSEK

SEQ ID NO: 3281 - protein, 530 aa, Unknown
  Description of Unknown: Integrase B3282 sequence
  SM00857,G3DSA:1.10.10.2600,IPR036162,PS51737,G3DSA:3.40.50.1390, IPR006119,IPR038109,PF07508,SSF53041,IPR011109, PF00239,PTHR30461,PS51736,Coil,cd00338
MEQYLIYLRKSRSDLEAEAHGEGETLSRHEHTLLELAKRQHLNVTDIYREVVSGDTIAARPMMQRVLSEVEQGVWSGVLVMEVERLARGDTIDQGIIAQTFKFSGTKIITPIKTYDPDNEFDEEYFEFGLFMSRREYKIINRRLQRGRLASAKEGKWPSGLAPFGYRRVKLKNEKGCSLEPIEEQAAIVRMIFDLYTVGLQDEDGSARPLSLGSIATRLNDMHIPSPSGSQWARITIRGIIKNPTYIGMVRWGSRETKKKVVDGKVVSVRGPADPEKECVFKGIHPPLVPKETFELANDKLARSENTSTHKEKVVRNPLAGLLVCSECGRQMMRMINPVHPDMPVVRCPRRGCPNCSSYLPIVEERVIQGLSEWMKGYELEWSSAAASSSVSSVGVREKALASAEAELRKLQQQLERTHDFLEQGIYDTDTFLSRSRMLSDKIAAAKDSVARCSRELTEEKLRETSRRDIIPKVKNLLDVYPLLETAEEKNALLKEVLEKVVYQKLNEKRKKSPDGFTIEIYPRIPKSEK

SEQ ID NO: 3282 - protein, 530 aa, Unknown
  Description of Unknown: Integrase B3283 sequence
  SM00857,G3DSA:1.10.10.2600,IPR036162,PS51737, G3DSA:3.40.50.1390,IPR006119,IPR038109,PF07508, IPR011109,SSF53041,PF00239,PTHR30461, PS51736,Coil,cd00338
MEQYLIYLRKSRSDLEAEAHGEGETLSRHEHTLLELAKRQHLNVTDIYREVVSGDTIAARPMMQRVLSEVEQGVWSGVLVMEVERLARGDTIDQGIIAQTFKFSGTKIITPIKTYDPDNEFDEEYFEFGLFMSRREYKIINRRLQRGRLASAKEGKWPSGLAPFGYRRVKLKNEKGCSLEPIEEQAAIVRMIFDLYTVGLQDEDGSARPLSLGSIATRLNDMHIPSPSGSQWARITIRGIIKNPTYIGMVRWGSRETKKKVVDGKVVSVRGPADPEKECVFKGIHPPLIPKETFELANDNLTRSENTSTHKEKIVRNPLAGLLVCSECGRQMMRIINPVHPDMPVVRCPRRGCPNCSSYLPIVEERVIQGLSEWMKGYELEWSSAAASASVSSVGVREKALASAEAELRKLQQQLERTHDFLEQGIYGTDTFLSRSRMLSDKIAAAKDSVTRCSRELTEEKLRETSRRDIIPKVKNLLDVYPLLETAEEKNALLKEVLEKVVYQKLNEKRKKSPDSFTIEIYPRIPKSEK

SEQ ID NO: 3283 - protein, 530 aa, Unknown
  Description of Unknown: Integrase B3284 sequence
  SM00857,G3DSA:1.10.10.2600,IPR036162,PS51737,G3DSA:3.40.50.1390, IPR006119,IPR038109,PF07508,IPR011109,SSF53041, PF00239,PTHR30461,PS51736,Coil,cd00338
MKTAVTYARFSSARQHETSIEAQRDAMARWCAQRSVQIVQEYADRAASGTKTEGRDDFLQMLADLKRRRVDYVLVHKYDRFARNENDQYFYMAMIEQRGAKLVAVAQEFGDGPEARFMLGVITAYNAFYSANLGNEVKKGRSVIIQQGKHPGGPIPLGYVSDGNGSYMIDDFEAYYMCRLFRAVINRRESTQAIIAEMNDVGIHGRRGGDVSYDTVARLLRNPIYAGVYQRRLPNGEIYRIENHHPAIVAMAEFEEVQRIMSQRTNVGRPNKTTFLLTGIAYCGACGSKIYAVNNPQNGKPYSTYFCTHCSGFRRIPAAELEGAAVDYLNALFSPERRAQLADAVASYSRRLTQSAQKRQPSAERKIKKIQREIDALVANLATGALDADTVAVVGQQISTRRARIKVLQESVTPPAPVNAPDVAEYFAGVSSLSLDMDRKVLRQIMHRYIARVIVHTTEIEFQSTFEDWFAEQQKKLQIPANGPTNAVIYTISFLHRAPGGGRGASTRIVPKILISMDKMHKVKRHPGKR

SEQ ID NO: 3284 - protein, 530 aa, Unknown
  Description of Unknown: Integrase B3285 sequence
  cd00338,SM00857,G3DSA:1.10.10.2600,IPR036162, PS51737,G3DSA:3.40.50.1390,IPR006119,IPR038109, PF07508,IPR011109,SSF53041,PTHR30461, PS51736,Coil,PF00239
MEQYLIYLRKSRSDLEAEAHGEGETLSRHEHTLLELAKRQHLNVTDIYREVVSGDTIVARPMMQRVLSEVEQGVWSGVLVMEVERLARGDTIDQGIIAQTFKFSGTKIITPIKTYDPDNEFDEEYFEFGLFMSRREYKIINRRLQRGRLASAKEGKWPSGLAPFGYRRVKLKNEKGCSLEPIEEQAAIVRMIFDLYTVGLQDEDGSARPLSLGSIATRLNDMRIPSPSGSQWARITIRGIIKNPTYIGMVRWGSRETKKKVVDGKVVSVRGPADPEKECVFKGIHPPLIPKETFELANDKLTRSENTSTRKEKVVRNPLAGLLVCSECGRQMMRMINPVHPDMPVVRCPRRGCPNCSSYLPIVEERVIQGLSEWMKGYELEWSSAAASSSVSSVGVREKALASAEAELRKLQQQLERTHDFLEQGIYDTDTFLSRSRMLSDKIAAAKDSVTRCSRELTEEKLRETSRRDIIPKVKNLLDVYPLLETAEEKNALLKEVLEKVVYQKLNEKRKKSPDGFTIEIYPRIPKSEK

SEQ ID NO: 3285 - protein, 530 aa, Unknown
  Description of Unknown: Integrase B3286 sequence
  cd00338,SM00857,G3DSA:1.10.10.2600,IPR036162,PS51737, G3DSA:3.40.50.1390,IPR006119,IPR038109,PF07508,IPR011109, SSF53041,PTHR30461,PS51736,Coil,PF00239
MEQYLIYLRKSRSDLEAEAHGEGETLSRHEHTLLELAKRQHLNVTDIYREVVSGDTIAARPMMQRVLSEVEQGVWSGVLVMEVERLARGDTIDQGIIAQTFKFSGTKIITPIKTYDPDNEFDEEYFEFGLFMSRREYKIINRRLQRGRLASAKEGKWPSGLAPFGYRRVKLKNDKGCSLEPIEEQAAIVRMIFDLYTVGLQDEDGSARPLSLGSIATRLNDMRIPSPSGSHWARITIRGIIKHPTYIGMVRWGSRETKKKVVDGKVVSVRGPADPEKECVFKGIHPPLIPKETFELANDKLTRSENTSTHKEKVVRNPLAGLLVCSECGRQMMRMINPVNPDMPVVRCPRRGCPNCSSYLPIVEERVIQGLSEWMKGYELEWSSTAASSSVSSVGVREKALASAEAELRKLQQQLERTHDFLEQGIYDTDTFLSRSRMLSDKIAAAKDSVTRCSRELTEEKLRETSRRDIIPKVKNLLDVYPLLETAEEKNALLKEVLEKVVYQKLNEKRKKSPDGFIIEIYPRIPKSEK

SEQ ID NO: 3286 - protein, 530 aa, Unknown
  Description of Unknown: Integrase B3287 sequence
  cd00338,SM00857,G3DSA:1.10.10.2600,IPR036162, PS51737,G3DSA:3.40.50.1390,IPR006119,IPR038109, PF07508,IPR011109,SSF53041,PTHR30461, PS51736,Coil,PF00239
MEQYLIYLRKSRSDIEAEAHGEGETLSRHEHTLLELAKRQHLNVTDIYREVVSGDTIAARPMMQRVLSEVEQGVWSGVLVMEVERLARGDTIDQGIIAQTFKFSGTKIITPIKTYDPDNEFDEEYFEFGLFMSRREYKIINRRLQRGRLASAKEGKWPSGLAPFGYRRVKLKNEKGCSLEPIEEQAEIVRMIFDLYTVGLQDEDGSARSLSLGSIATRLNDMHIPSPSGSQWARITIRGIIKNPTYIGMVRWGSRETKKKVVDGKVVSVRGPADPEKECVFKGIHPPLIPKETFELANDKLTRSENTSTHKEKVVRNPLAGLLVCSECGRQMMRMINPVHPDMPVVRCPRRGCPNCSSYLPIVEERVIQGLSEWMKGYELEWSSAAASSSVSSVGVREKALASAEAELRKLQQQLERTHDFLEQGIYDTDTFLSRSRMLSDKIAAAKDSVARCSRELTEEKLRETSRRDIIPKVKNLLDVYPLLETAEEKNALLKEVLEKVVYQKLNEKRKKSPDGFTIEIYPRIPKSEK

SEQ ID NO: 3287 - protein, 530 aa, Unknown
  Description of Unknown: Integrase B3288 sequence
  SM00857,G3DSA:1.10.10.2600,IPR036162,PF13408,PS51737, IPR025827,G3DSA:3.40.50.1390,IPR006119,IPR038109,PF07508, IPR011109,SSF53041,PTHR30461,Coil,PS51736, cd00338,PF00239
MNAVIYARFSSHNQQEQSIEGQIRYCTEYAKKNDMTIINSYIDRAISGTSDNRPEFLQMIKDSNNHQFNVVLVWKLDRFARNRYDSAIYKNTLKKNNVKVVSVTEYLGEGSESVLLEAMLEAMAETYSRQLSENVRRGMRESALKCQVVGGSVPLGFDTVDKKYVINEKEAEIVRFIFDEYVSGTSKKEIVYKLNAKGWRTKNGSTFVFNSLNKILSNRKYIGEYKYEDIVIEHGIPAIIDEQTFELAQKQLAKNKRTAGRKKAKVEYLLSGKIFCGYCGENMLGESATNRHGKKYHYYICNSKKKYKNCKKKREGKETLEKYLVQQTILFFSDKNNIDKVAKKVVKLYNSELHNGHIDSMIANKKELEKQLDNLTNSLIKTSNDRVLNTINEKINSIDTQLSDLEIEIAREKSLASIEMTVSDVVCFINDIINGDINDVIFKKQIIDTLINAIYIYDDKIIVYFNGSEDAKTITYDDLCSDLEKIDNGGEFVFQPLTSTKQVLDEHLLFQRRICRQMCSLIQKQNAVSV

SEQ ID NO: 3288 - protein, 530 aa, Unknown
  Description of Unknown: Integrase B3289 sequence
  SM00857,G3DSA:1.10.10.2600,IPR036162,PS51737,G3DSA:3.40.50.1390, IPR006119,IPR038109,PF07508,IPR011109,SSF53041, PF00239,PTHR30461,PS51736,Coil,cd00338
MEQYLIYLRKSRSDLEAEAHGEGETLSRHEHTLLELAKRQHLNVTDIYREVVSGDTIAARPMMQRVLSEVEQGVWSGVLVMEVERLARGDTIDQGIIAQTFKFSGTKIITPIKTYDPDNEFDEEYFEFGLFMSRREYKIINRRLQRGRLASAKEGKWPSGLAPFGYRRVKLKNEKGCSLEPIEEQAAIVRMIFDLYTVGLQDEDGSARPLSLGSIATRLNDMHIPSPSGSQWARITIRGIIKNPTYIGMVRWGSRETKKKVVDGKVVSVRGPADPEKECIFKGIHPPLIPKETFELANDKLTRSENTSTHKEKVVRNPLAGLLVCSECGRQMMRMINPVHPDMPVVRCPRRGCPNCSSYLPIVEERVIQGLSEWMKGYELEWSSAAASSSVSSVGVREKALASAEAELRKLQQQLERTHDFLEQGIYGTDTFLSRSRMLSDKIAAAKDSVARCSRELTEEKLRETSRRDIIPKVKNLLDVYPLLETAEEKNALLKEVLEKVVYQKLNEKRKKSPDGFTIEIYPRIPKSEK

SEQ ID NO: 3289 - protein, 530 aa, Unknown
  Description of Unknown: Integrase B3290 sequence
  cd00338,SM00857,G3DSA:1.10.10.2600,IPR036162, PF13408,PS51737,IPR025827,G3DSA:3.40.50.1390, IPR006119,IPR038109,PF07508,IPR011109, SSF53041,PTHR30461,PS51736,Coil,PF00239
MNAVIYARFSSHNQQEQSIEGQIRYCTEYAKKNDLTIINSYIDRAISGTSDNRPEFLQMIKDSNNHQFNVVLVWKLDRFARNRYDSAIYKNALKKNSVKVVSVTEYLGEGSESVLLEAMLEAMAETYSRQLSENVRRGMRESALKCQVVGGSVPLGFDTVDKKYVINEKEAEIVRFIFDEYVSGTSKKEIVNKLNAKGWRTKNGSTFVFNSLNKILSNRKYIGEYKYEDIVIEHGIPAIIDEQTFELAQKQLAKNKRTAGRKKAKVEYLLSGKIFCGYCGENMLGESATNRHGKKYHYYICNSKKKYKNCKKKREGKETLEKYLVQQTILFFSDKNNIDKVAKKVVKLYNSELHNGHIDSMIANKKELEKQLDNLTNSLIKTSNDRVLNTINEKINSIDTQLNDLEIEIAREKSLASIEMTVSDVVCFINDIINGDINDVIFKKQIIDTLINAIYIYDDKIIVYFNGSEDAKTITYDDLCSDLEKIDNGGEFVFQPLTSTKQVLDEHLLFQRRICRQMCSLIQKQNAVSV

SEQ ID NO: 3290 - protein, 530 aa, Unknown
  Description of Unknown: Integrase B3291 sequence
  SM00857,G3DSA:1.10.10.2600,IPR036162,PS51737,G3DSA:3.40.50.1390, IPR006119,IPR038109,PF07508,SSF53041,IPR011109, PF00239,PTHR30461,PS51736,Coil,cd00338
MEQYLIYLRKSRSDLEAEAHGEGETLSRHEHTLLELAKRQHLNVTDIYREVVSGDTIAARPMMQRVLSEVEQGVWSGVLVMEVERLARGDTIDQGIIAQTFKFSGTKIITPIKTYDPDNEFDEEYFEFGLFMSRREYKIINRRLQRGRLASAKEGKWPSGLAPFGYRRVKLKNEKGCSLEPIEEQAAIVRMIFDLYTVGLQDEDGSARPLSLGSIATRLNDMHIPSPSGSQWARITIRGIIKNPTYIGMVRWGSRETKKKVVDGKVVSVRGPADQEKECVFKGIHPPLVPKETFELANDKLARSENTSTHKEKVVRNPLAGLLVCSECGRQMMRMINPVHPDMPVVRCPRRGCPNCSSYLPIVEERVIQGLSEWMKGYELEWSSAAASSSVSSVGVREKALASAEAELRKLQQQLERTHDFLEQGIYDTDTFLSRSRMLSDKIAAAKDSVARCSRELTEEKLRETSRRDIIPKVRNLLDVYPLLETAEEKNALLKEVLEKVVYQKLNEKRKKSPDGFTIEIYPRIPKSEK

SEQ ID NO: 3291 - protein, 530 aa, Unknown
  Description of Unknown: Integrase B3292 sequence
  cd00338,SM00857,G3DSA:1.10.10.2600,IPR036162, PS51737,G3DSA:3.40.50.1390,IPR006119,IPR038109, PF07508,IPR011109,SSF53041,PTHR30461, PS51736,Coil,PF00239
MEQYLIYLRKSRSDLEAEAHGEGETLSRHEHTLLELAKRQHLNVTDIYREVVSGDTIAARPMMQRVLSEVEQGVWSGVLVMEVERLARGDTIDQGIIAQTFKFSGTKIITPIKTYDPDNEFDEEYFEFGLFMSRREYKIINRRLQRGRLASAKEGKWPSGLAPFGYRRVKLKNEKGCSLEPIEEQAAIVRMIFDLYTVGLQDEDGSARPLSLGSIATRLNDMHIPSPSGSQWARITIRGIIKNPTYIGMVRWGSRETKKKVVDGKVVSVRGPADPEKECVFKGIHPPLIPKETFELANDKLTRSENTSTHKEKVVRNPLAGLLVCSECGRQMMRMINPVHPDMPVVRCPRRGCPNCSSYLPIVEERVIQGLSEWMKGYELEWNSAAASSSVSSVGVREKALAGAEAELRKLQQQLERTHDFLEQGIYDTDTFLSRSRMLSDKIAAAKESVARCSRELTEEKLRETSRRDIIPKVKNLLDVYPLLETAEEKNALLKEVLEKVVYQKLNEKRKKSPDGFTIEIYPRIPKSEK

SEQ ID NO: 3292 - protein, 530 aa, Unknown
  Description of Unknown: Integrase B3293 sequence
  SM00857,G3DSA:1.10.10.2600,IPR036162,PS51737,G3DSA:3.40.50.1390, IPR006119,IPR038109,PF07508,IPR011109,SSF53041, PF00239,PTHR30461,PS51736,Coil,cd00338
MEQYLIYLRKSRSDLEAEAHGEGETLSRHEHTLLELAKRQHLNVTEIYREVVSGDTIAARPMMQRVLSEVEQGVWSGVLVMEVERLARGDTIDQGIIAQTFKFSGTKIITPIKTYDPDNEFDEEYFEFGLFMSRREYKIINRRLQRGRLASAKEGKWPSGLAPFGYRRVKLKNEKGCSLEPIEEQAAIVRMIFDLYTVGLQDEDGSARPLSLGSIAARLNDMRVPSPSGSQWTRITIRGIIKNPTYIGMVRWGSRETKKKVVDGKVVSVRGPADPEKECVFKGIHPPLIPKETFELANDKLTRSENTSTHKEKVVRNPLAGLLVCSECGRQMMRMINPVHPDMPVVRCPRRGCPNCSSYLPIVEERVIQGLSEWMKGYELEWSSAAASSSVSSVGVREKALASAEAELRKLQQQLERTHDFLEQGIYDTDTFLSRSRMLSDKIAAAKDSVARCSRELTEEKLRETSRRDIIPKVKNLLDVYPLLETAEEKNALLKEVLEKVVYQKLNEKRKKSPDGFTIEIYPRIPKSEK

SEQ ID NO: 3293 - protein, 530 aa, Unknown
  Description of Unknown: Integrase B3294 sequence
  cd00338,SM00857,G3DSA:1.10.10.2600,IPR036162, PS51737,G3DSA:3.40.50.1390,IPR006119,IPR038109, PF07508,IPR011109,SSF53041,PTHR30461, PS51736,Coil,PF00239
MEQYLIYLRKSRSDLEAEAHGEGETLSRHEHTLLELAKRQHLNVTDIYREVVSGDTIAARPMMQRVLSEVEQGVWSGVLVMEVERLARGDTIDQGIIAQTFKFSGTKIITPIKTYDPDNEFDEEYFEFGLFMSRREYKIINRRLQRGRLASAKEGKWPSGLAPFGYRRVKLKNEKGCSLEPIEEQAAIVRMIFDLYTVGLQDEDGSARPLSLGSIATRLNDMHIPSPSGSQWARITIRGIIKNPTYIGMVRWGSRETKKKVVDGKVVSVRGPADPEKECIFKGIHPPLIPKETFELANDKLARSENTSTHKEKVVRNPLAGLLVCSECGRQMMRMINPVHPDMPVVRCPRRGCPNCSSYLPIVEERVIQGLSEWMKGYELEWSSATASSSVSSVGVREKALASAEAELRKLQQQLERTHDFLEQGIYDTDTFLSRSRMLSDKIAAAKDSVARCSRELTEEKLRETSRRDIIPKVKNLLDVYPLLETAEEKNALLKEVLEKVVYQKLNEKRKKSPDGFTIEIYPRIPKSEK

SEQ ID NO: 3294 - protein, 530 aa, Unknown
  Description of Unknown: Integrase B3295 sequence
  PTHR30461:SF3,SM00857,G3DSA:1.10.10.2600,IPR036162,PF13408, IPR025827,G3DSA:3.40.50.1390,PS51737,IPR006119,IPR038109, PF07508,IPR011109,SSF53041,PTHR30461,cd00338, PF00239
MPTNKNMARKYAAGGGSDNSCDVEPLRAVIYARYSSSGQREESIEGQLRDCYDFAKKHGIIVIGEYIDKAMTGRVDRRPDFQRMMKDSEKGRFNCVLLWKMDRFARNRYDSAMYKYKLKKNGIRIFYAKETIPDGPEGIILESVMEGYAEYYSENLAQNVKRGNYDSALELKTLGKTCLGLKTGPDGRYMIDQAEAAIVRRIFEEYAEGERAKDIYERLNSEGYRTSRGGKFNKNSLRRILSNKKYIGVYEYEDIYVENGIPAIITDRDLFERVQKMLKINHDAPARGKAQNFLLTTKLFCGLCGSPMIGDGGTSHTGKAYAYYSCTKRKRGRSCKKESVPKDWIEDLVVGELVKIVHNDELIEQIADRVMEYQKREKDQSGLHALEIRQKENEKAISNMLAAIEAGIITPSTKTRLMELEADRADIEKGIAHELLAEPEFERDQIIYFLERFRSGDINDEAYRIMLVDTFLNSVYLYDDDHLVLVMNYSGENCKVDLKLVEGAVSGDGCKGSAFAPSSALDDDPKLKET

SEQ ID NO: 3295 - protein, 530 aa, Unknown
  Description of Unknown: Integrase B3296 sequence
  cd00338,SM00857,G3DSA:1.10.10.2600,IPR036162,PS51737, G3DSA:3.40.50.1390,IPR006119,IPR038109,PF07508,IPR011109, SSF53041,PTHR30461,PS51736,Coil,PF00239
MEQYLIYLRKSRSDLEAEAHGEGETLSRHEHTLLELAKRQHLNVTDIYREVVSGDTIAARPMMQRVLSEVEQGVWSGVLVMEVERLARGDTIDQGIIAQTFKFSGTKIITPIKTYDPDNEFDEEYFEFGLFMSRREYKIINRRLQRGRLASAKEGKWPSGLAPFGYRRVKLKNEKGCSLEPIEEQAAIVRMIFDLYTVGLQDEDGSARPLSLGSIAARLNDMRVPSPSGSQWTRITIRGIIKNPTYIGMVRWGSRETKKKVVDGKVVSVRGPADPEKECVFKGIHPPLIPKETFELANDKLTRSENTSTHKEKVVRNPLAGLLVCSECGRQMMRMINPVHPDMPVVRCPRRGCPNCSSYLPIVEERVIQGLSEWMKGYELEWSSAAASSSVSSVGVREKALASAEAELRKLQQQLERTHDFLEQGIYDTDTFLSRSRMLSDKIAAAKDSVARCSRELTEEKLRETSRRDIIPKVKNLLDVYPLLETAEEKNALLKEVLERVVYQKLNEKRKKSPDGFTIEIYPRIPKSEK

SEQ ID NO: 3296 - protein, 530 aa, Unknown
  Description of Unknown: Integrase B3297 sequence
  PTHR30461:SF3,SM00857,G3DSA:1.10.10.2600,IPR036162,PF13408, IPR025827,G3DSA:3.40.50.1390,PS51737,IPR006119,IPR038109, PF07508,IPR011109,SSF53041,PTHR30461, Coil,PS51736,cd00338,PF00239
MTTLHHGAYILARYSTDRQDEDSIEVQVVKCSRWCDANGLPVLDVFADMAVSGMKDDRPEYSRMMRQLSLGSADTVVIYDQSRMFRKMTAWFDFREKVERLGVRVVSVTQPMVGGDLRDPTNFLTEGSMALFNQIWVLQTRQKVTEKMRFLAQQGRHTGGKPPLGYNVVDGRYVVCEAEAEIVRSIFKWYASGKTYREIIRALNEAGYTTKSGNSFGTNSLHDLLKNEKYIGVLTYGKVEKRPDGSRNSHASASSVIRVEDAVPAIIDRCTWERVQRKLQENKRSQAGRAPVVRSYPLKGKVFCGECKSAMVVSKAKGKYYYYACSAKQRKGKCDCMPIRVDDLEVRVLDTMRELFCLPANVEYLLAILRDERSKLQGSAGEKLQQLVTRRSAVDKRIAAAVDAVLSGLNSPALSAKLTELEAEKAKLEHDMLQLKAQVSGASVSEDKLREILNMFARSPETDDLLLSIVVRVEVHADFIKVWTLLDPTPRGDFDFSDDSETVIRIDGVGSPAPRILITQSLLCFCVPRK

SEQ ID NO: 3297 - protein, 530 aa, Unknown
  Description of Unknown: Integrase B3298 sequence
  cd00338,SM00857,G3DSA:1.10.10.2600,IPR036162,PS51737, G3DSA:3.40.50.1390,IPR006119,IPR038109,PF07508,IPR011109, SSF53041,PTHR30461,PS51736,Coil,PF00239
MEQYLIYLRKSRSDLEAEAHGEGETLSRHEHTLLELAKRQHLNVTDIYREVVSGDTIAARPMMQRVLSEVEQGVWSGVLVMEVERLARGDTIDQGIIAQTFKFSGTKIITPIKTYDPDNEFDEEYFEFGLFMSRREYKIINRRLQRGRLASAKEGKWPSGLAPFGYRRVKLKNEKGCSLEPIEEQAAIVRMIFDLYTVGLQDEDGSARPLSLGSIATRLNDMHIPSPSGSQWARITIRGIIKNPTYIGMVRWGSRETKKKVVDGKVVSVRGPADPEKECVFKGIHPPLIPKETFELANDKLTRSENTSTHKEKVVRNPLAGLLVCSECGRQMMRMINPVHPDMPVVRCPRRGCPNCSSYLPIVEERVIQGLSEWMKGYELEWSSAAASSSVSSVGVREKALASAEAELRKLQQQLERTHDFLEQGIYDTDTFLSRSRMLSDKIAAAKDSVARCSRELTEEKLRETSRRDIIPKVKNLLDVYPLLETAEEKNALLKEVLEKVVYQKLNEKRKKSPDGFTIEIYPRIPKSEK

SEQ ID NO: 3298 - protein, 530 aa, Unknown
  Description of Unknown: Integrase B3299 sequence
  SM00857,G3DSA:1.10.10.2600,IPR036162,PS51737, G3DSA:3.40.50.1390,IPR006119,IPR038109,PF07508, IPR011109,SSF53041,PF00239,PTHR30461, PS51736,Coil,cd00338
MEQYLIYLRKSRSDIEAEAHGEGETLSRHEHTLLELAKRQHLNVTDIYREVVSGDTIAARPMMQRVLSEVEQGVWSGVLVMEVERLARGDTIDQGIIAQTFKFSGTKIITPIKTYDPDNEFDEEYFEFGLFMSRREYKIINRRLQRGRLASAKEGKWPSGLAPFGYRRVKLKNEKGCSLEPIEEQAAIVRMIFDLYTVGLQDEDGSARPLSLGSIATRLNDMHIPSPSGSQWARITIRGIIKNPTYIGMVRWGSRETKKKVVDGKVVSVRGPADPEKECVFKGIHPPLIPKETFELANDKLTRSENTSTHKEKVVRNPLAGLLVCSECGRQMMRMINPVHPDMPVVRCPRRGCPNCSSYLPIVEERVIQGLSEWMKGYELEWSSAAASSSVSSVGVREKALASAEAELRKLQQQLERTHDFLEQGIYDTDTFLSRSRMLSDKIAAAKDSVARCSRELTEEKLRETSRRDIIPKVKNLLDVYPLLETAEEKNALLKEVLEKVVYQKLNEKRKKSPDGFIIEIYPRIPKSEK

SEQ ID NO: 3299 - protein, 530 aa, Unknown
  Description of Unknown: Integrase B3300 sequence
  cd00338,SM00857,G3DSA:1.10.10.2600,IPR036162,PS51737, G3DSA:3.40.50.1390,IPR006119,IPR038109,PF07508,IPR011109, SSF53041,PTHR30461,PS51736,Coil,PF00239
MEQYLIYLRKSRSDLEAEAHGEGETLSRHEHTLLELAKRQHLNVTDIYREVVSGDTIAARPMMQRVLSEVEQGVWSGVLVMEVERLARGDTIDQGIIAQTFKFSGTKIITPIKTYDPDNEFDEEYFEFGLFMSRREYKIINRRLQRGRLASAKEGKWPSGLAPFGYRRVKLKNEKGCSLEPIEEQAAIVRMIFDLYTVGLQDEDGSARPLSLGSIATRLNDMHIPSPSGSQWARITIRGIIKNPTYIGMVRWGSRETKKKVVDGKVVSVRGPADPEKECVFKGIHPPLIPKETFELANDKLTRSENTSTHTEKVVRNPLAGLLVCSECGRQMMRMINPVHPDMPVVRCPRRGCPNCSSYLPIVEERVIQGLSEWMKGYELEWSSAAASSSVSSVGVREKALASAEAELRKLQQQLERTHDFLEQGIYDTDTFLSRSRMLSDKIAAAKESVARCSRELTEEKLRETSRRDIIPKVKNLLDVYPLLETAEEKNALLKEVLEKVVYQKLNEKRKKSPDGFTIEIYPRIPKSEK

SEQ ID NO: 3300 - protein, 530 aa, Unknown
  Description of Unknown: Integrase B3301 sequence
  SM00857,G3DSA:1.10.10.2600,IPR036162,PS51737, G3DSA:3.40.50.1390,IPR006119,IPR038109,PF07508, IPR011109,SSF53041,PTHR30461,Coil, PS51736,cd00338,PF00239
MPYCLYVRKSRADAEAEARGEGETLTRHINALLDLAKRRHLDITQIYREIVSGETIAARPVMQQLLSEVEQGLWDGVLVMEVERLARGDTVDQGIVAQTFKFSDTKIITPIKDYDPNNEFDEEYFEFGLFMSRREYKTINRRLQRGRIASVKEGKYVGSQSPYGYQREKLVGDKGYTLAPLPAEADIVRLIFQLYTNGEEQEDGSYKRLGVSRIVRRLNDMRIPPRKSNHWSPATIRDILINPVYIGKIRWNWRKDSKKMVDGRVVIARPRSSIDDCVLADGKHPPLIDDATFALAQEYMAQNPPHPIGERNKVKNPLSGLVVCAKCGKKMVRRPYNDRNQADTLLCADTACDNISSALFYVEERVLQALSDWLAEYRLQWETADDTSDNASAVDLKEKALRRLATEYDTLNKQLDNAHDLLEQGVYTTEQFLDRSRKLSERIKKNEADRSTLGADIAADKKRERGRKQIIPKVEKLLDVYDSLPSAKAKNDMLKEVLEKVVYLKTKNGRWNNAPDDFEITLYPKIPKSD

SEQ ID NO: 3301 - protein, 530 aa, Unknown
  Description of Unknown: Integrase B3302 sequence
  cd00338,SM00857,G3DSA:1.10.10.2600,IPR036162,PS51737, G3DSA:3.40.50.1390,IPR006119,IPR038109,PF07508,IPR011109, SSF53041,PTHR30461,PS51736,Coil,PF00239
MEQYLIYLRKSRSDLEAEAHGEGETLSRHEHTLLELAKRQHLNVTDIYREVVSGDTIAARPMMQRVLSEVEQGVWSGVLVMEVERLARGDTIDQGIIAQTFKFSGTKIITPIKTYDPDNEFDEEYFEFGLFMSRREYKIINRRLQRGRLASAKEGKWPSGLAPFGYRRVKLKNEKGCSLEPIEEQAAIVRMIFDLYTVGLQDEDGSARPLSLGSIATRLNDMHIPSPSGSQWARITIRGIIKNPTYIGMVRWGSRETKKKVVDGKVVSVRGSADPEKECVFKGIHPPLVPKETFELANDKLARSENTSTHKEKVVRNPLAGLLVCSECGRQMMRMINPVHPDMPVVRCPRRGCPNCSSYLPIVEERVIQGLSEWMKGYELEWSSAAASSSVSSVGVREKALASAEAELRKLQQQLERTHDFLEQGIYDTDTFLSRSRMLSDKIAAAKDSVTRCSRELTEEKLRETSRRDIIPKVKNLLDVYPLLETAEEKNALLKEVLEKVVYQKLNEKRKKSPDGFTIEIYPRIPKSEK

SEQ ID NO: 3302 - protein, 530 aa, Unknown
  Description of Unknown: Integrase B3303 sequence
  SM00857,G3DSA:1.10.10.2600,IPR036162,PS51737, G3DSA:3.40.50.1390,IPR006119,IPR038109,PF07508, IPR011109,SSF53041,PTHR30461,Coil, PS51736,cd00338,PF00239
MPYCLYVRKSRADAEAEARGEGETLTRHINALLDLAKRRHLDITQIYREIVSGETIAARPVMQQLLSEVEQGLWDGVLVMEVERLARGDTVDQGIVAQTFKFSDTKIITPIKDYDPNNEFDEEYFEFGLFMSRREYKTINRRLQRGRIASVKEGKYVGSQSPYGYQREKLVGDKGYTLAPLPAEADIVRLIFQLYTKGEEQEDGSYKRLGVSRIVRRLNDMRIPPRKSTHWSPATIRDILINPVYIGKIRWNWRKDSKKMVDGRVVIARPRSSIDDCVLADGKHPPLIDDATFALAQEYMAQNPPHPIGERNKVKNPLSGLVVCAKCGKKMVRRPYNDRNQADTLLCADTACDNISSALFYVEERVLQALSDWLAEYRLQWEIADDTSDNASAVNLKEKALRRLDTEYDTLNKQLDNAHDLLEQGVYTTEQFLDRSRKLSERIKKNEADRFTLGADIAADKKREQGRKQIIPKVEKLLDVYDSLPSAKAKNDMLKEVLEKVVYLKTKNGRWNNAPDDFEITLYPKIPKSY

SEQ ID NO: 3303 - protein, 530 aa, Unknown
  Description of Unknown: Integrase B3304 sequence
  PTHR30461:SF3,cd00338,SM00857,G3DSA:1.10.10.2600,IPR036162, PF13408,PS51737,G3DSA:3.40.50.1390,IPR025827,IPR006119, IPR038109,PF07508,IPR011109,SSF53041,PTHR30461, PS51736,Coil,PF00239
MAKKKKPAGGIAVIYARYSSHNQRDVSIEQQIEACRKHAAELGLTIIATYEDRAISGRTDNRPAFQRLMHDAEKGKFSYVLAWKSNRMGRNMMQAMVNESRLMDCGIKVYYAEEDFDDSAAGRFALRSMMNVNQFYSDNLAEDVRRGLMDNANKCMVNGRQPLGYKRGKDGKVVVDEPAAAIVREVYARVASGELFTDIARDLNRRGIKTADKGEWNKNSFHRLCSNEKYRGIYIYGDVRIEGGIPTIIGDTLWYKVQEALRVKKLKRNGRHRPGDEDYLLTGKLRCGKCGGYMIGMSGRSKTGDIHYYYACQNRRVGRTCDKKNIRRDVIEPAVAQAIKEYCLTDDAIEWIADKTVEYWEKADRNLQLDSIEGDLAAVQSSISNVMKAIEMGVVTETTRDRLIELEKQRTDLKSKLALAKEEVVHVDRKKLISSLLLFRNGDIHDRQYQEDLFKTFLISVYVYDDDDNGHLKIVFNAFGDNNTVDLPIDFGETDNQSAFSDGAEKFDYSLHRSTRLKPSEEAQVAFLFV

SEQ ID NO: 3304 - protein, 530 aa, Unknown
  Description of Unknown: Integrase B3305 sequence
  PTHR30461:SF3,SM00857,G3DSA:1.10.10.2600,IPR036162,PF13408, IPR025827,PS51737,G3DSA:3.40.50.1390,IPR006119,IPR038109, PF07508,IPR011109,SSF53041,PF00239,PTHR30461, PS51736,Coil,cd00338
MAKKKKPAGGVAIIYARYSSHNQRDVSIEQQIEACRKHAAELGLTIIATYEDRAISGRTDNRPAFQRMMHDAENGKFSYVLAWKSNRMGRNMMQAMVNESRLMDCGIKVYYAEEDFDDSAAGRFALRSMMNVNQFYSDNLAEDVRRGLMDNASKCMANGKQPLGYKRGEDGKVVVDEPAAAIVREVYTRVASGELFTDIARDLNRRGIKTADKGEWNKNSFHRLCSNEKYRGIYIYGDVRIEGGIPAIIDDTLWYKVQEALRVKKLKRNGRHRPGDEDYLLTGKLRCGKCGGYMIGMSGRSKTGEIHYYYTCQNRRVGHTCDKKNIRRDVIEPAVAQAIKEYCLTDDAIEWIADKTVEYWEKADRNLQLDSIEGDLAAVQSSISNVMKAIEMGVVTETTRDRLIELEKQRTDLKSKLALAKEEVVHVDRKKLISSLLLFRNGDIHDRQYQEDLFKTFLISAYVYDDDDNGHLKIVFNAFGDNNTVDFPIDFGEADNQSAFFDGAEKFDYALHRSTRLKPSEEAQVAFLFV

SEQ ID NO: 3305 - protein, 530 aa, Unknown
  Description of Unknown: Integrase B3306 sequence
  SM00857,G3DSA:1.10.10.2600,IPR036162,PS51737,G3DSA:3.40.50.1390, IPR006119,IPR038109,PF07508,IPR011109,SSF53041, PF00239,PTHR30461,PS51736,Coil,cd00338
MEQYLIYLRKSRSDLEAEAHGEGETLSRHEHTLLELAKRQHLNVTDIYREVVSGDTIAARPMMQRVLSEVEQGVWSGVLVMEVERLARGDTIDQGIIAQTFKFSGTKIITPIKTYDPDNEFDEEYFEFGLFMSRREYKIINRRLQRGRLASAKEGKWPSGLAPFGYRRVKLKNEKGCSLEPIEEQAAIVRMIFDLYTVGLQDKDGSARPLSLGSIATRLNDMRIPSPSGSQWARITIRGIIKNPTYIGMVRWGSRETKKKVVDGKVVSVRGPADPEKECVFKGIHPPLIPKETFELANDKLARSENTSTHKEKVVRNPLAGLLVCSECGRQMMRMINPVHPDMPVVRCPRRGCPNCSSYLPIVEERVIQGLSEWMKGYELEWSSAAESSSVSSVGVREKALASAEAELRKLQQQLERTHDFLEQGVYDTDTFLSRSRMLSDKIAVAKDSVARCSRELTEEKLRETSRRDIIPKVRNLLDVYPLLETAEEKNALLKEVLEKVVYQKLNEKRKKSPDGFTIEIYPRIPKSEK

SEQ ID NO: 3306 - protein, 530 aa, Unknown
  Description of Unknown: Integrase B3307 sequence
  PTHR30461:SF3,SM00857,G3DSA:1.10.10.2600,IPR036162,PF13408, PS51737,G3DSA:3.40.50.1390,IPR025827,IPR006119,IPR038109, PF07508,IPR011109,SSF53041,PTHR30461, Coil,PS51736,cd00338,PF00239
MSKADILARYSTDNQNADSIEVQVEKCTEWCKQHGYAIVNVYADYAVSGMKDTRPQYNQMMQNLRAGEADTVVIYDQSRMFRKMTAWFAFRDELTEMGIKVISITQPMIGKDLRDPANFLVESNMAVFNQMWVLQTRQKVMEKMRYMAATQQHTGGKPALGYKVVLDGDKKRLAIDEAEAQIVHRIFDAYASGQSYREIIAGLNRDGIKTKRGSAYGVNSLHDLLKNKKYIGIVEYGAHPYSESGRRNTHGSVDENVIRVEIPDLAIIDRKTFDTVQQRMKENKKNQGGRPATRREYPLKGKIFCAECKSSMTVRISKGNLFYYVCAAQKRQHQCTARPIRCDYLEQRVADAVRAALGTPENKQFLIRILREQSEAIQGTAASSLLALIDEERNTTAQLNNAINAVLAGLMSDQLKAKIAELETRKSDIEKKITALKRQVDASRIPEENLTQMLDYIISSDSESAALFAIVARVEVGPDDITIWTIFDADPNGHIDFDSKEDVLITHGVPSGVPLVFITAFGMLKIQVRR

SEQ ID NO: 3307 - protein, 530 aa, Unknown
  Description of Unknown: Integrase B3308 sequence
  cd00338,SM00857,G3DSA:1.10.10.2600,IPR036162,PS51737, G3DSA:3.40.50.1390,IPR006119,IPR038109,PF07508,IPR011109, SSF53041,PTHR30461,PS51736,Coil,PF00239
MEQYLIYLRKSRSDIEAEAHGEGETLSRHEHTLLELAKRQHLNVTDIYREVVSGDTIAARPMMQRVLSEVEQGVWSGVLVMEVERLARGDTIDQGIIAQTFKFSGTKIITPIKTYDPDNEFDEEYFEFGLFMSRREYKIINRRLQRGRLASAKEGKWPSGLAPFGYRRVKLKNEKGCSLEPVEEQAAIVRMIFDLYTVGLQDEDGSARPLSLGSIATRLNDMHIPSPSGSQWARITIRGIIKNPTYIGMVRWGSRETKKKVVGGKVVSVRGPADPEKECVFKGIHPPLIPKETFELANDKLTRSENTSTHKEKVVRNPLAGLLVCSECGRQMMRMINPVHPDMPVVRCPRRGCPNCSSYLPIVEERVIQGLSEWMKGYELEWSSAAASSSVSSVGVREKALAGAEAELRKLQQQLERTHDFLEQGIYDTDTFLSRSRMLSDKIAAAKDSVARCSRELTEEKLRETSRRDIIPKVKNLLDVYPLLETAEEKNALLKEVLEKVVYQKLNEKRKKSPDGFTIEIYPRIPKSEK

SEQ ID NO: 3308 - protein, 530 aa, Unknown
  Description of Unknown: Integrase B3309 sequence
  SM00857,G3DSA:1.10.10.2600,IPR036162,PS51737, G3DSA:3.40.50.1390,IPR006119,IPR038109,PF07508, IPR011109,SSF53041,PF00239,PTHR30461, PS51736,Coil,cd00338
MEQYLIYLRKSRSDLEAEAHGEGETLSRHEHTLLELAKRQHLNVTDIYREVVSGDTIAARPMMQRVLSEVEQGVWSGVLVMEVERLARGDTIDQGIIAQTFKFSGTKIITPIKTYDPDNEFDEEYFEFGLFMSRREYKIINRRLQRGRLASAKEGKWPSGLAPFGYRRVKLKNEKGCSLEPIEEQAAIVRMIFDLYTVGLQDEDGSARPLSLGSIATRLNDMHIPSPSGSQWARITIRGIIKNPTYIGMVRWGSRETKKKVVDGKVVSVRGPADPEKECVFKGIHPPLIPKETFELANDKLTRSENTSTHKEKVVRNPLAGLLVCSECGRQMMRMINPVHPDMPVVRCPRRGCPNCSSYLPIVEERVIQGLSEWMKGYELEWSSAAASSSVSSVGVREKALASAEAELRKLQQQLERTHDFLEQGIYDTNTFLSRSRMLSDKIAAAKDSVARCSRELTEEKLRETSRREIIPKVKNLLDVYPLLETAEEKNALLKEVLEKVVYQKLNEKRKKSPDGFTIEIYPRIPKSEK

SEQ ID NO: 3309 - protein, 530 aa, Unknown
  Description of Unknown: Integrase B3310 sequence
  cd00338,SM00857,G3DSA:1.10.10.2600,IPR036162,PS51737, G3DSA:3.40.50.1390,IPR006119,IPR038109,PF07508,IPR011109, SSF53041,PTHR30461,PS51736,Coil,PF00239
MEQYLIYLRKSRSDLEAEAHGEGETLSRHEHTLLELAKRQHLNVTDIYREVVSGDTIAARPMMQRVLSEVEQGVWSGVLVMEVERLARGDTIDQGIIAQTFKFSGTKIITPIKTYDPDNEFDEEYFEFGLFMSRREYKIINRRLQRGRLASAKEGKWPSGLAPFGYRRVKLKNEKGCSLEPIEEQAAIVRMIFDLYTVGLQDEDGSARPLSLGSIATRLNDMHIPSPSGSQWARITIRGIIKNPTYIGMVRWGSRETKKKVVDGKVVSVRGPADPEKECVFKGIHPPLIPKETFELANDKLTRSENTSTHKEKVVRNPLAGLLVCSECGRQMMRMINPVHPDMPVVRCPRRGCPNCSSYLPIVEERVIQGLSEWMKGYELEWSSAAASSSVSSVGVREKALTSAEAELRKLQQQLERTHDFLEQGIYDTDTFLSRSRMLSDKIASAKDSVTRCSRELTEEKLRETSRRDIIPKVKNLLDVYPLLETAEEKNALLKEVLEKVVYQKLNEKRKKSPDGFTIEIYPRIPKSEK

SEQ ID NO: 3310 - protein, 530 aa, Unknown
  Description of Unknown: Integrase B3311 sequence
  SM00857,G3DSA:1.10.10.2600,IPR036162,PS51737, G3DSA:3.40.50.1390,IPR006119,IPR038109,PF07508, IPR011109,SSF53041,PF00239,PTHR30461, PS51736,Coil,cd00338
MEQYLIYLRKSRSDLEAEAHGEGETLSRHEHTLLELAKRQHLNVTDIYREVVSGDTIAARPMMQRVLSEVEQGVWSGVLVMEVERLARGDTIDQGIIAQTFKFSGTKIITPIKTYDPDNEFDEEYFEFGLFMSRREYKIINRRLQRGRLASAKEGKWPSGLAPFGYRRVKLKNEKGCSLEPIEEQAAIVRMIFDLYTVGLQDEDGSARPLSLGSIATRLNDMHIPSPSGSQWARITIRGIIKNPTYIGMVRWGSRETKKKVVDGKVVSVRGPADPEKECVFKGIHPPLIPKETFELANDKLTRSENTSTHKEKVVRNPLAGLLVCSECGRQMMRMINPVHPDMPVVRCPRRGCPNCSSYLPIVEERVIQGLSEWMKGYELEWSSAAASSSVSSVGVREKALASAEAELRKLQQQLERTHDFLEQGIYDTDTFLSRSRMLSDKIASAKDSVTRCSRELTEEKLRETSRRDIIPKVKNLLDVYPLLETAEEKNALLKEVLEKVVYQKLNEKRKKSPDGFTIEIYPRIPKSEK

SEQ ID NO: 3311 - protein, 530 aa, Unknown
  Description of Unknown: Integrase B3312 sequence
  PTHR30461:SF3,SM00857,G3DSA:1.10.10.2600,IPR036162,PF13408, IPR025827,PS51737,G3DSA:3.40.50.1390,IPR006119,IPR038109, PF07508,SSF53041,IPR011109,PTHR30461,Coil, PS51736,cd00338,PF00239
MIAAIYSRKSKFTGKGESIENQIQLCMDYAKNLGINEFLVYEDEGFSGKSMDRPKFKEMLKDAKDKKFDYLICYRLDRISRNVSDFSTLIEDLNKLNISFVSIKEQFDTSTPMGRAMMYISSVFAQLERETIAERVRDNMYELARTGRWLGGMPPYGFISTQINYYDENMNQRKMYKLKVDEDTIEIVKLIFDKYLELRSLSKLYKYMYENGIKGTRGGNLDPSALSLILKNPAYVKADKSVVDYLRKSNIDVMGDIDKIHGILTYAKNTDSPIAAVAKHKGVIDSDKWIEAQRLLNSNKAKAPRAGTGSKALLSGLLKCSKCGSNMRITYKNSKSGTIYYYICGTKKSLGVSACDCKNIRSDKAESKVIDELKNKSIKSIMSSYKDSKLENSKNSKNIKTEINSINNQIKEKETYIDNLVMQLAKVTESSASTFIINKLESLNNDLSNLKSQLESLNTMSMENKQVDININMLIDNLNKFNKEIDTSDINKKRLLLSTVVDYMTWDSDTDTIKVNLIGINPSNTIASDK

SEQ ID NO: 3312 - protein, 530 aa, Unknown
  Description of Unknown: Integrase B3313 sequence
  cd00338,SM00857,G3DSA:1.10.10.2600,IPR036162,PS51737, G3DSA:3.40.50.1390,IPR006119,IPR038109,PF07508,IPR011109, SSF53041,PTHR30461,PS51736,Coil,PF00239
MEQYLIYLRKSRSDLEAEAHGEGETLSRHEHTLLELAKRQHLNVTDIYREVVSGDTIAARPMMQRVLSEVEQGVWSGVLVMEVERLARGDTIDQGIIAQTFKFSGTKIITPIKTYDPDNEFDEEYFEFGLFMSRREYKIINRRLQRGRLASAKEGKWPSGLAPFGYRRVKLKNEKGCSLEPIEEQAAIVRMIFDLYTVGLQDEDGSARPLSLGSIATRLNDMHIPSPSGSQWARITIRGIIKNPTYIGMVRWGSRETKKKVVDGKVVSVRGPADPEKECIFKGIHPPLIPKETFELANDKLARSENTSTHKEKVVRNPLAGLLVCSECGRQMMRMINPVHPDMPVVRCPRRGCPNCSSYLPIVEERVIQGLSEWMKGYELEWSSATASSSVSSVGVREKALASAEAELRKLQQQLERTHDFLEQGIYDTDTFLSRSRMLSDKIAAAKDSVTRCSRELTEEKLRETSRRDIIPKVKNLLDVYPLLETAEEKNALLKEVLEKVVYQKLNEKRKKSPDGFTIEIYPRIPKSEK

SEQ ID NO: 3313 - protein, 530 aa, Unknown
  Description of Unknown: Integrase B3314 sequence
  SM00857,G3DSA:1.10.10.2600,IPR036162,PS51737, G3DSA:3.40.50.1390,IPR006119,IPR038109,PF07508, IPR011109,SSF53041,PF00239,PTHR30461, PS51736,Coil,cd00338
MEQYLIYLRKSRSDLEAEAHGEGETLSRHEHTLLELAKRQHLNVTDIYREVVSGDTIAARPMMQRVLSEVEQGVWSGVLVMEVERLARGDTIDQGIIAQTFKFSGTKIITPIKTYDPDNEFDEEYFEFGLFMSRREYKIINRRLQRGRLASAKEGKWPSGLAPFGYRRVKLKNEKGCSLEPIEEQAAIVRMIFDLYTVGLQDEDGSARPLSLGSIATRLNDMHIPSPSGSQWARITIRGIIKNPTYIGMVRWGSRETKKKVVDGKVVSVRGPADPEKECVFKGIHPPLIPKETFELANDKLTRSENTSTHKEKVVRNPLAGLLVCSECGRQMMRMMNPVHPDMPVVRCPRRGCPNCSSYLPIVEERVIQGLSEWMKGYELEWSSAAASSSVSSVGVREKALASAEAELRKLQQQLERTHDFLEQGIYDTDTFLSRSRMLSDKISAAKESVARCSRELTEEKLRETSRRDIIPKVKNLLDVYPLLETAEEKNALLKEVLEKVVYQKLNEKRKKSPDGFTIEIYPRIPKSEK

SEQ ID NO: 3314 - protein, 530 aa, Unknown
  Description of Unknown: Integrase B3315 sequence
  cd00338,SM00857,G3DSA:1.10.10.2600,IPR036162,PS51737, G3DSA:3.40.50.1390,IPR006119,IPR038109,PF07508,SSF53041, IPR011109,PTHR30461,PS51736,Coil,PF00239
MEQYLIYLRKSRSDLEAEAHGEGETLSRHEHTLLELAKRQHLNVTDIYREVVSGDTIAARPMMQRVLSEVEQSVWSGVLVMEVERLARGDTIDQGIIAQTFKFSGTKIITPIKTYDPDNEFDEEYFEFGLFMSRREYKIINRRLQRGRLASAKEGKWPSGLAPFGYRRVKLKNEKGCSLEPIEEQAAIVRMIFDLYTVGLQDEDGSARPLSLGSIATRLNDMHIPSPSGSQWARITIRGIIKNPTYIGMVRWGSRETKKKVVDGKVVSVRGPADPEKECVFKGIHPPLIPKETFELANDKLIRSENTSTHKEKVVRNPLAGLLVCSECGRQMMRMINPVHPDMPVVRCPRRGCPNCSSYLPIVEERVIQGLSEWMKGYELEWSSAAASSSVSSVGVREKALASAEAELRKLQQQLERTHDFLEQGIYDTDTFLSRSRMLSDKIAAAKDSVARCSRELTEEKLRETSRRDIIPKVKNLLDVYPLLETAEEKNALLKEALEKVVYQKLNEKRKKSPDGFTIEIYPRIPKSEK

SEQ ID NO: 3315 - protein, 530 aa, Unknown
  Description of Unknown: Integrase B3316 sequence
  cd00338,SM00857,G3DSA:1.10.10.2600,IPR036162, PS51737,G3DSA:3.40.50.1390,IPR006119,IPR038109, PF07508,IPR011109,SSF53041,PTHR30461, PS51736,Coil,PF00239
MYEDLSYTYGSGAYAIYLRKSRKDLDAEAMGEGETLSRHLDILKALAKRMELNVVKIYAEVVSGESIDARPQMQELLRDVETGIYDGVLVVEVERLARGDTSDQGRVAKTFKFSNTLIITPSKTYDPNNEFDEEYFEFGLFMSRREYKTIRRRLVAGSDASRREGKYTGNVPPYGYARKKLKKEKGWTLEIIPDQAQVVRMIFDWYRNGMQGIPVGYTAISDELNRLSIPSPSSTRWTPNGIQGILRNPVYAGYIKSGYRKEVKKIVDGKLTRSRPLNNDYTLYPGRHESIISQETWDAVHNRMLKRVLPSSSSRVKPQQNPLAGLVCCSQCGRIMQRRPYQSGRTATLICPTKGCSTVASDLSMVEQRLLDALDQWLVSGTLPDPDHLPDNSDRLDLLRQAVSSCSEDLSEADRQLQKQYDLLEKGIYDEVTFFERSAIMKKRKSELTSRLKDLQTELQTETERNEAVKNLLPTLQTIHDTYPKLTSAELKNRLLKEVIDHVEYSKSENGRWGHPDNFSLKIYPRVTPA

SEQ ID NO: 3316 - protein, 530 aa, Unknown
  Description of Unknown: Integrase B3317 sequence
  SM00857,G3DSA:1.10.10.2600,IPR036162,PS51737,G3DSA:3.40.50.1390, IPR006119,IPR038109,PF07508,SSF53041,IPR011109, PF00239,PTHR30461,PS51736,Coil,cd00338
MEQYLIYLRKSRSDLEAEAHGEGETLSRHEHTLLELAKRQHLNVTDIYREVVSGDTIAARPMMQRVLSEVEQGVWSGVLVMEVERLARGDTIDQGIIAQTFKFSGTKIITPIKTYDPDNEFDEEYFEFGLFMSRREYKIINRRLQRGRLASAKEGKWPSGLAPFGYRRVKLKNEKGCSLEPIEEQAAIVRMIFDLYTVGLQDEDGSARSLSLGSIATRLNDMHIPSPSGSQWARITIRGIIKNPTYIGMVRWGSRETKKKVVDGKVVSVRGPADPEKECIFKGIHPPLVPKETFELANDKLARSENTSTHKEKVVRNPLAGMLVCSECGRQMMRMINPVHPDMPVVRCPRRGCPNCSSYLPIVEERVIQGLSEWMKGYELEWSSAAASSSVSSVGVREKALASAEAELRKLQQQLERTHDFLEQGIYDTDTFLSRSRMLSDKIAAAKESVARCSRELTEEKLREASRREIIPKVKNLLDVYPLLETAEEKNALLKEVLEKVVYQKLNEKRKKSPDGFTIEIYPRIPKSEK

SEQ ID NO: 3317 - protein, 530 aa, Unknown
  Description of Unknown: Integrase B3318 sequence
  cd00338,SM00857,G3DSA:1.10.10.2600,IPR036162, PS51737,G3DSA:3.40.50.1390,IPR006119,IPR038109, PF07508,IPR011109,SSF53041,PTHR30461, PS51736,Coil,PF00239
MEQYLIYLRKSRSDLEAEAHGEGETLSRHEHTLLELAKRQHLNVTDIYREVVSGDTIAARPMMQRVLSEVEQGVWSGVLVMEVERLARGDTIDQGIIAQTFKFSGTKIITPIKTYDPDNEFDEEYFEFGLFMSRREYKIINRRLQRGRLASAKEGKWPSGLAPFGYRRVKLKNEKGCSLEPIEEQAAIVRMIFDLYTVGLQDEDGSARPLSLGSIATRLNDMHIPSPSGSQWARITIRGIIKNPTYIGMVRWGSRETKKKVVDGKVVSVRGPADPEKECIFKGIHPPLIPKETFELANDKLARSENTSTHKEKVVRNPLAGLLVCSECGRQMMRMINPVHPDMPVVRCPRRGCPNCSSYLPIVEERVIQGLSEWMKGYELEWSSAAASSSVSSVGVREKALASAEAELRKLQQQLERTHDFLEQGIYDTDTFLSRSRMLSDKIAAAKESVARCSRELTEEKLRETSRRDIIPKVKNLLDVYPLLETAEEKNALLKEVLEKVVYQKLNEKRKKSPDGFTIEIYPRIPKSEK

SEQ ID NO: 3318 - protein, 530 aa, Unknown
  Description of Unknown: Integrase B3319 sequence
  SM00857,G3DSA:1.10.10.2600,IPR036162,PS51737,G3DSA:3.40.50.1390, IPR006119,IPR038109,PF07508,IPR011109,SSF53041, PF00239,PTHR30461,PS51736,Coil,cd00338
MEQYLIYLRKSRSDLEAEAHGEGETLSRHEHTLLELAKRQHLNVTDIYREVVSGDTIAARPMMQRVLSEVEQGVWSGVLVMEVERLARGDTIDQGIIAQTFKFSGTKIITPIKTYDPDNEFDEEYFEFGLFMSRREYKIINRRLQRGRLASAKEGKWPSGLAPFGYRRVKLKNEKGCSLEPIEEQAAIVRMIFDLYTVGLQDEDGSARPLSLGSIAARLNDMRVPSPSGSQWTRITIRGIIKNPTYIGMVRWGSRETKKKVVDGKVVSVRGPADPEKECVFKGIHPPLIPKETFELANDKLTRSENTSTHTEKVVRNPLAGLLVCSECGRQMMRMMNPVHPDMPVVRCPRRGCPNCSSYLPIVEERVIQGLSEWMKGYELEWSSAAASSSVSSVGVREKALASAEAELRKLQQQLERTHDFLEQGIYDTDTFLSRSRMLSDKISAAKESVARCSRELTEEKLRETSRRDIIPKVKNLLDVYPLLETAEEKNALLKEVLEKVVYQKLNEKRKKSPDGFTIEIYPRIPKSEK

SEQ ID NO: 3319 - protein, 530 aa, Unknown
  Description of Unknown: Integrase B3320 sequence
  cd00338,SM00857,G3DSA:1.10.10.2600,IPR036162, PS51737,G3DSA:3.40.50.1390,IPR006119,IPR038109, PF07508,IPR011109,SSF53041,PTHR30461, PS51736,Coil,PF00239
MEQYLIYLRKSRSDLEAEAHGEGETLSRHEHTLLELAKRQHLNVTDIYREVVSGDTIAARPMMQRVLSEVEQGVWSGVLVMEVERLARGDTIDQGIIAQTFKFSGTKIITPIKTYDPDNEFDEEYFEFGLFMSRREYKIINRRLQRGRLASAKEGKWPSGLAPFGYRRVKLKNEKGCSLEPIEEQAAIVRMIFDLYTVGLQDEDGSARPLSLGSIATRLNDMHIPSPSGSQWARITIRGIIKNPTYIGMVRWGSRETKKKVVDGKVVSVRGPADPEKECVFKGIHPPLIPKETFELANDKLTRSENTSTHKEKVVRNPLAGLLVCSECGRQMMRMINPVHPDMPVVRCPRRGCPNRSSYLPIVEERVIQGLSEWMKGYELEWSSAAASSSVSSVGVREKALASAEAELRKLQQQLERTHDFLEQGIYDTDTFLSRSRMLSDKIAAAKDSVARCSRELTEEKLRETSRRDIIPKVKNLLDVYPLLETAEEKNALLKEVLEKVVYQKLNEKRKKSPDGFTIEIYPRIPKSEK

SEQ ID NO: 3320 - protein, 530 aa, Unknown
  Description of Unknown: Integrase B3321 sequence
  cd00338,SM00857,G3DSA:1.10.10.2600,IPR036162,PS51737, G3DSA:3.40.50.1390,IPR006119,IPR038109,PF07508,SSF53041, IPR011109,PTHR30461,PS51736,Coil,PF00239
MEQYLIYLRKSRSDLEAEAHGEGETLSRHEHTLLELAKRQHLNVTDIYREVVSGDTIAARPMMQRVLSEVEQGVWSGVLVMEVERLARGDTIDQGIIAQTFKFSGTKIITPIKTYDPDNEFDEEYFEFGLFMSRREYKIINRRLQRGRLASAKEGKWPSGLAPFGYRRVKLKNEKGCSLEPIEEKAAIVRMIFDLYTVGLQDEDGSARPLSLGSIATRLNDMHIPSPSGSQWARITIRGIIKNPTYIGMVRWGSRETKKKVVDGKVVSVRGPADPEKECVFKGIHPPLVPKETFELANDKLARSENTSTHKEKVVRNPLAGLLVCSECGRQMMRMINPVHPDMPVVRCPRRGCPNCSSYLPIVEERVIQGLSEWMKGYELEWSSAAASSSVSSVGVREKALASAEAELRKLQQQLERTHDFLEQGIYDTDTFLSRSRMLSDKIAAAKDSVARCSRELTEEKLRETSRRDIIPKVKNLLDVYPLLETAEEKNALLKEVLEKVVYQKLNEKRKKSPDGFTIEIYPRIPKSEK

SEQ ID NO: 3321 - protein, 530 aa, Unknown
  Description of Unknown: Integrase B3322 sequence
  SM00857,G3DSA:1.10.10.2600,IPR036162,PS51737, G3DSA:3.40.50.1390,IPR006119,IPR038109,PF07508, IPR011109,SSF53041,PF00239,PTHR30461, PS51736,Coil,cd00338
MEQYLIYLRKSRSDLEAEAHGEGETLSRHEHTLLELAKRQHLNVTDIYREVVSGDTIAARPMMQRVLSEVEQGVWSGVLVMEVERLARGDTIDQGIIAQTFKFSGTKIITPIKTYDPDNEFDEEYFEFGLFMSRREYKIINRRLQRGRLASAKEGKWPSGLAPFGYRRVKLKNEKGCSLEPIEEQAAIVRMIFDLYTVGLQDEDGSARPLSLGSIATRLNDMRIPSPSGSQWARITIRGIIKNPTYIGMVRWGSRETKKKVVDGKVVSVRGPADPEKECVFKGIHPPLIPKETFELANDKLTRSENTSTHKEKVVRNPLAGLLVCSECGRQMMRMINPVHPDMPVVRCPRRGCPNCSSYLPIVEERVIQGLSEWMKGYELEWSSAAASSSVSSVGVREKALASAEAELRKLQQQLERTHDFLEQGIYDTDTFLSRSRMLSDKIAAAKDSVTHCSRELTEEKLRETSRRDIIPKVKNLLDVYPLLETAEEKNALLKEVLEKVVYQKLNEKRKKSPDGFTIEIYPRIPKSEK

SEQ ID NO: 3322 - protein, 530 aa, Unknown
  Description of Unknown: Integrase B3323 sequence
  cd00338,SM00857,G3DSA:1.10.10.2600,IPR036162,PS51737, G3DSA:3.40.50.1390,IPR006119,IPR038109,PF07508,IPR011109, SSF53041,PTHR30461,PS51736,Coil,PF00239
MEQYLIYLRKSRSDLEAEAHGEGETLSRHEHTLLELAKRQHLNVTDIYREVVSGDTIAARPMMQRVLSEVEQGVWSGVLVMEVERLARGDTIDQGIIAQTFKFSGTKIITPIKTYDPDNEFDEEYFEFGLFMSRREYKIINRRLQRGRLASAKEGKWPSGLAPFGYRRVKLKNEKGCSLEPIEEQAAIVRMIFDLYTVGLQDEDGSARPLSLGSIAARLNDMHIPSPSGSQWARITIRGIIKNPTYIGMVRWGSRETKKKVVDGKVVSVRGPADPEKECIFKGIHPPLIPKETFELANDKLTRSENTSTHKEKVVRNPLAGLLVCSECGRQMMRMINPVHPDMPVVRCPRRGCPNCSSYLPIVEERVIQGLSEWMKGYELEWSSAAASSSVSSVGVREKALASAEAELRKLQQQLERTHDFLEQGIYDTDTFLSRSRMLSDKIAAAKDSVTRCSRELTEEKLRETSRRDIIPKVKNLLDAYPLLETAEEKNALLKEVLEKVVYQKLNEKRKKSPDGFIIEIYPRIPKSEK

SEQ ID NO: 3323 - protein, 530 aa, Unknown
  Description of Unknown: Integrase B3324 sequence
  cd00338,SM00857,G3DSA:1.10.10.2600,IPR036162, PS51737,G3DSA:3.40.50.1390,IPR006119,IPR038109, PF07508,IPR011109,SSF53041,PTHR30461, PS51736,Coil,PF00239
MEQYCIYLRKSRADAEAEARGEGETLARHEKMLLAVAKRDRYHISKIYREIVSGETIAARPQMQQLLQDVEQGLYAGVLVMEVERLARGDTIDQGIMAQTFRYSDTKIITPMKVYDPNNEFDEEYFEFGLFMSRREYKTINRRLQRGRAASAKEGKYAGNITPYGYTRVKLEHDKGFRLVPDPEEAKIVQLVYDWYLNGEPQEDGSRKRLGSTYIARKLNAAHVPTRHGGKWGVNSVRGILINPVYTGKIRWNYRPAKKSMENGAVVKTRSEAEEGDYILADGLHEALISEEAYHAVQEDMHHKAVSGTHDGKKLCNPLAGLAYCTCCKHVMVRRPHNKRFHTDTLMCNTLDCPNVSADLEAVERRVISGIRDWLKQYEVEWSKNHQEPSAMDAQIATKKAAIQAAEKEQDVLKKQLDKAYDFLEQGIYDTDVFLSRSQALNDRIQDTQNSIKSLQEELHREQMRKEGIEEIIPKAKHVLEVYGSLTDAKSKNELLKSVLERVEYYKGKSTRWSGNPDNFEVVLFPKLPK

SEQ ID NO: 3324 - protein, 530 aa, Unknown
  Description of Unknown: Integrase B3325 sequence
  SM00857,G3DSA:1.10.10.2600,IPR036162,PS51737,G3DSA:3.40.50.1390, IPR006119,IPR038109,PF07508,IPR011109,SSF53041, PF00239,PTHR30461,PS51736,Coil,cd00338
MEQYLIYLRKSRSDIEAEAHGEGETLSRHEHTLLELAKRQHLNVTDIYREVVSGDTIAARPMMQRVLSEVEQGVWSGVLVMEVERLARGDTIDQGIIAQTFKFSGTKIITPIKTYDPDNEFDEEYFEFGLFMSRREYKIINRRLQRGRLASAKEGKWPSGLAPFGYRRVKLKNEKGCSLEPIEEQAAIVRMIFDLYTVGLQDEDGSARPLSLGSIATRLNDMHIPSPSGSQWARITIRGIIKNPTYIGMVRWGSRETKKKVVDGKVVSVRGPADPEKECVFKGIHPPLIPKETFELANDKLTRSENTSTHKEKVVRNPLAGLLVCSECGRQMMRMINPVHPDMPVVRCPRRGCPNCSSYLPIVEERVIQGLSEWMKGYELEWSSAAASSSVSSVGVREKALASAEAELRKLQQQLERTHDFLEQGIYDTDTFLSRSRMLSDKIAAAKESVARCSRELTEEKLREASRRDIIPKVKNLLDVYPLLETAEEKNALLKEVLEKVVYQKLNEKRKKSPDGFTIEIYPRIPKSEK

SEQ ID NO: 3325 - protein, 530 aa, Unknown
  Description of Unknown: Integrase B3326 sequence
  cd00338,SM00857,G3DSA:1.10.10.2600,IPR036162, PS51737,G3DSA:3.40.50.1390,IPR006119,IPR038109, PF07508,IPR011109,SSF53041,PTHR30461, PS51736,Coil,PF00239
MEQYLIYLRKSRSDLEAEAHGEGETLSRHEHTLLELAKRQHLNVTDIYREVVSGDTIAARPMMQRVLSEVEQGVWSGVLVMEVERLARGDTIDQGIIAQTFKFSGTKIITPIKTYDPDNEFDEEYFEFGLFMSRREYKIINRRLQRGRLASAKEGKWPSGLAPFGYRRVKLKNEKGCSLEPIEEQAAIVRMIFDLYTVGLQDEDGSARPLSLGSIATRLNDMHIPSPSGSQWARITIRGIIKNPTYIGMVRWGSRETKKKVVDGKVVSVRGPADPEKECVFKGIHPPLVPKETFELANDKLTRSENTSTHKEKVVRNPLAGLLVCSECGRQMMRMINPVHPDMPVVRCPRRGCPNCSSYLPIVEERVIQGLSEWMKGYELEWSSTAASSSVSSVGVREKALASAEAELRKLQQQLERTHDFLEQGIYDTDTFLSRSRMLSDKIAAAKDSVTRCSRELTEEKLRETSRRDIIPKVKNLLDVYPLLETAEEKNALLKEVLEKVVYQKLNEKRKKSPDGFTIEIYPRIPKSEK

SEQ ID NO: 3326 - protein, 530 aa, Unknown
  Description of Unknown: Integrase B3327 sequence
  cd00338,SM00857,G3DSA:1.10.10.2600,IPR036162,PS51737, G3DSA:3.40.50.1390,IPR006119,IPR038109,PF07508,IPR011109, SSF53041,PTHR30461,PS51736,Coil,PF00239
MEQYLIYLRKSRSDLEAEAHGEGETLSRHEHTLLELAKRQHLNVTDIYREVVSGDTIAARPMMQRVLSEVEQGVWSGVLVMEVERLARGDTIDQGIIAQTFKFSGTKIITPIKTYDPDNEFDEEYFEFGLFMSRREYKIINRRLQRGRLASAKEGKWPSGLAPFGYRRVKLKNEKGCSLEPIEEQAAIVRMIFDLYTVGLQDEDGSARPLSLGSIAARLNDMRVPSPSGSQWTRITIRGIIKNPTYIGMVRWGSRETKKKVVDGKVVSVRGPADPEKECVFKGIHPPLIPKETFELANDKLTRSENTSTHKEKVVRNPLAGLLVCSECGRQMMRMINPVHPDMPVVRCPRRGCPNCSSYLPIVEERVIQGLSEWMKGYELEWSSAAASSSVSSVGVREKALAGAEAELRKLQQQLERTHDFLEQGIYDTDTFLSRSRMLSDKIAAAKDSVARCSRELTEEKLRETSRRDIIPKVKNLLDVYPLLETAEEKNALLKEVLEKVVYQKLNEKRKKSPDGFTIEIYPRIPKSEK

SEQ ID NO: 3327 - protein, 530 aa, Unknown
  Description of Unknown: Integrase B3328 sequence
  SM00857,G3DSA:1.10.10.2600,IPR036162,PS51737, G3DSA:3.40.50.1390,IPR006119,IPR038109,PF07508, IPR011109,SSF53041,PTHR30461,Coil, PS51736,cd00338,PF00239
MEQYLIYLRKSRSDIEAEAHGEGETLSRHEHTLLELAKRQHLNVTDIYREVVSGDTIAARPMMQRVLSEVEQGVWSGVLVMEVERLARGDTIDQGIIAQTFKFSGTKIITPIKTYDPDNEFDEEYFEFGLFMSRREYKIINRRLQRGRLASAKEGKWPSGLAPFGYRRVKLKNEKGCSLEPIEEQAAIVRMIFDLYTVGLQDEDGSARPLSLGSIATRLNDMHIPSPSGSQWARITIRGIIKNPTYIGMVRWGSRETKKKVVDGKVVSVRGPADPEKECVFKGIHPPLIPKETFELANDKLTRSENTSTHKEKVVRNPLAGLLVCSECGRQMMRMINPVHPDMPVVRCPRRGCPNCSSYLPIVEERVIQGLSEWMKGYELEWSSAAASSSVSSVGVREKALASAEAELRKLQQQLERTHDFLEQGIYDTDTFLSRSRMLSDKIAAAKDSVARCSRELTEEKLRETSRRDIIPKVKNLLDVYPLLETAEEKNALLKEVLEKVVYQKLNEKRKKSPDGFTIEIYPRIPKSEK

SEQ ID NO: 3328 - protein, 530 aa, Unknown
  Description of Unknown: Integrase B3329 sequence
  PTHR30461:SF3,cd00338,SM00857,G3DSA:1.10.10.2600,IPR036162, PF13408,PS51737,G3DSA:3.40.50.1390,IPR025827,IPR006119, IPR038109,PF07508,IPR011109,SSF53041,PTHR30461, PS51736,Coil,PF00239
MAKKKKPTGGVAIIYARYSSHNQRDVSIEQQIEACRKHAAELGLTIIATYEDWAISGRTDNRPAFQRMMHDAENGKFSYVLAWKSNRMGRNMMQAMVNESRLMDCGIKVYYAEEDFDDSAAGRFALRSMMNVNQFYSDNLAEDVRRGLMDNASKCMANGKQPLGYKRGEDGKVVVDEPAAAIVREVYVRVASGELFTDIARDLNRRGIKTADKGEWNKNSFHRLCSNEKYRGIYIYGDVRIEGGIPTIIDDTLWYKVQEALRVKKLKRNGRHRPGDEDYLLTGKLRCGKCGGYMIGMSGRSKTGDIHYYYACQNRRVGRTCDKKNIRRDVIEPAVAQAIKEYCLTDDAIEWIADKTVEYWEKADRNLQLDSIEGDLAAVQSSISNVMKAIEMGVVTETTRDRLIELEKQRTDLKSKLALAKEEVVHVDRKKLISSLLLFRNGDIHDRQYQEDLFKTFLISAYVYDDDDNGHLKIVFNAFGDNNTVDLPIDFGETDNQSAFFDRAEKFDYALHRSTRLKPSEEAQVAFLFV

SEQ ID NO: 3329 - protein, 530 aa, Unknown
  Description of Unknown: Integrase B3330 sequence
  cd00338,SM00857,G3DSA:1.10.10.2600,IPR036162,PS51737, G3DSA:3.40.50.1390,IPR006119,IPR038109,PF07508,IPR011109, SSF53041,PTHR30461,PS51736,Coil,PF00239
MEQYLIYLRKSRSDLEAEAHGEGETLSRHEHTLLELAKRQHLNVTDIYREVVSGDTIAARPMMQRVLSEVEQGVWSGVLVMEVERLARGDTIDQGIIAQTFKFSGTKIITPIKTYDPDNEFDEEYFEFGLFMSRREYKIINRRLQRGRLASAKEGKWPSGLAPFGYRRVKLKNEKGCSLEPVEEQAAIVRMIFDLYTVGLQDEDGSAHPLSLGSIATRLNDMHIPSPSGSQWARITIRGIIKNPTYIGMVRWGSRETKKKVVDGKVVSVRGPADPEKECVFKGIHPPLVPKETFELANDKLARSENTSTHKEKVVRNPLAGLLVCSECGRQMMRMINPVHPDMPVVRCPRRGCPNCSSYLPIVEERVIQGLSEWMKGYELEWSSAAASSSVSSVGVREKALASAEAELRKLQQQLERTHDFLEQGIYDTDTFLSRSRMLSDKIAAAKDSVARCSRELTEEKLRETSRRDIIPKVKNLLDVYPLLETAEEKNALLKEVLEKVVYQKLNEKRKKSPDGFTIEIYPRIPKSEK

SEQ ID NO: 3330 - protein, 530 aa, Unknown
  Description of Unknown: Integrase B3331 sequence
  PTHR30461:SF3,cd00338,SM00857,G3DSA:1.10.10.2600,IPR036162, PF13408,IPR025827,G3DSA:3.40.50.1390,PS51737,IPR006119, IPR038109,PF07508,IPR011109,SSF53041, PTHR30461,PS51736,Coil,PF00239
MYEEIKQVVLYVRYSSANQTEQSIEGQVRVCSDFCQRHGFRIIEIYADRATSASKDIEKRVEFLRMIKDAEKKNFQAVIVYKLDRFARSRYDSANYKYRLRKNGVQLISATENISNDPEGIILESVLEGMAEFYSAELSQKITRGLKESAYKHNSIGGAIPLGYKSEGKKLVIDEETAPIVRQAFEMYAEGHSVADICRLFNARGYKTSKGTNFGKSSFSKMFHNERYIGVYQFHDYRAEDAIPAIIDKKLFYQVQARMKSSGKSPGQFKARHIYLLSGKLYCGHCGSKMNANSNGTAGYSYYECYGKKNLHKDCHKRNLRKDFIEDIVINDAMSLLTDENINQIAEVTIRTNLHDIEHCTDIPAIKDKLHETKLSLSNITKAIENGLAPETLVKRMVELEKDKKTLEEELKKEEKKVSYLDKEQVIFWLNQFKNGNIEDEDFRRQLIDLFVNHVTVWDEDDNHFKVTIAYNLTSLHEKTYHLKRGGRLSDLSSMHQDSVSNPIIQGTLLYHTTHCHLKPHQWRKFNQEV

SEQ ID NO: 3331 - protein, 530 aa, Unknown
  Description of Unknown: Integrase B3332 sequence
  PTHR30461:SF3,SM00857,G3DSA:1.10.10.2600,IPR036162,PF13408, IPR025827,G3DSA:3.40.50.1390,PS51737,IPR006119,IPR038109, PF07508,IPR011109,SSF53041,PTHR30461,PS51736, cd00338,PF00239
MQIRNAVAYCRFSSDNQRSESIDAQIRAIKEYCKNNKYMLTHIYKDEALSGTSDKRDQFQQMITDSKDGLFDAVIVHKLDRFARNRYDSAIYKKKLKDNGVVVLSVLENLDDTPEAVILESVLEGMNEYYSKNLSREVRKGLNENAIKCIHNGGIPPLGYDVTPDKHYCINEKEAAAVRLIFNMYSENYGYRLIINKLNELGYKTKLGRSFSVSSLHDIIINEKYRGVYVWNKRKSKKAGNHAYKDDEEIVKIEGGMPRIISDDLFFKCQKIKKTKIKPRRHSSHEYILTGKIFCGKCGHSYCGSSAYRNKNNNMVYNYCCMNRKNKKGCDNKAINADKLEYAVLEAIRDTFLNDDAIKLIANKMDHYLKETVSTVDKDAVSKLNRDLENIDTKQERLIDLYLDEKLSIESLNKKSALLDQEKTIIKNKLNELSNIVKLDFNIDEIIVFLNDMKGKLNDTDSQTKRTLIEAFIYRISINEDDVDIMLYLDNLIDKNCDNIGGGEENRIVSQFMYEYKIKRQYINFPLTNS

SEQ ID NO: 3332 - protein, 530 aa, Unknown
  Description of Unknown: Integrase B3333 sequence
  cd00338,SM00857,G3DSA:1.10.10.2600,IPR036162,PS51737, G3DSA:3.40.50.1390,IPR006119,IPR038109,PF07508,IPR011109, SSF53041,PTHR30461,PS51736,Coil,PF00239
MEQYLIYLRKSRSDLEAEAHGEGETLSRHEHTLLELAKRQHLNVTDIYREVVSGDTIAARPMMQRVLSEVEQGVWSGVLVMEVERLARGDTIDQGIIAQTFKFSGTKIITPIKTYDPDNEFDEEYFEFGLFMSRREYKIINRRLQRGRLASAKEGKWPSGLAPFGYRRVKLKNEKGCSLEPIEEQAAIVRMIFDLYTVGLQDEDGSARPLSLGSIATRLNDMHIPSPSGSQWARITIRGIIKNPTYIGMVRWGSRETKKKVVDGKVVSVRGPADPEKECVFKGIHPPLIPKETFELANDKLTRSENTSTHKEKVVRNPLAGLLVCSECGRQMMRMINPVHPDMPVVRCPRRGCPNCSSYLPIVEERVIQGLSEWMKGYELEWSSAAASSSVSSVGVREKALASAEAELRKLQQQLERTHDFLEQGIYDTDTFLSRSRMLSDKIAAAKDSVTRCSRELTEEKLRETSRRDIIPKVKNLLDVYPLLETAEEKNALLKEVLEKVVYQKLNEKRKKSPDGFTIEIYPRIPKSEK

SEQ ID NO: 3333 - protein, 530 aa, Unknown
  Description of Unknown: Integrase B3334 sequence
  PTHR30461:SF3,cd00338,SM00857,G3DSA:1.10.10.2600,IPR036162, PF13408,PS51737,G3DSA:3.40.50.1390,IPR025827,IPR006119, IPR038109,PF07508,IPR011109,SSF53041, PTHR30461,PS51736,Coil,PF00239
MAKKKKPAGGIAVIYARYSSHNQRDVSIEQQIEACRKHAAELGLTIIATYEDRAISGRTDNRPAFQRLMHDAEKGKFSYVLAWKSNRMGRNMMQAMVNESRLMDCGIIVYYAEEDFDDSAAGRFALRSMMNVNQFYSDNLAEDVRRGLMDNANKCMVNGRQPLGYKRGKDGKVVVDEPAAAIVREVYARVASGELFTDIARDLNRRGIKTADKGEWNKNSFHRLCSNEKYRGIYIYGDVRIEGGIPTIIDDTLWYKVQEALRVKKLKRNGRHRPGDEDYLLTGKLRCGKCGGYMIGMSGRSKTGDIHYYYACQNRRVGRTCDKKNIRRDVIEPAVAQAIKEYCLTDDAIEWIADKTVEYWEKADRNLQLDSIEGDLAAVQSSISNVMKAIEMGVVTETTRDRLIELEKQRTDLKSKLSLAKEEVVHVDRKKLISSLLLFRNGDIHDRQYQEDLFKTFLISVYVYDDDDNGHLKIVFNAFGDNHTVDLPIDFGETDNQSAFSDGAEKFDYSLHRSTRLKPSEEAQVAFLFV

SEQ ID NO: 3334 - protein, 530 aa, Unknown
  Description of Unknown: Integrase B3335 sequence
  cd00338,SM00857,G3DSA:1.10.10.2600,IPR036162,PS51737, G3DSA:3.40.50.1390,IPR006119,IPR038109,PF07508,IPR011109, SSF53041,PTHR30461,PS51736,Coil,PF00239
MEQYLIYLRKSRSDLEAEAHGEGETLSRHEHTLLELAKRQHLNVTDIYREVVSGDTIAARPMMQRVLSEVEQGVWSGVLVMEVERLARGDTIDQGIIAQTFKFSGTKIITPIKTYDPDNEFDEEYFEFGLFMSRREYKIINRRLQRGRLASAKEGKWPSGLAPFGYRRVKLKNEKGCSLEPIEEQAAIVRMIFDLYTVGLQDEDGSARPLSLGSIATRLNDMHIPSPSGSQWARITIRGIIKNPTYIGMVRWGSRETKKKVVDGKVVSVRGPADPEKECVFKGIHPPLIPKETFELANDKLTRSENTSTHKEKVVRNPLAGLLVCSECGRQMIRMINPVHPDMPVVRCPRRGCPNCSSYLPIVEERVIQGLSEWMKGYELEWSSAAASSSVSSVGVREKALASAEAELRKLQQQLERTHDFLEQGIYDTDTFLSRSRMLSDKIAAAKDSVTRCSRELTEEKLRETSRRDIIPKVKNLLDVYPLLETAEEKNTLLKEVLEKVVYQKLNEKRKKSPDGFTIEIYPRIPKSEK

SEQ ID NO: 3335 - protein, 530 aa, Unknown
  Description of Unknown: Integrase B3336 sequence
  PTHR30461:SF3,SM00857,G3DSA:1.10.10.2600,IPR036162,PF13408, IPR025827,G3DSA:3.40.50.1390,PS51737,IPR006119,IPR038109, PF07508,SSF53041,IPR011109,PTHR30461, Coil,PS51736,cd00338,PF00239
MKITKFPIDLSMLTEEEIDQFRQDPSTLFEGDTDVCLYLRFSSERQREQSIEGQLRDCRTFCKLNSYRITAIYVDRATTARKDVEKRVHFQEMIRDSEKKPWEYVVVWKLDRFARNRTDSALFKFRLRKNGVKVISATENISEKPEGIILEAVLEGMAEFYSADLSQKITRGMRESALKCHSIGGHVPLGYKIEDHKLVINPATAHIVQEAFELYANGETVADICRIFNTKGYRTAKGVEFNRNSFKSMFRNKRYIGVYTYKDIEVEGGVPAIIDKELFETVGHRLSKNAEAPARGKAKVDYLLAGKLFCGHCGGSMNGESGTSKTGAIHNYYTCYTRKRKHACDKKPLKKDWIEYIVAQDAMELLTDDTIQELADMAISQTEQDLRENTRIPELTDRMKETESGITNITKAIEKGIASDALMNRLVELEKEKKNLLRLLAEEEKYVCKIERSQIVYWLTEFKGGRIEDERYRRIIIDLMINSVTVWDEPDGFRITTAYNLTSCKSKTLRIAPLNAPIRSEQMHVIVWIG

SEQ ID NO: 3336 - protein, 530 aa, Unknown
  Description of Unknown: Integrase B3337 sequence
  PTHR30461:SF3,cd00338,SM00857,G3DSA:1.10.10.2600,IPR036162, PF13408,PS51737,G3DSA:3.40.50.1390,IPR025827,IPR006119, IPR038109,PF07508,IPR011109,SSF53041,PTHR30461, PS51736,Coil,PF00239
MAKKKKPTGGVAIIYARYSSHNQRDVSIEQQIEACRKHAAELGLTIIATYEDRAISGRTDNRPAFQRMMHDAENGKFSYVLAWKSNRMGRNMMQAMVNESRLMDCGIKVYYAEEDFDDSAAGRFALRSMMNVNQFYSDNLAEDVRRGLMDNASKCMANGKQPLGYKRGEDGKVVVDEPAAAIVREVYVRVASGELFTDIARDLNRRGIKTADKGEWNKNSFHRLCSNEKYRGIYIYGDVRIEGGIPTIIDDTLWYKVQEALRVKKLKRNGRHRPGDEDYLLTGKLRCGKCGGYMIGMSGRSKTGDIHYYYACQNRRVGRTCDKKNIRRDVIEPAVAQAIKEYCLTDDAIEWIADKTVEYWEKADRNLQLDSIEGDLAAVQSSISNVMKAIEMGVVTETTRDRLIELEKQRTDLKSKLALAKEEVVHVDRKKLISSLLLFRNGDIHDRQYQEDLFKTFLISAYVYDDDDNGHLKIVFNAFGDNNTVDLPIDFGETDNQSAFFDRAEKFDYALHRSTRLKPSEEVQVAFLFV

SEQ ID NO: 3337 - protein, 530 aa, Unknown
  Description of Unknown: Integrase B3338 sequence
  cd00338,SM00857,G3DSA:1.10.10.2600,IPR036162,PS51737, G3DSA:3.40.50.1390,IPR006119,IPR038109,PF07508,IPR011109, SSF53041,PTHR30461,PS51736,Coil,PF00239
MEQYLIYLRKSRSDLEAEAHGEGETLSRHEHTLLELAKRQRLNVTDIYREVVSGDTIAARPMMQRVLSEVEQGVWSGVLVMEVERLARGDTIDQGIIAQTFKFSGTKIITPIKTYDPDNEFDEEYFEFGLFMSRREYKIINRRLQRGRLASAKEGKWPSGLAPFGYRRVKLKNEKGCSLEPIEEQAAIVRMIFDLYTVGLQDEDGSARPLSLGSIATRLNDMHIPSPSGSQWARITIRGIIKNPTYIGMVRWGSRETKKKVVDGKVVSVRGPADPEKECVFKGIHPPLIPKETFELANDKLIRSENTSTHKEKVVRNPLAGLLVCSECGRQMMRMINPVHPDMPVVRCPRRGCPNCSSYLPIVEERVIQGLSEWMKGYELEWSSAAASSSVSSVGVREKALASAEAELRKLQQQLERTHDFLEQGIYDTDTFLSRSRMLSDKIAAAKDSVARCSRELTEEKLRETSRRDIIPKVKNLLDVYPLLETAEEKNALLKEVLEKVVYQKLNEKRKKSPDGFTIEIYPRIPKSEK

SEQ ID NO: 3338 - protein, 530 aa, Unknown
  Description of Unknown: Integrase B3339 sequence
  cd00338,SM00857,G3DSA:1.10.10.2600,IPR036162, PS51737,G3DSA:3.40.50.1390,IPR006119,IPR038109, PF07508,IPR011109,SSF53041,PTHR30461, PS51736,Coil,PF00239
MEQYLIYLRKSRSDLEAEAHGEGETLSRHEHTLLELAKRQHLNVTDIYREVVSGDTIAARPMMQRVLSEVEQGVWSGVLVMEVERLARGDTIDQGIIAQTFKFSGTKIITPIKTYDPDNEFDEEYFEFGLFMSRREYKIINRRLQRGRLASAKEGKWPSGLAPFGYRRVKLKNEKGCSLEPIEEQAAIVRMIFDLYTVGLQDEDGSARPLSLGSIATRLNDMHIPSPSGSQWARITIRGIIKNPTYIGMVRWGSRETKKKVVDGKVVSVRGPADPEKECVFKGIHPPLIPKETFELANDKLTRSENTSTHKEKVVRNPLAGLLVCSECGRQMMRMINPVHPDMPVVRCPRRGCPNCSSYLPIVEERVIQGLSEWMKGYELEWSSAAASSSVSSVGVREKALASAEAELRKLQQQLERTHDFLEQGIYDTDTFLSRSRMLSDKISAAKDSVTRCSRELTEEKLRETSRRDIIPKVKNLLDVYPLLETAEEKNALLKEVLEKVVYQKLNEKRKKSPDGFTIEIYPRIPKSEK

SEQ ID NO: 3339 - protein, 530 aa, Unknown
  Description of Unknown: Integrase B3340 sequence
  PTHR30461:SF3,cd00338,SM00857,G3DSA:1.10.10.2600,IPR036162, PF13408,PS51737,IPR025827,G3DSA:3.40.50.1390,IPR006119, IPR038109,PF07508,SSF53041,IPR011109,PTHR30461, PS51736,Coil,PF00239
MSDKEKTNGSLAMAPRVITIPAANQETARKLRVAAYTRVSSNSKDQEHSFAAQNAYFSKLITDNPDWELADIYADQGITGTSIDKRDDFLRMMEDCRKGRIDRILVKSSSRFARNTKESLAAVRELKSLNISVYFEEQNIDTAQVSGEVLIAMFAALAQRESEAISERVRWSYRVRMSKGRFSTCKAPYGYRLVKDHLEIQEDEASIIRHIFDRYLAGVSMENIAKEITALGCPTRDGTQYWQLTSIQYILQNEKYAGDSLSQKKYTTRSFPRQQKINHGERKQYLVIDSHPAIISREIFQKVQELLTQRSAAIHPRSDVPHAFARKVVCGHCGTLCKRKNCGGSVNWACRRHDKSITACPNTQVPEEQMKNAFLHVYYNLKHYGTSILTQLISDLHAARTGSLLWSENIVEINKQISDIASQERLLAQLKQQGVVDPDIFISRSNQLAERLRELKLQKERILRSEEDHTIQQTQDLLDVLESGPDWQDDFDEQLFSDMIEKIVVVDNETLCFRLLNGLEVTEKIERTRR

SEQ ID NO: 3340 - protein, 530 aa, Unknown
  Description of Unknown: Integrase B3341 sequence
  PTHR30461:SF3,cd00338,SM00857,G3DSA:1.10.10.2600,IPR036162, PF13408,PS51737,G3DSA:3.40.50.1390,IPR025827,IPR006119, IPR038109,PF07508,IPR011109,SSF53041,PTHR30461, PS51736,Coil,PF00239
MAKKKKPAGGIAVIYARYSSHNQRDVSIEQQIEACRKHAAELGLTIIATYEDRAISGRTDNRPAFQRLMHDAEKGKFSYVLAWKSNRMGRNMMQAMVNESRLMDCGIKVYYAEEDFDDSAAGRFALRSMMNVNQFYSDNLAEDVRRGLMDNANKCMVNGRQPLGYKRGKDGKVVVDEPAAAIVREVYARVASGELFTDIARDLNRRGIKTADKGEWNKNSFHRLCSNEKYRGIYIYGDVRIEGGIPTIIDDTLWYKVQEALRVKKLKRNGRHRPGDEDYLLTGKLRCGKCGGYMIGMSGRSKTGDIHYYYACQNRRVGRTCDKKNIRRDVIEPAVAQAIKEYCLTDDAIEWIADKTVEYWEKADRNLQLDSIEGDLAAVQSSISNVMKAIEMGVVTETTRDRLIELEKQRTDLKSKLALAKEEVVHVDRKKLISSLLLFRNGDIHDRQYQEDLFKTFLISVYVYDDDDNGHLKIVFNAFGDNNTVDLPIDFGETDNQSAFSDGAEKFDYSLHRSTRLKPSEEAQVAFLFV

SEQ ID NO: 3341 - protein, 530 aa, Unknown
  Description of Unknown: Integrase B3342 sequence
  cd00338,SM00857,G3DSA:1.10.10.2600,IPR036162,PS51737, G3DSA:3.40.50.1390,IPR006119,IPR038109,PF07508,IPR011109, SSF53041,PTHR30461,PS51736,Coil,PF00239
MEQYLIYLRKSRSDLEAEAHGEGETLSRHEHTLLELAKRQHLNVTDIYREVVSGDTIAARPMMQRVLSEVEQGVWSGVLVMEVERLARGDTIDQGIIAQTFKFSGTKIITPIKTYDPDNEFDEEYFEFGLFMSRREYKIINRRLQRGRLASAKEGKWPSGLAPFGYRRVKLKNEKGCSLEPIEEQAEIVRMIFDLYTVGLQDEDGSARPLSLGSIATRLNDMHIPSPSGSQWARITIRGIIKNPTYIGMVRWGSRETKKKVVDGKVVSVRGPADPEKECVFKGIHHPLVPKETFELANDKLTRSENTSTHKEKVVRNPLAGLLVCSECGRQMMRIINPVHPDMPVVRCPRRGCPNCSSYLPIVEERVIQGLSEWMKGYELEWSSAAASSSVSSVGVREKALASAEAELRKLQQQLERTHDFLEQGIYDTDTFLSRSRMLSDKIAAAKDSVTRCSRELTKEKLRETSRRDIIPKVKNLLDVYPLLETAEEKNALLKEVLEKVVYQKLNEKRKKSPDGFTIEIYPRIPKSEK

SEQ ID NO: 3342 - protein, 530 aa, Unknown
  Description of Unknown: Integrase B3343 sequence
  PTHR30461:SF3,cd00338,SM00857,G3DSA:1.10.10.2600,IPR036162, PS51737,G3DSA:3.40.50.1390,IPR006119,IPR038109,PF07508, IPR011109,SSF53041,PTHR30461,PS51736, Coil,PF00239
MEQYLIYLRKSRSDLEAEAHGEGETLSRHEHTLLELAKRQHLNVTDIYREVVSGDTIAARPMMQRVLSEVEQGVWSGVLVMEVERLARGDTIDQGIIAQTFKFSGTKIITPIKTYDPDNEFDEEYFEFGLFMSRREYKIINRRLQRGRLASAKEGKWPSGLAPFGYRRVKLKNEKGCSLEPIEEQAAIVRMIFDLYTVGLQDEDGSARPLSLGSIATRLNDMRIPSPSGSQWARITIRGIIKNPTYIGMVRWGSRETKKKVVDGKVVSVRGPADPEKECVFKGIHPPLIPKETFELANDKLTRSENTSTHKEKVVRNPLAGLLVCSECGRQMMRMMNSVHPDMPVVRCPRRGCPNCSSYLPIVEERVIQGLSEWMKGYELEWSSAAASSSVSSVGVREKALASAEAELRKLQQQLERTHDFLEQGIYDTDTFLSRSRMLSDKIAAAKDSVTHCSRELTEEKLRETSRRDIIPKVKNLLDVYPLLETAEEKNALLKEVLEKVVYQKLNEKRKKSPDGFTIEIYPRIPKSEK

SEQ ID NO: 3343 - protein, 530 aa, Unknown
  Description of Unknown: Integrase B3344 sequence
  cd00338,SM00857,G3DSA:1.10.10.2600,IPR036162,PS51737, G3DSA:3.40.50.1390,IPR006119,IPR038109,PF07508,IPR011109, SSF53041,PTHR30461,PS51736,Coil,PF00239
MEQYLIYLRKSRSDLEAEAHGEGETLSRHEHTLLELAKRQHLNVTDIYREVVSGDTIAARPMMQRVLSEVEQGVWSGVLVMEVERLARGDTIDQGIIAQTFKFSGTKIITPIKTYDPDNEFDEEYFEFGLFMSRREYKIINRRLQRGRLASAKEGKWPSGLAPFGYRRVKLKNEKGCSLEPIEEQAAIVRMIFDLYTVGLQDEDGSARPLSLGSIATRLNDMHIPSPSGSQWARITIRGIIKNPTYIGMVRWGSRETKKKVVDGKVVSVRGPADPEKECVFKGIHPPLIPKETFELANDKLTRSENTSTHTEKVVRNPLAGLLVCSECGRQMMRMINPVHPDMPVVRCPRRGCPNCSSYLPIVEERVIQGLSEWMKGYELEWSSAAASSSVSSVGVREKALASAEAELRKLQQQLERTHDFLEQGIYDTDTFLSRSRMLSDKIAAAKESVARCSRELTEEKLRETSRRDIIPKVKNLLDVYPLLETAEEKNALLKEVLEKVVYQKLNEKRKKSPDGFIIEIYPRIPKSEK

SEQ ID NO: 3344 - protein, 530 aa, Unknown
  Description of Unknown: Integrase B3345 sequence
  PTHR30461:SF3,SM00857,G3DSA:1.10.10.2600,IPR036162,PF13408, IPR025827,G3DSA:3.40.50.1390,PS51737,IPR006119,IPR038109, PF07508,IPR011109,SSF53041,PTHR30461, Coil,PS51736,cd00338,PF00239
MIAAIYSRKSKFTGKGESIENQIQLCMDYAKNLGVNEFLVYEDEGFSGKSMDRPKFKEMLKDAKDKKFDYLICYRLDRISRNVSDFSTLIEDLNKLNISFVSIKEQFDTSTPMGRAMMYISSVFAQLERETIAERVRDNMYELARTGRWLGGMPPYGFISTQINYYDENMNQRKMYKLKVDEDTIEIVKLIFDKYLELRSLSKLYKYMYENGIKGTRGGNLDPSALSLILKNPAYVKADKSVVDYLRKSNIDVMGDIDNIHGILTYAKNTDSPIAAVAKHKGVIDSDKWIEAQRLLNANKAKAPRAGTGSKALLSCLLKCSKCGSNMRITYKNSKSGTIYYYICGTKKSLGVSACDCRNIRSDKAESKVIDELKNKSIKSIMSSYKDSKLENSKNSKNIKTEINSINNQIKEKETYIDNLVMQLAKVTESSASTFIINKLESLNNDLSNLKSQLESLNTMSMENNQVDININMLIDNLNKFNKEIDTSDINKKRLLLSTVVDYMTWDSDTDTIKVNLIGINSSNTIASGK

SEQ ID NO: 3345 - protein, 530 aa, Unknown
  Description of Unknown: Integrase B3346 sequence
  SM00857,G3DSA:1.10.10.2600,IPR036162,PS51737,G3DSA:3.40.50.1390, IPR006119,IPR038109,PF07508,IPR011109,SSF53041, PF00239,PTHR30461,PS51736,Coil,cd00338
MEQYLIYLRKSRSDLEAEAHGEGETLSRHEHTLLELAKRQHLNVTDIYREVVSGDTIAARPMMQRVLSEVEQGVWSGVLVMEVERLARGDTIDQGIIAQTFKFSGTKIITPIKTYDPDNEFDEEYFEFGLFMSRREYKIINRRLQRGRLASAKEGKWPSGLAPFGYRRVKLKNEKGCSLEPIEEQAAIVRMIFDLYTVGLQDEDGSTRPLSLGSIATRLNDMHIPSPSGSQWARITIRGIIKNPTYIGMVRWGSRETKKKVVDGKVVSVRGPADPEKECVFKGIHPPLIPKETFELANDKLTRSENTSTHKEKVVRNPLAGLLVCSECGRQMMRMINPVHPDMPVVRCPRRGCPNCSSYLPIVEERVIQGLSEWMKGYELEWSSAAASSSVSSVGVREKALASAEAELRKLQQQLERTHDFLEQGIYDTNTFLSRSRMLSDKIAAAKDSVARCSRELTEEKLRETSRREIIPKVKNLLDVYPLLETAEEKNALLKEVLEKVVYQKLNEKRKKSPDGFTIEIYPRIPKSEK

SEQ ID NO: 3346 - protein, 530 aa, Unknown
  Description of Unknown: Integrase B3347 sequence
  SM00857,G3DSA:1.10.10.2600,IPR036162,PS51737, G3DSA:3.40.50.1390,IPR006119,IPR038109,PF07508, IPR011109,SSF53041,PTHR30461,Coil, PS51736,cd00338,PF00239
MEQYLIYLRKSRSDLEAEAHGEGETLSRHEHTLLELAKRQHLNVTDIYREVVSGDTIAARPMMQRVLSEVEQGVWSGVLVMEVERLARGDTIDQGIIAQTFKFSGTKIITPIKTYDPDNEFDEEYFEFGLFMSRREYKIINRRLQRGRLASAKEGKWPSGLAPFGYRRVKLKNEKGCSLEPIEEQAAIVRMIFDLYTVGLQDEDGSARPLSLGSIAARLNDMRVPSPSGSQWTRITIRGIIKNPTYIGMVRWGSRETKKKVVDGKVFSVRGPADPEKECVFKGIHPPLIPKETFELANDKLTRSENTSTHKEKVVRNPLAGLLVCSECGRQMMRMINPVHPDMPVVRCPRRGCPNCSSYLPIVEERVIQGLSEWMKGYELEWSSAAASSSVSSVGVREKALASAEAELRKLQQQLERTHDFLEQGIYDTDTFLSRSRLLSDKIAAAKDSVARYSRELTEEKLRETSRRDIIPKVKNLLDVYPLLETAEEKNDLLKEVLEKVVYQKINEKRKKSPDGFTIEIYPRIPKSKK

SEQ ID NO: 3347 - protein, 530 aa, Unknown
  Description of Unknown: Integrase B3348 sequence
  SM00857,G3DSA:1.10.10.2600,IPR036162,PS51737,G3DSA:3.40.50.1390, IPR006119,IPR038109,PF07508,IPR011109,SSF53041, PTHR30461,Coil,PS51736,cd00338,PF00239
MPYCLYVRKSRADAEAEARGEGETLTRHINALLDLAKRRHLDITQIYREIVSGETIAARPVMQQLLSEVEQGLWDGVLVMEVERLARGDTVDQGIVAQTFKFSDTKIITPIKDYDPNNEFDEEYFEFGLFMSRREYKTINRRLQRGRIASVKEGKYVGSQSPYGYQREKLVGDKGYTLAPLPAEADIVRLIFQLYTKGEEQEDGSYKRLGVSRIVRRLNDMRIPPRKSTHWSPATIRDILINPVYIGKIRWNWRKDSKKMVDGRVVIARPRSSIDDCVLADGKHPPLIDDATFALAQEYMAQNPPHPIGERNKVKNPLSGLVVCAKCGKKMVRRPYNDRNQADTLLCADTACDNISSALFYVEERVLQALSDWLAEYRLQWETADDTADNASAVNLKEKALRRLATEYDTLNKQLDNAHDLLEQGVYTTEQFLDRSRKLSERIKKNEADRSTLGADIAADKKREQGRKQIIPKVEKLLDVYDSLPSAKSKNDMLKEVLEKVVYLKTKNGRWNNAPDDFEITLYPKIPKSD

SEQ ID NO: 3348 - protein, 530 aa, Unknown
  Description of Unknown: Integrase B3349 sequence
  cd00338,SM00857,G3DSA:1.10.10.2600,IPR036162, PS51737,G3DSA:3.40.50.1390,IPR006119,IPR038109, PF07508,IPR011109,SSF53041,PTHR30461, PS51736,Coil,PF00239
MEQYLIYLRKSRSDLEAEAHGEGETLSRHEHTLLELAKRQHLNVTDIYREVVSGDTIAARPMMQRVLSEVEQGVWSGVLVMEVERLARGDTIDQGIIAQTFKFSGTKIITPIKTYDPDNEFDEEYFEFGLFMSRREYKIINRRLQRGRLASAKEGKWPSGLAPFGYRRVKLKNEKGCSLEPIEEQAAIVRMIFDLYTVGLQDEDGSARPLSLGSIATRLNDMHIPSPSGSQWARITIRGIIKNPTYIGMVRWGSRETKKKVVDGKVVSVRGPADPEKECVFKGIHPPLIPKETFELANDKLTRSENTSTHKEKVVRNPLAGLLVCSECGRQMMRMINPVHPDMPVVRCPRRGCPNCSSYLPIVEERVIQGLSEWMKGYELEWSSAAVSSSVSSVGVREKALASAEAELRKLQQQLERTHDFLEQGIYDTDTFLSRSRMLSDKIAAAKDSVTRCSRELTEEKLRETSRRDIIPKVKNLLDVYPLLETAEEKNALLKEVLEKVVYQKLNEKRKKSPDGFTIEIYPRIPKSEK

SEQ ID NO: 3349 - protein, 530 aa, Unknown
  Description of Unknown: Integrase B3350 sequence
  SM00857,G3DSA:1.10.10.2600,IPR036162,PS51737,G3DSA:3.40.50.1390, IPR006119,IPR038109,PF07508,IPR011109,SSF53041, PTHR30461,Coil,PS51736,cd00338,PF00239
MEQYLIYLRKSRSDLEAEAHGEGETLSRHEHTLLELAKRQHLNVTDIYREVVSGDTIAARPMMQRVLSEVEQGVWSGVLVMEVERLARGDTIDQGIIAQTFKFSGTKIITPIKTYDPDNEFDEEYFEFGLFMSRREYKIINRRLQRGRLASAKEGKWPSGLAPFGYRRVKLKNEKGCSLEPIEEQAAIVRMIFDLYTVGLQDEDGSAHPLSLGSIATRLNDMRIPSPSGSQWSRITIRGIIKNPTYIGMVRWGSRETKKKVVDGKVVSVRGPADPEKECVFKGIHPPLIPKETFELANDKLARSENTSTHKEKAVRNPLAGLLVCSECGRQMMRMINPVHPDMPVVRCPRRGCPNCSSYLPIVEERVIQGLSEWMKGYELEWSSAAASSSVSSIGVREKALASAEAELRKLQQQLERTHDFLEQGIYDTDTFLSRSRMLSDKIAAAKDSVARCSRELTEEKLRETSRRDIIPKVKNLLDVYPLLETAEEKNALLKEVLEKVVYQKLNEKRKKSPDGFTIEIYPRIPKSEK

SEQ ID NO: 3350 - protein, 530 aa, Unknown
  Description of Unknown: Integrase B3351 sequence
  PTHR30461:SF3,SM00857,G3DSA:1.10.10.2600,IPR036162,PF13408, PS51737,IPR025827,G3DSA:3.40.50.1390,IPR006119,IPR038109, PF07508,IPR011109,SSF53041,PF00239, PTHR30461,PS51736,Coil,cd00338
MQTMPIDLSALTPEERQQFAENPSVLSTDCVATCCLYMRYSSDRQSEQSIEGQLRELISYCIRQEYRIAAVYVDRAISAHTSMAKRVAFQQMLADSKRAAWNTVLVWKLDRFARNRQDSAAARALLYKNGCGVESATEAISATKEGRLLESVLEGLNEYYSDELREKIIRGNRESALKGNALGGSVPLGYKIENKKWAIDPLTAPLVSEAFDRYASGDTVAAICDDFNARGYRTAKGAKFNKSSFKNIFRNEKYIGVYKYKDIRQEDSVPRIVTDDVWAKVKARLKVNEAAPARGKAKVPYLLAGKIFCGHCGSQMVGECGRSKNGHTYNYYSCAGRKIRRACNKKPVPKDWIEDIVVQDALEVLTDDVIDYVATVAARQSEEEIQQNTNIPAIREQIADIERKVRNLTKAIETSGMAPDTLVSRIAELESQRKGLSAQLLEEQHSVIHLTKEMVVYYLESVRKQAVPLETQKKMLIDLFVNSVTVYDDDPGYFKITTAYNLSAVPTKTYRVSTLFVEAGSSDTGPNGPP

SEQ ID NO: 3351 - protein, 530 aa, Unknown
  Description of Unknown: Integrase B3352 sequence
  PTHR30461:SF3,SM00857,G3DSA:1.10.10.2600,IPR036162,PS51737, G3DSA:3.40.50.1390,IPR006119,IPR038109,PF07508,SSF53041, IPR011109,PTHR30461,Coil,PS51736,cd00338, PF00239
MEKTIEKVCGKWEQDQYAMYLRKSRADMEMEALGEGETLARHKHMLEALAAKHDIHPGQITVYKEVVSGDSIDQRPEMQRLLSDIYQHKYKAVLVVEVERLARGNTKDQGEVADAFQASSTKIITPAKVYDPNNEFDQEYFEFGLFMSRREYKTIKRRLEAGKKQSVMEGNYLPPQRIFGFNIVKPSKKDRYLVENQEEGPILRMIFDWYTEEKRSQYWIARKLTEMGVKTTRNRDEWSKGTIRDMLSNVHYIGKVSWGAQQTVKVFDEKKGKLVKKRQKGQVEYYEGKHEGLISEEQFEKAQMILKQKKPKANMQKELANPLAGLLECCDCGRNMSLLDYNKYPSRQKYNYQPRFIHARMFSCKKKSCDVQTVMDAFVEALNAYIDDFTFKMENDNDQTDLIRHQDMIKAMEKELAKQEKKKRKLFDSWEADDGTYTRDEFIERKQMYAHQIDELNDRIKEAKENMPKPVNYSKKIVSLHKMIDCINNPKLSAKKKNDFLKQYIDKITYDIIDHGERKGGTPILEVFLK

SEQ ID NO: 3352 - protein, 530 aa, Unknown
  Description of Unknown: Integrase B3353 sequence
  SM00857,G3DSA:1.10.10.2600,IPR036162,PS51737,G3DSA:3.40.50.1390, IPR006119,IPR038109,PF07508,IPR011109,SSF53041, PTHR30461,Coil,PS51736,cd00338,PF00239
MEQYLIYLRKSRSDLEAEAHGEGETLSRHEHTLLELAKRQHLNVTDIYREVVSGDTIAARPMMQRVLSEVEQGVWSGVLVMEVERLARGDTIDQGIIAQTFKFSGTKIITPIKTYDPDNEFDEEYFEFGLFMSRREYKIINRRLQRGRLASAKEGKWPSGLAPFGYRRVKLKNEKGCSLEPIEEQAAIVRMIFDLYTVGLQDEDGSARPLSLGSIATRLNDMHIPSPSGSQWARITIRGIIKNPTYIGMVRWGSRETKKKVVDGKVVSVRGPADPEKECVFKGIHPPLVPKETFELANDKLARSENTSTHKEKVVRNPLAGLLVCSECGRQMMRMINPVHPDMPVVRCPRRGCPNCSSYLPIVEERVIQGLSEWMKGYELEWSSAAASSSVSSVGVREKALASVEAELRKLQQQLERTHDFLEQGIYDTDTFLSRSRMLSDKIAAAKDSVTRCSRELTEEKLRETSRRDIIPKVKNLLDVYPLLETAEEKNALLKEVLEKVVYQKLNEKRKKSPDGFTIEIYPRIPKSEK

SEQ ID NO: 3353 - protein, 530 aa, Unknown
  Description of Unknown: Integrase B3354 sequence
  SM00857,G3DSA:1.10.10.2600,IPR036162,PS51737, G3DSA:3.40.50.1390,IPR006119,IPR038109,PF07508, IPR011109,SSF53041,PTHR30461,PS51736, cd00338,PF00239
MEQYLIYLRKSRSDLEAEAHGEGETLSRHEHTLLELAKRQHLNVTDIYREVVSGDTIAARPMMQRVLSEVEQGVWSGVLVMEVERLARGDTIDQGIIAQTFKFSGTKIITPIKTYDPDNEFDEEYFEFGLFMSRREYKIINRRLQRGRLASAKEGKWPSGLAPFGYRRVKLKNEKGCSLEPIEEQAAIVRMIFDLYTVGLQDEDGSARPLSLGSIAARLNDMRVPSPSGSQWTRITIRGIIKNPTYIGMVRWGSRETKKKVVDGKVVSVRGPADPEKECVFKGIHPPLIPKETFELANDKLTRSENTSTHKEKVVRNPLAGLLVCSECGRQMMRMINPVHPDMPVVRCPRRGCPNCSSYLPIVEERVIQGLSEWMKGYELEWSSAAASSSVSSVGVREKALASADAELRKLQQQLERTHDFLEQGIYDTDTFLSRSRMLSDKIAAAKDSVARCSRELTEEKLRETSRRDIIPKVKNLLDVYPLLETAEEKNALLKEVLEKVVYQKLNEKRKKSPDGFTIEIYPRIPKSEK

SEQ ID NO: 3354 - protein, 530 aa, Unknown
  Description of Unknown: Integrase B3355 sequence
  SM00857,G3DSA:1.10.10.2600,IPR036162,PS51737,G3DSA:3.40.50.1390, IPR006119,IPR038109,PF07508,IPR011109,SSF53041, PF00239,PTHR30461,PS51736,Coil,cd00338
MEQYLIYLRKSRSDLEAEAHGEGETLSRHEHTLLELAKRQHLNVTDIYREVVSGDTIAARPMMQRVLSEVEQGVWSGVLVMEVERLARGDTIDQGIIAQTFKFSGTKIITPIKTYDPDNEFDEEYFEFGLFMSRREYKIINRRLQRGRLASAKEGKWPSGLAPFGYRRVKLKSEKGCSLEPIEEQAAIVRMIFDLYTVGLQDEDGSARPLSLGSIAARLNDMRVPSPSGSQWTRITIRGIIKNPTYIGMVRWGSRETKKKVVDGKVVSVRGPADPEKECVFKGIHPPLIPKETFEFANDKLTRSENTSTHKEKVVRNPLAGLLVCSECGRQMMRMINPVHPDMPVVRCPRRGCPNCSSYLPIVEERVIQGLSEWMKGYELEWSSAAASSSASSVGVREKALASAEAELRKLQQQLERTHDFLEQGIYDTDTFLSRSRMLSDKIAAAKDSVARCSRELTEEKLRETSRRDIIPKVKNLLDVYPLLETAEEKNALLKEVLEKVVYQKLNEKRKKSPDGFTIEIYPRIPKSEK

SEQ ID NO: 3355 - protein, 530 aa, Unknown
  Description of Unknown: Integrase B3356 sequence
  SM00857,G3DSA:1.10.10.2600,IPR036162,PF13408, IPR025827,PS51737,G3DSA:3.40.50.1390,IPR006119, IPR038109,PF07508,SSF53041,IPR011109, PF00239,PTHR30461,PS51736,Coil,cd00338
MAQENYIIYLRKSRADAEAEARGEGETLARHEKALLELARRQKLNVTDIYREIVSGETIAARPVMQRVLAEVEQGRWAGVLVMEVERLARGDTMDQGLVAQTFKFSGAKIITPMKTYDPSNEFDEEYFEFGLFMARREYKVINRRMQRGREASAREGKFLGNHPPYGYVRKKLEREKGYTLEPHPGQADVIRMIFDLYTIGYPLEDGAYRRLGVSLIARRLNEMAIPPQKGGAWSESSIRDILINPVYAGMIRWNTRPHVKRMVDGQITVTRPRARPEDRICVKGLHEPLISTDTFDAAQKLMSCNRPAPIGRAKGVKNPLAGIVVCGVCGRKLVRRPYPAGRGQPDTLMCPNASCSNVSSALHYVEEHILSALRDWLAEYKLKLLTQGETLSPSALASKKMTLRVVEAELSKLNKQMERLHDLLEQGVYDVDVFLNRSRILGEQIAKAKASIEALNEEIKLEEARSGAYKNIIPKVQHLLDSYHDLSNPKAQNDLLREVLDKAVYTKTIKGRWHAAPDDFEITIFPRLS

SEQ ID NO: 3356 - protein, 530 aa, Unknown
  Description of Unknown: Integrase B3357 sequence
  SM00857,G3DSA:1.10.10.2600,IPR036162,PS51737,G3DSA:3.40.50.1390, IPR006119,IPR038109,PF07508,IPR011109,SSF53041, PF00239,PTHR30461,PS51736,Coil,cd00338
MEQYLIYLRKSRSDLEAEAHGEGETLSRHEHTLLELAKRQHLNVTDIYREVVSGDTIAARPMMQRVLSEVEQGVWSGVLVMEVERLARGDTIDQGIIAQTFKFSGTKIITPIKTYDPDNEFDEEYFEFGLFMSRREYKIINRRLQRGRLASAKEGKWPSGLAPFGYRRVKLKNEKGCSLEPIEEQAAIVRMIFDLYTVGLQDEDGSARPLSLGSIATRLNDMRIPSPSGSQWARITIRGIIKNPTYIGMVRWGSRETKKKVVDGKVVSVRGPADPEKECIFKGIHPPLIPKETFELANDKLTRSENTSTHKERVVRNPLAGLLVCSECGRQMMRMINPVHPDMPVVRCPRRGCPNCSSYLPIVEERVIQGLSEWMKGYELEWSSAAASSSVSSVGVREKALASAEAELRKLQQQLERTHDFLEQGIYDTDTFLSRSRMLSDKIASAKDSVTRCSRELTEEKLRETSRRDIIPKVKNLLDVYPLLETAEEKNALLKEVLEKVVYQKLNEKRKKSPDGFTIEIYPRIPKSEK

SEQ ID NO: 3357 - protein, 530 aa, Unknown
  Description of Unknown: Integrase B3358 sequence
  SM00857,G3DSA:1.10.10.2600,IPR036162,PF13408, PS51737,IPR025827,G3DSA:3.40.50.1390,IPR006119, IPR038109,PF07508,IPR011109,SSF53041, PTHR30461,PS51736,cd00338,PF00239
MSKRESKSSQKCLAAEQIGVIYARYSSHNQKEESIEQQIAECSDFAAKNGIRIVGIYADKAVSGRSDRRPNFQRMMRDAEKRHFQIVVAYKSNRIARNMLNALQYEARLDLFGIKTLYAKEEFGNTAAGRFALRTMMNVNQFYSENMGEDIKRGMVDNANECKVNGMLPLGYVKSKEGKYAVAPDEAAVVREIFDSFLKDVPVAEIARSLNQRGIRTKLGREWNKNSFHIMLKNDNYIGVYRHSGVVVENGIPPILEREVFAAVQEKLANKKKAAGRRSANGEYLLTGKLFCGYCGSYMIGVSGTGENGTVHNYYQCQKRHAENRCEKKNVRRDFIEKLIARLTQDYILQDETIEWIADSTMSFQAVARRQSGITQLERDLADNRKIAKNIMAAIEQGIITETTKARLLEVEGTIRDLERSLSIAKAASQPIERERVVFSLEQMREGNVGSKEHQKKLIDTFVKAVTLWDDRIQIDYYHTPGKHKFSYSLEELTSKVENESNAADVRAESLEVHQTGIGRTHISSAAASP

SEQ ID NO: 3358 - protein, 530 aa, Unknown
  Description of Unknown: Integrase B3359 sequence
  cd00338,SM00857,G3DSA:1.10.10.2600,IPR036162,PS51737, G3DSA:3.40.50.1390,IPR006119,IPR038109,PF07508,IPR011109, SSF53041,PTHR30461,PS51736,Coil,PF00239
MEQYLIYLRKSRSDLEAEAHGEGETLSRHEHTLLELAKRQHLNVTDIYREVVSGDTIAARPMMQRVLSEVEQGVWSGVLVMEVERLARGDTIDQGIIAQTFKFSGTKIITPIKTYDPDNEFDEEYFEFGLFMSRREYKIINRRLQRGRLASAKEGKWPSGLAPFGYRRVKLKNEKGCSLEPIEEQAAIVRMIFDLYTVGLQDEDGSARPLSLGSIATRLNDMHIPSPSGSQWARITIRGIIKNPTYIGMVRWGSRETKKKVVDGKVVSVRGPADPEKECVFKGIHPPLIPKETFELANDKLTRSENTSTHKEKVVRNPLAGLLVCSECGRQMMRMINPVHPDMPVVRCPRRGCPNCSSYLPIVEERVIQGLSEWMKGYELEWSSAAASFSVSSVGVREKALASAEAELRKLQQQLERTHDFLEQGIYDTDTFLSRSRMLSDKIAAAKDSVTRCSRELTEEKLRETSRRDIIPKVKNLLDVYPLLETAEEKNALLKEVLEKVVYQKLNEKRKKSPDGFTIEIYPRIPKSEK

SEQ ID NO: 3359 - protein, 530 aa, Unknown
  Description of Unknown: Integrase B3360 sequence
  cd00338,SM00857,G3DSA:1.10.10.2600,IPR036162, PS51737,G3DSA:3.40.50.1390,IPR006119,IPR038109, PF07508,IPR011109,SSF53041,PTHR30461, PS51736,Coil,PF00239
MEQYLIYLRKSRSDLEAEAHGEGETLSRHEHTLLELAKRQHLNVTDIYREVVSGDTIAARPMMQRVLSEVEQGVWSGVLVMEVERLARGDTIDQGIIAQTFKFSGTKIITPIKTYDPDNEFDEEYFEFGLFMSRREYKIINRRLQRGRLASAKEGKWPSGLAPFGYRRVKLKNEKGCSLEPIEEQAAIVRMIFDLYTVGLQDEDGSARPLSLGSIATRLNDMRIPSPSGSQWARITIRGIIKNPTYIGMVRWGSRETKKKVVDGKVVSVRGPADPEKECVFKGIHPPLIPKETFELANDKLARSENTSTHKEKVVRNPLAGLLVCSECGRQMTRMINPVHPDMPVVRCPRRGCPNCSSYLPIVEERVIQGLSEWMKGYELEWSSAAASSSVSSVGVREKALASAEAELRKLQQQLERTHDFLEQGIYDTDTFLSRSRMLSDKIAAAKDSVTRCSRELTEEKLRETSRRDIIPKVKNLLDVYPLLETAEEKNALLKEVLEKVVYQKLNEKRKKSPDGFTIEIYPRIPKSEK

SEQ ID NO: 3360 - protein, 529 aa, Unknown
  Description of Unknown: Integrase B3361 sequence
  PTHR30461:SF3,SM00857,G3DSA:1.10.10.2600,IPR036162,PF13408, PS51737,IPR025827,G3DSA:3.40.50.1390,IPR006119,IPR038109, PF07508,SSF53041,IPR011109,PF00239,PTHR30461, PS51736,Coil,cd00338
MQRAVIYARYSPGPNQTEQSIEGQVRECTKYAELHDLRIVGTYVDRKISGKTDNRREFQRMIDDSEKHIFDVIILYHTDRFARNRYDSAIYKHKLKENGVELRYATTDIPNGPEGIILESIMEGWAEYYSAELSRKIKRGMRESALKCHSTGAGRCLGYRTAEDKSLVIEPEGAKAVQTVFDMYIKGKSHADICRYLNDCGFRTAQGKLFNKNSVTHIIRNKRYIGVYTYDDITIEDGIPAIISKDTFHLAQLEAARRKTAKRPKEPKAEYLLSGKAFCGHCQKPLVGVSGTGKSGNKWYYYYCQESRAKRGCTKKPVKRDWLEREVVKRTVAEVLQPKVIQHIAKKCYDLQMEYRQDNSDVLFYELKLKDVRKAIKNTMHAIESGVKTKTLPARLQELENEEEALEAELAIAKASDFVITADQIEFLLTQFAEPWECESEEEYHRRIIKCFVHKVFLFDDKLLIYYNVSRDGKTREQSEAELLEEALGEGFDKRSSGSTILIAGRTPECEIIVLRYGFWLALDLTVQV

SEQ ID NO: 3361 - protein, 529 aa, Unknown
  Description of Unknown: Integrase B3362 sequence
  SM00857,G3DSA:1.10.10.2600,IPR036162,PF13408,PS51737, G3DSA:3.40.50.1390,IPR025827,IPR006119,IPR038109,PF07508, IPR011109,SSF53041,PF00239,PTHR30461,PS51736, Coil,cd00338
MKFTSTWKISDPLAQYIIYLRKSRKDMEAEALGQTDTLKRHRAALLSLSESRGLNVVEICEEVVTGDSIAVRPEVQKVLQLVETGNYAGVIVMEVERLARGDTIDQGIIAQTFKYSNTKIITPNKIYDPNNEMDEEYFEFGLFMSRREYNTIKRRLSRGKEASLREGKWISGKTPFGWSREKLPNDKGYKLVPHPEQAPVLQQIYNWYTGEGCARIGAKAISTRLNSLGVPTNSGSLWRSDSVLDILRNPANAGWIKSGGRPETKRIVDGAVVVSRPRTRQEDLKLYKGLHDGLISQEQYDKAVALSYSSASPRGKGAWGTVTSLAGLVRCDQCGRVMVRRPSSGNRRDTLLCPSYGCTTVSAWYDDVEDAVLDALHGWLRELELGEAAAPDDTPMRTALESSIAADRKQLAKLEAQEARAYELVETGVYTPEIFLQRSQALAADKQVIVDRIEASQTTIHELARAKQARARLAPAVRRVLETYPLAASPQEKNALLKTVLQKVLYHKQIKSYTKSGSDMHVTLYPLAD

SEQ ID NO: 3362 - protein, 529 aa, Unknown
  Description of Unknown: Integrase B3363 sequence
  PTHR30461:SF3,IPR036162,PS51737,IPR011109,PTHR30461, PF00239,G3DSA:1.10.10.2600,IPR006119,SSF53041,cd00338, SM00857,IPR025827,IPR038109,PS51736,mobidb-lite, PF13408,G3DSA:3.40.50.1390,PF07508,Coil
MKKRINTNSAARAVIYARYSSANQRDCSIEQQVEKCRELAAREGVTVIEIYADRAISGKTDRRPNFQRMMKDASLRQFDVVLAWKSNRMGRNMLQAMMNEEQLRSNGIRTIYAEEDFDDTAAGRFALRNMMNVNQFYSENMAEDISRGLMDNASKCMSNGSLPLGYKTGKDQKVVLDEAEAAIVQEIFTRVSCYEPFIDIARDLNRRGIKTKKGAEWGRSSFHTICRNERYRGIYIYRDIRVEGGMPRIVSDELFYKVQEVLKVKKNPQGRRKRSGYEEYLLTGKLYCGHCGSPMTGIAGTSKTGAMHYYYTCQKRRTDHSCDKKAVRRDQIEKAVAIAIQQQLLTDENIQMMADETMAYNARTEIKYRLQSLQQQLYSNETSTANIMKAIEMGIITDTTKARLLALEQEHGQLLAKIDTAKAEMVPINREDFVSLLDIYRTGDVNNKKYLAALFDTFLVRVDLYDDHFKITFDPTGGKMPVDIPIGAEDSPESPGDSPESSDFEASPQDAEKFVLALHNRTKELQALA

SEQ ID NO: 3363 - protein, 529 aa, Unknown
  Description of Unknown: Integrase B3364 sequence
  cd00338,SM00857,G3DSA:1.10.10.2600,IPR036162,PS51737, G3DSA:3.40.50.1390,IPR006119,IPR038109,PF07508,IPR011109, SSF53041,PTHR30461,PS51736,Coil,PF00239
MYENLSFPYGSGTYAIYLRKSRKDLDAEALGEGETLARHLSILKALAQRMELNVVRVYAEVVSGESIDARPQMQELLRDVESGIYDGILVVEVERLARGDTSDQGRVAKTFKFSDTLIITPSKTYDPNNEYDEEYFEFGLFMSRREYKTIRRRLTAGHAASCREGKYTGNVPPYGYARKKLPKEKGWTLEIIPEQARAVRLIFDWYQNGLSGLPVGYTMIAEELNHLSIKSPAGGLWNRNSVQNVLRNPVYAGYIKAGYRKEVKKLVDGKMNRSRPLNTDYTLYPGRHEAIISQETWDAVHNRMLKRTAPSARKTRPQQNPLSGMIYCSQCHRIMQRRPYQNGRTAMLICTTAHCSTVSSDLPMVEQRILDALDSWLLSGTLPDPDQLPDHSGRIELLQHAATGCQEELHEADQQLQKQYDLLEKGIYDEETFFERSAIMKKKKSELTSRLKDLQAELQHEISQDASARNLLPTLQTIHDTYHTITDPAVQNSLLKEVIDHIEYTKSESGRWGRPDNFSLKIYPRVPPA

SEQ ID NO: 3364 - protein, 529 aa, Unknown
  Description of Unknown: Integrase B3365 sequence
  PTHR30461:SF3,SM00857,G3DSA:1.10.10.2600,IPR036162,PF13408, PS51737,G3DSA:3.40.50.1390,IPR025827,IPR006119,IPR038109, PF07508,IPR011109,SSF53041,PTHR30461, Coil,PS51736,cd00338,PF00239
MSRYCIYLRKSRADLEAEAHGEGETLSRHKTALLELARRMGITISATYEEIVSGETIAARPQMQRLLSEVGAGEWDGVLVMEIERLARGDTMDQGLVAQTFKYSGTKIITPLKTFDPQNEFDEEYFEFGLFMARREFTTTNRRLVRGREASAKEGKYVGSVPPYGYRKVKIPNDKGFTLEIIEEQAKVVRMIFEWYAEGAEVNSQKKRIGPYTIAVRLNELGIKSVAGKDYWTIYGVQHMLINPVYIGKIRWGYRKVKKTVTPEGMKKKSREFAQDGDYIVVDGLHEPILSEELFYKVQDLIAANPPTPIKYRHKNINPFAGLIFCAKCGHCMNYRRGYGRQPDYIGCYTAGCKNKASRFDLVEQRVLSILNSWVKDYSVDKAQIKHEADLNAELSNAISLAEKEIETLQDQLDKVYSFFERGTYTEKIFKQRSSAIEQQIMEIGEKIDRLKAEHQQVLERQNVQAEFVPSIKHLLEIYDTLEPVEKNKWLKQIIDRIVYEKNADGKYHNVDPGDFTIGILPRLPKRGS

SEQ ID NO: 3365 - protein, 529 aa, Unknown
  Description of Unknown: Integrase B3366 sequence
  cd00338,SM00857,G3DSA:1.10.10.2600,IPR036162,PF13408, PS51737,G3DSA:3.40.50.1390,IPR025827,IPR006119,IPR038109, PF07508,IPR011109,SSF53041,PTHR30461,PS51736, Coil,PF00239
MKFTSAWRIVDPLSQYIIYLRKSRKDMDAEALGQTDTLKRHRAALLSLAESRGLNVVEICEEVVTGDSIAVRPEVQKVLQLVETGAYAGVLVMEVERLARGDTIDQGIIAQTFKYSNTMIITPNKSYDPNNEMDEEYFEFGLFMSRREYNTIKRRLTRGKEASIREGKWISGKTPFGWLREKIPNDKGYMLVPHPEQAPILRQIYDWYTGDGCVRVGSSAIATRLNRLGVKTNTGSRWTASAILEVLRNPANAGWIKSKGRPEIKHIVDGSVVVSRPRARIEDLTLHKGLHNGLISQEQFDRAVALSYSTASPRGKGAWKTATSLAGLVRCDQCGRIMVRRATSGGRKDTFLCPSYGCSTVSAWYDEVETAVLDALRGWLHELEVGEAVSADDSSLLSALSSAISADQKQLAKLEAQETRAYEFVETGVYTPEVFLQRSQSLAADKLAILSRIDENQRAIDDIDRAKQTRARLAPAVRHVLETYPLAGSVQEQNDLLKTVLQKIVYHKQSKSYSKAGSDMRVTLYPLTD

SEQ ID NO: 3366 - protein, 529 aa, Unknown
  Description of Unknown: Integrase B3367 sequence
  SM00857,G3DSA:1.10.10.2600,IPR036162,PS51737,G3DSA:3.40.50.1390, mobidb-lite,IPR006119,IPR038109,PF07508,SSF53041, IPR011109,PTHR30461,Coil,PS51736,cd00338, PF00239
MPYCLYVRKSRADAEAEARGEGETLTRHINTLLELAKKRNFDVTQIYREIVSGETIAARPVMQQLLSEVEQGAWDGVLVMEVERLARGDTIDQGIVAQTFKYSDTKIITPIKDYNPNDEFDEEYFEFGLFMSRREYKTINRRLQRGRLASVKEGKYVASRPPYGYERVRIEHDKGFTLRPVEDEADIVRFIFQLYTTGEKQEDGSYHKLGMGAIAKRLNAMRVPAPNEAEHWQDGTIRVILKNPTYLGKVRWKTNQTRKKVIDGRVKKERVPAPASERVLSDGLHPALIDESVFYLAQEIMSSKGSVSIQEKRKIANPLAGVLTCGLCGRTMARHPTPLGAILYCPNNICKSVSSKYEIVEERLLEGIADWLKDYRLQWDDAPAEDLASPVEIKEKAIKKAESDIVTLEKQLARTHDLLEQGVYTTDTFLERSRSISARIEQAKSDVEVLRADIKDDRVREESKKTIIPKAERLLDVYASLPSAEEKNKVLKEVLEKAVYTKNKRSPRGSSGDNFELTLYPKLPYSSDK

SEQ ID NO: 3367 - protein, 529 aa, Unknown
  Description of Unknown: Integrase B3368 sequence
  SM00857,G3DSA:1.10.10.2600,IPR036162,PF13408,PS51737, G3DSA:3.40.50.1390,IPR025827,IPR006119,IPR038109,PF07508, SSF53041,IPR011109,PTHR30461,Coil,PS51736, cd00338,PF00239
MSNARIIEIPATRQIRSGKNNTMRKMRVAAYCRVSTEEEEQQGSFETQKLYYTEKINSTSEWELAGIYADDGISGIHTKKRDGFNQMIQDCKKKKIDLILTKSISRFARNTLDSIQYVRMLKAIGIAVIFEKENINTSTMNSEMILTVLSAFAQAESESISQNVARGKRMGFRQGKFPFPYGQILGYRKGLDGKPEVIPEEAEVIRMIFNSYLQGASLLTIKKKLEAGGVLTARGNKKWSSESVQRILQNEKYCGDVLLQKTFIEDVLTGVSKKNTGQLPQYYIENNHEGIVTKQMFREVQAEIARRNSKSAANQRKRHQGRYNSKYALSERLVCGDCGSPYKRVTWNIHGRKQIVWRCVNRLEYGTKFCSHSPSIPEEELHQAILKAVQNLAANFTDEVAAQLDGILRQMKAGENLKAQLQKQLEKAQQEFDRLLEMSLELDESTPFLDDKLRKLSGKIKILKANIAESTDGKGEDEEATKQLTAQDLLIKEYDDILTARIIEKVIVHSRQEIEIYFIGGYTQKIDLI

SEQ ID NO: 3368 - protein, 529 aa, Unknown
  Description of Unknown: Integrase B3369 sequence
  PTHR30461:SF3,cd00338,SM00857,G3DSA:1.10.10.2600,IPR036162, PF13408,PS51737,IPR025827,G3DSA:3.40.50.1390,IPR006119, IPR038109,PF07508,IPR011109,SSF53041,PTHR30461, PS51736,Coil,PF00239
MSSVDKIAVIYARYSSHGQTEQSIEGQIAAAQKYAEQHGYTIIHIYADRAMTGRNDDREQFQKMLSDTAMHQFGVILLWKIDRFGRNREEIAFNRYRCKKNGVRVERVAEDVPDGPEGVILDSVLEGMAEYYSLQLAQNVRRGQRESAKKSMSIGGNKMLGYVVNPETKRYESDPKTASYVTEIFKRYANGETISEIVTWLNAQGIRTTRGSEFTVNSLHRLLKNEKYTGVYIFHDIRNEGGMPALTDRATFDKVQEMLKVNRRAPVRVWSKTEYLLTDKLFCGHCGAIMVGESGHGRNGTKHSYYTCLNRKKKKSCDKKPVRQDVIEPLVLRAIGKLLENPATLENIADQVWAAYERSDTSGDTIKALDKQIADVDRALSNVMKAIEMGIINEMTKTRMDELTNQKQALSQSRAEAGLTEGFKLTRDMILFFLQEMAALDMADRDSQKRLIKTFVNAIYLYDDHFDIAFNYTDNGKVAVRMQEINDAASGEVFGCCAQSPTMLKATFNFTLDVAFIFCFVQCFPPCYS

SEQ ID NO: 3369 - protein, 529 aa, Unknown
  Description of Unknown: Integrase B3370 sequence
  PTHR30461:SF3,SM00857,G3DSA:1.10.10.2600,IPR036162,PF13408, PS51737,G3DSA:3.40.50.1390,IPR025827,IPR006119,IPR038109, PF07508,SSF53041,IPR011109,PTHR30461,Coil, PS51736,cd00338,PF00239
MKKFPIDLSCLTEEEISQFQEDPYTLYNGDQEVALYLRYSSTGQSDQSIEGQLRDCRAFCKANHYRIVAIYVDRATTARKDVGKRVHLMEMVADSAKQNWEYVIVWKLDRFARNRNDSAIMKMRLRKNGVKVLSATEHLTDSPESIILESVLEGMAEFFSAELSQKVTRGMRESALKCHSVGGHIPLGYKVENHKLVVDPDTAHIVQEAFSLYANGESVADICRKFNSAGYKTAKNTEFNRSSFKAMFRNTRYIGTYTYKDIVIENGIPAIIDKELFETVQRRLSKAATAPARGKAKVDYLLSGKLFCGHCGASMNGESGAGRHGKVYHYYSCYTKKRKLGCDKRPLKKDYIEGIVARDALNLLTDQLIDEIADMAIRQSEQDLINDTHIPQLTAQLSEVEKSITNITAAIEKGIASETLMNRLVQLEHEKKTLNKEIKAEEKFVYRIDRDQIVFWLSQFKYGNIEDEDFRRRLIDLLVNSVTVWDEPDGYKITTAYNLTSCKTKTFRVEKNPAAEEATGFDFGESECE

SEQ ID NO: 3370 - protein, 529 aa, Unknown
  Description of Unknown: Integrase B3371 sequence
  cd00338,SM00857,G3DSA:1.10.10.2600,IPR036162,PF13408, IPR025827,G3DSA:3.40.50.1390,PS51737,IPR006119,IPR038109, PF07508,SSF53041,IPR011109,PTHR30461,PS51736, Coil,PF00239
MKFTSTWKIADPLAQYIIYLRKSRKDMEAEALGQTDTLKRHRAALLSLSESRGLNVVEICEEVVTGDSIAVRPEVQKVLQLVETGNYAGVIVMEVERLARGDTIDQGIIAQTFKYSNTKIVTPNKVYDPNNEMDEEYFEFGLFMSRREYNTIKRRLSRGKEASLREGKWISGKTPFGWSREKLPNDKGYKLVPHPEQAPVLQQIYNWYTGDGCARIGAKAISTRLNSLGVPTNSGSLWRADSVLDILRNPANAGWIKSGGRPETKRIVDGSVVVSRPRTRQEDLKLYKGLHNGLISQEQYDKAVALSYSSASPRGKGAWGTVTSLAGLVRCDQCGRVMVRRPSSGTRRETLLCPSYGCTTVSAWYDDVEDAVLDALRGWLRELELGEAAAPDDTPMRTALESSIAADRKQLAKLEAQEARAYELVETGVYTPEIFLQRSQALAADKQVIVDRIEASQTTIHELARARQARARLAPAVRRVLETYPLAASPQEKNALLKTVLQKVLYHKQAKSYTKSGSDMHVTLYPLAD

SEQ ID NO: 3371 - protein, 529 aa, Unknown
  Description of Unknown: Integrase B3372 sequence
  PTHR30461:SF3,SM00857,G3DSA:1.10.10.2600,IPR036162,PF13408, IPR025827,PS51737,G3DSA:3.40.50.1390,IPR006119,IPR038109, PF07508,IPR011109,SSF53041,PTHR30461,Coil, PS51736,cd00338,PF00239
MSRYCIYLRKSRADLEAEAHGEGETLSRHKTALLELARRMGITISATYEEIVSGETIAARPQMQRLLSEVGAGEWDGVLVMEIERLARGDTMDQGLVAQTFKYSGTKIITPLKTFDPQNEFDEEYFEFGLFMARREFTTTNRRLVRGREASAKEGKYVGSVPPYGYRKVKIPNDKGFTLEIVEEQAKVVRMIFEWYAEGAEVNSQKKRIGPYTIAVRLNELGIKSAGKKDYWTIYGVQNMLINPVYIGKIRWGYRKVKKTVTPEGMKKKSREFAQDGDYIVVDGLHEPILSEELFYKVQDLIAANPPTPIKYRHKNINPFAGLIFCAKCGHCMNYRRGYGRQPDYIGCYTAGCKNKASRFDLVEQRVLSILNSWVKDYSVDKAQIKHEADLNAELSNAISLAEKEIETLQDQLDKVYSFFERGTYTEKIFKQRSSAIEQQIMEIGEKIDRLKAEHQQVLERQNVQAEFVPSIKHLLEIYDTLEPVEKNKWLKQIIDRIVYEKNADGKYHNVDPGDFTIGILPRLPKRGS

SEQ ID NO: 3372 - protein, 529 aa, Unknown
  Description of Unknown: Integrase B3373 sequence
  PTHR30461:SF3,SM00857,G3DSA:1.10.10.2600,IPR036162,PF13408, PS51737,G3DSA:3.40.50.1390,IPR025827,IPR006119,IPR038109, PF07508,SSF53041,IPR011109,PF00239,PTHR30461, PS51736,Coil,cd00338
MTIQKDNTALRAAVYVRYSSENQRDGYSIEYQLDECKKYIKEQQYEFLKAYVDEAVSGKSTNNRTAFFDLLADVKNGLYDVVVVYKYSRFARNLLEATLYRQQIEKNGAKLISAMERIDDSTPEGRMMRNIIMTMDEYYSDNLSTFVLSSMYTAAKSGKFLGGKYPYGYTVNDENKFIENKAEADIVRRVFDLRLAGMSPIDIVRTLHADGLRSRTGKRFTRSFISKMLTNERYIGTYKYEVSGYEPIIIENAFEGLISLDKWQAVQEIIKREKRAPYVKSRLRHRVYPLVGKIYCGKCGEPFRGNGRRIKDPETGELNREIVYYTCRGQHVHNNCDIGSVRKEVIEDFVFGKIKELILNENVINDIAEVVYKSVDNGENDLTEDISKLKKEKAQIERKLENLLDLFLDGEISKAILNKKSDELQTDLKDLNSRLQTMEFTAANEITVDRIHGFLLDMINQLETADDTVKKAIASQFIDKIIVYDTEVTVKLTVTPHFMTDKRSNGGALYSLSAIRKPSRQGTRPAPLR

SEQ ID NO: 3373 - protein, 529 aa, Unknown
  Description of Unknown: Integrase B3374 sequence
  PTHR30461:SF3,IPR036162,PS51737,IPR011109,PTHR30461, PF00239,G3DSA:1.10.10.2600,IPR006119,SSF53041,cd00338, SM00857,IPR025827,IPR038109,mobidb-lite,PS51736, PF13408,G3DSA:3.40.50.1390,PF07508,Coil
MKKRINTNSAARAVIYARYSSANQRDCSIEQQVEKCRELAAREGVTVIEIYADRAVSGKTDRRPNFQRMMKDASLRQFDVVLAWKSNRMGRNMLQAMMNEEQLRSNGIRTIYAEEDFDDTAAGRFALRNMMNVNQFYSENMAEDISRGLMDNASKCMSNGSLPLGYKTGKDQKVVLDEAEAAIVQEIFTRVSCYEPFIDIARDLNRRGIKTKKGAEWGRSSFHTICRNERYRGIYIYRDIRVEGGMPRIVSDELFYKVQEVLKVKKNPQGRRKRSGYEEYLLTGKLYCGHCGSPMTGIAGTSKTGAMHYYYTCQKRRTDHSCDKKAVRRDQIEKAVAIAIQQQLLTDENIQMMADETMAYNARTEIKYRLQSLQQQLYSNETSTANIMKAIEMGIITDTTKARLLALEQEHGQLLAKIDTAKAEMVPINREDFVSLLDIYRTGDVNNKKYLAALFDTFLVRVDLYDDHFKITFDPTGGKMPVDIPIGAEDSPESLGDSPESSDFEASPQDAEKFVLALHNRTKELQALA

SEQ ID NO: 3374 - protein, 529 aa, Unknown
  Description of Unknown: Integrase B3375 sequence
  PTHR30461:SF3,SM00857,G3DSA:1.10.10.2600,IPR036162,PF13408, PS51737,IPR025827,G3DSA:3.40.50.1390,IPR006119,IPR038109, PF07508,IPR011109,SSF53041,PTHR30461,Coil, PS51736,cd00338,PF00239
MSKYCIYLRKSRADLEAEAHGEGETLSRHKTALLELARRMGITISATYEEIVSGETIAARPQMQRLLSEVGAGEWDGVLVMEIERLARGDTMDQGLVAQTFKYSGTKIITPLKTFDPQNEFDEEYFEFGLFMARREFTTTNRRLVRGREASAKEGKYVGSIPPYGYRKVKIPNDKGFTLEIVEEQAKVVRMIFEWYAEGAEVNSQKKRIGPYTIAVRLNELGIKSAGKKDYWTIYGVQNMLINPVYIGKIRWGYRKVKKTVTPEGMKKKSREFAQDGDYIVVDGLHEPILSEELFYKVQDLIAANPPTPIKYRHKNINPFAGLIFCAKCGHCMNYRRGYGRQPDYIGCYTAGCKNKASRFDLVEQRVLSILNSWVKDYSVDKAQIKHEADLNAELSNAISLAEKEIETLQDQLDKVYSFFERGTYTEKIFKQRSSAIEQQIMEIGEKIDRLKAEHQQVLERQNVQAEFVPSIKHLLEIYDTLEPVEKNKWLKQIIDRIVYEKNADGKYHNVDPGDFTIGILPRLPKRGS

SEQ ID NO: 3375 - protein, 529 aa, Unknown
  Description of Unknown: Integrase B3376 sequence
  SM00857,G3DSA:1.10.10.2600,IPR036162,PS51737,G3DSA:3.40.50.1390, IPR006119,IPR038109,PF07508,IPR011109,SSF53041, PF00239,PTHR30461,PS51736,Coil,cd00338
MAYCIYLRKSRADRELENQGHGDTLKRHRDTLIELAKKKHLVIEEIYEEVVSGDSISARPQMQRLLNDVSEGKWQGVLVMEIERLARGDTSDQGIVTNTFTYSNTLIVTPLKTYNPADEFDQEYFEFGLYMSRREYKTIKRRLHAGMEASCREGNYIHHTPPFGYSRVKNEKSKGYHLEPKPGEAEIVKLIFQWYAKGELQPDGSCKPIGTSLIAHKLNTEYSIKPLNGVWTVSTLSSMLRNEHYLGYIVFGKSRRSKAVENGNVVNKWIRNEPGSYELYPGKHPALVSQDVFDMAQAKLSLNPRRPAKSITNPLAGVIKCGMCGRNMYRRPYVKRGQAASLICQEKTCHNVSSAFKLVEDALLSSIQEWIDGYELEEQHEKYNTDTLDSKIALLEESKKQIDKFKGQLEKIYESYESGIYDSATFLERQKLMSAKISDTEQSITNLNKEIQQEREFINNQEQIIPRAKKVLEIYRTCDDVQLKNDLIKSIVDKVVYVKTANGKFKDQKQEDFSLELFPKLPKNKGISD

SEQ ID NO: 3376 - protein, 529 aa, Unknown
  Description of Unknown: Integrase B3377 sequence
  cd00338,SM00857,G3DSA:1.10.10.2600,IPR036162, PF13408,IPR025827,G3DSA:3.40.50.1390,PS51737, IPR006119,IPR038109,PF07508,SSF53041, IPR011109,PTHR30461,PS51736,Coil,PF00239
MNFTSTWKIADPLAQYIIYLRKSRKDMEAEALGQTDTLKRHRAALLSLSESRGLNVVEICEEVVTGDSIAVRPEVQKVLQFVETGNYAGVIVMEVERLARGDTIDQGIIAQTFKYSNTKIITPNKIYDPNNEMDEEYFEFGLFMSRREYNTIKRRLSRGKEASLREGKWISGKTPFGWSREKLPNDKGYKLVPHPEQAPILQQIYNWYTGEGCARIGAKAISTRLNSLGVPTNSGSLWRADSVLDILRNPANSGWIKSGGRPETKRIVDGAVVVSRPRTRQEDLKLYKGLHDGLIPQEQYDKAVALSYSSASPRGKGSWGTVTSLAGLVRCEQCGRVMVRRPSSGNRRDTLLCPSYGCTTVSAWYDDVEDAVLDALRGWLRELELGEAAAPDDTPMRTALESSIAADRKQLAKLEAQEARAYELVETGVYTPEIFLQRSQALAADKQVIVDRIEASQTTITELARAKQARARLAPAVRRVLETYPLAASPQEKNALLKTVLQKVLYHKQTKSYTKSGSDMHVTLYPLAD

SEQ ID NO: 3377 - protein, 529 aa, Unknown
  Description of Unknown: Integrase B3378 sequence
  cd00338,SM00857,G3DSA:1.10.10.2600,IPR036162,PF13408, PS51737,G3DSA:3.40.50.1390,IPR025827,IPR006119,IPR038109, PF07508,SSF53041,IPR011109,PTHR30461,PS51736, Coil,PF00239
MNFTSTWKISDPLAQYIIYLRKSRKDMEAEALGQTDTLKRHRAALLSLSESRGLNIVEICEEVVTGDSIAVRPEVQKVLQLVETGNYAGVIVMEVERLARGDTIDQGIIAQTFKYSDTRIITPNKTYDPNNEMDEEYFEFGLFMSRREYNTIKRRLSRGKEASLREGKWISGKTPFGWSREKLPNDKGYKLVPHPEQAPVLQQIYNWYTGEGCARIGAKAISTRLNSLGVPTNSGSLWRADSVLDILRNPANAGWIKSGGRPETKRIVDGAVVVSRPRTRQEDLKLYKGLHDGLISQEQYDKAVALSYSSASPRGKGAWGTVTSLAGLVRCDQCGRVMVRRPSSGNRRDTLLCPSYGCTTVSAWYDDVEDAVLDALRGWLRELELGEAAAPDDTPMRTALESSIAADRKQLAKLEAQEARAYELVETGVYTPEIFLQRSQALAADKQVIVDRIEASQTTIHELARARQARARLAPAVRRVLETYPLAASPQEKNALLKTVLQKVLYHKQTKSYTKSGSDMHVTLYPLAD

SEQ ID NO: 3378 - protein, 529 aa, Unknown
  Description of Unknown: Integrase B3379 sequence
  cd00338,SM00857,G3DSA:1.10.10.2600,IPR036162,PF13408, IPR025827,G3DSA:3.40.50.1390,PS51737,IPR006119,IPR038109, PF07508,SSF53041,IPR011109,PTHR30461,PS51736, Coil,PF00239
MNFTSTWKIADPLAQYIIYLRKSRKDMEAEALGQTDTLKRHRAALLSLSESRGLNVVEICEEVVTGDSIAVRPEVQKVLQLVETGNYAGVIVMEVERLARGDTIDQGIIAQTFKYSNTKIVTPNKVYDPNNEMDEEYFEFGLFMSRREYNTIKRRLSRGKEASLREGKWISGKTPFGWSREKLPNDKGYKLVPHPEQAPILQQIYSWYTGEGCARIGSSAIATRLNNLGVKTNSGNAWTASAVLDTLRNPANAGWIKSGGRPETKRIVDGSVVVSRPRTRQEDLNLYKGLHDGLISQEQYDKAVALSYSSGSPRGKGAWQTMTSLAGLVRCDQCGRVMVRRPSSGGRRDAFMCPSPDCPTVSAWYEDVEDAVLDALRGWLHELEVGEAERSDEHSLLDALAASISADQKQLAKLEAQEARAYEFVETGVYTPEIFLQRSQALAADKQVIISRIEENQLAQDEITRAKQARTRLAPAVRHVLETYPLAATPQDKNDLLKTVLQKVLYHKQSKSYSKAGSDMRVTLYPLTD

SEQ ID NO: 3379 - protein, 529 aa, Unknown
  Description of Unknown: Integrase B3380 sequence
  SM00857,G3DSA:1.10.10.2600,IPR036162,PF13408,PS51737, G3DSA:3.40.50.1390,IPR025827,IPR006119,IPR038109,PF07508, IPR011109,SSF53041,PF00239,PTHR30461,PS51736, Coil,cd00338
MNFTSTWKIADPLAQYIIYLRKSRKDMEAEALGQTDTLKRHRAALLSLSESRGLNVVEICEEVVTGDSIAVRPEVQKVLQLVETGNYAGVIVMEVERLARGDTIDQGIIAQTFKYSNTKIITPNKIYDPNNEMDEEYFEFGLFMSRREYNTIKRRLSRGKEASLREGKWISGKTPFGWSREKLPNDKGYKLVPHPEQAPVLQQIYNWYTGEGCARIGAKAISTRLNSLGVPTNSGSLWRADSVLDILRNPANAGWIKSGGRPETKRIVDGSVVVSRPRTRQEDLRLYKGLHDGLISQEQYDKAVALSYSSASPRGKGAWGTVTSLAGLVRCDQCGRVMVRRPSSGGRRDTLLCPSYGCATVSAWYEDVEDAVLDALRGWLRELELGEAAAPDDTPMRTALESSIAADRKQLAKLEAQEARAYELVETGVYTPEVFLQRSQALAADKQVIVDRIEASQTTITELARAKQARARLAPAVRHVLETYPLAATPQDKNDLLKTVLQKVLYHKQSKSYSKAGSDMRVTLYPLTD

SEQ ID NO: 3380 - protein, 529 aa, Unknown
  Description of Unknown: Integrase B3381 sequence
  SM00857,G3DSA:1.10.10.2600,IPR036162,PF13408,PS51737, IPR025827,G3DSA:3.40.50.1390,IPR006119,IPR038109,PF07508, IPR011109,SSF53041,PTHR30461,Coil,PS51736, cd00338,PF00239
MPYCLYLRKSRADIDAEANGEMETLARHEKILLDLAKRMHLDVTEIYREVVSGETISSRPVVQHLLTEVENEMWDGVLVVEIERLARGDTIDQGIVSRAFKFSNTKIITPLKTYDPNNEYDEEYFEFGLFMSRREYKTIRRRLTQGRMSSAKEGKHTGSKAPYGYDRIHVESGKGYTLSPNEKETPIVKMIFDWFVNGQLQEDGSYRKLGAHAIAHRLTNLSIDSPTGNPTWNPRSVYWILHNPVYTGKIRWGYKKDKKIIVDGAVKRTRIIPPEEEQILVEGLHPAIISDEIFNQAQELFLRRGNPSVVIEKELKNPLAGVVVCGICGRPLRYRSNANRRDFGVECRTYGCPCKGSYIYIVEKRIIDALRDWVNEYKLSWDDMPREMHSLLIVKEQAYNAAIKELNTLTKQLDKTHDLLEQGIYDTETFLIRSKSLSEKIAESEKNIAKLSADINNEKLRENNRKNLIPKVENLIDIYWQLPNASAKNDMLKEVLEKVEYTKLHTVGRSKTKKLDDFDLVLYPKLPRT

SEQ ID NO: 3381 - protein, 529 aa, Unknown
  Description of Unknown: Integrase B3382 sequence
  cd00338,SM00857,G3DSA:1.10.10.2600,IPR036162,PF13408, IPR025827,G3DSA:3.40.50.1390,PS51737,IPR006119,IPR038109, PF07508,SSF53041,IPR011109,PTHR30461,PS51736, Coil,PF00239
MKFTSTWKIADPLAQYIIYLRKSRKDMEAEALGQTDTLKRHRAALLSLSESRGLNVVEICEEVVTGDSIAVRPEVQKVLQFVETGNYAGVIVMEVERLARGDTIDQGIIAQTFKYSNTKIITPNKIYDPNNEMDEEYFEFGLFMSRREYNTIKRRLSRGKEASLREGKWISGKTPFGWLREKLPNDKGYKLVPHPEQAPVLRQIYNWYTGEGCARIGAKAISTRLNSLGVPTNSGSLWRADSVLDILRNPANAGWIKSGGRPETKRIVDGAVVVSRPRTRQEDLKLYKGLHDGLISQEQYDKAVALSYSSASPRGKGAWGTVTSLAGLVRCDQCGRVMVRRPSSGNRRDTLLCPSYGCTTVSAWYDDVEDAVLDALRGWLRELELGEAAAPDDTTMRTALESSIAADRKQLAKLEAQEARAYELVETGVYTPEIFLQRSQALAADKQVIVDRIEASQTTIHELARARQARARLAPAVRRVLETYPLAASPQEKNALLKTVLQKVLYHKQTKSYTKSGSDMHVTLYPLAD

SEQ ID NO: 3382 - protein, 529 aa, Unknown
  Description of Unknown: Integrase B3383 sequence
  PTHR30461:SF3,SM00857,G3DSA:1.10.10.2600,IPR036162,PS51737, G3DSA:3.40.50.1390,IPR006119,IPR038109,PF07508,IPR011109, SSF53041,PTHR30461,Coil,PS51736,cd00338, PF00239
MSRYCIYLRKSRADLEAEAHGEGETLSRHKTALLELARRMGITISATYEEIVSGETIAARPQMQRLLSEVGAGEWDGVLVMEIERLARGDTMDQGLVAQTFKYSGTKIITPLKTFDPQNEFDEEYFEFGLFMARREFTTTNRRLVRGREASAKEGKYVGSVPPYGYRKVKIPNDKGFTLEIIEEQAKVVRMIFEWYAEGAEVNGQKKRIGPYTIAVRLNELGIKSVAGKDYWTIYGVQHMLINPVYIGKIRWGYRKVKKTVTPEGMKKKSREFAQDGDYIVVDGLHEPILSEELFYKVQDLIAANPPTPIKYRNNNVNPFAGLIFCAKCGHCLSYRKGYGRHPGYLGCNIAGCDNKAAPFELIEQRVLSILNSWVKDYSVDKAQIKHEADLNVELSNAISLAEKEIETLQDQLDKVYSFFERGTYTEKIFKQRSSAIEQQITDIGEKIDRLKAEHQQVLERQNVQAEFVPSIKHLLEIYDTLEPVEKNKWLKQIIDHMVYEKNADGKYRNVDPGDFTLGILPRLPKKGS

SEQ ID NO: 3383 - protein, 529 aa, Unknown
  Description of Unknown: Integrase B3384 sequence
  cd00338,SM00857,G3DSA:1.10.10.2600,IPR036162,PF13408, PS51737,G3DSA:3.40.50.1390,IPR025827,IPR006119,IPR038109, PF07508,IPR011109,SSF53041,PTHR30461,PS51736, Coil,PF00239
MKFTSTWKIADPLSQYIIYLRKSRKDMDAEALGQTDTLKRHRAALLSLAESRGLNIVEICEEVVTGDSIAVRPEVQKVLQLVETGAYAGVLVMEVERLARGDTIDQGIIAQTFKYSNTMIITPNKSYDPNNEMDEEYFEFGLFMSRREYNTIKRRLTRGKEASIREGKWISGKTPFGWLREKIPNDKGYMLVPHPEQAPILRQIYDWYTGDGCVRVGSSAIATRLNRLGVKTNTGSRWTASAILEVLRNPANAGWIKSKGRPEIKHIIDGSVVVSRPRTRIEDLTLHKGLHNGLISQEQFDRAVALSYSTASPRGKGAWKTATSLAGLVRCDQCGRIMVRRATSGGRKDTFLCPSYGCSTVSAWYDEVETAVLDALRGWLHELEVGEAVSADDSSLLSALSSAISADQKQLAKLEAQETRAYEFVETGVYTPEVFLQRSQSLAADKLAILSRIDENQRAIDDIDRAKQTRARLAPAVRHVLETYPLAGSVQEQNDLLKTVLQKIVYHKQSKSYSKAGSDMRVTLYPLTD

SEQ ID NO: 3384 - protein, 529 aa, Unknown
  Description of Unknown: Integrase B3385 sequence
  cd00338,SM00857,G3DSA:1.10.10.2600,IPR036162,PS51737, G3DSA:3.40.50.1390,IPR006119,IPR038109,PF07508,IPR011109, SSF53041,PTHR30461,PS51736,Coil,PF00239
MEQYCLYLRKSRSDIEAENHGEEETLARHEKILLELAKRREYNVTQIYREVVSGETIAARPVMQQLLSEVEHGLWSGVLVVEVERLARGDTIDQGIVAQTFKYSDTQIITPMKTYNPNNEFDEEYFEFGLFMSRREYKTINRRLQRGRLSSVKEGKYVNSIAPYGYERVKIKGEKGFTLAPDPNEANVIKMIFELYTRGELQPDGTYKRLGVSLLAGKLNSMKIPARKSEYWVPASIKDMLRNPVYAGKIRWNCRAVIKKMKSGNINISRPRSEESDCIIVKGLHPALVTQETFDLAQEYLAKNPPRPTKRNAPTKNPLSGVVVCAFCGRRLVRRPYTSATPPTLMCTVPQCPNISSFLHLVEERILKALEEWLRNYKLQWNLSDKSSELISEAEILRQSLKDINLQITKLNKQMIKAHELLEQDIYTTDVFLERSRAITEKQNQLSSDRAEIEKQLGIESTREKSTKEIIPKVEKLLDVYYDLPTAQEKNDMLKEVLEKVVYKKTQNTRWSGSPDDFEITIYPKLPKS

SEQ ID NO: 3385 - protein, 529 aa, Unknown
  Description of Unknown: Integrase B3386 sequence
  cd00338,SM00857,G3DSA:1.10.10.2600,IPR036162, PF13408,IPR025827,G3DSA:3.40.50.1390,PS51737, IPR006119,IPR038109,PF07508,SSF53041, IPR011109,PTHR30461,PS51736,Coil,PF00239
MKFTSAWRIVDPLSQYIIYLRKSRKDMDAEALGQTDTLKRHRAALLSLAESRGLNVVEICEEVVTGDSIAVRPEVQKVLQLVETGAYAGVLVMEVERLARGDTIDQGIIAQTFKYSNTMIITPNKIYDPNNEMDEEYFEFGLFMSRREYNTIKRRLSRGKEASLREGKWISGKTPFGWSREKLPNDKGYKLVPHPEQAPVLQQIYNWYTGEGCARIGAKAISTRLNSLGVPTNSGSLWRADSVLDILRNPANAGWIKSGGRPETKRIVDGAVVVSRPRTRQEDLKLYKGLHDGLISQEQYDKAVALSYSSASPRGKGAWGTVTSLAGLVRCDQCGHVMVRRPSSGNRRDTLLCPSYGCTTVSAWYDDVEAAVLDALRGWLRELELGEAAAPDDTPMRTALESSIAADRKQLAKLEAQEARAYELVETGVYTPEIFLQRSQALAADKQVIVDRIEASQTTIHELARARQARARLAPAVRRVLETYPLAASPQEKNALLKTVLQKVLYHKQTKSYTKSGSDMHVTLYPLAD

SEQ ID NO: 3386 - protein, 529 aa, Unknown
  Description of Unknown: Integrase B3387 sequence
  cd00338,SM00857,G3DSA:1.10.10.2600,IPR036162,PF13408, IPR025827,G3DSA:3.40.50.1390,PS51737,IPR006119,IPR038109, PF07508,IPR011109,SSF53041,PTHR30461,PS51736, Coil,PF00239
MKFTSTWKIADPLAQYIIYLRKSRKDMEAEALGQTDTLKRHRAALLSLSESLGLNVVEICEEVVTGDSIAVRPEVQKVLQLVETGNYAGVIVMEVERLARGDTIDQGIIAQTFKYSDTRIITPNKTYDPNNEMDEEYFEFGLFMSRREYNTIKRRLSRGKEASLREGKWISGKTPFGWLREKLPNDKGYKLVPHPEQAPILQQIYDWYTGDGCTRIGSFAIATRLNHLGVKTNSGSAWTASAVLDTLRNPANAGWIKSGGRPETKRIVDGSVVVSRPRTRQEDLRLYKGLHDGLISQEQYDKAVALSNSSGSPRGKGAWQTVTSLAGLIRCDQCGRVMVRRPSSGGRRDAFMCPSPDCPTVSAWYEDVEGAVLDALRGWLHELEVGNSESSDDHSLLDALAASISADQKQLAKLEVQEARAYEFVETGVYTPEIFLQRSQALAADKQVIISRIEENQRAQDEITRAKQARARLAPAVRHVLETYPLAATPQDKNELLKTVLQKVLYHKQSKSHSKSGSDMRVTLYPLTD

SEQ ID NO: 3387 - protein, 529 aa, Unknown
  Description of Unknown: Integrase B3388 sequence
  PTHR30461:SF3,SM00857,G3DSA:1.10.10.2600,IPR036162,PF13408, IPR025827,G3DSA:3.40.50.1390,PS51737,IPR006119,IPR038109, PF07508,IPR011109,SSF53041,PF00239,PTHR30461, PS51736,Coil,cd00338
MSSVETTAVVYARYSSHGQTEQSIEGQIAAAQKYAEQHGYTIIHIYADRAMTGRNDDREEFQKMLSDTATRQFGVILLWKIDRFGRNREEIAFNRYRCKKNGVRVERVAEDVPDGPEGVILDSVLEGMAEYYSLQLAQNVRRGQRESAKKSQTVGGCKIIGYNVNSDTKRYEVDPKTAPFVTEVFKRYANGETISEIVAWLNAQGVRTTRGGEFTVNSLHRLLKNEKYTGVYIFHDIRNEGGMPALIDRATFDKAQEMLKVNRRAPARVWSKTEYLLTDKLFCGHCGTMMVGESGHGRNGTKHNYYTCWNRKKKKTCDKKPIRQDVIEPLVLRAIGKLLENPATLENIADQVWAAYERSDTSGDTIKALDKQIADVDRALSNVMKAIEMGIINEMTKARMDELTDQKQALSAARAEAGLAGGFKLTRDMILFFLQDMAALDRSNRDSQKRLIKTFVNAIYLYDDHFNIAFNYTDNGKMTVRMQEIDDAASGDVFGRCAQSPAIVQTSEPLITIVVSCSVFVFSVKMPEA

SEQ ID NO: 3388 - protein, 529 aa, Unknown
  Description of Unknown: Integrase B3389 sequence
  cd00338,SM00857,G3DSA:1.10.10.2600,IPR036162,PF13408, IPR025827,G3DSA:3.40.50.1390,PS51737,IPR006119,IPR038109, PF07508,IPR011109,SSF53041,PTHR30461,PS51736, Coil,PF00239
MKFTSTWKISDPLAQYIIYLRKSRKDMEAEALGQTDTLKRHRAALLSLSESRELNVVEICEEVVTGDSIAVRPEVQKVLQLVETGNYAGVIVMEVERLARGDTIDQGIIAQTFKYSNTKIITPNKIYDPNNEMDEEYFEFGLFMSRREYNTIKRRLSRGKEASLREGKWISGKTPFGWLREKLPNDKGYKLVPHPEQAPVLQQIYNWYTGEGCVRIGAKAISTRLNSLGVPTNSGSLWRADSVLDILRNPANAGWIKSGGRPETKRIVDGAVVVSRPRTRQEDLKLYKGLHDGLISQEQYDKAVALSYSSASPRGKGAWGTVTSLAGLVRCDQCGRVMVRRPSSGNRRDTLLCPSYGCTTVSAWYDDVEDAVLDALRGWLRELELGEAAAPDDTPMRTALESSIAADRKQLAKLEAQEARAYELVETGVYTPEIFLQRSQALAADKQVIVDRIEASQTTIHELARARQARARLAPAVRRVLETYPLAASPQEKNALLKTVLQKVLYHKQTKSYTKSGSDMHVTLYPLAD

SEQ ID NO: 3389 - protein, 529 aa, Unknown
  Description of Unknown: Integrase B3390 sequence
  cd00338,SM00857,G3DSA:1.10.10.2600,IPR036162,PS51737, G3DSA:3.40.50.1390,IPR006119,IPR038109,PF07508,SSF53041, IPR011109,PTHR30461,PS51736,Coil,PF00239
MEQYLIYLRKSRSDLEAEAHGEGETLSRHEHTLLELAKRQHLNVTDIYREVVSGDTIAARPMMQRVLSEVEQGVWSGVLVMEVERLARGDTIDQGIIAQTFKFSGTKIITPIKTYDPDNEFDEEYFEFGLFMSRREYKIINRRLQRGRLASAKEGKWPSGLAPFGYRRVKLKNEKGCSLEPIEEQAAIVRMIFDLYTVGLQDEDSSARPLSLGSIATRLNDMHIPSPSGSQWARITIRGIIKNPTYIGMVRWGSRETKKKVVDGKVVSVRGPADPEKECVFKGIHPPLVPKETFELANDKLARSENTSTHKEKVVRNPLAGLLVCSECGRQMMRIINPVHPDMPVVRCPRRGCPNCSSYLPIVEERVIQGLSEWMKGYELEWSSAAASSSVSSVGVREKALASAEAELRKLQQQLERTHDFLEQGIYDTDTFLSRSRMLSDKIAAAKDSVTRCSRELTEEKLRETSRRDIIPKVKNLLDVYPLLETAEEKNALLKEVLEKVVYQKLNEKRKKSPDGFTIEIYPRIPKSE

SEQ ID NO: 3390 - protein, 529 aa, Unknown
  Description of Unknown: Integrase B3391 sequence
  cd00338,SM00857,G3DSA:1.10.10.2600,IPR036162, PF13408,PS51737,G3DSA:3.40.50.1390,IPR025827, IPR006119,IPR038109,PF07508,IPR011109, SSF53041,PTHR30461,PS51736,Coil,PF00239
MKFTSAWRIVDPLSQYIIYLRKSRKDMDAEALGQTDTLKRHRAALLSLAESRGLNVVEICEEVVTGDSIAVRPEVQKVLQLVETGAYAGVLVMEVERLARGDTIDQGIIAQTFKYSNTMIITPNKSYDPNNEMDEEYFEFGLFMSRREYNTIKRRLTRGKEASIREGKWISGKTPFGWLREKIPNDKGYMLVPHPEQAPILRQIYDWYTGDGCVRVGSSAIATRLNRLGVKTNTGSRWTASAILEVLRNPANAGWIKSKGRPEIKHIVDGSVVVSRPRARIEDLTLHKGLHNGLISQEQFDRAVALSYSTASPRGKGAWKTATSLAGLVRCDQCGRIMVRRATSGGRKDTFLCPSYGCSTVSAWYDEVETAVLDALRGWLHELEVGEAVSADDSSLLSALSSAISADQKQLAKLEAQETRAYEFVETGVYTPEVFLQRSQSLAADKLAILSRIDENQRAIDDIDRAKQARARLAPAVRHVLETYPLAGSVQEQNDLLKTVLQKIVYHKQSKSYSKAGSDMRVTLYPLTD

SEQ ID NO: 3391 - protein, 529 aa, Unknown
  Description of Unknown: Integrase B3392 sequence
  SM00857,G3DSA:1.10.10.2600,IPR036162,PF13408,PS51737, G3DSA:3.40.50.1390,IPR025827,IPR006119,IPR038109,PF07508, IPR011109,SSF53041,PF00239,PTHR30461,PS51736, Coil,cd00338
MKFTSTWKISDPLAQYIIYLRKSRKDMEAEALGQTDTLKRHRAALLSLSESRGLNVVEICEEVVTGDSIAVRPEVQKVLQLVETGNYAGVIVMEVERLARGDTIDQGIIAQTFKYSNTKIVTPNKVYDPNNEMDEEYFEFGLFMSRREYNTIKRRLSRGKEASLREGKWISGKTPFGWLREKLPNDKGYKLVPHPEQAPVLQQIYNWYTGEGCARIGVKAISTRLNSLGVPTNSGSLWRADSVLDVLRNPANAGWIKSGGRPETKRIVDGAVVVSRPRTRQEYLKLYKGLHDGLISQEQYDKAVALSYSSASPRGKGAWGTVTSLAGLVRCDQCGRVMVRRPSSGNRRDTLLCPSYGCTTVSAWYDDVEDAVLDALRGWLRELELGEAAAPDDTPMRTALESSIAADRKQLAKLEAQEARAYELVETGVYTPEIFLQRSQALAADKRVIVDRIEASQTTIHELARARQARARLAPAVRRVLETYPLAASPQEKNALLKTVLQKILYHKQTKSYTKSGSDMHVTLYPLAD

SEQ ID NO: 3392 - protein, 529 aa, Unknown
  Description of Unknown: Integrase B3393 sequence
  cd00338,SM00857,G3DSA:1.10.10.2600,IPR036162,PF13408, IPR025827,G3DSA:3.40.50.1390,PS51737,IPR006119,IPR038109, PF07508,SSF53041,IPR011109,PTHR30461,PS51736, Coil,PF00239
MKFTSTWKIADPLAQYIIYLRKSRKDMEAEALGQTDTLKRHRAALLSLSESRGLNVVEICEEVVTGDSIAVRPEVQKVLQLVETGNYAGVIVMEVERLARGDTIDQGIIAQTFKYSDTRIITPNKTYDPNNEMDEEYFEFGLFMSRREYNTIKRRLSRGKEASMREGKWISGKTPFGWSREKLPNDKGYKLVPHPEQAPVLQQIYNWYTGEGCARIGAKAISTRLNSLGVPTNSGSLWRADSVLDILRNPANAGWIKSGGRPETKRIVDGAVVVSRPRTRQEDLKLYKGLHNGLISQEQYDKAVALSYSSASPRGKGAWGTVTSLAGLVRCDQCGRVMVRRPSSGNRRDTLLCPSYGCTTVSAWYDDVEDAVLDALRGWLRELELGEAAAPDDTPMRTALESSIAADRKQLAKLEAQEARAYELVETGVYTPEIFLQRSQALAADKQVIVDRIEASQTTITELARAKQARARLAPAVRRVLETYPLAASPQEKNALLKTVLQKVLYHKQTKSYTKSGSDMHVTLYPLAD

SEQ ID NO: 3393 - protein, 529 aa, Unknown
  Description of Unknown: Integrase B3394 sequence
  PTHR30461:SF3,SM00857,G3DSA:1.10.10.2600,IPR036162,PF13408, PS51737,IPR025827,G3DSA:3.40.50.1390,IPR006119,IPR038109, PF07508,IPR011109,SSF53041,PTHR30461,Coil, PS51736,cd00338,PF00239
MSRYCIYLRKSRADLEAEAHGEGETLSRHKTALLELARRMGITISATYEEIVSGETIAARPQMQRLLSEVGAGEWDGVLVMEIERLARGDTMDQGLVAQTFKYSGTKIITPLKTFDPQNEFDEEYFEFGLFMARREFTTTNRRLVRGREASAKEGKYVGSVPPYGYRKVKIPNDKGFTLEIVEEQAKVVRMIFEWYAEGAEVNDQKKRIGPYTIAVRLNELGIKSAGKKDYWTIYGVQNMLINPVYIGKIRWGYRKVKKTVTPEGMKKKSREFAQDGDYIVVDGLHEPILSEELFYKVQNLIAANPPTPIKYRHKNINPFAGLIFCAKCGHCMNYRRGYGRQPDYIGCYTAGCKNKASRFDLVEQRVLSILNSWVKDYSVDKAQIKHEADLNAELSNAISLAEKEIETLQDQLDKVYSFFERGTYTEKIFKQRSSAIEQQIMEIGEKIDRLKAEHQQVLERQNVQAEFVPSIKHLLEIYDTLEPVEKNKWLKQIIDRIVYEKNADGKYHNVDPGDFTIGILPRLPKRGS

SEQ ID NO: 3394 - protein, 529 aa, Unknown
  Description of Unknown: Integrase B3395 sequence
  PTHR30461:SF3,cd00338,SM00857,G3DSA:1.10.10.2600,IPR036162, PS51737,G3DSA:3.40.50.1390,IPR006119,IPR038109,PF07508, SSF53041,IPR011109,PTHR30461,PS51736,Coil, PF00239
MSKYCIYLRKSRADLEAEAHGEGETLSRHKTALLELARRKGITISATYEEIVSGETIAARPQMQRLLSEVGAGEWDGVLVMEIERLARGDTMDQGLVAQTFKYSGTKIITPLKTFDPQNEFDEEYFEFGLFMARREFTTTNRRLVRGREASAKEGKYVGSVPPYGYRKVKIPNDKGFTLEIIEEQAKVVRMIFEWYAEGAEVNGQKKRIGPYTIAVRLNELGIKSVAGKDYWTIYGVQHMLINPVYIGKIRWGYRKVKKTVTPEGMKKKSREFAQDGNYIVVDGLHEPILSEELFYKVQDLIAANPPTPIKYRNNNINPFAGLIFCAKCGHCLSYRKGYGRHPGYLGCNIAGCNNKAAPFELIEQRVLSILNSWVKDYSVDKAQIKHEADLNAELSNAISLAEKEIETLQDQLDKVYSFFERGTYTEKIFKQRSSAIEQQITDISEKIDRLKSEHQQVLERQNVQAEFVPSIKHLLEIYDTLEPVEKNKWLKQIIDRMVYEKNANGKYRNVDPGDFTLGILPRLPKKGS

SEQ ID NO: 3395 - protein, 529 aa, Unknown
  Description of Unknown: Integrase B3396 sequence
  PTHR30461:SF3,SM00857,G3DSA:1.10.10.2600,IPR036162,PF13408, IPR025827,PS51737,G3DSA:3.40.50.1390,IPR006119,IPR038109, PF07508,SSF53041,IPR011109,PF00239,PTHR30461, PS51736,Coil,cd00338
MSSVDKIAVVYARYSSHGQTEQSIEGQIAAAQKYAEQHGYTIIHIYADRAMTGRNDDREEFQRMLSDTATHQFGVILLWKIDRFGRNREEIAFNRYRCKKNGVRVERVAEDVPDGPEGVILDSVLEGMAEYYSLQLAQNVRRGQRESAKKSQTVGGCKIIGYNVNPDTKRYEVDPKTAPFVTEVFKRYANGETISEIVAWLNAQGVRTTRGGEFTVNSLHRLLKNEKYTGVYIFHDIRNEGGMPALIDHATFDKVQEMLKVNRRAPARVWSKTEYLLTDKLFCGHCGAMMVGESGHGRNGTKHNYYTCWNRKKKKSCDKKPVRQDVIESLVLRSIGKLLENPATLENIADQVWAAYERSDTSGDTIKALDKQIADVDRALSNVMKAIEMGIINEMTKARMDELTDQKQALSAARAEAGLAGGFKLTRDMILFFLQEIAALDMADRDSQKRLIKTFVNAIYLYDDHFDIAFNYTDNGKVVVRMQEINDAACGEVFGRCAQSPAIVQTSEPLITVVVSCSVFVFSVKMPEA

SEQ ID NO: 3396 - protein, 529 aa, Unknown
  Description of Unknown: Integrase B3397 sequence
  cd00338,SM00857,G3DSA:1.10.10.2600,IPR036162,PF13408, IPR025827,G3DSA:3.40.50.1390,PS51737,IPR006119,IPR038109, PF07508,SSF53041,IPR011109,PTHR30461,PS51736, Coil,PF00239
MKFTSTWKIADPLAQYIIYLRKSRKDMEAEALGQTDTLKRHRAALLSLSESRGLNVVEICEEVVTGDSIAVRPEVQKVLQLVETGNYAGVIVMEVERLARGDTIDQGIIAQTFKYSDTRIITPNKTYDPNNEMDEEYFEFGLFMSRREYNTIKRRLSRGKEASLREGKWISGKTPFGWLREKLPNDKGYKLVPHPEQAPVLQQIYNWYTGEGCARIGAKAISTRLNSLGVPTNSGSLWRADSVLDILRNPANAGWIKSGGRPETKRIVDGAVVVSRPRTRQEDLKLYKGLHDGLISQEQYDKAVALSYSSASPRGKGAWGTVTSLAGLVRCDQCGRVMVRRPSSGNRRDTLLCPSYGCTTVSAWYDDVEDAVLDALRGWLRELELGEAAAPDDTPMRTALESSIAADRKQLAKLEAQEARAYELVETGVYTPEIFLQRSQALAADKQVIVDRIEASQTTIHELARARQARARLAPAVRRVLETYPLAASPQEKNDLLKTVLQKVLYHKQTKSYTKSGSDMHVTLYPLAD

SEQ ID NO: 3397 - protein, 529 aa, Unknown
  Description of Unknown: Integrase B3398 sequence
  PTHR30461:SF3,cd00338,SM00857,G3DSA:1.10.10.2600,IPR036162, PF13408,IPR025827,G3DSA:3.40.50.1390,PS51737,IPR006119, IPR038109,PF07508,IPR011109,SSF53041,PTHR30461, PS51736,Coil,PF00239
MQRAVIYARYSPGPNQTEQSIEGQVRECTKYAEQHDLRIVGTYVDRKISGKTDNRREFQRMIDDSEKHIFDVIILYHTDRFARNRYDSAIYKHKLKENGVELRYATTDIPKGPEGIILESIMEGWAEYYSAELSRKIKRGMRESALKCHSTGAGRCLGYRTAEDKSLVIEPEGAKAVQTVFDMYIKGKSHADICRYLNDCGFRTAQGKLFNKNSVTHIIRNKRYIGVYTYDDITIEDGIPAIISKDTFHLAQLEAARRKTVKRPKEPKAEYLLSGKAFCGHCQKPLVGVSGTGKSGNKWYYYYCQESRAKRGCTKRPVKRDWLEREVVKRTIAEVLQPEVIQHIAKKCYDLQMEYRQDNSDVLFYELKLKDVRKAIKNTMHAIESGVKTKTLPARLQELENEEEALEAELAIAKASDFVITADQIEFLLTQFAEPWECESEEEYHRRIIKCFVHKVFLFDDKLLIHYNVSRDGKTREQSEAELLEEALGEGFDKRSSGSTILIAGRTPECEIIVLRYGFWLALDLTVQA

SEQ ID NO: 3398 - protein, 529 aa, Unknown
  Description of Unknown: Integrase B3399 sequence
  PTHR30461:SF3,SM00857,G3DSA:1.10.10.2600,IPR036162,PF13408, IPR025827,G3DSA:3.40.50.1390,PS51737,IPR006119,IPR038109, PF07508,SSF53041,IPR011109,PF00239,PTHR30461, PS51736,Coil,cd00338
MKKIAIYSRKSVFTGKGESVENQIALCKDYCEKFLRYDNADYIVYEDEGFSGKNINRPQFKLLLDDIKKHKIDILVCYRLDRISRSVADFASTLEILNKYNVDFLSIREKFDTTSANGRAMLNISATFAQLERETIAERVKDNMLQMAKNGYWTGGQLPLGYDSIRYSTIDGTGKERSYSKLKENIKELDVVRLIYSEFLKNNSILDITKLLNENNLKGKNRCDFDRTQVKRILRNPLYVKSSDLTNLYLSNNYSVYGIANGNGYLTYNKSKAKDKWIVSVANHKGIIEDTNWLLVQKILDNNATKVSNRTGTGTGDNTSLFSGILKCSECGENMVIKYNNKNKYGNPNLYYICSSKTRKFTSKCKTKNLNVKATDIKILEDIKSYNKEVLIKKYEEYINELIANNNTGLKENLKEQIKHKEKQINNLVIKLSNIDTPEISDIILNQLATLTNEVKDLKTKLSNSDIQAANVEKAIGEFKNIKNLLLEFDSSIDSTEDIKVKRQLIRNIVKSVKYNEVDKTFFIEFYHP

SEQ ID NO: 3399 - protein, 529 aa, Unknown
  Description of Unknown: Integrase B3400 sequence
  SM00857,G3DSA:1.10.10.2600,IPR036162,PF13408,IPR025827, PS51737,G3DSA:3.40.50.1390,IPR006119,IPR038109,PF07508, SSF53041,IPR011109,PTHR30461,Coil,PS51736, cd00338,PF00239
MSNARIIEIPATRQIRGGKSNTIRKMRVAAYCRVSTEEEEQQGSFETQKLYYTEKINSTSEWELAGIYADDGISGIHTKKRDGFNQMIQDCKKKKIDLILTKSISRFARNTLDSIQYVRMLKAIGIAVIFEKENINTSTMNSEMILTVLSAFAQAESESISQNVARGKRMGFRQGKFPFPYGQILGYRKGLDGKPEVIPEEAEVIRMIFNSYLQGASLLTIKKKLEAGGVLTARGNKKWSSESVQRILQNEKYCGDVLLQKTFIEDVLTGVSKKNTGQLPQYYIENNHEGIVTKQMFREVQAEIARRNSKSAASQRKRHQGRYNSKYALSERLVCGDCGSPYKRVTWNIHGRKQIVWRCVNRLEYGTKFCSHSPSIPEEELHQAILKAVQNLAANFTDEVAAQLDGILRQMEAGENLKAQLQKQLEKAQQEFDRLLEMSLELDESTPFLDDKLRKLSGKIKILKANIAESTDGKGEDVEETKRLTAQDLLIKEYDDILTARIIEKVIVHSRQEIEIYFIGGYTQRIDLT

SEQ ID NO: 3400 - protein, 529 aa, Unknown
  Description of Unknown: Integrase B3401 sequence
  PTHR30461:SF3,SM00857,G3DSA:1.10.10.2600,IPR036162,PF13408, IPR025827,PS51737,G3DSA:3.40.50.1390,IPR006119,IPR038109, PF07508,IPR011109,SSF53041,PTHR30461,Coil, PS51736,cd00338,PF00239
MSKYCIYLRKSRADLEAEAHGEGETLSRHKTALLELARRKGITISATYEEIVSGETIAARPQMQRLLSEVGAGEWDGVLVMEIERLARGDTMDQGLVAQTFKYSGTKIITPLKTFDPQNEFDEEYFEFGLFMARREFTTTNRRLVRGREASAKEGKYVGSVPPYGYRKVKIPNDKGFTLEIIEEQAKVVRMIFEWYAEGAEVNSQKKRIGPYTIAVRLNELGIKSAGKKDYWTIYGVQNMLINPVYIGKIRWGYRKVKKTVTPEGMKKKSREFAQDGDYIVVDGLHEPILSEELFYKVQDLIAANPPTPIKYRHKNINPFAGLIFCAKCGHCMNYRRGYGRQPDYIGCYTAGCKNKASRFDLVEQRVLSILNSWVKDYSVDKAQIKHEADLNAELSNAISLAEKEIETLQDQLDKVYSFFERGTYTEKIFKQRSSAIEQQIMEIGEKIDRLKAEHQQVLERQNVQAEFVPSIKHLLEIYDTLEPVEKNKWLKQIIDRIVYEKNADGKYHNVDPGDFTIGILPRLPKRGS

SEQ ID NO: 3401 - protein, 529 aa, Unknown
  Description of Unknown: Integrase B3402 sequence
  PTHR30461:SF3,SM00857,G3DSA:1.10.10.2600,IPR036162,PS51737, G3DSA:3.40.50.1390,IPR006119,IPR038109,PF07508,SSF53041, IPR011109,PTHR30461,Coil,PS51736,cd00338, PF00239
MSRYCIYLRKSRADLEAEAHGEGETLSRHKTALLELARRMGITISATYEEIVSGETIAARPQMQRLLSEVGAGEWDGVLVMEIERLARGDTMDQGLVAQTFKYSGTKIITPLKTFDPQNEFDEEYFEFGLFMARREFTTTNRRLVRGREASAKEGKYVGSVPPYGYRKVKIPNDKGFTLEIIEEQAKVVRMIFEWYAEGAEVNGQKKRIGPYTIAVRLNELGIKSVAGKDYWTIYGVQHMLINPVYIGKIRWGYRKVKKTVTPEGMKKKSREFAQDGDYIVVDGLHEPILSEELFYKVQDLIAANPPTPIKYRNNNVNPFAGLIFCTKCGHCLSYRKGYGRHPGYLGCNIAGCDNKAAPFELIEQRVLSILNSWVKDYSVDKAQIKHEADLNAELTNAISLAEKEIETLQDQLDNVYSFFERGTYTEKIFKQRSSAIEQQITDIGEKIDRLKAEHQQVLERQNVQAEFVPSIKHLLEIYDTLEPVEKNKWLKQIIDRMVYEKNADGKYRNVDPGDFTLGILPRLPKKGS

SEQ ID NO: 3402 - protein, 529 aa, Unknown
  Description of Unknown: Integrase B3403 sequence
  PTHR30461:SF3,SM00857,G3DSA:1.10.10.2600,IPR036162,PF13408, PS51737,G3DSA:3.40.50.1390,IPR025827,IPR006119,IPR038109, PF07508,IPR011109,SSF53041,PF00239,PTHR30461, PS51736,Coil,cd00338
MQQAVIYARYSPGPNQTEQSIEGQVRECTKYAELHDLRIVGTYIDRKISGKTDNRREFQRMIDDSEKHIFDVIILYHTDRFARNRYDSAIYKHKLKENGVELRYATTDIPKGPEGIILESIMEGWAEYYSAELSRKIKRGMRESALKCHSTGAGRCLGYRTAEDKSLVIEPEGAKAVQTVFDMYIKGKSHADICRYLNDCGFRTAQGKLFNKNSVTHIIRNKRYIGVYTYDDITIEDGIPAIISKDTFHLAQLEAARRKTAKRPKEPKAEYLLSGKAFCGHCQKPLVGVSGTGKSGNKWYYYYCQESRAKRGCTKKPVKRDWLEREVVKRTVAEVLQPEVIQHIAKKCYDLQMEYRQDNSDVLFYELKLKDVRKAIKNTMHAIESGVKTKTLPARLQELENEEEALEAELAIAKASDFVITADQIEFLLTQFAEPWECESEEEYHRRIIKCFVHKVFLFDDKLLIYYNVSRDGKTREQSEAELLEEALGEGFDKRSSGSTILIAGRTPECEIIILRYGFWLALDLTVQV

SEQ ID NO: 3403 - protein, 529 aa, Unknown
  Description of Unknown: Integrase B3404 sequence
  SM00857,G3DSA:1.10.10.2600,IPR036162,PF13408,PS51737, G3DSA:3.40.50.1390,IPR025827,IPR006119,IPR038109,PF07508, IPR011109,SSF53041,PTHR30461,Coil,PS51736, cd00338,PF00239
MSNARIIEIPATRQIRSGKNNTMRKMRVAAYCRVSTEEEEQQGSFETQKLYYTEKINSTSEWELAGIYADDGISGIHTKKRDGFNQMIQDCKKKKIDLILTKSISRFARNTLDSIQYVRMLKAIGIAVIFEKENINTSTMNSEMILTVLSAFAQAESESISQNVARGKRMGFRQGKFPFPYGQILGYRKGLDGKPEVIPEEAEVIRMIFNSYLQGASLLTIKKKLEAGGVLTARGNKKWSSESVQRILQNEKYCGDVLLQKTFIEDVLTGVSKKNTGQLPQYYIENNHEGIVTKQMFREVQAEIARRNSKSAANQRKRHQGRYNSKYALSERLVCGDCGSPYKRVTWNIHGRKQIVWRCVNRLEYGTKFCSHSPSIQEEELHQAILKAVQNLAANFTDEVAAQLDGILRQMKAGENLKAQLQKQLEKAQQEFDRLLEMSLELDESTPFLDDKLRKLSGKIKILKANIAESTDGKGEDEEATKQLTAQDLLIKEYDDILTARIIEKVIVHSRQEIEIYFIGGYTQKIDLI

SEQ ID NO: 3404 - protein, 529 aa, Unknown
  Description of Unknown: Integrase B3405 sequence
  cd00338,SM00857,G3DSA:1.10.10.2600,IPR036162,PF13408, IPR025827,G3DSA:3.40.50.1390,PS51737,IPR006119,IPR038109, PF07508,IPR011109,SSF53041,PTHR30461,PS51736, Coil,PF00239
MKFTSTWKISDPLAQYIIYLRKSRKDMEAEALGQTDTLKRHRAALLSLSESRGLNVIEICEEVVTGDSIAVRPEVQKVLQLVETGNYAGVIVMEVERLARGDTIDQGIIAQTFKYSNTKIITPNKIYDPNNEMDEEYFEFGLFMSRREYNTIKRRLSRGKEASLREGKWISGKTPFGWSREKLPNDKGYKLVPHPEQAPVLQQIYNWYTGEGCARIGAKAISTRLNHLGVKTNSGNAWTASAVLDTLRNPANAGWIKSGGRPETKRIVDGSVVVSRPRTRQEDLNLYKGLHDGLISQEQYDKAVALSYSSGSPRGKGAWQTMTSLAGLVLCDQCGRVMVRRPSSGGRRDAFMCPSPDCPTVSAWYEDVEDAVLDALRGWLHELEVGEAERSDKHSLLDALAASISADQKQLAKLEAQEARAYEFVETGVYTPEIFLQRSQALAADKQVIISRIEENQLAQDEITRAKQARTRLAPAVRHVLETYPLAATPQDKNDLLKTVLQKVLYHKQSKSYSKAGSDMRVTLYPLTD

SEQ ID NO: 3405 - protein, 529 aa, Unknown
  Description of Unknown: Integrase B3406 sequence
  SM00857,G3DSA:1.10.10.2600,IPR036162,PF13408,PS51737, G3DSA:3.40.50.1390,IPR025827,IPR006119,IPR038109,PF07508, IPR011109,SSF53041,PF00239,PTHR30461,PS51736, Coil,cd00338
MNFTSTWKITDPFAQYIIYLRKSRKDMEAEALGQTDTLKRHRATLLSLAESSGLNVVEICEEVVTGDSIAVRPEVQKVLQLVETGSYAGVLVMEVERLARGDTIDQGIIAQTFKYSNTKIVTPNKVYDPNNEMDEEYFEFGLFMSRREYNTIKRRLSRGKEASLREGKWISGKTPFGWLREKLPNDKGYKLIPHPDQAPILRQIYDWYTGEGCARIGAKAISTRLNSLGVSTNSGSLWRTDSVLDILRNPANAGWIKSGGRPETKRIVDGAVVVSRPRTRQEDLKLYKGLHDGLISQEQYDKAVALSYSSASPRGKGAWQTVTSLAGLIRCDQCGRVMVRRPSSGGRRDTLLCPSYGCTTVSAWYEDVEGAVLDALRGWLHELEVGNSENSDDHSLLDALAASISADQKQLAKLEVQEARAYEFVETGVYTPEIFLQRSQALAADKQVIISRIEENQRAQDEITRAKQARARLAPAVRHVLETYPLAATSQDKNDLLKTVLQKVLYHKQSKSYSKAGSDMRVTLYPLTD

SEQ ID NO: 3406 - protein, 529 aa, Unknown
  Description of Unknown: Integrase B3407 sequence
  PTHR30461:SF3,cd00338,SM00857,G3DSA:1.10.10.2600,IPR036162, PF13408,IPR025827,G3DSA:3.40.50.1390,PS51737,IPR006119, IPR038109,PF07508,IPR011109,SSF53041,PTHR30461, PS51736,Coil,PF00239
MRAKKKPAMLEPDMQDAVIYTRYSSHNQRDCSIEQQVADCEIFARQNNLRVVKVYADRHLSGTTDNRPQFQQMLKDAAHGHWAYVICWKIDRFARNRYDSATYKFRLKKAGVRVLYAKESIPDGPEGILLESVLEGSAEYYSAALAQNIRRGMKYNAEQCKVNSGSIPFGYCKGPDGRFAIHEANAEVVREIFRKAAAGMPFVDIANDLNSRGLKTSRGGRWNKGSFRLLMNEAYIGVYHFSDTRIEGGMPALIDQGTFWAANERLKANSSVRGRHQDGGDYLLTGKLKCAHCGSYMIGFSGTGKSGELHYYYGCQKRRRERACKKANVPREWIERVVVKAALDYVLRPDVMEWIADAVMEYQEREAASAQLAALTAELEENQKATDNVMKAIEAGIITSTTKQRLLDLEAKAQDLKRAIELEKLSHVRLERDQVLFWLDRFRGGSLQSQEFRRKVIDAFVSVVYLSDDHLRIAFNYSGGSNAEADFDLVMDAEAAAGELSKKFALKGRGYLVLLFSDSIGYSRLYFCC

SEQ ID NO: 3407 - protein, 529 aa, Unknown
  Description of Unknown: Integrase B3408 sequence
  cd00338,SM00857,G3DSA:1.10.10.2600,IPR036162,PF13408, PS51737,G3DSA:3.40.50.1390,IPR025827,IPR006119,IPR038109, PF07508,IPR011109,SSF53041,PTHR30461,PS51736, Coil,PF00239
MNFTSTWKITDPFAQYIIYLRKSRKDMEAEALGQTDTLKRHRAALLSLAENNGLSVVEICEEVVTGDSIAVRPEVQKVLQLVETGSYAGVLVMEVERLARGDTIDQGIIAQTFKYSNTKIITPNKVYDPNNEMDEEYFEFGLFMSRREYNTIKRRLSRGKEASLREGKWISGKTPFGWLREKLPNDKGYKLIPHPEQAPILRQIYDWYTGEGCARIGAKAISTRLNSLGVPTNSGSLWRTDSVLDILRNPANAGWIKSGGRPETKRIVDGAVVVSRPRTRQEDLKLYKGLHDGLISQEQYDKAVALSYSSASPRGKGAWQTVTSLAGLIRCDQCGRVMVRRPSSGGRRDTLLCPSYGCTTVSAWYEDVEGAVLDALRGWLHELEVGNSENSDDHSLLDALAASISADQKQLAKLEVQEARAYEFVETGVYTPEIFLQRSQALAADKQVIISRIEENQRAQDEITRAKQARARLAPAVRHVLETYPLAATSQDKNDLLKTVLQKVLYHKQSKSYSKAGSDMRVTLYPLTD

SEQ ID NO: 3408 - protein, 529 aa, Unknown
  Description of Unknown: Integrase B3409 sequence
  PTHR30461:SF3,SM00857,G3DSA:1.10.10.2600,IPR036162,PS51737, G3DSA:3.40.50.1390,IPR006119,IPR038109,PF07508,IPR011109, SSF53041,PTHR30461,Coil,PS51736,cd00338, PF00239
MSSYCIYLRKSRADLEAEAHGEGETLSRHKTALLELARRMGITISATYEEIVSGETIAARPQMQRLLSEVGAGEWDGVLVMEIERLARGDTMDQGLVAQTFKYSGTKIITPLKTFDPQNEFDEEYFEFGLFMARREFTTTNRRLVRGREASAKEGKYVGSVPPYGYRKVKIPNDKGFTLEIVEEQAKVVRMIFEWYAEGAEVNSQKKRIGPYTIAVRLNELGIKSAGKKDYWTIYGVQNMLINPVYIGKIRWGYRKVKKTVTPEGMKKKSREFAQDGDYIVVDGLHEPILSEELFYKVQDLIAANPPTPIKYRNNNINPFAGLIFCAKCGHCLSYRKGYGRHPGYLGCNVAGCDNKAAPFELIEQRVLSILNSWVKDYSVDKAQIKHEADLNAELSNAISLAEKEIENLQGQLDNVYSFFERGTYTEKIFKQRSSAIEQQITDIGEKIDRLKAEHQQVLERQNVQAEFVPSIKHLLEIYDTLEPVEKNKWLKQIIDRMVYEKNADGKYRNVDPGDFTLGILPRLPKKGS

SEQ ID NO: 3409 - protein, 529 aa, Unknown
  Description of Unknown: Integrase B3410 sequence
  cd00338,SM00857,G3DSA:1.10.10.2600,IPR036162,PS51737, G3DSA:3.40.50.1390,IPR006119,IPR038109,PF07508,IPR011109, SSF53041,PTHR30461,PS51736,Coil,PF00239
MEQYCLYLRKSRSDVEAENHGEEETLARHEKILLELAKRREYNVTQIYREVVSGETIAARPVMQQLLSEVEHGLWSGVLVVEVERLARGDTIDQGIVAQTFKYSDTQIITPMKTYNPNNEFDEEYFEFGLFMSRREYKTINRRLQRGRLSSVKEGKYVNSIAPYGYERVKIKGEKGFTLAPDPNEANVIKMIFELYTRGELQPDGTYKRLGVSLLAGKLNSMKIPARKSEYWVPASIKDMLRNPVYAGKIRWNCRAVIKKMKSGNINISRPRSEESDCIIVKGLHPALVTQETFDLAQEYLAKNPPRPTKRNAPTKNPLSGVVVCAFCGRRLVRRPYTSATPPTLMCTVPQCPNISSFLHLVEERILKALEEWLRNYKLQWNLSDKSSELISEAEILRQSLKDINLQITKLNKQMIKAHELLEQDIYTTDVFLERSRAITEKQNQLSSDRAEIEKQLGIESTREKSTKEIIPKVEKLLDVYYDLPTAQEKNDMLKEVLEKVVYKKTQNTRWSGSPDDFEITIYPKLPKS

SEQ ID NO: 3410 - protein, 529 aa, Unknown
  Description of Unknown: Integrase B3411 sequence
  SM00857,G3DSA:1.10.10.2600,IPR036162,PF13408, IPR025827,G3DSA:3.40.50.1390,PS51737,IPR006119, IPR038109,PF07508,SSF53041,IPR011109, PF00239,PTHR30461,PS51736,Coil,cd00338
MKFTSTWKISDPLAQYIIYLRKSRKDMEAEALGQTDTLKRHRAALLSLSESRGLNVVEICEEVVTGDSIAVRPEVQKVLQLVETGSYAGVLVMEVERLARGDTIDQGIIAQTFKYSNTKIITPNKIYDPNNEMDEEYFEFGLFMSRREYNTIKRRLSRGKEASLREGKWISGKTPFGWLREKLPNDKGYKLIPHPEQAPILRQIYDWYTGEGCARIGAKAISTRLNSLGVPTNSGSLWRTDSVLDILRNPANAGWIKSGGRPETKRIVDGAVVVSRPRTRQEDLKLYKGLHDALISQAQYDKAVSLSYSVVAPRGKGAWKTVTSLAGLVRCDQCGRVMVRRASSGDRRPSFMCPTQGCPTVSSWYSEVEEALLDALRDWLRELEVGEADTNDDHSLLDALSASINADQKQLAKLEAQEARAYELVETGVYTPEVFLRRSQALAADKQVIVSRIEENQRAQDEITRAKQARARLAPAVRHVLEAYPLAATPQDKNDLLKTVLQKVLYHKRSKSYSKAGSDMCLTLYPLTD

SEQ ID NO: 3411 - protein, 529 aa, Unknown
  Description of Unknown: Integrase B3412 sequence
  cd00338,SM00857,G3DSA:1.10.10.2600,IPR036162,PF13408, PS51737,G3DSA:3.40.50.1390,IPR025827,IPR006119,IPR038109, PF07508,IPR011109,SSF53041,PTHR30461,PS51736, Coil,PF00239
MKFTSTWKIADPLAQYIIYLRKSRKDMEAEALGQTDTLKRHRAALLSLSESRGLNVVEICEEVVTGDSIAVRPEVQKVLQLVETGNYAGVIVMEVERLARGDTIDQGIIAQTFKYSNTKIITPNKIYDPNNEMDEEYFEFGLFMSRREYNTIKRRLSRGKEASLREGKWISGKTPFGWSREKLPNDKGYKLVPHPEQAPVLQQIYNWYTGEGCARIGAKAISTRLNSLGVPTNSGSLWRADSVLDILRNPANAGWIKSGGRPETKRIVDGAVVVSRPRTRQEDLKLYKGLHDGLISQEQYDKAVALSYSSASPRGKGAWGTVTSLAGLVRCDQCGRVMVRRPSSGNRRDTLLCPSYGCTTVSAWYDDVEDAVLDALRGWLRELELGEAAAPDDTPMRTALESSIVADRKQLAKLEAQEARAYELVETGIYTPEIFLQRSQALAADKQVIVDRIEASQTTIHELARARQARARLAPAVRRVLETYPLAASPQEKNALLKTVLQKVLYHKQTKSYTKSGSDMHVTLYPLAD

SEQ ID NO: 3412 - protein, 529 aa, Unknown
  Description of Unknown: Integrase B3413 sequence
  PTHR30461:SF3,SM00857,G3DSA:1.10.10.2600,IPR036162,PF13408, IPR025827,G3DSA:3.40.50.1390,PS51737,IPR006119,IPR038109, PF07508,SSF53041,IPR011109,PF00239,PTHR30461, PS51736,Coil,cd00338
MNAVIYARYSSERQTEASIEGQLKVCYDYAEKQGYTIIGEYIDRALTGRNTDRPQFLKMIKDSSKQEFQIVLVYQLDRFSRNRYDSATYKAKLKKNGVRVVSARENISDDASGILMESVLEGMAEYYSRELAQKVTRGMNLNAEKCLYNGGTVPFGYKIVDKKFVIDEHTAPYVKKIFEMYSTGNTIKEIITYLNARNIKTSTNTKFNYSSLHTMLHNRKYIGFYKFGDVEVKDGVPRLISDKLFEKVQGESLKNHKAPARAKAIEEYILTTKLFCGYCKEMMVGVSGTSGNKKKFCYYSCNKARRKLCNKKNVSKDYLEDLVVNQCRELLTDENILKIAKEVVKQSRKDDSYSEIEYLEKAINKLNKEKKNLMTTLKSCDIESVKQDIFSEIGNINEEIADFEKQMSEVKNNMVVVEETEVIFFLSKLKDGNINSLKYRKLLVNIFVNQIFLYDDKITFIFNTGKEPVTLPEKFLEEYEKEHKIRSDLQKTGSPRRNRLTNRAKRFLICFFEIFVLLSCSCGYICAIV

SEQ ID NO: 3413 - protein, 529 aa, Unknown
  Description of Unknown: Integrase B3414 sequence
  PTHR30461:SF3,IPR036162,PS51737,IPR011109,PTHR30461, PF00239,G3DSA:1.10.10.2600,IPR006119,SSF53041,cd00338, SM00857,IPR025827,IPR038109,PS51736,mobidb-lite, PF13408,G3DSA:3.40.50.1390,PF07508,Coil
MKKRINTNSAARAVIYARYSSANQRDCSIEQQVEKCRELAAREGVTVIEIYADRAVSGKTDRRPNFQRMMKDASLRQFDVVLAWKSNRMGRNMLQAMMNEEQLRGNGIRTIYAEEDFDDTAAGRFALRNMMNVNQFYSENMAEDISRGLMDNASKCMSNGSLPLGYKTGKDQKVVLDEAEAAIVQEIFTRVSCYEPFIDIARDLNRRGIKTKKGAEWGRSSFHTICRNERYRGIYIYRDIRVEGGMPRIVSDELFYKVQEVLKVKKNPQGRRKRSGYEEYLLTGKLYCGHCGSPMTGIAGTSKTGAMHYYYTCQKRRTDHSCDKKAVRRDQIEKAVAIAIQQQLLTDENIQMMADETMAYNARTEIKYRLQSLQQQLYSNETSTANIMKAIEMGIITDTTKARLLALEQEHGQLLAKIDTAKAEMVPINREDFVSLLDIYRTGDVNNKKYLAALFDTFLVRVDLYDDHFKITFDPTGGKMPVDIPIGAEDSPESPGDSPESSDFEASPQDAEKFVLALHNRTKELQALA

SEQ ID NO: 3414 - protein, 529 aa, Unknown
  Description of Unknown: Integrase B3415 sequence
  PTHR30461:SF3,SM00857,G3DSA:1.10.10.2600,IPR036162,PF13408, PS51737,G3DSA:3.40.50.1390,IPR025827,IPR006119,IPR038109, PF07508,IPR011109,SSF53041,PF00239,PTHR30461, PS51736,Coil,cd00338
MQQAVIYARYSPGPNQTEQSIEGQVRECTKYAELHDLRIVGTYIDRKISGKTDNRREFQRMIDDSEKHIFDVIILYHTDRFARNRYDSAIYKHKLKENGVELRYATTDIPKGPEGIILESIMEGWAEYYSAELSRKIKRGMRESALKCHSTGAGRCLGYRTAEDKSLVIEPEGAKAVQTVFDMYIKGKSHADICRYLNDCGFRTAQGKLFNKNSVTHIIRNKRYIGVYTYDDITIEDGIPAIISKDTFHLAQLEAARRKTAKRPKEPKAEYLLSGKAFCGHCQKPLVGVSGTGKSGNKWYYYYCQESRAKRGCTKKPVKRDWLEREVVKRTVAEVLQPEVIQHIAKKCYDLQMEYRQDNSDVLFYELKLKDVRKAIKNTMHAIESGVKTKTLPARLQELENEEEALEAELAIAKASDFVITADQIEFLLTQFAEPWECESEEEYHRRIIKCFVHKVFLFDDKLLIYYNVSRDGKTREQSEAELLEEALGEGFDKRSSGSTMLIAGRTPECEIIVLRYGFWLALDLTVQA

SEQ ID NO: 3415 - protein, 529 aa, Unknown
  Description of Unknown: Integrase B3416 sequence
  cd00338,SM00857,G3DSA:1.10.10.2600,IPR036162,PF13408, IPR025827,G3DSA:3.40.50.1390,PS51737,IPR006119,IPR038109, PF07508,SSF53041,IPR011109,PTHR30461,PS51736, Coil,PF00239
MKFTSTWKIADPLAQYIIYLRKSRKDMEAEALGQTDTLKRHRAALLSLSESRGLNVVEICEEVVTGDSIAVRPEVQKVLQLVETGNYAGVIVMEVERLARGDTIDQGIIAQTFKYSDTRIITPNKTYDPNNEMDEEYFEFGLFMSRREYNTIKRRLSRGKEASLREGKWISGKTPFGWLREKLPNDKGYKLVPHPEQAPVLQQIYNWYTGEGCARIGAKAISTRLNSLGVPTNSGSFWRADSVLDILRNPANAGWIKSGGRPETKRIVDGSVVVSRPRTRQEDLKLYKGLHDGLIPQEQYDKAVALSYSSASPRGKGAWGTVTSLAGLVRCDQCGRVMVRRPSSGNRRDTLLCPSYGCTTVSAWYDDVEDAVLDALRGWLRELELGEAAAPDDTPMRTALESSIAADRKQLAKLEAQEARAYELVETGVYTPEIFLQRSQALAADKQVIVDRIEASQTTITELARARQARARLAPAVRRVLETYPLAASPQEKNALLKTVLQKVLYHKQTKSYTKSGSDMHVTLYPLAD

SEQ ID NO: 3416 - protein, 529 aa, Unknown
  Description of Unknown: Integrase B3417 sequence
  cd00338,SM00857,G3DSA:1.10.10.2600,IPR036162,PF13408, IPR025827,G3DSA:3.40.50.1390,PS51737,IPR006119,IPR038109, PF07508,IPR011109,SSF53041,PTHR30461,PS51736, Coil,PF00239
MKFTSTWKISDPLAQYIIYLRKSRKDMEAEALGQTDTLKRHRAALLSLSESRGLNVVEIREEVVTGDSIAVRPEVQKVLQLVETGNYAGVIVMEVERLARGDTIDQGIIAQTFKYSDTRIITPNKTYDPNNEMDEEYFEFGLFMSRREYNTIKRRLSRGKEASLREGKWISGKTPFGWSREKLPNDKGYKLVPHPEQAPILQQIYNWYTGEGCARIGAKAISTRLNSLGVPTNSGSLWRADSVLDILRNPANAGWIKSGGRPETKRIVDGSVVVSRPRTRQEDLKLYKGLHDGLISQEQYDKAVALSYSSASPRGKGAWGTVTSLAGLVRCDQCGRVMVRRPSSGGRRDTLLCPSYGCTTVSAWYDDVEDAVLDALRGWLRELELGEAAAPDDTPMRTALESSIAADRKQLAKLEAQEARAYELVETGVYTPEIFLQRSQALAADKQVIVDRIEASQTTIHELARAKQARARLAPAVRRVLETYPLAASPQEKNALLKTVLQKVLYHKQTKSYTKSGSDMHVTLYPLAD

SEQ ID NO: 3417 - protein, 529 aa, Unknown
  Description of Unknown: Integrase B3418 sequence
  cd00338,SM00857,G3DSA:1.10.10.2600,IPR036162,PF13408, PS51737,G3DSA:3.40.50.1390,IPR025827,IPR006119,IPR038109, PF07508,IPR011109,SSF53041,PTHR30461,PS51736, Coil,PF00239
MKFTSTWKISDPLAQYIIYLRKSRKDMEAEALGQTDTLKRHRAALLSLSESRGLNVVEICEEVVTGDSIAVRPEVQKVLQLVETGSYAGVLVMEVERLARGDTIDQGIIAQTFKYSNTKIVTPNKVYDPNNEMDEEYFEFGLFMSRREYNTIKRRLSRGKEASLREGKWISGKTPFGWSREKLPNDKGYKLIPHPEQAPVLQQIYDWYTGDGCARIGAKAISTRLNHLGVKTNSGNSWTTSAILELLRNPANAGWIKSGGRPETKRIVDGSVVVSRPRTRQEDLKLYKGLHDALISQAQYDKAVSLSYSVVAPRGKGAWKTVTSLAGLVRCDQCGRVMVRRPSSGGRRDAFMCPSSDCPTVSAWYEDVEDAVLDALRGWLHELEVGEAERSDEHSLLDALAASISADQKQLAKLEVQEARAYEFVETGVYTPEIFLQRSQALAADKQVIISRIEENQRAQDEITRAKQARARLAPAVRHVLETYPLAATPQDKNELLKTVLQKVLYHKQSKSHSKSGSDMRVTLYPLTD

SEQ ID NO: 3418 - protein, 529 aa, Unknown
  Description of Unknown: Integrase B3419 sequence
  SM00857,G3DSA:1.10.10.2600,IPR036162,PF13408,IPR025827, G3DSA:3.40.50.1390,PS51737,IPR006119,IPR038109,PF07508, SSF53041,IPR011109,PF00239,PTHR30461,PS51736, Coil,cd00338
MNFTSTWKIADPLAQYIIYLRKSRKDMEAEALGQTDTLKRHRAALLSLSESRGLNVVEICEEVVTGDSIAVRPEVQKVLQLVETGNYAGVIVMEVERLARGDTIDQGIIAQTFKYSNTKIVTPNKVYDPNNEMDEEYFEFGLFMSRREYNTIKRRLSRGKEASLREGKWISGKTPFGWSREKLPNDKGYKLVPHPEQAPILQQIYNWYTGEGCARIGAKAISTRLNSLGVPTNSGSLWRADSVLDILRNPANAGWIKSGGRPETKRIVDGAVVVSRPRTRQEDLKLYKGLHDGLISQEQYDKAVALSYSSASPRGKGAWGTVTSLAGLVRCDQCGRVMVRRPSSGNRRDTLLCPSYGCTTVSAWYDDVEDAVLDALRGWLRELELGEAAAPDDTPMRTALESSIAADRRQLAKLEAQEARAYELVETGVYTPEVFLQRSQALAADKQVIVDRIEASQATIHELARAKQARARLAPAVRRVLETYPLAASPQEKNALLKTVLQKVLYHKQTKSYTKSGSDMHVTLYPLAD

SEQ ID NO: 3419 - protein, 529 aa, Unknown
  Description of Unknown: Integrase B3420 sequence
  cd00338,SM00857,G3DSA:1.10.10.2600,IPR036162,PF13408, PS51737,G3DSA:3.40.50.1390,IPR025827,IPR006119,IPR038109, PF07508,IPR011109,SSF53041,PTHR30461,PS51736, Coil,PF00239
MKFTSAWRIVDPLSQYIIYLRKSRKDMDAEALGQTDTLKRHRAALLSLAESRGLNVVEICEEVVTGDSIAVRPEVQKVLQLVETGAYAGVLVMEVERLARGDTIDQGIIAQTFKYSNTMIITPNKSYDPNNEMDEEYFEFGLFMSRREYNTIKRRLTRGKEASIREGKWISGKTPFGWLREKIPNDKGYMLVPHPEQAPILRQIYDWYTGDGCVRVGSSAIATRLNRLGVKTNTGSRWTASAILEVLRNPANAGWIKSKGRPEIKHIVDGSVVVSRPRARIEDLTLHKGLHNGLISQEQFDRAVALSYSTASPRGKGAWKTATSLAGLVRCDQCGRIMVRRATSGGRKDTFLCPSYGCSTVSAWYDEVETAVLDALRGWLHELEVGEAVSADDSSLLSALSSAISADQKQLAKLEAQEARAYEFVETGVYTPEVFLQRSQSLAADKQAVLSRIEENQRAIDDIDRAKQARARLAPAVRHVLETYPLAGSVQEQNDLLKTVLQKIVYHKQSKSYSKAGSDMRVTLYPLTD

SEQ ID NO: 3420 - protein, 529 aa, Unknown
  Description of Unknown: Integrase B3421 sequence
  PTHR30461:SF3,SM00857,G3DSA:1.10.10.2600,IPR036162,PF13408, PS51737,G3DSA:3.40.50.1390,IPR025827,IPR006119,IPR038109, PF07508,SSF53041,IPR011109,PF00239,PTHR30461, PS51736,Coil,cd00338
MQRAVIYARYSPGPNQTEQSIEGQVRECTKYAELHDLRIVGTYIDRKISGKTDNRREFQRMIDDSEKHIFDVIILYHTDRFARNRYDSAIYKHKLKENGVELRYATTDIPKGPEGIILESIMEGWAEYYSAELSRKIKRGMRESALKCHSTGAGRCLGYRTAEDKSLVIEPEGAKAVQTVFDMYIKGKSHADICRYLNDCGFRTAQGKLFNKNSVTHIIRNKRYIGVYTYDDITIEDGIPAIISKDTFHLAQLEAARRKTTKRPKEPKAEYLLSGKAFCGHCQKPLVGVSGTGKSGNKWYYYYCQESRAKRGCTKKPVKRDWLEREVVKRTVAEVLQPEIIQHIAKKCYDLQMEYRQDNSDVLFYELKLKDVRKAIKNTMHAIESGVKTKTLPARLQELENEEEALEAELAIAKASDFVITANQIEFLLTQFAEPWECESEEEYHRRIIKCFVHKVFLFDDKLLIYYNVSRDGKTREQSEAELLEEALGEGFDKRSSGSTILIAGRTPECEIIVLRYGFWLALDLTVQA

SEQ ID NO: 3421 - protein, 529 aa, Unknown
  Description of Unknown: Integrase B3422 sequence
  PTHR30461:SF3,cd00338,SM00857,G3DSA:1.10.10.2600,IPR036162, PF13408,PS51737,IPR025827,G3DSA:3.40.50.1390,IPR006119, IPR038109,PF07508,IPR011109,SSF53041,PTHR30461, PS51736,Coil,PF00239
MYEEIKTACLYLRYSSSNQTEQSIEGQMHVCQDFCKRHNIRIVEMYIDRATSASKDIEKRVEFLKMIKDSEKGNFNAVIVYKLDRFARSRYDSATYKYRLKRNGVQLISATENITQDPEGIILESVLEGMAEFYSAELSQKINRGMRESALKHNSIGGAIPLGYKTVDKKLVIDETTAPIVREAFQMYADGESVAEICRTFNNRGYKTSKGTRFGKSSFTKIFRNEKYIGVYKYHDYRAEDVIPPIIDKDLWDRVQVRVGKIKKAPARNKARHTYLLTGKLFCGHCGSAMNADGNSQGYLYYRCYGKKNLDKQCNKRNMEKNLIERLVAQDAMSFLTDEYIEKIATIACDRNKQEIESDSPIPVIRDRIRQVDVSLNNLLKAIETGSAPDMLVKRMGELETEKKDMEVQLKKEMAHQVYIDKEQVIFWLEKFREGDINDEEFCQTVIDLFVNSVTVWDEPDDKFKITIAYNLTSIPQKTYRLSKDGRLSDYASNTPQWTVRSRYRWYRSSAGRLWCCPKSCGTFGHILS

SEQ ID NO: 3422 - protein, 529 aa, Unknown
  Description of Unknown: Integrase B3423 sequence
  PTHR30461:SF3,cd00338,SM00857,G3DSA:1.10.10.2600,IPR036162, PF13408,PS51737,IPR025827,G3DSA:3.40.50.1390,IPR006119, IPR038109,PF07508,IPR011109,SSF53041,PTHR30461, PS51736,Coil,PF00239
MIPFSVSSSALPDGCSGFLRAVIYARFSPGKNQKEISIEGQLRECREFADRNNYEVVGEYIDRRISGRSDNRADFQRLMRDCEKRCFDVVIVWKFDRFFRNRQESAIYKKHLADFGVKLVSAKEFIPDGSGGIIMAGMIETVAEWYSANLSENVTRGMYETASKAQSTGHLPLGYVTGPDKRLKIQPVEAEAVQIAFQMYSDGANLKEIADALNESGHTTKTGRPFCVNSFGAILTNPKYIGVYKWHDDIEIRDGCPRIVSDELFFSVQRRLERTRRTSGRGRATTEYFLSTKIFCGHCGKPMCGESALKRGMRYYYYACSEKKRFHNCKKKNVPKDKIENLVFEKTLAMLTDDNIAYIAREVERIAADENINLAALRQLEGQLAEVNKRLSNIGNAIAQGIITETTKELLVSAEAERAAINKKIAQERLLMKGTVKAENVACWLHSFKTKKRSDLEFKRQLFASLVHSVYVYDDHLKVIFNVEKYGAVEISFDELSSATSSDVVGLAQPAKRPQRTLILCGLLAFVTH

SEQ ID NO: 3423 - protein, 529 aa, Unknown
  Description of Unknown: Integrase B3424 sequence
  PTHR30461:SF3,SM00857,G3DSA:1.10.10.2600,IPR036162,PF13408, PS51737,G3DSA:3.40.50.1390,IPR025827,IPR006119,IPR038109, PF07508,IPR011109,SSF53041,PF00239,PTHR30461, PS51736,Coil,cd00338
MSSVDKIAVVYARYSSHGQTEQSIEGQIAAAQKYAEQHGYTIIHIYADRAMTGRNDDREEFQRMLSDTATHQFGVILLWKIDRFGRNREEIAFNRYRCKKNGVRVERVAEDVPDGPEGVILDSVLEGMAEYYSLQLAQNVRRGQRESAKKSQTVGGCKIIGYNVDPDTKRYDVDPKTAPFVTEVFKRYANGKTISEIVVWLNAQGVRTTRGGEFTVNSLHRLLKNEKYTGVYIFHDIRNEGGMPALIDRATFDKAQEMLKVNRRAPARVWSKTEYLLTDKLFCGHCGAMMVGESGHGRNGTKHNYYTCWNRKKKKLCDKKPVRQDVIEPLVLRSIGKLLENPATLENIADQVWAAYERSDTSGDTIKALDKQIADVDRALSNVMKAIEMGIINEMTKARMDELTDQKQALSAARADAGLAGGFKLTRDMILFFLQGIAALDMADRDSQKRLIKTFVNAIYLYDDHFDIAFNYTDNGKVVVRIQEINDAACGEVFGRCAQSPAIVQTSEPLITIVVSCSVFVFTVKMPEA

SEQ ID NO: 3424 - protein, 529 aa, Unknown
  Description of Unknown: Integrase B3425 sequence
  cd00338,SM00857,G3DSA:1.10.10.2600,IPR036162,PF13408, IPR025827,G3DSA:3.40.50.1390,PS51737,IPR006119,IPR038109, PF07508,SSF53041,IPR011109,PTHR30461,PS51736, Coil,PF00239
MKFTSTWKIADPLAQYIIYLRKSRKDMEAEALGQTDTLKRHRAALLSLSESRGLNVVEICEEVVTGDSIAVRPEVQKVLQLVETGNYAGVIVMEVERLARGDTIDQGIIAQTFKYSDTRIITPNKTYDPNNEMDEEYFEFGLFMSRREYNTIKRRLSRGKEASLREGKWISGKTPFGWSREKLPNDKGYKLVPHPEQAPVLQQIYNWYTGEGCARIGAKAISTRLNSLGVPTNSGSLWRADSVLDILRNPANAGWIKSGGRPETKRIVDGSVVVSRPRTRQEDLKLYKGLHDGLISQEQYDKAVALSYSSASPRGKGAWGTVTSLAGLVRCDQCGRVMVRRPSSGNRRDTLLCPSYGCTTVSAWYDDVEDAVLDALRGWLRELELGEAAAPDDTPMRTALESSIAADRKQLAKLEAQEARAYELVETGVYTPEIFLQRSQALAADKQVIVDRIEASQTTIHELARARQARARLAPAVRRVLETYPLAASPQEKNALLKTVLQKVLYHKQTKSYTKSGSDMHVTLYPLAD

SEQ ID NO: 3425 - protein, 529 aa, Unknown
  Description of Unknown: Integrase B3426 sequence
  PTHR30461:SF3,SM00857,G3DSA:1.10.10.2600,IPR036162,PF13408, IPR025827,G3DSA:3.40.50.1390,PS51737,IPR006119,IPR038109, PF07508,SSF53041,IPR011109,PF00239,PTHR30461, PS51736,Coil,cd00338
MSSVDKTAVIYARYSSHGQTEQSIEGQIAAAQKYAEGKGYTIIHIYADRAMTGRNDDREQFQKMLSDTATHQFGVILLWKIDRFGRNREEIAFNRYRCKKNGVRVERVAEDVPDGPEGVILDSVLEGMAEYYSLQLAQNVRRGQRESAKKSQTVGGCNIIGYKVNPDTKRYEVDPKTAPFVTEVFKRYANGETISEIVAWLNVQGVRATRGGEFTVNSLHRLLKNEKYTGVYIFHDIRNEGGMPALTDRATFDKVQEMLKVNRRAPARVWSKTEYLLTDKLFCGHCGAMMVGESGHGRNGTKHSYYTCWNRKKKKSCSKKPVLQDVIEPMVLRVISKMLSDEATLEYIADQVWAVYERSDTSGDTIKALDKQIADVDRALSNVMKAIEMGIINEMTKARMDELTDQKQALSVARAEAGLAGGFKLTRDMILFFLHDMAATNMTDRDCQKRLIKTFVNAIYLYDDHFDIAFNYTSNGKMVVKMQEINDTTSGEVFGRCAQSPAIVRTSEPLITIVVSCSVFVFSVKMPEV

SEQ ID NO: 3426 - protein, 529 aa, Unknown
  Description of Unknown: Integrase B3427 sequence
  SM00857,G3DSA:1.10.10.2600,IPR036162,PS51737,G3DSA:3.40.50.1390, IPR006119,IPR038109,PF07508,IPR011109,SSF53041, PF00239,PTHR30461,PS51736,Coil,cd00338
MYEDLSFPYGSGTYAIYLRKSRKDLDAEALGEGETLARHLSVLKALAQRMELNVVRVYAEVVSGESIDARPQMQELLRDVESGIYDGVLVVEVERLARGDTSDQGRVAKTFKFSDTLIITPSKTYDPNDEFDEEYFEFGLFMSRREYKTIRRRLTAGHAASCREGKYTGNVPPYGYARKKLPKEKGWTLEIIPEQARAVRLIFDWYQNGLNGLPVGYTMIAEELNHLSIKSPAGTFWNRNSIQNVLRNPVYAGYIKAGYRKEVKKLVDGKMNRSRPLNTDYTLYPGRHEAIISQETWDAVHNRMLKRTAPSARKTRPQQNPLSGMIYCSQCHRVMQRRPYQSGRTATLICTTPHCSTVSSDLPMVEQRILDALDGWLLSGTLPDPDQLPDHSGRIELLQHAVTGCQEELHEADLQLQKQYDLLEKGIYDEETFFERSAIMKKKKSELTSRLKNLQAELQHEISQDASAKNLLPTLQTIHDTYHTITDPAVQNSLLKEVIDHIEYTKSESGRWGRPDNFSLKIYPRVPPA

SEQ ID NO: 3427 - protein, 529 aa, Unknown
  Description of Unknown: Integrase B3428 sequence
  PTHR30461:SF3,SM00857,G3DSA:1.10.10.2600,IPR036162,PS51737, G3DSA:3.40.50.1390,IPR006119,IPR038109,PF07508,SSF53041, IPR011109,PF00239,PTHR30461,PS51736, Coil,cd00338
MSRYCIYLRKSRADLEAEAHGEGETLSRHKTALLELARRKGITISATYEEIVSGETIAARPQMQRLLSEVGAGEWDGVLVMEIERLARGDTMDQGLVAQTFKYSGTKIITPLKTFDPQNEFDEEYFEFGLFMARREFTTTNRRLVRGREASAKEGKYVGSVPPYGYRKVKIPNDKGFTLEIIEEQAKVVRMIFEWYAEGAEVNGQKKRIGPYTIAVRLNELGIKSVAGKDYWTIYGVQHMLINPVYIGKIRWGYRKVKKTVTPEGMKKKSREFAQDGDYIVVDGLHEPILSEELFYKVQDLIAANPPTPIKYRNNNVNPFAGLIFCAKCGHCLSYRKGYGRHPGYLGCNIAGCDNKAAPFELIEQRVLSILNSWVKDYSVDKAQIKHEADLNAELTNAISLAEKEIETLQDQLDKVYSFFERGTYTEKIFKQRSSTIEQQITDIGEKIDRLKAEHQQVLERQNVQAEFVPSIKHLLEIYDTLEPVEKNKWLKQIIDRMVYEKNADGKYRNVDPGDFTLGILPRLPKKGS

SEQ ID NO: 3428 - protein, 529 aa, Unknown
  Description of Unknown: Integrase B3429 sequence
  PTHR30461:SF3,SM00857,G3DSA:1.10.10.2600,IPR036162,PF13408, PS51737,G3DSA:3.40.50.1390,IPR025827,IPR006119,IPR038109, PF07508,IPR011109,SSF53041,PF00239,PTHR30461, PS51736,Coil,cd00338
MQRAVIYARYSPGPNQTEQSIEGQVRECTKYAELHDLRIVGTYVDRKISGKTDNRREFQRMIDDSEKHIFDVIILYHTDRFARNRYDSAIYKHKLKENGVELRYATTDIPKGPEGIILESIMEGWAEYYSAELSRKIKRGMRESALKCHSTGAGRCLGYRTAEDKSLVVEPEGAKAVQTVFDMYIKGKSHADICRYLNDCGFRTAQGKLFNKNSVTHIIRNKRYIGVYTYDDITIEDGIPAIISKDTFHLAQLEAARRKTAKRPKEPKAEYLLSGKAFCGHCQKPLVGVSGTGKSGNKWYYYYCQESRAKRGCTKKPVKRDWLEREVVKRTVAEVLQPEVIQHIAKKCYDLQMEYRQDNSDVLFYELKLKDVRKAIKNTMHAIESGVKTKTLPTRLQELENEEEALEAELAIAKASDFVITVDQIEFLLTQFAEPWECESEEEYHRRIIKCFVHKVFLFDDKLLIYYNVSRDGKTREQSEAELLEEALGEGFDKRSSGSTILIAGRTPECEIIVLRYGFWLALDLTVQA

SEQ ID NO: 3429 - protein, 529 aa, Unknown
  Description of Unknown: Integrase B3430 sequence
  PTHR30461:SF3,IPR036162,PS51737,IPR011109,PTHR30461, PF00239,G3DSA:1.10.10.2600,IPR006119,SSF53041,cd00338, SM00857,IPR025827,IPR038109,PS51736,mobidb-lite, PF13408,G3DSA:3.40.50.1390,PF07508,Coil
MRKKSNLNAATRAVIYARYSSANQRDCSIEQQVAKCRELAARLGLTVIDVYEDRAISGKTDRRPNFQRMMKDADLRQFDVVLAWKSNRMGRNMLQAMTNEERLRDNGIRTVYAEEDFDDTAAGRFALRNMMNVNQFYSENMAEDITRGLMDNAAKCLSNGSLPLGYKPGDDRHVVLDEAEAAIVQEIFTRVSCYEPFIDIARDLNRRGIKTKKGSEWGRSSFHTICRNERYRGIYIYRDVRIEGGMPRIVSDELFYKVQEVLKVKKNPQGRRKRSGYEEYLLTGKLFCGHCGSPMTGIAGTSKTGAMHYYYTCQKRRTDHSCDKKAVRRDQIERAVGVAIQQQLLTDENIQMMADKLMEYNARTETKYRLQGLQDQLNANKTATANILKAIEMGIITDATKARLLELEKEQGQLLVKIDEAKAEMVPISRNDFVKLLYIYKEGEPTDKKYLAALFDNFLVRVDLYDDHLKITFDPTGGRQPIDMPIGAEESPESPGDSSESSNFEASSQDAEKFVLALHNCTKELQALA

SEQ ID NO: 3430 - protein, 529 aa, Unknown
  Description of Unknown: Integrase B3431 sequence
  cd00338,SM00857,G3DSA:1.10.10.2600,IPR036162,PF13408, IPR025827,G3DSA:3.40.50.1390,PS51737,IPR006119,IPR038109, PF07508,SSF53041,IPR011109,PTHR30461,PS51736, Coil,PF00239
MKCTSTWRISDPLAQYIVYLRKSRKDMEAEALGQTDTLKRHRATLLSLAENNGLNVVEICEEVVTGDSIAVRPEVQKVLQLVETGSYTGVLVMEVERLARGDTIDQGIIAQTFKYSNTKIVTPNKVYDPNNEMDEEYFEFGLFMSRREYNTIKRRLSRGKEASLREGKWISGKTPFGWLREKLPNDKGYKLIPHPDQAPILRQIYDWYTGEGCARIGSYAIASRLNTLGVKTNSGNSWTTSAILELLRNPANAGWIKSGGRPETKRIVDGSVVVSRPRTRQEDLKLYKGLHDALISQAQYDKAVSLSYSVVAPRGKGAWKTVTSLAGLVRCDQCGRVMVRRASSGDRRPSFMCPTQGCPTVSSWYSEVEEALLDALRDWLRELEVGEADTNDDHSLLDALSASINADQKQLSKLEAQEARAYELVETGVYTPEVFLQRSQALAADKQVIVSRIEENQRAQDEITRAKQARARLAPAVRHVLEAYPLAATPQDKNDLLKTVLQKVLYHKRSKSYSKAGSDMCLTLYPLTD

SEQ ID NO: 3431 - protein, 529 aa, Unknown
  Description of Unknown: Integrase B3432 sequence
  SM00857,G3DSA:1.10.10.2600,IPR036162,PF13408,PS51737, G3DSA:3.40.50.1390,IPR025827,IPR006119,IPR038109,PF07508, IPR011109,SSF53041,PTHR30461,Coil,PS51736, cd00338,PF00239
MPYCLYLRKSRADIDAEANGEMETLARHEKILLDLAKRMHLDVTEIYREVVSGETISSRPVVQHLLTEVENEMWDGVLVVEIERLARGDTIDQGIVSRAFKFSNTKIITPLKTYDPNNEYDEEYFEFGLFMSRREYKTIRRRLTQGRMSSAKEGKHTGSKAPYGYDRIHVESGKGYTLSPNEKETPIVKMIFDWFVNGQLQEDGSYRKLGAHAIAHRLTNLSIDSPTGNPTWNPRSVYWILHNPVYTGKIRWGYKKDKKIIVDGAVKRTRIIPPEEEQILVEGLHPAIISDEIFNRAQELFLRRGNPSVVIEKELKNPLAGVVVCGICGRPLRYRSNANRRDYGVECRTYGCPCKGSYIYIVEKRIIDALRDWVNEYKLSWDDMPRETHSLLIVKEQAYNAAIKELNTLTKQLDKTHDLLEQGIYDTETFLIRSKSLSEKIAESEKNIAKLSADINNEKLRENNRKNLIPKVENLIDIYWQLPNASAKNDMLKEVLEKVEYTKLHTVGRSKTKKLDDFDLVLYPKLPRT

SEQ ID NO: 3432 - protein, 529 aa, Unknown
  Description of Unknown: Integrase B3433 sequence
  PTHR30461:SF3,SM00857,G3DSA:1.10.10.2600,IPR036162,PF13408, PS51737,G3DSA:3.40.50.1390,IPR025827,IPR006119,IPR038109, PF07508,IPR011109,SSF53041,PTHR30461,Coil, PS51736,cd00338,PF00239
MQQAVIYARYSPGPNQTEQSIEGQVRECTKYAELHDLRIVGTYIDRKISGKTDNRREFQRMIDDSEKHIFDVIILYHTDRFARNRYDSAIYKHKLKENGVELRYATTDIPKGPEGIILESIMEGWAEYYSAELSRKIKRGMRESALKCHSTGAGRCLGYRTAEDKSLVIEPEGAKAVQTVFDMYIKGKSHVDICRYLNDCGFRTAQGKLFNKNSVTHIIRNKRYIGVYTYDDITIEDGIPAIISKDTFHLAQLEAARRKTAKRPKEPKAEYLLSGKAFCGHCQKPLVGVSGTGKSGNKWYYYYCQESRAKRGCTKKPVKRDWLEREVVKRTVAEVLQPEVIQHIAKKCYDLQMEYRQDNSDVLFYELKLKDVRKAIKNTMHAIESGVKTKTLPARLQELENEEEALEAELAIAKASDFVITADQIEFLLTQFAEPWECESEEEYHRRIIKCFVHKVFLFDDKLLIYYNVSRDGKTREQSEAELLEEALGEGFDKRSSGSTILIAGRTPECEIIILRYGFWLALDLTVQV

SEQ ID NO: 3433 - protein, 529 aa, Unknown
  Description of Unknown: Integrase B3434 sequence
  cd00338,SM00857,G3DSA:1.10.10.2600,IPR036162,PF13408, IPR025827,G3DSA:3.40.50.1390,PS51737,IPR006119,IPR038109, PF07508,SSF53041,IPR011109,PTHR30461,PS51736, Coil,PF00239
MNFTSTWKISDPLAQYIIYLRKSRKDMEAEALGQTDTLKRHRAALLSLSESRGLNVVEICEEVVTGDSIAVRPEVQKVLQLVETGNYAGVIVMEVERLARGDTIDQGIIAQTFKYSNTKIVTPNKVYDPNNEMDEEYFEFGLFMSRREYNTIKRRLSRGKEASLREGKWISGKTPFGWSREKLPNDKGYKLVPHPEQAPILQQIYNWYTGEGCARIGAKAISTRLNSLGVPTNSGSLWLADSVLDILRNPANAGWIKSGGRPETKRIVDGAVVVSRPRTRQEDLKLYKGLHDGLISQEQYDKAVALSYSSASPRGKGAWGTVTSLAGLVRCDQCGRVMVRRPSSGNRRDTLLCPSYGCTTVSAWYDDVEDAVLDALRGWLRELELGEAAAPDDTPMRTALESSIAADRKQLAKLEAQEARAYELVETGVYTPEIFLQRSQALAADKQVIVDRIEASQTTIHELSRARQARARLAPAVRRVLETYPLAASPQEKNDLLKTVLQKVLYHKQTKSYTKSGSDMHVTLYPLAD

SEQ ID NO: 3434 - protein, 529 aa, Unknown
  Description of Unknown: Integrase B3435 sequence
  SM00857,G3DSA:1.10.10.2600,IPR036162,PF13408,PS51737, G3DSA:3.40.50.1390,IPR025827,IPR006119,IPR038109,PF07508, IPR011109,SSF53041,PTHR30461,Coil,PS51736, cd00338,PF00239
MPYCLYLRKSRADIDAEANGEMETLARHEKILLDLAKRMHLDVTEIYREVVSGETISSRPVVQHLLTEVENEMWDGVLVVEIERLARGDTIDQGIVSRAFKFSNTKIITPLKTYDPNNEYDEEYFEFGLFMSRREYKTIRRRLTQGRMSSAKEGKHTGSKAPYGYDRIHVESGKGYTLSPNEKEAPIVKMIFDWFVNGQLQEDGSYRKLGAHAIAHRLTNLSIDSPTGNPTWNPRSVYWMLHNPVYTGKIRWGYKKDKKIIVDGAVKRTRIIPPEEEQILVEGLHPAIISDEIFNRAQELFLRRGNPSVVIEKELKNPLAGVVVCGICGRPLRYRSNANRRDFGVECRTYGCPCKGSYIYIVEKRIIDALRDWVNEYKLSWDDMPRETHSLLIVKEQAYNAAIKELNTLTKQLDKTHDLLEQGIYDTETFLIRSKSLSEKIAESEKNIAKLSADINNEKLRENNRKNLIPKVENLIDIYWQLPNASAKNDMLKEVLEKVEYTKLHTVGRSKTKKLDDFDLVLYPKLPRT

SEQ ID NO: 3435 - protein, 529 aa, Unknown
  Description of Unknown: Integrase B3436 sequence
  PTHR30461:SF3,SM00857,G3DSA:1.10.10.2600,IPR036162,PF13408, IPR025827,PS51737,G3DSA:3.40.50.1390,IPR006119,IPR038109, PF07508,IPR011109,SSF53041,PF00239,PTHR30461, Coil,cd00338
MKRAVIYARYSPGPNQTEQSIEGQVRECTKYAEQHDLRIIGTYIDRKISGKTDNRREFQRMIDDSDKHLFDAIILYHTDRFARNRYDSAIYKHRLKENGVELRYATTDIPKGPEGIILESIMEGWAEYYSAELSRKIKRGMRESALKCHSTGSGRCLGYRTAEDKSLVIEPEGAKAVQTVFDMYIKGKSHAEICKYLNDCGFRTAQGKLFNKNSVGHIIKNQRYIGVYTYDDITIEDGIPAIISKDTFHLAQLEAERRKRTKRPLEPKAEYLLSGKAFCGHCQKPLVGVSGTGKSGNKWYYYYCQESRAKRGCTKRPVKRDWLEAEVVRRTVDEILRPEVIQHIAQKCYDLQMEYRQDNSDVLFYELKLKDVRKAIKNTLHAIESGVKTKTLPARLQELENEEEALEAELAVAKASDFIITPSQIEFLLEQFAERWESESEEEYRRRIIKCFVHKVFLFDDKLLIYYNVSRDGKTREQSETELLSSALGEGFDKRSSGSTILIAGRTPECEIIVLRHGFWLALDLTAQV

SEQ ID NO: 3436 - protein, 529 aa, Unknown
  Description of Unknown: Integrase B3437 sequence
  cd00338,SM00857,G3DSA:1.10.10.2600,IPR036162,PF13408, IPR025827,G3DSA:3.40.50.1390,PS51737,IPR006119,IPR038109, PF07508,IPR011109,SSF53041,PTHR30461,PS51736, Coil,PF00239
MKFTSTWRISDPLAQYIVYLRKSRKDMEAEALGQTDTLKRHRATLLFLAENNGLNVVEICEEVVTGDSIAVRPEVQKVLQLVETGSYAGVLVMEVERLARGDTIDQGIIAQTFKYSNTKIVTPNKVYDPNNEMDEEYFEFGLFMSRREYNTIKRRLSRGKEASLREGKWISGKTPFGWLREKLPNDKGYKLIPHPDQAPILRQIYDWYTGEGCARIGSYAIASRLNTLGIKTNSGNSWTTSAILELLRNPANAGWIKSGGRPETKRIVDGSVVVSRPRTRQEDLKLYKGLHDALISQAQYDKAVSLSYSVVAPRGKGAWKTVTSLAGLVRCDQCGRVMVRRASSGDRRPAFICPTQGCPTVSSWYSEVEEALLDALRDWLRELEVGDADTNDDHSLLDALSASINADQKQLAKLEAQEARAYELVETGVYTPEVFLQRSQALAADKQVIVSRVEENQRAQDEITRAKQARARLAPAVRHVLEAYPLAATPQDKNDLLKTVLQKVLYHKRSKSYSKAGSDMCLTLYPLTD

SEQ ID NO: 3437 - protein, 529 aa, Unknown
  Description of Unknown: Integrase B3438 sequence
  PTHR30461:SF3,SM00857,G3DSA:1.10.10.2600,IPR036162,PF13408, PS51737,IPR025827,G3DSA:3.40.50.1390,IPR006119,IPR038109, PF07508,IPR011109,SSF53041,PTHR30461,Coil, PS51736,cd00338,PF00239
MSRYCIYLRKSRADLEAEAHGEGETLSRHKTALLELARRMGITISATYEEIVSGETIAARPQMQRLLSEVGAGEWDGVLVMEIERLARGDTMDQGLVAQTFKYSDTKIITPLKTFDPQNEFDEEYFEFGLFMARREFTTTNRRLVRGREASAKEGKYVGSVPPYGYRKVKIPNDKGFTLEIVEEQAKVVRMIFEWYAEGAEVNSQKKRIGPYTIAVRLNELGIKSAGKKDYWTIYGVQNMLINPVYIGKIRWGYRKVKKTVTPEGMKKKSREFAQDGDYIVVDGLHEPILSEELFYKVQDLIAANPPTPIKYRHKNINPFAGLIFCAKCGHCMNYRRGYGRQPDYIGCYTAGCKNKASRFDLVEQRVLSILNSWVKDYSVDKAQIKHEADLNAELSNAISLAEKEIETLQDQLDKVYSFFERGTYTEKIFKQRSSAIEQQIMEIGEKIDRLKAEHQQVLERQNVQAEFVPSIKHLLEIYDTLEPVEKNKWLKQIIDRIVYEKNADGKYHNVDPGDFTIGILPRLPKKGN

SEQ ID NO: 3438 - protein, 529 aa, Unknown
  Description of Unknown: Integrase B3439 sequence
  SM00857,G3DSA:1.10.10.2600,IPR036162,PF13408,PS51737, G3DSA:3.40.50.1390,IPR025827,IPR006119,IPR038109,PF07508, IPR011109,SSF53041,PF00239,PTHR30461,PS51736, Coil,cd00338
MNFTSTWKIADPLAQYIIYLRKSRKDMEAEALGQTDTLKRHRAALLSLSESRALNVVEICEEVVTGDSIAVRPEVQKVLQLVETGNYAGVIVMEVERLARGDTIDQGIIAQTFKYSDTRIITPNKTYDPNNEMDEEYFEFGLFMSRREYNTIKRRLSRGKEASLREGKWISGKTPFGWSREKLPNDKGYKLVPHPEQAPILQQIYNWYTGEGCARIGAKAISTRLNSLGVPTNSGSLWRADSVLDVLRNPANAGWIKSGGRPETKRIVDGAVVVSRPRTRQEDLKLYKGLHDGLISQEQYDKAVALSYSSASPRGKGAWGTVTSLAGLVRCDQCGRVMVRRPSSGNRRDTLLCPSYGCTTVSAWYDDVEDAVLDALRGWLRELELGEAAAPDDTPMRTALESSIAADRKQLAKLEAQEARAYELVETGVYTPEIFLQRSQALAADKQVIVDRIEASQTTIHELARARQARARLAPAVRRVLETYPLAASPQEKNALLKTVLQKVLYHKQTKSYTKSGSDMHVTLYPLAD

SEQ ID NO: 3439 - protein, 529 aa, Unknown
  Description of Unknown: Integrase B3440 sequence
  cd00338,SM00857,G3DSA:1.10.10.2600,IPR036162,PF13408, IPR025827,G3DSA:3.40.50.1390,PS51737,IPR006119,IPR038109, PF07508,SSF53041,IPR011109,PTHR30461,PS51736, Coil,PF00239
MKFTSTWKIADPLAQYIIYLRKSRKDMEAEALGQTDTLKRHRAALLSLSESRGLNVVEICEEVVTGDSIAVRPEVQKVLQLVETGNYAGVIVMEVERLARGDTIDQGIIAQTFKYSDTRIITPNKTYDPNNEMDEEYFEFGLFMSRREYNTIKRRLSRGKEASLREGKWISGKTPFGWSREKLPNDKGYKLVPHPEQAPVLQQIYNWYTGEGCARIGAKAISTRLNSLGVPTNSGSLWRADSVLDILRNPANAGWIKSGGRPETKRIVDGAVVVSRPRTRQEDLKLYKGLHDGLISQEQYDKAVALSYSSASPRGKGAWGTVTSLAGLVRCDQCGRVMVRRPSSGNRRDTLLCPSYGCTTVSAWYDDVEDAVLDALRGWLRELELGEAAAPDDTPMRTALESSIAADRKQLAKLEAQEARAYELVETGVYTPEIFLQRSQALAADKQVIVDRIEASQTTIHELARARQARARLAPAVRRVLETYPLAASPQEKNALLKTVLQKILYHKQAKSYTKSGSDMHVTLYPLAD

SEQ ID NO: 3440 - protein, 529 aa, Unknown
  Description of Unknown: Integrase B3441 sequence
  SM00857,G3DSA:1.10.10.2600,IPR036162,PF13408,PS51737, G3DSA:3.40.50.1390,IPR025827,IPR006119,IPR038109,PF07508, SSF53041,IPR011109,PTHR30461,Coil,PS51736, cd00338,PF00239
MGNMRIIEIPASMRESAGQKNTVRKLRVAAYCRVSTEEEEQQGSFEIQKLYYTEKINSTPEWEVAGIYADDGISGVHTKKRDGFNQMIQDCKKHRIDLILTKSISRFARNTLDSIQYVRMLKQMGIAVVFEKENINTATMNSEMILTVLSAFAQAESESISQNVARGKRMGYKHGKFAFPYGRIIGYRKGADGKPEIIPEQAEIIRLIFNRYLQGDSLQSIKAKLETAGALTARGNTAWSAQSIQRILQNEKYCGDVLLQKTFTEDVLTGVHKKNTGQLPQYYIENYHEGIVSKQMFREVQAEIARRNSKSAANQRKRRRGRYNSKYALSERLFCGDCGSPYKRVTWNIHGRKQIVWRCVNRIEYGTKFCGSSPSIPEEELHRAILKAVQDLAANFTDEVAAQINGILHDIQTGESAKPNLQEQLEQTQQEFDRLLEMSLDFDEDTPFLDDRLKKLNSKIKSLKKGIEDSAARQEKIGQPEMLLSAKDMQIQEYDDTLTARIIEKITVRSRNEIEIRFIGGYKKTMQLI

SEQ ID NO: 3441 - protein, 529 aa, Unknown
  Description of Unknown: Integrase B3442 sequence
  PTHR30461:SF3,SM00857,G3DSA:1.10.10.2600,IPR036162,PF13408, PS51737,G3DSA:3.40.50.1390,IPR025827,IPR006119,IPR038109, PF07508,IPR011109,SSF53041,PF00239,PTHR30461, PS51736,Coil,cd00338
MSSVDKTAVIYARYSSHGQTEQSIEGQIAAAQKYAEGKGYTIIHIYADRAMTGRNDDREQFQKMLSDTATHQFGVILLWKIDRFGRNREEIAFNRYRCKKNGVRVERVAEDVPDGPEGVILDSVLEGMAEYYSLQLAQNVRRGQRESAKKSQTVGGCNIIGYKVNPDTKRYEVDPKTAPFVTEVFKRYANGETISEIVAWLNVQGVRATRGGEFTVNSLHRLLKNEKYTGVYIFHDIRNEGGMPALTDRATFDKVQEMLKVNRRAPARVWSKTEYLLTDKLFCGHCGAMMVGESGHGRNGTKHSYYTCWNRKKKKSCSKKPVRQDVIEPMVLRVISKMLSDEATLEYIADQVWAVYERSDTSGDTIKALDKQIADVDRALSNVMKAIEMGIINEMTKARMDELTDQKQALSVARAEAGLAGGFKLTRDMILFFLHDMAATNMTDCDCQKRLIKTFVNAIYLYDDHFDIAFNYTSNGKMVVKMQEINDTTSGEVFGRCAQSPAIVRTSEPLITIVVSCSVFVFSVKMPEV

SEQ ID NO: 3442 - protein, 529 aa, Unknown
  Description of Unknown: Integrase B3443 sequence
  SM00857,G3DSA:1.10.10.2600,IPR036162,PF13408,IPR025827, G3DSA:3.40.50.1390,PS51737,IPR006119,IPR038109,PF07508, SSF53041,IPR011109,PF00239,PTHR30461,PS51736, Coil,cd00338
MNFTSTWKISDPLAQYIIYLRKSRKDMEAEALGQTDTLKRHRAALLSLSESRGLNVIEICEEVVTGDSIAVRPEVQKVLQLVETGNYAGVIVMEVERLARGDTIDQGIIAQTFKYSDTRIITPNKTYDPNNEMDEEYFEFGLFMSRREYNTIKRRLSRGKEASLREGKWISGKTPFGWSREKLPNDKGYKLVPHPEQAPVLRQIYNWYTGEGCARIGAKAISTRLNSLGVPTNSGSLWRADSVLDILRNPANAGWIKSGGRPETKRIVDGAVVVSRPRTRQEDLKLYKGLHDGLISQEQYDKAVALSYSSASPRGKGAWGTVTSLAGLVRCDQCGRVMVRRPSSGNRRDTLLCPSYGCTTVSAWYDDVEDAVLDALRGWLRELELGEAAAPDDTPMRTALESSIAADRKQLAKLEAQEARAYELVETGVYTPEIFLQRSQALAADKQVIVDRIDASQTTIHELARARQARARLAPAVRRVLETYPLAASPQEKNALLKTVLQKILYHKQAKSYTKSGSDMHVTLYPLAD

SEQ ID NO: 3443 - protein, 529 aa, Unknown
  Description of Unknown: Integrase B3444 sequence
  SM00857,G3DSA:1.10.10.2600,PS51736,IPR036162,PS51737, PF13408,IPR025827,G3DSA:3.40.50.1390,IPR006119,IPR038109, PF07508,IPR011109,SSF53041,PF00239,PTHR30461, mobidb-lite,Coil,cd00338
MKFTSTWRISDPIAQYIVYLRKSRKDIEAEALGQTDTLKRHRAALLSLAESSGLNVVEICEEVVTGDSIAVRPEVQKVLQLVETGSYAGVLVMEVERLARGDTIDQGIIAQTFKYSNTKIVTPNKVYDPNNEMDEEYFEFGLFMSRREYNTIKRRLSRGKEASLREGKWISGKTPFGWSREKLPNDKGYKLVPHPEQAQTLQQIYDWYTGEGCARIGSFAIATRLNHLGVKTNSGSAWTASAVLDTLRNPANAGWIKSGGRPETKRIVDGSVVVSRPRTRQEDLKLYKGLHDALISQAQYDKAVSLSYSVVAPRGKGAWKTVTSLAGLVRCDQCGRVMVRRASSGDRRPSFMCPTHGCPTVSSWYSEVEEALLDALRDWLRELEVGEADTNDDHSLLDALSASINADQKQLAKLEAQEARAYELVETGVYTPEVFLQRSQALAADKQVIVSRVEENQRAQDEITRAKQARARLAPAVRHVLETYPLAATPQDKNELLKTVLQKVLYHKQSKSHSKSGSDMRVTLYPLTD

SEQ ID NO: 3444 - protein, 529 aa, Unknown
  Description of Unknown: Integrase B3445 sequence
  PTHR30461:SF3,SM00857,G3DSA:1.10.10.2600,IPR036162,PS51737, G3DSA:3.40.50.1390,IPR006119,IPR038109,PF07508,IPR011109, SSF53041,PTHR30461,Coil,PS51736,cd00338, PF00239
MSRYCIYLRKSRADLEAEAHGEGETLSRHKTALLELARRMGITISATYEEIVSGETIAARPQMQRLLSEVGAGEWDGVLVMEIERLARGDTMDQGLVAQTFKYSGTKIITPLKTFDPQNEFDEEYFEFGLFMARREFTTTNRRLVRGREASAKEGKYVGSVPPYGYRKVKIPNDKGFTLEIVEEQAKVVRMIFEWYAEGAEVNGQKKRIGPYTIAVRLNELGIKSAGKKDYWTIYGVQNMLINPVYIGKIRWGYRKVKKTVTPEGMKKKSREFAQDGDYIVVDGLHEPILSEELFYKVQDLIAANPPTPIKYRNNNVNPFAGLIFCAKCGHCLSYRKGYGRHPGYLGCNIAGCDNKAAPFELIEQRVLSILNSWVKDYSVDKAQIKHEADLNAELTNAISLAEKEIETLQDQLDNVYSFFERGTYTEKIFKQRSSAIEQQITDIGEKIDRLKAEHQQVLERQNVQAEFVPSIKHLLEIYDTLEPVEKNKWLKQIIDRMVYEKNADGKYRNVDPGDFTLGILPRLPKKGS

SEQ ID NO: 3445 - protein, 529 aa, Unknown
  Description of Unknown: Integrase B3446 sequence
  PTHR30461:SF3,SM00857,G3DSA:1.10.10.2600,IPR036162,PF13408, PS51737,IPR025827,G3DSA:3.40.50.1390,IPR006119,IPR038109, PF07508,IPR011109,SSF53041,PF00239,PTHR30461, PS51736,Coil,cd00338
MAKVTVIPSTINPITKLPNNGLQKRKVAGYARVSTILDEQCSSYQAQVDYYTNLIKRNPEWEFVEVYADEGISGTNTKRRGGFNQMMQDALDGKIDLILTKSVSRFARNTVDSLTFIRKLKEKGVEVFFEKENIYTFDSKGELLITIMASLAQEESRSISENVTWGKRKAFSDGKVSMPYKHFLGYKKGEDGRPTIDEKESLVVKEIYSLFLKYGYSTTKIAKEFNERGICTPSGKGKWTLTTVESILSNEKYKGDALLQKKYVVDFLTHRSKPNEGEIPQYYVENSHPAIIDKVEWDLVQIELERRKKLCKTYSSKNIFSSKLVCEDCDSFFGRKIWHSNDEYKAIVYQCNGKFKNKDKRCNTPTLREEEIKSMFLEAYNKFVLDKTALVGDCKLMIETIADVSLLDEQISKQIEKLEELAKKVKELVSSNASTPELQIDYINDYDKLCTMHSIEETRYKLLLKEKSGRLAKAKSMELFIESIKDKADVIDSWNSDLWILLVDKAIVHHDKSITFVFKNMKEITIAAK

SEQ ID NO: 3446 - protein, 529 aa, Unknown
  Description of Unknown: Integrase B3447 sequence
  PTHR30461:SF3,IPR036162,PS51737,IPR011109,PTHR30461, PF00239,G3DSA:1.10.10.2600,IPR006119,SSF53041,cd00338, SM00857,IPR025827,IPR038109,PS51736,mobidb-lite, PF13408,G3DSA:3.40.50.1390,PF07508,Coil
MKKRINTNSAARAVIYARYSSANQRDCSIEQQVEKCRELAAREGVTVIEIYADRAISGKTDRRPNFQRMMKDSSLRQFDVVLAWKSNRMGRNMLQAMMNEEQLRSNGIRTIYAEEDFDDTAAGRFALRNMMNVNQFYSENMAEDISRGLMDNASKCMSNGSLPLGYKTGKDQKVVLDEAEAAIVQEIFTRVSCYEPFIDIARDLNRRGIKTKKGAEWGRSSFHTICRNERYRGIYIYRDIRVEGGMPRIVSDELFYKVQEVLKVKKNPQGRRKRSGYEEYLLTGKLYCGHCGSPMTGIAGTSKTGAMHYYYTCQKRRTDHSCDKKAVRRDQIEKAVAIAIQQQLLTDENIQMMADETMAYNARTEIKYRLQSLQQQLYSNETSTANIMKAIEMGIITDTTKARLLALEQEHGQLLAKIDTAKAEMVPINREDFVSLLDIYRTGDVNNKKYLAALFDTFLVRVDLYDDHFKITFDPTGGKMPVDIPIGAEDSPESPGDSPESSDFEASPQDAEKFVLALHNRTKEKHLET

SEQ ID NO: 3447 - protein, 529 aa, Unknown
  Description of Unknown: Integrase B3448 sequence
  PTHR30461:SF3,SM00857,G3DSA:1.10.10.2600,IPR036162,PF13408, IPR025827,G3DSA:3.40.50.1390,PS51737,IPR006119,IPR038109, PF07508,IPR011109,SSF53041,PTHR30461,cd00338, PF00239
MPTSKNTARKYAAGGSSDNSCGVEPLRAVIYARYSSSGQREESIEGQLRDCYEFAKKHGIIVIGEYIDKAMTGRVDRRPDFQRMMKDSEKGRFNCVLLWKMDRFARNRYDSAMYKYKLKKNGIRIFYAKETIPDGPEGIILESVMEGYAEYYSENLAQNVKRGNYDSALELKTLGKTCLGLKTGPDGRYMIDQAEAVIVRRIFEEYAEGERAKDIYERLNSEGYRTSRGGKFNKNSLRRILSNKKYIGVYEYEDIYVENGIPAIITDRDLFERVQKMLKINHDAPARGKAQNFLLTTKLFCGLCGSPMIGDGGTSHTGKAYAYYSCTKRKRGRSCKKESVPKDWIEDLVVGELVKIVHNDELIEQIADRVMEYQKREKDQSGLHALEIRQKENEKAISNMLAAIEAGIITPSTKTRLMELEADRADIEKGIAHELLAEPEFERDQIIYFLERFRSGDINDEAYRIMLVDTFLNSVYLYDDDHLVLVMNYSGENCKVDLKLVEGAVSGDGCKGSAFAPSSALYKPVREFL

SEQ ID NO: 3448 - protein, 529 aa, Unknown
  Description of Unknown: Integrase B3449 sequence
  PTHR30461:SF3,SM00857,G3DSA:1.10.10.2600,IPR036162,PF13408, IPR025827,G3DSA:3.40.50.1390,PS51737,IPR006119,IPR038109, PF07508,SSF53041,IPR011109,PF00239,PTHR30461, PS51736,Coil,cd00338
MQRAVIYARYSPGPNQTEQSIEGQVRECTKYAELHDLRIVGTYIDRKISGKTDNRREFQRMIDDSEKHIFDVIILYHTDRFARNRYDSAIYKHKLKENGVELRYATTDIPKGPEGIILESIMEGWAEYYSAELSRKIKRGMRESALKCHSTGAGRCLGYRTAEDKSLVIEPEGAKAVQTVFDMYIKGKSHADICRYLNDCSFRTAQGKLFNKNSVTHIIRNKRYIGVYTYDDITIEDGIPAIISKDTFHLAQLEAARRKTAKRPKEPKAEYLLSGKAFCGHCQKPLVGVSGTGKSGNKWYYYYCQESRAKRGCTKKPVKRDWLEREVVKRTIAEVLQPEVIQHIAKKCYDLQMEYRQDNSDVLFYELKLKDVRKAIKNTMHAIELGVKTKTLPARLQELENEEEALEAELAIAKASDFVITADQIEFLLTQFTEPWECESEEEYHRRIIKCFVHKVFLFDGKLLIYYNVSRDGKTREQSEAELLEEALGEGFDKRSSGSTILIAGRTPECEIIVLRYGFWLALDLTVQA

SEQ ID NO: 3449 - protein, 529 aa, Unknown
  Description of Unknown: Integrase B3450 sequence
  SM00857,G3DSA:1.10.10.2600,IPR036162,PF13408,IPR025827, G3DSA:3.40.50.1390,PS51737,IPR006119,IPR038109,PF07508, IPR011109,SSF53041,PF00239,PTHR30461,PS51736, Coil,cd00338
MNFTSTWKIADPLAQYIIYLRKSRKDMEAEALGQTDTLKRHRAALLSLSESRALNVVEICEEVVTGDSIAVRPEVQKVLQLVETGNYAGVIVMEVERLARGDTIDQGIIAQTFKYSDTRIITPNKTYDPNNEMDEEYFEFGLFMSRREYNTIKRRLSRGKEASLREGKWISGKTPFGWSREKLPNDKGYKLVPHPEQAPILQQIYNWYTGEGCARIGAKAISTRLNSLGVPTNSGSLWRTDSVLDILRNPANAGWIKSGGRPETKRIVDGAVIVSRPRTRQEDLKLYKGLHDGLISQEQYDKAVALSYSSASPRGKGAWGTVTSLAGLVRCDQCGRVMVRRPSSGNRRDTLLCPSYGCTTVSAWYDDVEDSVLDALRGWLRELELGEAAAPDDTPMRTALESSIAADRKQLAKLEAQEARAYELVETGVYTPEIFLQRSQALSADKQVIVDRIEASQTTITELARAKQARARLAPAVRRVLETYPLAASPQEKNALLKTVLQKVLYHKQTKSYTKSGSDMHVTLYPLAD

SEQ ID NO: 3450 - protein, 529 aa, Unknown
  Description of Unknown: Integrase B3451 sequence
  PTHR30461:SF3,SM00857,G3DSA:1.10.10.2600,IPR036162,PF13408, PS51737,G3DSA:3.40.50.1390,IPR025827,IPR006119,IPR038109, PF07508,IPR011109,SSF53041,PTHR30461,Coil, PS51736,cd00338,PF00239
MPKAKNVTVIPATLNIHTKTPTTERVRRRVAAYARVSTDSEEQLTSYEAQVDYYTKFIRENPDWDFVEVYTDEGISAVNTKHRDGFNRMIRDALAGKIDLIVTKSVSRFARNTVDSLTTIRKLKEAGCECFFQKENIMTFDSKGELLITIMSSLAQEESRSISENVTRGQRKRFSDGKVSIPYGQFLGYRKGADGLPEIVPEEAEVVRRIYRELLQGKSTNAIAAMLTEEGIPTPGKKTVWQRATVESILRNEKYKGSALLQKSFTVDFLTKKTKINEGEVPQYYVEDSHPAIIEPWEWEQVQAELERRKNSRTRHRQTSPFSGKIFCADCGEIFGSKTWHSTDRYRRIVWQCNGKFKREHKCETPHLTEERLKELFFAALGEYLSDRNAAIDRLRYAQRMLTDTDFIDADIQALEEELTTITGMLRLCIAENAANTMTEETYRTTHDELCSRFEETEAKLAVLQKQRDKMKADAIAIGGMMFKLGELESLPLTFDEKLWNGTVDHVTVHADERVVFRFKDGKEIVTRL

SEQ ID NO: 3451 - protein, 529 aa, Unknown
  Description of Unknown: Integrase B3452 sequence
  PTHR30461:SF3,SM00857,G3DSA:1.10.10.2600,IPR036162,PF13408, IPR025827,PS51737,G3DSA:3.40.50.1390,IPR006119,IPR038109, PF07508,SSF53041,IPR011109,PF00239,PTHR30461, PS51736,Coil,cd00338
MAKVRVIPSTLNPLTQSPISETKKKKVAAYARVSTDSDEQYTSYEMQVKYYKKFIQEHDGWIYVNVYADEGITGTNTKKRDSFNQMINDALDGKIDLIITKSISRFARNTLDTISITRKLKVSGVEVFFEKEGLWTFDSKSELILTIMASIAQEESRSISANVTMGKRWGMQEGKVSFAYKNFLGYKKENGKIVIDEEQAVIVRRIYSMFLKEGKTCSGIAVQLKKEGILTPSGNSSNWQKNTVLSILTNEKYKGDALLQKTFTANFLEHNVKRNNGQLPQYYVENSHPAIINRYEWEQVQTELARRQEIGRNYSGAGAFASKLVCEDCGGFYGMKVWHSNSKFKKMILQCNNKFKKGKSRCQTPHLTEDEVKEMFIRTYNETMKDKTKVIDDTEAVIAMLTNTDEIDKRIASLTSEIEIVSELVKKLIRENSSAAQSQDDYQTKYNELSSRYDKTKKALEKAMQDKAHKQGQRIKLQSFLESLKQKECIIDQWDEELWMIMVEKAIVHRDKSITFKFYNGKEITLTSA

SEQ ID NO: 3452 - protein, 529 aa, Unknown
  Description of Unknown: Integrase B3453 sequence
  PTHR30461:SF3,SM00857,G3DSA:1.10.10.2600,IPR036162,PF13408, IPR025827,G3DSA:3.40.50.1390,PS51737,IPR006119,IPR038109, PF07508,IPR011109,SSF53041,PF00239,PTHR30461, PS51736,Coil,cd00338
MSSVDKIAVVYARYSSHGQTEQSIEGQIAAAQKYAEQHGYTIIHIYADRAMTGRNDDREEFQKMLSDTATRQFGVILLWKIDRFGRNREEIAFNRYRCKKNGVRVERVAEDVPDGPEGVILDSVLEGMAEYYSLQLAQNVRRGQRESAKKSQTVGGCKIIGYNVNPDTKRYEVDPKTAPFVTEVFKRYANGETISEIVAWLNAQGVRTTRGGEFTVNSLHRLLKNEKYTGVYIFHDIRNEGGMPALIDRATFDKAQEMLKVNRRAPARVWSKTEYLLTDKLFCGHCGTMMVGESGHGRNGTKHNYYTCWNRKKKKTCDKKPIRQDVIEPLVLRAIGKLLENPATLENIADQVWAAYERSDTSGDTIKALDKQIADVDRALSNVMKAIEMGIINEMTKARMDELTDQKQALSAARAEAGLAGGFKLTRDMILFFLQEMASLDRSDRNCQKRLIKTFVNAIYLYDDHFDIAFNYTSNGKTVVKMQEINDTASGEVFGRCAQSPAIVQTSEPLITIVVSCSVFVFSVKMPEA

SEQ ID NO: 3453 - protein, 529 aa, Unknown
  Description of Unknown: Integrase B3454 sequence
  cd00338,SM00857,G3DSA:1.10.10.2600,IPR036162,PF13408, IPR025827,G3DSA:3.40.50.1390,PS51737,IPR006119,IPR038109, PF07508,IPR011109,SSF53041,PTHR30461,PS51736, Coil,PF00239
MNFTSTWKIADPLAQYIIYLRKSRKDMEAEALGQTDTLKRHRAALLSLSESRGLNVVEICEEVVTGDSIAVRPEVQKVLQLVETGNYAGVIVMEVERLARGDTIDQGIIAQTFKYSDTRIITPNKTYDPNNEMDEEYFEFGLFMSRREYNTIKRRLSRGKEASLREGKWISGKTPFGWSREKLPNDKGYKLVPHPEQAPVLRQIYNWYTGEGCARIGAKAISTRLNSLGVPTNSGSLWRADSVLDILRNPANAGWIKSGGRPETKRIVDGAVVVSRPRTRQEDLKLYKGLHDGLISQEQYDKAVALSYSSASPRGKGAWGTVTSLAGLVRCDQCGRVMVRRPSSGNRRDTLLCPSYGCTTVSAWYDDVEDAVLDALRGWLRELELGEAAAPDDTPMRTALESSISADRKQLAKLEAQEARAYELVETGVYTPEIFLQRSQALAADKQVIVDRIEASQTTITELARARQARARLAPAVRRVLETYPLAASPQEKNALLKTVLQKVLYHKQTKSYTKSGSDMHVTLYPLAD

SEQ ID NO: 3454 - protein, 529 aa, Unknown
  Description of Unknown: Integrase B3455 sequence
  cd00338,SM00857,G3DSA:1.10.10.2600,IPR036162,PF13408, IPR025827,G3DSA:3.40.50.1390,PS51737,IPR006119,IPR038109, PF07508,IPR011109,SSF53041,PTHR30461,PS51736, Coil,PF00239
MKFTSTWKIADPLAQYIIYLRKSRKDMEAEALGQTDTLKRHRAALLSLAESRKLNVVEICEEVVTGDSIAVRPAVQKVLQFVETGAYAGVLVMEVERLARGDTIDQGIIAQTFKYSNTMIITPNKSYDPNNEMDEEYFEFGLFMSRREYNTIKRRLTRGKEASIREGKWISGKTPFGWLREKIPNDKGYMLVPHPEQAPILQQIYDWYTGEGCVRVGSSAIATRLNRLGVKTNTGSRWTASAILEVLRNPANAGWIKSKGRPEIKHIVDGSVVVSRPRARIEDLTLHKGLHNGLISQEQFDRAVALSYSTASPRGKGAWKTATSLAGLVRCDQCGRIMVRRATSGGRKDTFLCPSYGCPTVSAWYDEVETAVLGALRGWLHELEVGEAVSADDSSLLSALSSAISADQKQLAKLEAQEARAYEFVETGVYTPEVFLQRSQSLAADKLAILSRIEENQRAIDDIDRAKQARARLAPAVRHVLETYPLAGSVQEQNDLLKTVLQKIVYHKRSKSYSKAGSDMRVTLYPLTD

SEQ ID NO: 3455 - protein, 529 aa, Unknown
  Description of Unknown: Integrase B3456 sequence
  PTHR30461:SF3,IPR036162,PS51737,IPR011109,PTHR30461, PF00239,G3DSA:1.10.10.2600,IPR006119,SSF53041,cd00338, SM00857,IPR025827,IPR038109,mobidb-lite,PS51736, PF13408,G3DSA:3.40.50.1390,PF07508,Coil
MKKRINTNSAARAVIYARYSSANQRDCSIEQQVEKCRELAAREGVTVIEIYADRAVSGKTDRRPNFQRMMKDASLRQFDVVLAWKSNRMGRNMLQAMMNEEQLRSNGIRTIYAEEDFDDTAAGRFALRNMMNVNQFYSENMAEDISRGLMDNASKCMSNGSLPLGYKTGKDQKVVLDEAEAAIVQEIFTRVSCYEPFIDIARDLNRRGIKTKKGAEWGRSSFHTICRNERYRGIYIYRDIRVEGGMPRIVSDELFYKVQEVLKVKKNPQGRRKRSGYEEYLLTGKLYCGHCGSTMTGIAGTSKTGAMHYYYTCQKRRTDHSCDKKAVRRDQIEKAVAIAIQQQLLTDENIQMMADETMAYNARTEIKYRLQSLQQQLYSNETSTANIMKAIEMGIITDTTKARLLALEQEHGQLLAKIDTVKAEMVPINREDFVSLLDIYRTGDVNNKKYLAALFDTFLVRVDLYDDHFKITFDPTGGKMPVDIPIGAEDSPESPGDSPESSDFEASPQDAEKFVLALHNRTKELQALA

SEQ ID NO: 3456 - protein, 529 aa, Unknown
  Description of Unknown: Integrase B3457 sequence
  PTHR30461:SF3,SM00857,G3DSA:1.10.10.2600,IPR036162,PF13408, PS51737,IPR025827,G3DSA:3.40.50.1390,IPR006119,IPR038109, PF07508,IPR011109,SSF53041,PTHR30461,Coil, PS51736,cd00338,PF00239
MSRYCIYLRKSRADLEAEAHGEGETLSRHKTALLELARRMGITISATYEEIVSGETIAARPQMQRLLSEVGAGEWDGVLVMEIERLARGDTMDQGLVAQTFKYSGTKIITPLKTFDPQNEFDEEYFEFGLFMARREFTTTNRRLVRGREASAKEGKYVGSVPPYGYRKVKIPNDKGFTLEIVEEQAKVVRMIFEWYAEGAEVNSQKKRIGPYTIAVRLNELGIKSAGKKDYWTIYGVQNMLINPVYIGKIRWGYRKVKKTVTPEGMKKKSREFAQDGDYIVVDGLHEPILSEELFYKVQDLIAANPPTPIKYRHKNINPFAGLIFCAKCGHCMNYRRGYGRQPDYIGCYTAGCKNKASRFDLVEQRVLSILNSWVKDYSVDKAQIKHEADLNVELSNAISLAEKEIETLQDQLDKVYSFFERGTYTEKIFKQRSSAIEQQITDIGEKIDRLKAEHQQVLERQNVQAEFVPSIKHLLEIYDTLEPVEKNKWLKQIIDHMVYEKNADGKYRNVDPGDFTLGILPRLPKKGS

SEQ ID NO: 3457 - protein, 529 aa, Unknown
  Description of Unknown: Integrase B3458 sequence
  SM00857,G3DSA:1.10.10.2600,IPR036162,PF13408,IPR025827, G3DSA:3.40.50.1390,PS51737,IPR006119,IPR038109,PF07508, IPR011109,SSF53041,PF00239,PTHR30461,PS51736, Coil,cd00338
MSNMRIIEIPASMRESAGRKNTVRKLRVAAYCRVSTEEEEQQGSFEIQKLYYTEKINSTPEWEVAGIYADDGISGVHTKKRDGFNQMIQDCKKRKIDLILTKSISRFARNTLDSIQYVRMLKQMGIAVVFEKENINTATMNSEMILTVLSAFAQAESESISQNVARGKRMGYKHGKFAFPYGRIIGYRKGADGKPEIIPDQAEVIRLIFNSYLQGDSLQSIKAKLETAGALTARGNTAWSAQSIQRILQNEKYCGDVLLQKTFTEDVLTGVHKKNTGQLPQYYIENYHEGIVSKQMFREVQAEIARRNSKSAANQRKRRRGRYNSKYALSERLFCGNCGSPYKRVTWNIHGRKQIVWRCVNRIEYGTKFCGSSPSVPEEKLHRAILKAVQDLAANFTDEVAAQINGILHDIQTGESTKPNLQEQLEQTQQEFDRLLEMSLDFDENTPFLDDKLKKLNNKIKSLKKAIEDSAARQEKTRQPEMLLSAKDLQIQEYDDALTARIIEKITVRSRNEIEIRFIGGYKKTMQLT

SEQ ID NO: 3458 - protein, 529 aa, Unknown
  Description of Unknown: Integrase B3459 sequence
  cd00338,SM00857,G3DSA:1.10.10.2600,IPR036162,PF13408, IPR025827,PS51737,G3DSA:3.40.50.1390,IPR006119,IPR038109, PF07508,IPR011109,SSF53041,PTHR30461,PS51736, Coil,PF00239
MKYTSTWRISDPLAQYIVYLRKSRKDMEAEALGQTDTLKRHRAALLSLAESRGLNVVEICEEVVTGDSIAVRPEVQKVLQLVETGSYAGVLVMEVERLARGDTIDQGIIAQTFKYSNTKIITPNKIYDPNNEMDEEYFEFGLFMSRREYNTIKRRLSRGKEASLREGKWISGKTPFGWLREKLPNDKGYKLIPHPEQAPILRQIYDWYTGEGCARIGSYAIASRLNALGVKTNSGNSWTTSAILELLRNPANAGWIKSGGRPETKRIVDGSVVVSRPRTRLEDLKLYKGLHDALISQAQYDKAVSLSYSVVAPRGKGAWKTVTSLAGLVRCDQCGRVMVRRASSGDRRPSFMCPTQGCPTVSSWYSEVEEALLDALRDWLRELEVGEADTNDDHSLLDALSASINADQKQLAKLEAQEARAYELVETGVYTPEVFLQRSQALAADKQVIVSRIEENQRAQDEITRAKQARARLAPAVRHVLEAYPLAATPQDKNDLLKTVLQKVLYHKRSKSYSKAGSDMCLTLYPLTD

SEQ ID NO: 3459 - protein, 529 aa, Unknown
  Description of Unknown: Integrase B3460 sequence
  PTHR30461:SF3,SM00857,G3DSA:1.10.10.2600,IPR036162,PF13408, PS51737,G3DSA:3.40.50.1390,IPR025827,IPR006119,IPR038109, PF07508,SSF53041,IPR011109,PF00239,PTHR30461, PS51736,Coil,cd00338
MSNEKDYSVLPEVTIIQESAKIESEEHKPKKLRVCAYARVSTEKEEQEYSFENQRDYYMDYISKRSDWEFVGIYSDFGLSGKNKKRPQFIKMIDDCHAGKIDRIITKSISRFARNTIDCIQTVRDLREKGIGVYFEREGIDSLSPQSALVLSIMAIVAEEESRSISNNIKWAIQKQFAQGHYLIHTKHFLGYSREEDNRIIIIPKQALAVRSIYQLYLDGKSIHQIALEMELREIESPEGNKNWGDSTILSILKNEKYKGDCLLQKTYSPDFLASKRYKNTGQLRSYYVKSHHAPIISSAMFDEVQNEMQRRKDLRTGSKAYPSKYSGKSCLSGLLICGQCGGVMRRHVQYRKGGGIGYWVCQRHDQGSCSMMQIKEKVIIDGLQMVIRQILFQKEPLYTEMTDTIINSARKAHKSSIKSVNAKIKRVQRQIQQIKDDYIEDAITYEEYCHLSRQFIHTEPFLELEREEMIQENKCLAPIEQRIEEISQRLKLQTLYEHFNEDLHMGVQKTRKQWSGILQEPTYQRRSP

SEQ ID NO: 3460 - protein, 529 aa, Unknown
  Description of Unknown: Integrase B3461 sequence
  PTHR30461:SF3,SM00857,G3DSA:1.10.10.2600,IPR036162,PF13408, PS51737,IPR025827,G3DSA:3.40.50.1390,IPR006119,IPR038109, PF07508,IPR011109,SSF53041,PF00239,PTHR30461, PS51736,Coil,cd00338
MSRYCIYLRKSRADLEAEAHGEGETLSRHKTALLELARRMGITISATYEEIVSGETIAARPQMQRLLSEVGAGEWDGVLVMEIERLARGDTMDQGLVAQTFKYSGTKIITPLKTFDPQNEFDEEYFEFGLFMARREFTTTNRRLVRGREASAKDGKYVGSVPPYGYRKVKIPNDKGFTLEIIEEQAKVVRMIFEWYAEGAEVNSQKKRIGPYTIAVRLNELGIKSVAGKDYWTIYGVQHMLINPVYIGKIRWGYRKVKKTVTPEGMKKKSREFAQDGDYIVVDGLHEPILSEELFYKVQDLIAANPPTPIKYRHKNINPFAGLIFCAKCGHCMNYRRGYGRQPDYIGCYTAGCKNKASRFDLVEQRVLSILNSWVKDYSVDKAQIKHEADLNAELSNAISLAEKEIETLQDQLDKVYSFFERGTYTEKIFKQRSSVIEQQIMEIGEKIDRLKAEHQQVLERQNVQAEFVPSIKHLLEIYDTLEPVEKNKWLKQIIDRIVYEKNADGKYHNVDPGDFTIGILPRLPKRGS

SEQ ID NO: 3461 - protein, 529 aa, Unknown
  Description of Unknown: Integrase B3462 sequence
  PTHR30461:SF3,SM00857,G3DSA:1.10.10.2600,IPR036162,PS51737, G3DSA:3.40.50.1390,IPR006119,IPR038109,PF07508,SSF53041, IPR011109,PF00239,PTHR30461,PS51736,Coil, cd00338
MSRYCIYLRKSRADLEAEAHGEGETLSRHKTALLELARRKGITISATYEEIVSGETIAARPQMQRLLSEVGAGEWDGVLVMEIERLARGDTMDQGLVAQTFKYSGTKIITPLKTFDPQNEFDEEYFEFGLFMARREFTTTNRRLVRGREASAKEGKYVGSVPPYGYRKVKIPNDKGFTLEVIEEQAKVVRMIFEWYAEGAEVNGQKKRIGPYTIAVRLNELGIKSVAGKDYWTIYGVQHMLINPVYIGKIRWGYRKVKKTVTPEGMKKKSREFAQDGDYIVVDGLHEPILSEELFYKVQDLIAANPPTPIKYRNNNVNPFAGLIFCAKCGHCLSYRKGYGRHPGYLGCNIAGCDNKAAPFELIEQRVLSILNSWVKDYSVDKAQIKHEADLNAELTNAISLAEKEIETLQDQLDKVYSFFERGTYTEKIFKQRSSTIEQQITDIGEKIDRLKAEHQQVLERQNVQAEFVPSIKHLLEIYDTLEPVEKNKWLKQIIDRMVYEKNADGKYRNVDPGDFTLGILPRLPKKGS

SEQ ID NO: 3462 - protein, 529 aa, Unknown
  Description of Unknown: Integrase B3463 sequence
  PTHR30461:SF3,cd00338,SM00857,G3DSA:1.10.10.2600,IPR036162, PF13408,IPR025827,PS51737,G3DSA:3.40.50.1390,IPR006119, IPR038109,PF07508,IPR011109,SSF53041,PTHR30461, PS51736,Coil,PF00239
MSSVDKTAVIYARYSSHGQTEQSIDGQIAAAQKYAEGKGYTIIHIYADRAMTGRNDDREQFQKMLSDTATHQFGVILLWKIDRFGRNREEIAFNRYRCKKNGVRVERVAEDVPDGPEGVILDSVLEGMAEYYSLQLAQNVRRGQRESAKKSQSNGGTRMIGYKVNPDTKRYEIDPDTAPFITEVFRRYAGGQTMAEIAAWLNAQGLRATRGGMFTVNSLHRLLKNEKYTGVYIFRDIRNEGGMPALIDRATFDKVQEMLKVNRRAPSRVWSRAEYLLTDKLFCGHCGAPMAGVSGHGHTGVKHNYYTCLNRKRKKSCTKKSVRQDVLEPLVLKSIRNLLQDDATLKYIADRVWAEYERSDTSGDTIRALDRQIADVDRALSNVMKAIEMGIINEMTKARMDELTEQKQALSAARADAGLARGFKLTRNMILYFLRKMAAMDISDRDSQKRLIKTFVNAIYLYDDHFDIAFNYTENGKVIVKMQEIDDASTGGAFGCCAQCPTIVRTSEPLIAIVVSCSVFVFSVKMPEA

SEQ ID NO: 3463 - protein, 529 aa, Unknown
  Description of Unknown: Integrase B3464 sequence
  cd00338,SM00857,G3DSA:1.10.10.2600,IPR036162,PS51737, G3DSA:3.40.50.1390,IPR006119,IPR038109,PF07508,IPR011109, SSF53041,PTHR30461,PS51736,Coil,PF00239
MYEDLSFPYGSGTYAIYLRKSRKDLDAEALGEGETLSRHLAILKALAQRMELNVIRIYAEVVSGESIDARPQMQELLRDVETGIYDGVLVVEVERLARGDTSDQGRVAKTFKFSDTLIITPSKTYDPNNEYDEEYFEFGLFMSRREYKTIRRRLTAGHAASCREGKYTGNIPPYGYARKKLPKEKGWTLEIIPEQARAVRLIFDWYQNGLNGLPVGYTMIAEELNHLSIKSPAGGLWNRNSVQNVLRNPVYAGYIKAGYRKEVKKLVDGKMNRSRPLNTDYTLYPGRHEAIISQETWDAVHNRMLKRTAPSARKTRPQQNPLSGMIYCSQCHRVMQRRPYQSGRTATLICTTPHCSTVSSDLPMVEQRILDALDGWLLSGTLPDPDQLPDHSGRIELLQHAVTGCQEELHEADLQLQKQYDLLEKGIYDEETFFERSAIMKKKKSELTSRLKDLQAELQHEISQDASAKNLLPTLQTIHDTYHTITDPAVQNSLLKEVIDHIEYTKSESGRWGRPDNFSLKIYPRVPPA

SEQ ID NO: 3464 - protein, 529 aa, Unknown
  Description of Unknown: Integrase B3465 sequence
  PTHR30461:SF3,SM00857,G3DSA:1.10.10.2600,IPR036162,PF13408, IPR025827,PS51737,G3DSA:3.40.50.1390,IPR006119,IPR038109, PF07508,SSF53041,IPR011109,PTHR30461, Coil,PS51736,cd00338,PF00239
MSSYCIYLRKSRADLEAEAHGEGETLSRHKTALLELARRMGITISATYEEIVSGETIAARPQMQRLLSEVGAGEWDGVLVMEIERLARGDTMDQGLVAQTFKYSGTKIITPLKTFDPQNEFDEEYFEFGLFMARREFTTTNRRLVRGRETSAKEGKYVGSVPPYGYRKVKIPNDKGFTLEIVEEQAKVVRMIFEWYAEGAEVNSQKKRIGPYTIAVRLNELGIKSAGKKDYWTIYGVQNMLINPVYIGKIRWGYRKVKKTVTPEGMKKKSREFAQDGDYIVVDGLHEPILSEELFYKVQDLIAANPPTPIKYRHKNINPFAGLIFCAKCGHCMNYRRGYGRQPDYIGCYTAGCKNKASRFDLVEQRVLSILNSWVKDYSVDKAQIKHEADLNAELSNAISLAEKEIETLQDQLDKVYSFFERGTYTEKIFKQRSSAIEQQIMEIGEKIDRLKAEHQQVLERQNVQAEFVPSIKHLLEIYDTLEPVEKNKWLKQIIDRIVYEKNADGKYHNVDPGDFTIGILPRLPKRGS

SEQ ID NO: 3465 - protein, 529 aa, Unknown
  Description of Unknown: Integrase B3466 sequence
  cd00338,SM00857,G3DSA:1.10.10.2600,IPR036162,PF13408, IPR025827,G3DSA:3.40.50.1390,PS51737,IPR006119,IPR038109, PF07508,IPR011109,SSF53041,PTHR30461,PS51736, Coil,PF00239
MNFTSTWKIADPLAQYIIYLRKSRKDMEAEALGQTDTLKRHRAALLSLSESRGLNVVEICEEVVTGDSIAVRPEVQKVLQLVETGNYAGVIVMEVERLARGDTIDQGIIAQTFKYSDTRIITPNKTYDPNNEMDEEYFEFGLFMSRREYNTIKRRLSRGKEASLREGKWISAKTPFGWLREKLPNDKGYKLVPHPEQAPILQQIYNWYTGEGCARIGAKAISTRLNSLGVPTNSGSLWRADSVLDILRNPANAGWIKSGGRPETKRIVDGAVVVSRPRTRQEDLKLYKGLHDGLISQEQYDKAVALSYSSASPRGKGAWGTVTSLAGLVRCDQCGRVMVRRPSSGNRRDTLLCPSYGCTTVSAWYDDVEDAVLDALRGWLRELELGEAAAPDDTPMRTALESSISADRKQLAKLEAQEARAYELVETGVYTPEIFLQRSQALSADKQVIVDRIEASQTTITELARAKQARARLAPAVRRVLETYPLAASPQEKNALLKTVLQKVLYHKQTKSYTKSGSDMHVTLYPLAD

SEQ ID NO: 3466 - protein, 529 aa, Unknown
  Description of Unknown: Integrase B3467 sequence
  SM00857,G3DSA:1.10.10.2600,IPR036162,PF13408,IPR025827, G3DSA:3.40.50.1390,PS51737,IPR006119,IPR038109,PF07508, SSF53041,IPR011109,PF00239,PTHR30461,PS51736, Coil,cd00338
MKFTSTWRISDPLAQYIVYLRKSRKDMEAEALGQTDTLKRHRATLLFLAENSGLNVVEICEEVVTGDSIAVRPEVQKILQLVETGSYAGVLVMEVERLARGDTIDQGIIAQTFKYSNTKIVTPNKVYDPNNEMDEEYFEFGLFMSRREYNTIKRRLSRGKEASLREGKWISGKTPFGWLREKLPNDKGYKLIPHPEQAPILRQIYDWYTGEGCARIGSYAIASRLNALGIKTNSGNTWTTSAILELLRNPANAGWIKSGGRPETKRIVDGSVVVSRPRTRQEDLKLYKGLHDALISQAQYDKAVSLSYSVVAPRGKGAWKTVTSLAGLVRCDQCGRVMVRRASSGDRRPSFMCPTQGCPTVSSWYSEVEEALLDALRDWLRELEVGEADTNDDHSLLDALSASINADQKQLAKLEAQEARAYELVETGVYTPEVFLQRSQALAADKQVIVSRVEENQRAQDEITRAKQARARLAPAVRHVLEAYPLAATPQDKNDLLKTVLQKVLYHKRSKSYSKAGSDMCLTLYPLTD

SEQ ID NO: 3467 - protein, 529 aa, Unknown
  Description of Unknown: Integrase B3468 sequence
  SM00857,G3DSA:1.10.10.2600,IPR036162,PF13408,PS51737, G3DSA:3.40.50.1390,IPR025827,IPR006119,IPR038109,PF07508, IPR011109,SSF53041,PTHR30461,Coil,PS51736, cd00338,PF00239
MPYCLYLRKSRADIDAEANGEMETLARHEKILLDLAKRMHLDVTEIYREVVSGETISSRPVVQHLLTEVENEMWDGVLVVEIERLARGDTIDQGIVSRAFKFSNTKIITPLKTYDPNNEYDEEYFEFGLFMSRREYKTIRRRLTQGRMSSAKEGKHTGSKAPYGYDRIHVESGKGYTLSPNEKEAPIVKMIFDWFVNGQLQEDGSYRKLGAHAIAHRLTNLCIDSPTGNPTWNPRSVYWMLHNPVYTGKIRWGYKKDKKIIVDGAVKRTRIIPPEEEQILVEGLHPAIISDEIFNRAQELFLRRGNPSVVIEKELKNPLAGVVVCGICGRPLRYRSNANRRDYGVECRTYGCPCKGSYIYIVEKRIIDALRDWVNEYKLSWDDMPRETHSLLIVKEQAYNAAIKELNTLTKQLDKTHDLLEQGIYDTETFLIRSKSLSEKIAESEKNIAKLSADINNEKLRENNRKNLIPKVENLIDIYWQLPNASAKNDMLKEVLEKVEYTKLHTVGRSKTKKLDDFDLVLYPKLPRT

SEQ ID NO: 3468 - protein, 529 aa, Unknown
  Description of Unknown: Integrase B3469 sequence
  SM00857,G3DSA:1.10.10.2600,IPR036162,PF13408,IPR025827, G3DSA:3.40.50.1390,PS51737,IPR006119,IPR038109,PF07508, IPR011109,SSF53041,PF00239,PTHR30461,PS51736, Coil,cd00338
MKFTSTWKISDPLAQYIIYLRKSRKDMEAEALGQTDTLKRHRAALLSLSESRGLNVVEICEEVVTGDSIAVRPEVQKVLQLVETGNYAGVIVMEVERLARGDTIDQGIIAQTFKYSNTKIITPNKIYDPNNEMDEEYFEFGLFMSRREYNTIKRRLSRGKEASLREGKWISGKTPFGWLREKLPNDKGYKLIPHPEQAPILQQIYNWYTGEGCARIGAKAISTRLNSLGVPTNSGSLWRADSVLDILRNPANAGWIKSGGRPETKRIVDGAVVVSRPRTRQEDLKLYKGLHDGLISQEQYDKAVALSYSSASPRGKGAWGTVTSLAGLVRCDQCGRVMVRRPSSGNRRDTLLCPSYGCTTVSAWYDDVEDAVLDALRGWLRELELGEAAAPDDTPMRTALESSIAADRKQLAKLEAQEARAYELVETGIYTPEIFLQRSQALAADKQVIVDRIEASQTTIHELARARQARARLAPAVRRVLETYPLAASPQEKNALLKTVLQKVLYHKQTKSYTKSGSDMHVTLYPLAD

SEQ ID NO: 3469 - protein, 529 aa, Unknown
  Description of Unknown: Integrase B3470 sequence
  PTHR30461:SF3,IPR036162,PS51737,IPR011109,PTHR30461, PF00239,G3DSA:1.10.10.2600,IPR006119,SSF53041,cd00338, SM00857,IPR025827,IPR038109,PS51736,mobidb-lite, PF13408,G3DSA:3.40.50.1390,PF07508,Coil
MRKKSNLNAATRAVIYARYSSANQRDCSIEQQVAKCRELAARLGLTVIDVYEDRAISGKTDRRPNFQRMMKDADLRQFDVVLAWKSNRMGRNMLQAMTNEERLRDNGIRTVYAEEDFDDTAAGRFALRNMMNVNQFYSENMAEDITRGLMDNAAKCLSNGSLPLGYKPGDDRHVVLDEAEAAIVQEIFTRVSCYEPFIDIARDLNRRGIKTKKGSEWGRSSFHTICCNERYRGIYIYRDVRIEGGMPRIVSDELFYKVQEVLKVKKNPQGRRKRSGYEEYLLTGKLFCGHCGSPMTGIAGTSKTGAMHYYYTCQKRRTDHSCDKKAVRRDQIERAVGVAIQQQLLTDENIQMMADKLMEYNARTETKYRLQGLQDQLNANKTATANILKAIEMGIITDATKARLLELEKEQGQLLVKIDEAKAEMVPISRNDFVKLLYIYKEGEPTDKKYLAALFDNFLVRVDLYDDHLKITFDPTGGRQPIDMPIGAEESPESPGDSPESSDFEASPQDAEKFVLALHNRTKELQALA

SEQ ID NO: 3470 - protein, 529 aa, Unknown
  Description of Unknown: Integrase B3471 sequence
  PTHR30461:SF3,SM00857,G3DSA:1.10.10.2600,IPR036162,PF13408, IPR025827,G3DSA:3.40.50.1390,PS51737,IPR006119,IPR038109, PF07508,SSF53041,IPR011109,PTHR30461,Coil, PS51736,cd00338,PF00239
MTKRKWGELMKTITKIEEIESVGPAKKIRVAAYCRVSSSSDDQLISLETQKAHYETYIRANPEWEFAGLYYDEGISGTKTSKREGLLSMLKDCGRGKIDYIVTKSISRFARNTADCLTMVRKLLELDIPVFFEKENINTASMESELMLSILSSMAESESVSISQNAKWSIQRRFKNGTFIIACPPYGYDNVDGELVVVPEQAVVVKRIFADALAGKGTHMIARELNSEGLPPIQGKKWHPGTIKFILKNEKYTGDVIFQKTYTDSSFNRHRNNGEYDQYFCENHHEPIISHEDFDKVNELLRQRGKEKGNGEDTAKYNNRYGFSGRIKCGECGSTFKRRMHYKPSGAYVAWCCGRHIDSVDACSMKYITDDALKAAFLTMMNKLVFSHKVVLKPLLNDLITTSDSERLQQISELENQIEKNVEQKQVLTDLMTSVKLSPALFHKVSNELNTEAEMLSKKKEGLLYSMSGEYSKVEELKLLMQFTAKNNMVTEFTEELFLAYVDRVTVVSRAEVMFELKCGLNLKERLVK

SEQ ID NO: 3471 - protein, 529 aa, Unknown
  Description of Unknown: Integrase B3472 sequence
  cd00338,SM00857,G3DSA:1.10.10.2600,IPR036162,PF13408, PS51737,IPR025827,G3DSA:3.40.50.1390,IPR006119,IPR038109, PF07508,IPR011109,SSF53041,PTHR30461,PS51736, Coil,PF00239
MKFTSTWRISDPLAQYIVYLRKSRKDMEAEALGQTDTLKRHRATLLSLAENNNLNVVEICEEVVTGDSIAVRPEVQKVLQLVETGSYAGVLVMEVERLARGDTIDQGIIAQTFKYSNTKIVTPSKVYDPNNEMDEEYFEFGLFMSRREYNTIKRRLSRGKEASLREGKWISGKTPFGWLREKLPNDKGYKLIPHPEQAPILQQIYDWYTGDGCTRIGAKAISTRLNSLGVPTNSGSLWRTDSVLDILRNPANAGWIKSGGRPETKRIVDGSVVVSRPRTRQEDLKLYKGLHDALISQAQYDKAVSLSYSVVAPRGKGAWKTVTSLAGLVRCDQCGRVMVRRASSGDRRPSFMCPTQGCPTVSSWYSEVEEALLDALRDWLRELEVGEADTNDDHSLLDALSASINADQKQLAKLEAQEARAYELVETGVYTPEVFLQRSQALAADKQVIVSRVEENQRAQDEITRAKQARARLAPAVRHVLEAYPLAATPQDKNDLLKTVLQKVLYHKRSKSYSKAGSDMCLTLYPLTD

SEQ ID NO: 3472 - protein, 529 aa, Unknown
  Description of Unknown: Integrase B3473 sequence
  PTHR30461:SF3,SM00857,G3DSA:1.10.10.2600,IPR036162,PF13408, IPR025827,G3DSA:3.40.50.1390,PS51737,IPR006119,IPR038109, PF07508,IPR011109,SSF53041,PF00239,PTHR30461, PS51736,Coil,cd00338
MANARKVQVIEATINPKTHLSTTSPRKRRVAAYARVSTDSDEQAGSYDAQIDYYTRYICNRPDWEFVKVYPDDGISGLSTKKREQFMAMINDALAGKIDYIITKSISRFARNTVDTLTYVRMLKDHGVGVYFEKENIDTMDAKGELLITIMSSLAQEESRSISENVIWGQRKRFADGKVTLPYKRFLGYDRGASKDDPPVVNEEQAVWVRYIYSEFMLGKTACAIAKALTASGVPSPSGKPKWSPSTVESILSNEKYKGDALLQKTFTVDFLSKKKKVNEGEHPQYYVEHSHEAIIDPREWQLVQLEMERRKSLGMRYSGNCVLATRIVCGDCGSYFGPKVWNSTSKYKRTIWQCNNKFKGETKCSTPHIEEQEIKSRFISVINFLLPDKQALLEDCRLMQDALTDCTKIDEQLNALTEELEVVAALTRKCIAENAAEVIDQVEYKKRYDGLNDRYNITREKIEAMEKKKTSRIGEADKIGAFMFEMLERDEPLDTFDDRLWIAVIDHATVFHDGRIVFTFVNGMEAEG

SEQ ID NO: 3473 - protein, 529 aa, Unknown
  Description of Unknown: Integrase B3474 sequence
  PTHR30461:SF3,SM00857,G3DSA:1.10.10.2600,IPR036162,PF13408, PS51737,G3DSA:3.40.50.1390,IPR025827,IPR006119,IPR038109, PF07508,IPR011109,SSF53041,PF00239,PTHR30461, PS51736,Coil,cd00338
MATAKNVTVIPATFNPQTRRPLKQVTRRRVAGYARVSTDSDEQFTSYEAQVDYYTNYINSNPEWSFVKVYTDEGISGTNTKHRDGFNEMIADALNGKIDLIVTKSVSRFARNTVDSLTTIRKLKEHGTEVYFEKEAIWTFDNKGELLLTIMSSLAQEESRSISENVTWGRRKQFSDGKVSLPYGQFLGYRKGPDGLPEIVPEEAKTVDLIYRMFRNGKTPSYIARHLTAQGIPTPGGKKVWQAQVIESILTNEKYKGDARLQKKFTTDFLTKKQKKNEGEVPQYYVENSHPAIIEPRAWAEVQRIMKRRKASGKRHECSSPFSGMVICGDCGSTYGSKVWHSNDPYRKVIWQCNSKFKSEEKCRTPHVTEERLKDGFLEALSILHENRETLLNDIRDVKHDLENCTEVNAKITETAQEMEVIAGLIQKAIEDNAVHAQDQEEYNRRYNELADHYEKLKKKLEALEQERDDREYKSTVLSGFLFEMMEFEYLDAEFTDARCIAMLDHVSIYADGRMVYSFLNGSDITVML

SEQ ID NO: 3474 - protein, 529 aa, Unknown
  Description of Unknown: Integrase B3475 sequence
  SM00857,G3DSA:1.10.10.2600,IPR036162,PF13408,IPR025827, G3DSA:3.40.50.1390,PS51737,IPR006119,IPR038109,PF07508, IPR011109,SSF53041,PF00239,PTHR30461,PS51736, Coil,cd00338
MNFTSTWKIADPLAQYIIYLRKSRKDMEAEALGQTDTLKRHRAALLSLSESRALNVVEICEEVVTGDSIAVRPEVQKVLQLVETGNYAGVIVMEVERLARGDTIDQGIIAQTFKYSNTKIVTPNKVYDPNNEMDEEYFEFGLFMSRREYNTIKRRLSRGKEASLREGKWISGKTPFGWSREKLPNDKGYKLVPHPEQAPVLQQIYNWYTGDGCARIGAKAISTRLNSLGVPTNSGSLWRADSVLDILRNPANAGWIKSGGRPETKRIVDGSVVVSRPRTRQEDLKLYKGLHNGLISQEQYDKAVALSYSSASPRGKGAWGTVTSLAGLVRCDQCGRVMVRRPSSGNRRDTLLCPSYGCTTVSAWYDDVEDAVLDALRGWLRELELGEAAAPDDTPMRTALESSIAADRKQLAKLEAQEARAYELVETGVYTPEVFLQRSQALAADKQVIVDRIEASQTTIHELALAKQARARLAPAVRRVLETYPLAASPQEKNALLKTVLQKVLYHKQTKSYTKSGSDMHVTLYPLAD

SEQ ID NO: 3475 - protein, 529 aa, Unknown
  Description of Unknown: Integrase B3476 sequence
  PTHR30461:SF3,IPR036162,PS51737,IPR011109,PTHR30461, PF00239,G3DSA:1.10.10.2600,IPR006119,SSF53041,cd00338, SM00857,IPR025827,IPR038109,PS51736,mobidb-lite, PF13408,G3DSA:3.40.50.1390,PF07508,Coil
MKKRINTNSAARAVIYARYSSANQRDCSIEQQVEKCRELAAREGVTVIEIYADRAVSGKTDRRPNFQRMMKDASLRQFDVVLAWKSNRMGRNMLQAMMNEEQLRSNGIRTIYAEEDFDDTAAGRFALRNMMNVNQFYSENMAEDISRGLMDNASKCMSNGSLPLGYKTGKDQKVVLDEAEAAIVQEIFTRVSCYEPFIDIARDLNRRGIKTKKGAEWGRSSFHTICRNERYRGIYIYRDIRVEGGMPRIVSDELFYKVQEVLKVKKNPQGRRKRSGYEEYLLTGKLYCGHCGSPMTGIAGTSKTGAMHYYYTCQKRRTDHSCDKKAVRRDQIEKAVAIAIQQQLLTDENIQMMADETMAYNARTEIKYRLQSLQQQLYSNETSTANIMKAIEMGIITDTTKARLLALEQEHGQLLAKIDTAKAEMVPINREDFVSLLDIYRTGDVNNKKYLAALFDTFLVRVDLYDDHFKITFDPTGGKMPVDIPIGAEDSPESPGDSPESSDFEASPQDAEKFVLALHSRTKELQALA

SEQ ID NO: 3476 - protein, 529 aa, Unknown
  Description of Unknown: Integrase B3477 sequence
  PTHR30461:SF3,IPR036162,PS51737,IPR011109,PTHR30461, PF00239,G3DSA:1.10.10.2600,IPR006119,SSF53041,cd00338, SM00857,IPR025827,IPR038109,PS51736,mobidb-lite, PF13408,G3DSA:3.40.50.1390,PF07508,Coil
MKKRINTNSAARAVIYARYSSANQRDCSIEQQVEKCRELAAREGVTVIEIYADRAVSGKTDRRPNFQRMMKDASLRQFDVVLAWKSNRMGRNMLQAMMNEEQLRSNGIRTIYAEEDFDDTAAGRFALRNMMNVNQFYSENMAEDISRGLMDNASKCMSNGSLPLGYKTGKDQKVVLDEAEAAIVQEIFTRVSCYEPFIDIARDLNRRGIKTKKGAEWGRSSFHTICRNERYRGIYIYRDIRVEGGMPRIVSDELFYKVQEVLKVKKNPQGRRKRSGYEEYLLTGKLYCGHCGSTMTGIAGTSKTGAMHYYYTCQKRRTDHSCDKKAVRRDQIEKAVAIAIQQQLLTDENIQMMADETMAYNARTEIKYRLQSLQQQLYSNETSTANIMKAIEMGIITDTTKARLLALEQEHGQLLAKIDTAKAEMVPINREDFVSLLDIYRTGDVNNKKYLAALFDTFLVRVDLYDDHFKITFDPTGGKMPVDIPIGAEDSPESPGDSPESSDFEASPQDAEKFVLALHNRTKELQALA

SEQ ID NO: 3477 - protein, 529 aa, Unknown
  Description of Unknown: Integrase B3478 sequence
  PTHR30461:SF3,cd00338,SM00857,G3DSA:1.10.10.2600,IPR036162, PF13408,PS51737,G3DSA:3.40.50.1390,IPR025827,IPR006119, IPR038109,PF07508,IPR011109,SSF53041,PTHR30461, PS51736,Coil,PF00239
MQRAVIYARYSPGPNQTEQSIEGQVRECTKYAELHDLRIVGTYVDRKISGKTDNRREFQRMIDDSEKHIFDVIILYHTDRFARNRYDSAIYKHKLKENGVELRYATTDIPKGPEGIILESIMEGWAEYYSAELSRKIKRGMRESALKCHSTGAGRCLGYRTAEDKSLVIEPEGAKAVQTVFDMYIKGKSHADICRYLNVCGFRTAQGKLFNKNSVTHIIRNKRYIGVYTYDDITIEDGIPAIISKDTFHLAQLEAARRKTAKRPKEPKAEHLLSGKAFCGHCQKPLVGVSGTGKSGNKWYYYYCQESRAKRGCTKKPVKRDWLEREVVKRTVAEVLQPEVIQHIAKKCYDLQMEYRQDNSDVLFYELKLKDVRKAIKNTMHAIESGVKTKTLPARLQELENEEEALEAELAIAKAADFVITTDQIEFLLTQFAEPWECESEEEYHRRIIKCFVHKVFLFDDKLLIYYNVSRDGKTREQSEAELLEGALGEGFDKRSSGSTILIAGRTPECEIIVLRYGFWLALDLTVQV

SEQ ID NO: 3478 - protein, 529 aa, Unknown
  Description of Unknown: Integrase B3479 sequence
  cd00338,SM00857,G3DSA:1.10.10.2600,IPR036162,PF13408, PS51737,G3DSA:3.40.50.1390,IPR025827,IPR006119,IPR038109, PF07508,IPR011109,SSF53041,PTHR30461,PS51736, Coil,PF00239
MKFTSTWRISDPIAQYIIYLRKSRKDMEAEALGQTDTLKRHRAALLSLAESRGLNIVEICEEVVTGDSIAVRPEVQKVLQLVETGSYAGVLVMEVERLARGDTIDQGIIAQTFKYSNTKIVTPNKVYDPNNEMDEEYFEFGLFMSRREYNTIKRRLSRGKEASLREGKWISGKTPFGWLREKLPNDKGYKLIPHPEQAPILRQIYDWYTGEGCARIGAKAISTRLNSLGVPTNSGSLWRTDSVLDILRNPANAGWIKSGGRPETKRIVDGAVVVSRPRTRQEDLKFYKGLHDGLISQEQYDKAVALSYSSASPRGKGAWQTVTSLAGLIRCDQCGRVMVRRASSGGRRDTLLCPSYGCTTVSAWYEDVEGAVLDALRGWLHELEVGNSENSDDHSLLDALAASISADQKQLAKLEAQEARAYEFVETGVYTPEIFLQRSQALAADKQVIISRIEENQRAQDEITRAKQARSRLAPAVRHVLETYPLAATPQDKNELLKTVLQKVLYHKQSKSHSKSGSDMRVTLYPLTD

SEQ ID NO: 3479 - protein, 529 aa, Unknown
  Description of Unknown: Integrase B3480 sequence
  PTHR30461:SF3,SM00857,G3DSA:1.10.10.2600,IPR036162,PF13408, PS51737,G3DSA:3.40.50.1390,IPR025827,IPR006119,IPR038109, PF07508,IPR011109,SSF53041,PF00239,PTHR30461, PS51736,Coil,cd00338
MQRAVIYARYSPGPNQTEQSIEGQVRECTKYAELHDLRIVGTYVDRKISGKTDNRREFQRMIDDSEKHIFDVIILYHTDRFARNRYDSAIYKHKLKENGVELRYATTDIPKGPEGIILESIMEGWAEYYSAELSRKIKRGMRESALKCHSTGAGRCLGYRTAEDKSLVIEPEGAKAVQTVFDMYIKGKSHADICRYLNDCGFRTAQGKLFNKNSVTHIIRNKRYIGVYTYDDITIEDGIPAIISKDTFHLAQLEAARRKTAKRPKEPKAEYLLSGKAFCGHCQKPLVGVSGTGKSGNKWYYYYCQESRAKRGCTKKPVKRDWLEREVVKRTVAEVLQPEVIQHIAKKCYNLQMEYRQDNSDVLFYELKLKDVRKAIKNTMHAIESGVKTKTLPARLQELENEEEALEAELAIAKAADFVITTDQIEFLLTQFAEPWECESEEEYHRRIIKCFVHKVFLFDDKLLIYYNVSRDGKTREQSEAELLEEALGEGFDKRSSGSTILIAGRTPECEIIVLRYGFWLALDLTVQA

SEQ ID NO: 3480 - protein, 529 aa, Unknown
  Description of Unknown: Integrase B3481 sequence
  cd00338,SM00857,G3DSA:1.10.10.2600,IPR036162,PF13408, IPR025827,G3DSA:3.40.50.1390,PS51737,IPR006119,IPR038109, PF07508,IPR011109,SSF53041,PTHR30461,PS51736, Coil,PF00239
MKFTSTWKIADPLSQYIIYLRKSRKDMEAEALGQTDTLNRHRAALLSLSESRGLNVVEICEEVVTGDSIAVRPEVQKVLQLVETGNYAGVIVMEVERLARGDTIDQGIIAQTFKYSNTKIITPNKIYDPNNEMDEEYFEFGLFMSRREYNTIKRRLSRGKEASLREGKWISGKTPFGWLREKLPNDKGYKLVPHPEQAPILQQIYNWYTGEGCARIGAKAISTRLNSLGVPTNSGSLWRADSVLDILRNPANAGWIKSGGRPETKRIVDGAVVVSRPRTRQEDLKLYKGLHDGLISQEQYDKAVALSYSSASPRGKGAWGTVTSLAGLVRCDQCGRVMVRRPSSGNRRDTLLCPSYGCTTVSAWYDDVEDAVLDALRGWLRELELGEAAAPDDTPMRTALESSIAADRKQLAKLEAQEARAYELVETGVYTPEIFLQRSQALAADKQVIVDRIEASQTTITELARARQARARLAPAVRRVLETYPLAASPQERNALLKTVLQKVLYHKQTKSYTKSGSDMHVTLYPLAD

SEQ ID NO: 3481 - protein, 529 aa, Unknown
  Description of Unknown: Integrase B3482 sequence
  PTHR30461:SF3,SM00857,G3DSA:1.10.10.2600,IPR036162,PF13408, IPR025827,PS51737,G3DSA:3.40.50.1390,IPR006119,IPR038109, PF07508,IPR011109,SSF53041,PTHR30461,Coil, PS51736,cd00338,PF00239
MSRYCIYLRKSRADLEAEAHGEGETLSRHKTALLELARRMGITISATYEEIVSGETIAARPQMQRLLSEVGAGEWDGVLVMEIERLARGDTMDQGLVAQTFKYSGTKIITPLKTFDPQNEFDEEYFEFGLFMARREFTTTNRRLVRGREASAKEGKYVGSVPPYGYRKVKIPNDKGFTLEIVEEQAKVVRMIFEWYAEGAEVNSQKKRIGPYTIAVRLNELGIKSAGKKDYWTIYGVQNMLINPVYIGKIRWGYRKVKKTVTPEGMKKKSREFAQDGDYIVVDGLHEPILSEELFYKVQDLIAANPPTPIKYRHKNINPFAGLIFCAKCGHCMNYRRGYGRQPDYIGCYTAGCKNKASRFDLVEQRVLSILNSWVKDYSVDKAQIKHEADLNAELSNAISLAEKEIETLQDQLDKVYSFFERGTYTEKIFKQRSSAIEQQIMEIGEKIDRLKAEHQQVLERQNVQAEFVPSIKHLLEIYDTLEPVEKNKWLKQIIDRIVYEKNADGKYHNVDPGDFTIGILPRLPKKGN

SEQ ID NO: 3482 - protein, 529 aa, Unknown
  Description of Unknown: Integrase B3483 sequence
  SM00857,G3DSA:1.10.10.2600,IPR036162,PF13408,IPR025827, G3DSA:3.40.50.1390,PS51737,IPR006119,IPR038109,PF07508, SSF53041,IPR011109,PF00239,PTHR30461,PS51736, Coil,cd00338
MKFTSTWKISDPLAQYIIYLRKSRKDMEAEALGQTDTLKRHRAALLSLSESRGLNVVEICEEVVTGDSIAVRPEVQKVLQLVETGNYAGVIVMEVERLARGDTIDQGIIAQTFKYSNTRIITPNKTYDPNNEMDEEYFEFGLFMSRREYNTIKRRLSRGKEASLREGKWISGKTPFGWSREKLPNDKGYKLVPHPEQAPVLQQIYNWYTGEGCARIGAKAISTRLNSLGVPTNSGSLWRADSVLDILRNPANAGWIKSGGRPETKRIVDGAVVVSRPRTRQEDLKLYKGLHDGLISQEQYDKAVALSYSSASPRGKGAWGTVTSLAGLVRCDQCGRVMVRRPSSGGRRDTLLCPSYGCTTVSAWYDDVEDAVLDALRGWLRELELGEAAAPDDTPMRTALESSIAADRKQLAKLEAQEARAYELVETGVYTPEIFLQRSQALAADKQVIVDRIDASQTTIHELARARQARARLAPAVRRVLETYPLAASPQEKNALLKTVLQKVLYHKQTKSYTKSGSDMHVTLYPLAD

SEQ ID NO: 3483 - protein, 529 aa, Unknown
  Description of Unknown: Integrase B3484 sequence
  PTHR30461:SF3,SM00857,G3DSA:1.10.10.2600,IPR036162,PF13408, IPR025827,G3DSA:3.40.50.1390,PS51737,IPR006119,IPR038109, PF07508,SSF53041,IPR011109,PTHR30461,Coil, PS51736,cd00338,PF00239
MKKAVIYARYSSDSQTEQSIEGQLRVVNQFASNNDYIIIDTYIDRATTGTNTNRPGFQKMIADSARRDFDYVLVYKLDRFARNRFDSAFNKKALKKNGVKVVSATENISDSPEGIILESMLEGMAEYYSAELSQKVKRGQFESLEKGTFLGGTMLYGYKVNNKIIEINEEQAYIVRKIFTAYANGKTALQIADMLKNDNILNNQGRLFCANSIMNLLKNKKYTGLLEYGDYVKENYYPRIIDDNTFEIVSKRIEDNKRSPARMKAYCLYRLSGKLYCGHCKSLMTGESGTSKQGKIHYYYKCFGKKKHNGCDKKSVKKEELENLVVALVLQHILAEDKILDTIEGVTSAYNESVKQSTELSILKQEQAQNEKYINNILTAIKNGIFSETTQKELIKLESRQTELKEAILVQEALQQNKLSKEQVLFFFKQFIQEELSDEEAKTSIIDTLVYKVILYDDKIRIILKNKDNITKDGSLEELEKMCSNLAQLSPPNPKPLYSVVFFFYFLHFIQNIGHNSHYLASNPQRNHT

SEQ ID NO: 3484 - protein, 529 aa, Unknown
  Description of Unknown: Integrase B3485 sequence
  PTHR30461:SF3,IPR036162,PS51737,IPR011109,PTHR30461, PF00239,G3DSA:1.10.10.2600,IPR006119,SSF53041,cd00338, SM00857,IPR025827,IPR038109,PS51736,mobidb-lite, PF13408,G3DSA:3.40.50.1390,PF07508,Coil
MKKRINTNSAARAVIYARYSSANQRDCSIEQQVEKCRELAAREGVTVIEIYADRAVSGKTDRRPNFQRMMKDASLRQFDVVLAWKSNRMGRNMLQAMMNEEQLRSNGIRTIYAEEDFDDTAAGRFALRNMMNVNQFYSENMAEDISRGLMDNASKCMSNGSLPLGYKTGKDQKVVLDEAEAAIVQEIFTRVSCYEPFIDIARDLNRRGIKTKKGAEWGRSSFHTICRNERYRGIYIYRDIRVEGGMPRIVSDELFYKVQEVLKVKKNPQGRRKRSGYEEYLLTGKLYCGHCGSPMTGIAGTSKTGAMHYYYTCQKRRTDHSCDKKAVRRDQIEKAVAIAIQQQLLTDENIQMMADETMAYNARTEIKYRLQSLQQQLYSNETSTANIMKAIEMGIITDTTKARLLALEQEHGQLLAKIDTAKAEMVPINREDFVSLLDIYRTGDVNNKKYLAALFDTFLVRVDLYDDHFKITFDPTGGKMPVDIPIGAEDSPESPGDSPESSDFEASPQDAEKFVLALHNRTKEKHLET

SEQ ID NO: 3485 - protein, 529 aa, Unknown
  Description of Unknown: Integrase B3486 sequence
  PTHR30461:SF3,cd00338,SM00857,G3DSA:1.10.10.2600,IPR036162, PF13408,IPR025827,G3DSA:3.40.50.1390,PS51737,IPR006119, IPR038109,PF07508,SSF53041,IPR011109,PTHR30461, PS51736,Coil,PF00239
MTETNISTARVPQVTVIDPRIPEKAKLRVAAYARVSSDSEDQVNSYIAQVDFYSKYIAGKEEWEMVDIYADEGISGLEARNRDDFNRMMTDCREGKIDRVLCKSISRFARNTQEYIQFVRELLRLGISIHFEKENIDTGKMTSEQVAQIYGAFAQMESTNHSSNMRFSVRMRMEKGLFVPSSVPYGYRLAGRDLEIIPEEAEVVRRIFSAYLSGQGKDDIARELNQLGVDRGRNREKWHPSTVAYILTNISYTGDMIWQKSCATDTIPFRQVRNLGQKPRYFVEHSHPAIVSCADFQRVQELMSSRKGQFHGTHRISKGSLYDKHIYCGGCGSLCRKKITVGKTYWVCRRHDGNKADCPTPQIPEPEITAAVLRLYHKLKLGQETVLRPVLSQLQELRERELRSNRKISDIDNEIARISEQNLVLVRLKSKGYVDSALYLSQMDEIDRKLRELRKLRRRLLEAAGEDRQIHDTERMMEYLEDGPEWLDEVPAELFGELIERIIIISPERLKFRLLNGMELAENIERTVR

SEQ ID NO: 3486 - protein, 529 aa, Unknown
  Description of Unknown: Integrase B3487 sequence
  PTHR30461:SF3,SM00857,G3DSA:1.10.10.2600,IPR036162,PF13408, PS51737,IPR025827,G3DSA:3.40.50.1390,IPR006119,IPR038109, PF07508,IPR011109,SSF53041,PTHR30461,PS51736, cd00338,PF00239
MSSVDKIAVVYARYSSHGQTEQSIEGQIAAAQKYAEQHGYTIIHIYADRAMTGRNDDREEFQKMLSDTATHQFGVILLWKIDRFGRNREEIAFNRYRCKKNGVRVERVAEDVPDGPEGVILDSVLEGMAEYYSLQLAQNVRRGQRESAKKSQTVGGCKIIGYNVNPDTKKYEVDPKTAPFVTEVFKRYANGETISEIVAWLNVQGVRTTRGGEFTVNSLHRLLKNEKYTGVYIFHDVRNEGGMPALIDRATFDKAQEMLKVNRRAPARVWSKTEYLLTDKLFCGHCGAMMVGESGHGRNGTKHSYYTCWNRKKKKSCDKKPVRQDVIEPMVLRAISKMLGDEATLEYITDQVWAVYERSDTSGDTIKALDKQIADVDRALSNVMKAIEMGIINEMTKTRMDELTDQKQALSVARAEAGLAGGFKLTRDMILFFLHDMAAMDMTDRDCQKRLIKTFVNAIYLYDDHFDIAFNYTDNGKVVVRMQEINDATRGEVFGRCAQSPAIVQTSEPLITIVVSCSVFVFTVKMPEA

SEQ ID NO: 3487 - protein, 529 aa, Unknown
  Description of Unknown: Integrase B3488 sequence
  cd00338,SM00857,G3DSA:1.10.10.2600,IPR036162,PF13408, IPR025827,G3DSA:3.40.50.1390,PS51737,IPR006119,IPR038109, PF07508,IPR011109,SSF53041,PTHR30461,PS51736, Coil,PF00239
MNFTSTWKIADPLAQYIIYLRKSRKDMEAEALGQTDTLKRHRAALLSLSESRGLNVVEICEEVVTGDSIAVRPEVQKVLQLVETGNYAGVIVMEVERLARGDTIDQGIIAQTFKYSDTRIVTPNKTYDPNNEMDEEYFEFGLFMSRREYNTIKRRLSRGKEASLREGKWISGKTPFGWLREKLPNDKGYKLVPHPEQAPVLQQIYNWYTGEGCARIGAKAISTRLNSLGVPTNSGSPWRADSVLDILRNPANAGWIKSGGRPETKRIVDGAVVVSRPRTRQEDLKLYKGLHDGLISQEQYDKAVALSYSSASPRGKGAWGTVTSLAGLVRCDQCGRVMVRRPSSGGRRDTLLCPSYGCTTVSAWYDDVEDAVLDALRGWLRELELGEAAAPDDTPMRTALESSIAADRKQLAKLEAQEARAYELVETGVYTPEIFLQRSQALAADKQVIVDRIEASQTTIHELARARQARARLAPAVRRVLETYPLAASPQEKNALLKTVLQKVLYHKQTKSYTKSGSDMHVTLYPLAD

SEQ ID NO: 3488 - protein, 529 aa, Unknown
  Description of Unknown: Integrase B3489 sequence
  cd00338,SM00857,G3DSA:1.10.10.2600,IPR036162,PF13408, IPR025827,G3DSA:3.40.50.1390,PS51737,IPR006119,IPR038109, PF07508,SSF53041,IPR011109,PTHR30461,PS51736, Coil,PF00239
MKFTSTWKIADPLAQYIIYLRKSRKDMEAEALGQTDTLKRHRAALLSLSESRGLNVVEICEEVVTGDSIAVRPEVQKVLQLVETGNYAGVIVMEVERLARGDTIDQGIIAQTFKYSDTRIITPNKTYDPNNEMDEEYFEFGLFMSRREYNTIKRRLSRGKEASLREGKWISGKTPFGWSREKLPNDKGYKLVPHPEQAPVLRQIYNWYTGEGCARIGAKAISTRLNSLGVPTNSGSLWRADSVLDILRNPANAGWIKSGGRPETKRIVDGAVVVSRPRTRQEDLKLYKGLHDGLISQEQYDKAVALSYSSASPRGKGAWGTVTSLAGLVHCDQCGRVMVRRPSSGNRRDTLLCPSYGCTTVSAWYDDVEDAVLDALRGWLRELELGEAAAPDDTPMRTVLESSIAADRKQLAKLEAQEARAYELVETGVYTPEVFLQRSQALAADKQVIVDRIEASQTTIHELARSRQARARLAPAVRRVLETYPLAASPQEKNALLKTVLQKILYHKQAKSYTKSGSDMHVTLYPLAD

SEQ ID NO: 3489 - protein, 529 aa, Unknown
  Description of Unknown: Integrase B3490 sequence
  cd00338,SM00857,G3DSA:1.10.10.2600,IPR036162,PF13408, IPR025827,G3DSA:3.40.50.1390,PS51737,IPR006119,IPR038109, PF07508,IPR011109,SSF53041,PTHR30461,PS51736, Coil,PF00239
MKFTSTWKIADPLAQYIIYLRKSRKDMEAEALGQTDTLKRHRAALLSLSESRGLNVVEICEEVVTGDSIAVRPEVQKVLQLVETGNYAGVIVMEVERLARGDTIDQGIIAQTFKYSDTRIITPNKTYDPNNEMDEEYFEFGLFMSRREYNTIKRRLSRGKEASLREGKWISAKTPFGWLREKLPNDKGYKLVPHPEQAPILQQIYNWYTGEGCARIGAKAISTRLNSLGVPTNSGSLWRADSVLDILRNPANAGWIKSGGRPETKRIVDGAVVVSRPRTRQEDLKLYKGLHDGLISQEQYDKAVALSYSSASPRGKGAWGTVTSLAGLVRCDQCGRVMVRRPSSGNRRDTLLCPSYGCTTVSAWYDDVEDAVLDALRGWLRELELGEAAAPDDTPMRTALESSISADRKQLAKLEAQEARAYELVETGVYTPEIFLQRSQALSADKQVIVDRIEASQTTITELARAKQARARLAPAVRRVLETYPLAASPQEKNALLKTVLQKVLYHKQTKSYTKSGSDMHVTLYPLAD

SEQ ID NO: 3490 - protein, 529 aa, Unknown
  Description of Unknown: Integrase B3491 sequence
  SM00857,G3DSA:1.10.10.2600,IPR036162,PF13408,IPR025827, G3DSA:3.40.50.1390,PS51737,IPR006119,IPR038109,PF07508, IPR011109,SSF53041,PF00239,PTHR30461,PS51736, Coil,cd00338
MKFTSTWKISDPLAQYIIYLRKSRKDMEAESLGQTDTLKRHRATLLSLAESSGLNVVEICEEVVTGDSIAVRPEVQKVLQLVETGSYAGVLVMEVERLARGDTIDQGIIAQTFKYSNTKIVTPNKVYDPNNEMDEEYFEFGLFMSRREYNTIKRRLSRGKEASLREGKWISGKTPFGWLREKLPNDKGYKLIPHPDQAPILRQIYDWYTGEGCARIGSYAIASRLNALGVKTNSGNSWTTSAILELLRNPANAGWIKSGGRPETKRIVDGSVVVSRPRTRQEDLKLYKGLHDALISQAQYDKAVSLSYSVVAPRGKGAWKTVTSLAGLVRCDQCGRVMVRRASSGDRRPSFMCPTQGCPTVSSWYSEVEEALLNALRDWLRELEVGEVDTNDDHSLLDALSASINADQKQLAKLEAQEARAYELVETGVYTPEVFLRRSQALAADKQVIVSRVEENQRAQDEITRAKQARARLAPAVRHVLEAYPLAATPQDKNDLLKTVLQKVLYHKRSKSYSKAGSDMCLTLYPLTD

SEQ ID NO: 3491 - protein, 529 aa, Unknown
  Description of Unknown: Integrase B3492 sequence
  PTHR30461:SF3,IPR036162,PS51737,IPR011109,PTHR30461, PF00239,G3DSA:1.10.10.2600,IPR006119,SSF53041,cd00338, SM00857,IPR025827,IPR038109,PS51736,mobidb-lite, PF13408,G3DSA:3.40.50.1390,PF07508,Coil
MRKKSNLNAATRAVIYARYSSANQRDCSIEQQVAKCRELAARLGLTVIDVYEDRAISGKTDRRPNFQRMMKDADLRQFDVVLAWKSNRMGRNMLQAMTNEERLRDNGIRTVYAEEDFDDTAAGRFALRNMMNVNQFYSENMAEDITRGLMDNAAKCLSNGSLPLGYKPGDDRHVVLDEAEAAIVQEIFTRVSCYEPFIDIARDLNRRGIKTKKGSEWGRSSFHTICRNERYRGIYIYRDVRIEGGMPRIVSDELFYKVQEVLKVKKNPQGRRKRSGYEEYLLTGKLFCGHCGSPMTGIAGTSKTGAMHYYYTCQKRRTDHSCDKKAVRRDQIERAVGVAIQQQLLTDENIQMMADKLMEYNARTETKYRLQGLQDQLNANKTATANILKAIEMGIITDATKARLLELEKEQGQLLVKIDEAKAEMVPISRNDFVKLLYIYKEGEPTDKKYLAALFDNFLVRVDLYDDHLKITFDPTGGRQPIDMPIGAEESPESPGDSPESSDFEASPQDAEKFVLALHNRTKEKHLRT

SEQ ID NO: 3492 - protein, 529 aa, Unknown
  Description of Unknown: Integrase B3493 sequence
  cd00338,SM00857,G3DSA:1.10.10.2600,IPR036162,PF13408, PS51737,G3DSA:3.40.50.1390,IPR025827,IPR006119,IPR038109, PF07508,IPR011109,SSF53041,PTHR30461,PS51736, Coil,PF00239
MNFTSTWKIADPLAQYIIYLRKSRKDMEAEALGQTDTLKRHRAALLSLSESRGLNVVEICEEVVTGDSIAVRPEVQKVLQLVETGNYAGVIVMEVERLARGDTIDQGIIAQTFKYSDTRIITPNKTYDPNNEMDEEYFEFGLFMSRREYNTIKRRLSRGKEASLREGKWISGKTPFGWSREKLPNDKGYKLVPHPEQAPVLQQIYNWYTGEGCARIGAKAISTRLNSLGVPTNSGSLWRTDSVLDILRNPANAGWIKSGGRPETKRIVDGAVVVSRPRTRQEDLKLYKGLHDGLISQEQYDKAVALSYSSASPRGKGAWGTVTSLAGLVRCDQCGRVMVRRPSSGNRRDTLLCPSYGCTTVSAWYDDVEDAVLDALRGWLRELELGEAAAPDDTPMRTALESSIAADRKQLAKLEAQEARAYELVETGVYTPEIFLQRSQALAADKQVIVDRIEASQTTITELARAKQARARLAPAVRRVLETYPLAASPQEKNALLKTVLQKVLYHKQTKSYTKSGSDMHVTLYPLAD

SEQ ID NO: 3493 - protein, 529 aa, Unknown
  Description of Unknown: Integrase B3494 sequence
  PTHR30461:SF3,SM00857,G3DSA:1.10.10.2600,IPR036162,PF13408, IPR025827,PS51737,G3DSA:3.40.50.1390,IPR006119,IPR038109, PF07508,SSF53041,IPR011109,PF00239,PTHR30461, PS51736,Coil,cd00338
MSSVDKIAVVYARYSSHGQTEQSIEGQIAAAQKYAEQHGYTIIHIYADRAMTGRNDDREEFQRMLSDTATHQFGVILLWKIDRFGRNREEIAFNRYRCKKNGVRVERVAEDVPDGPEGVILDSVLEGMAEYYSLQLAQNVRRGQRESAKKSQTVGGCKIIGYNVNPDTKRYEVDPKTAPFVTEVFKRYANGETISEIVAWLNAQGVRTTRGGEFTVNSLHRLLKNEKYTGVYIFHDIRNEGGMPALIDHATFDKVQEMLKVNRRAPARVWSKTEYLLTDKLFCGHCGAMMVGESGHGRNGTKHNYYTCWNRKKKKSCDKKPVRQDVIESLVLRSIGKLLENPATLENIADQVWAAYERSDTSGDTIKALDKQIADVDRALSNVMKAIEMGIINEMTKARMDELTDQKQALSAARAEAGLAGGFKLTRDMILFFLQEIAALDMADRDSQKRLIKTFVNAIYLYDDHFDIAFNYTDNGKVVVRMQEINDAACGEVFGRCAQSPAIVQTSEPLITIVVSCSVFVFSVKMPEA

SEQ ID NO: 3494 - protein, 529 aa, Unknown
  Description of Unknown: Integrase B3495 sequence
  cd00338,SM00857,G3DSA:1.10.10.2600,IPR036162,PF13408, PS51737,G3DSA:3.40.50.1390,IPR025827,IPR006119,IPR038109, PF07508,IPR011109,SSF53041,PTHR30461,PS51736, Coil,PF00239
MKFTSTWRISDPLAQYIVYLRKSRKDMEAEALGQTDTLKRHRAALLSLAESSGLNVVEICEEVVTGDSIAVRPEVQKVLQLVETGSYAGVLVMEVERLARGDTIDQGIIAQTFKYSNTKIVTPNKVYDPNNEMDEEYFEFGLFMSRREYNTIKRRLSRGKEASLREGKWISGKTPFGWLREKLPNDKGYKLIPHPEQAPILRQIYDWYTGEGCARIGSYAIASRLNTLGIKTNSGNSWTTSAILELLRNPANAGWIKSGGRPETKRIVDGSVVVSRPRTRQEDLKLYKGLHDALISQAQYDKAVSLSYSVVAPRGKGAWKTVTSLAGLVRCDQCGRVMVRRASSGDRRPSFMCPTQGCPTVSSWYSEVEEALLDALRDWLRELEVGEADTNDDHSLLDALSASINADQKQLAKLESQEARAYELVETGVYTPEVFLQRSQALAADKQVIVSRVEENQRAQDEITRAKQARARLAPAVRHVLEAYPLAATPQDKNDLLKTVLQKVLYHKRSKSYSKAGSDMCLTLYPLTD

SEQ ID NO: 3495 - protein, 529 aa, Unknown
  Description of Unknown: Integrase B3496 sequence
  PTHR30461:SF3,IPR036162,PS51737,IPR011109,PTHR30461, PF00239,G3DSA:1.10.10.2600,IPR006119,SSF53041,cd00338, SM00857,IPR025827,IPR038109,mobidb-lite,PS51736, PF13408,G3DSA:3.40.50.1390,PF07508,Coil
MRKKSNLNVATRAVIYARYSSANQRDCSIEQQVAKCRELAARLGLTVIDVYEDRAISGKTDRRPNFQRMMKDADLRQFDVVLAWKSNRMGRNMLQAMTNEERLRDNGIRTVYAEEDFDDTAAGRFALRNMMNVNQFYSENMAEDITRGLMDNAAKCLSNGSLPLGYKPGDDRHVVLDEAEAAIVQEIFTRVSCYEPFIDIARDLNRRGIKTKKGSEWGRSSFHTICRNERYRGIYIYRDVRIEGGMPRIVSDELFYKVQEVLKVKKNPQGRRKRSGYEEYLLTGKLFCGHCGSPMTGIAGTSKTGAMHYYYTCQKRRTDHSCDKKAVRRDQIERAVGVAIQQQLLTDENIQMMADKLMEYNARTETKYRLQGLQDQLNANKTATANILKAIEMGIITDATKARLLELEKEQGQLLVKIDEAKAEMVPISRNDFVKLLYIYKEGEPTDKKYLAALFDNFLVRVDLYDDHLKITFDPTGGRQPIDMPIGAEDSPESPGDSSESSDFEASSQDAEKFVLALHNCTKEKHLET

SEQ ID NO: 3496 - protein, 529 aa, Unknown
  Description of Unknown: Integrase B3497 sequence
  PTHR30461:SF3,cd00338,SM00857,G3DSA:1.10.10.2600,IPR036162, PF13408,PS51737,IPR025827,G3DSA:3.40.50.1390,IPR006119, IPR038109,PF07508,IPR011109,SSF53041,PTHR30461, PS51736,Coil,PF00239
MSSVDKTAVIYARYSSHGQTEQSIDGQIAAAQKYAEGKGYTIIHIYADRAMTGRNDDREQFQKMLSDTATHQFGVILLWKIDRFGRNREEIAFNRYRCKKNGVRVERVAEDVPDGPEGVILDSVLEGMAEYYSLQLAQNVRRGQRESAKKSQSNGGTRMIGYKVNPDTKRYEVDPDTAPFITEVFRRYAGGQTMAEIAAWLNAQGLRATRGGMFTVNSLHRLLKNEKYTGVYIFRDIRNEGGMPALIDRATFDKVQEMLKVNRRAPSRVWSRAEYLLTDKLFCGHCGAPMAGVSGHGHTGVKHNYYTCLNRKRKKSCTKKSVRQDVLEPLVLKSIRNLLQDDATLKYIADRVWAEYERSDTSGDTIRALDRQIADVDRALSNVMKAIEMGIINEMTKARMDELTEQKQALSAARADAGLARGFKLTRNMVLYFLRKMAAMDISDRDSQKRLIKTFVNAIYLYDDHFDIAFNYTENGKVIVKMQEIDDASTGGAFGCCAQCPTIVRTSEPLIAIVVSCSVFVFSVKMPEA

SEQ ID NO: 3497 - protein, 529 aa, Unknown
  Description of Unknown: Integrase B3498 sequence
  SM00857,G3DSA:1.10.10.2600,IPR036162,PF13408,PS51737, G3DSA:3.40.50.1390,IPR025827,IPR006119,IPR038109,PF07508, SSF53041,IPR011109,PTHR30461,Coil,PS51736, cd00338,PF00239
MSNARIIEIPATRQIRSGKNNTMRKMRVAAYCRVSTEEEEQQGSFETQKLYYTEKINSTSEWELAGIYADDGISGIHTKKRDGFNQMIQDCKKKKIDLILTKSISRFARNTLDSIQYVRMLKAIGIAVIFEKENINTSTMNSEMILTVLSAFAQAESESISQNVARGKRMGFRQGKFPFPYGQILGYRKGLDGKPEVIPEEAEVIRMIFNSYLQGASLLTIKKKLEAGGVLTARGNKKWSSESVQRILQNEKYCGDVLLQKTFIEDVLTGVSKKNMGQLPQYYIENNHEGIVTKQMFREVQAEIARRNSKSAANQRKRHQGRYNSKYALSERLVCGDCGSPYKRVTWNIHGRKQIVWRCVNRLEYGTKFCSHSPSIPEEELHQAILKAVQNLAANFTDEVAAQLDGILRQMKAGENLKAQLQKQLEKAQQEFDRLLEMSLELDESTPFLDDKLRKLSGKIKILKANIAESTDGKGEDEEATKQLTAQDLLIKEYDDILTARIIEKVIVHSRQEIEIYFIGGYTQKIDLI

SEQ ID NO: 3498 - protein, 529 aa, Unknown
  Description of Unknown: Integrase B3499 sequence
  PTHR30461:SF3,IPR036162,PS51737,IPR011109,PTHR30461, PF00239,G3DSA:1.10.10.2600,IPR006119,SSF53041,cd00338, SM00857,IPR025827,IPR038109,PS51736,mobidb-lite, PF13408,G3DSA:3.40.50.1390,PF07508,Coil
MRKKSNLNAATRAVIYARYSSANQRDCSIEQQVAKCRELAARLGLTVIDVYEDRAISGKTDRRPNFQRMMKDADLRQFDVVLAWKSNRMGRNMLQAMTNEERLRDNGIRTVYAEEDFDDTAAGRFALRNMMNVNQFYSENMAEDITRGLMDNAAKCLSNGSLPLGYKPGDDRHVVLDEAEAAIVQEIFTRVSCYEPFIDIARDLNRRGIKTKKGSEWGRSSFHTICRNERYRGIYIYRDVRIEGGMPRIVSDELFYKVQEVLKVKKNPQGRRKRSGYEEYLLTGKLFCGHCGSPMTGIAGTSKTGAMHYYYTCQKRRTDHSCDKKAVRRDQIERAVGVAIQQQLLTDENIQMMADKLMEYNARTETKYRLQGLQDQLNANKTATANILKAIEMGIITDATKARLLELEKEQGQLLVKIDEAKAEMVPISRNDFVKLLYIYKEGEPTDKKYLAALFDNFLVRVDLYDDHLKITFDPTGGRQPIDMPIGAEKSPESPGDSSESSNFEASSHDAEKFVLALHNCTKELQALA

SEQ ID NO: 3499 - protein, 529 aa, Unknown
  Description of Unknown: Integrase B3500 sequence
  PTHR30461:SF3,SM00857,G3DSA:1.10.10.2600,IPR036162,PF13408, PS51737,G3DSA:3.40.50.1390,IPR025827,IPR006119,IPR038109, PF07508,SSF53041,IPR011109,PTHR30461,Coil, cd00338,PF00239
MKKFKFPIDLSMLTEEEINQFREDPSTLFQGDTDVCLYLRFSSERQKEQSIEGQLRDCIAYCKRKNYRIVAIYVDRATTARKDVEKRVHFQEMITTSVHQTWKLVIVWKLDRFARNREDSAVFKMRLRKNGVKVESATEGISKNPEGIILEAVLEGIAEYYSADLSQKITRGMRESALKCHSIGGHVPLGYKIEDHRLVINPNTAHIVQEAFELYANGETVADICRMFNTKGYRTAKGAEFNRNSFKSMFRNKRYIGVYTYKEIEKEGGVPAIIDKELFETVQRRLSANAEAPARGKAKVDYLLAGKLFCGHCGGSMNGESGTSKTGAIHHYYSCYSRKRHHSCDKKPLRKEWIEQIVAQDVMELLTDDAIQEMADMAISQTEKDLRENTRIPELSERMKETESGIANITKAVEKGIASDALMSRLVELEKEKKNLLRLIAEEEKYVCKIDRDQIVYWLTKFKDGNIEDENFKRIIIDLMVNSVTVWDEPDGFRITTAYNLTSCKNKTFRIPSSSDKGFGFEGLESTKK

SEQ ID NO: 3500 - protein, 529 aa, Unknown
  Description of Unknown: Integrase B3501 sequence
  SM00857,G3DSA:1.10.10.2600,IPR036162,PF13408,IPR025827, PS51737,G3DSA:3.40.50.1390,IPR006119,IPR038109,PF07508, SSF53041,IPR011109,PF00239,PTHR30461,PS51736, Coil,cd00338
MKFTSTWRISDPLAQYIVYLRKSRKDMEAEALGQTDTLKRHRAALLSLSESRGLNVVEICEEVVTGDSIAVRPEVQKVLQLVETGSYAGVLVMEVERLARGDTIDQGIIAQTFKYSNTKIVTPNKVYDPNNEMDEEYFEFGLFMSRREYNTIKRRLSRGKEASLREGKWISGKTPFGWLREKLPNDKGYKLIPHPEQAPILRQIYDWYTGEGCARIGSSAIATRLNNLGVKTNSGNAWTASAVLDTLRNPANAGWIKSGGRPETKRIVDGSVVVSRPRTRQEDLNLYKGLHDGLISQEQYDKAVALSYSSSSPRGKGAWQTTTSLAGLVRCDQCGRVMVRRPSSGGRRDAFMCPSPDCPTVSAWYEDVEDAVLDALRGWLHELEVGEAERSDEHSLLDALSASISADQKQLAKLEAQEARAYEFVETGVYTPEIFLQRSQALAADKQVIISRIEDNQLAQDEITRAKQARTRLAPAVRHVLETYPLAATPQDKNDLLKTVLQKVLYHKQSKSYSKAGSDMRVTLYPLTD

SEQ ID NO: 3501 - protein, 529 aa, Unknown
  Description of Unknown: Integrase B3502 sequence
  SM00857,G3DSA:1.10.10.2600,IPR036162,PF13408,PS51737, IPR025827,G3DSA:3.40.50.1390,IPR006119,IPR038109,PF07508, IPR011109,SSF53041,PF00239,PTHR30461,PS51736, Coil,cd00338
MKFTSTWKISDPLAQYIIYLRKSRKDMEAEALGQTDTLKRHRAALLSLSESRELNVVEICEEVVTGDSIAVRPEVQKVLQLVETGNYAGVIVMEVERLARGDTIDQGIIAQTFKYSDTRIITPNKTYDPNNEMDEEYFEFGLFMSRREYNTIKRRLSRGKEASLREGKWISGKTPFGWLREKLPNDKGYKLVPHPEQAPVLQQIYNWYTGDGCARIGAKAISTRLNSLGVPTNSGSLWRADSVLDILRNPANAGWIKSGGRPETKRIVDGSVVVSRPRTRQEDLKLYKGLHNGLISQEQYDKAVALSYSSASPRGKGAWGTVTSLAGLVRCDQCGRVMVRRPSSGNRRDTLLCPSYGCTTVSAWYDDVEDAVLDALRGWLRELELGEAAAPDDTPMRTALESSIAADRKQLAKLEAQEARAYELVETGVYTPEIFLQRSQALAADKQVIVDRIEASQTTIHELARARQARARLAPAVRRVLETYPLAASPQEKNALLKTVLQKVLYHKQTKSYTKSGSDMHVTLYPLAD

SEQ ID NO: 3502 - protein, 529 aa, Unknown
  Description of Unknown: Integrase B3503 sequence
  PTHR30461:SF3,SM00857,G3DSA:1.10.10.2600,IPR036162,PF13408, PS51737,G3DSA:3.40.50.1390,IPR025827,IPR006119,IPR038109, PF07508,IPR011109,SSF53041,PTHR30461,Coil, PS51736,cd00338,PF00239
MTNAVIYARYSPGPNQTDQSIEGQIHECTRFCEDNDLRIVGTYIDRKQTGRNDNRADFQKMLRDSSRHGFSTVVVWKIDRFGRNREEIAKNKAVLRMNGVRVLSAKEHIPDGPEGIILESVLEGLAEYYSANLSQNIKRGMRESALKCQFNGSGLSTGYTVDADHKYRIDPDGAAVVRTIFEMYDGGKKIADILRYLQQSNIKTMRGKEYTHYGISRILRNRVYIGEYHWHDIVVPGGVPQIIDNDLFDRVQKRLEVNKHAPAARRGDVDFLLTSKLICGNCKSTMIGDCGTGKNGARWYYYTCRAKKTKSSKCRKKSVPKEALEREVTALTAAYVLRDDVIDYIANKVVEIQKSEHDDKSMLRYFESQLKDTNKAIANIMRAIEAGIITETTRSRLEELEDTKRDLETEIIKEKVARPTIEREQVIFFLEKFRGGNVDDKEYQRKIIDTFVHKVILYDDKITITYNYSTDSTKNAENTVESIESAASAAECKCSNKPSSSPPIFEKSNTILFFVGSLFGISCKIADRR

SEQ ID NO: 3503 - protein, 529 aa, Unknown
  Description of Unknown: Integrase B3504 sequence
  PTHR30461:SF3,SM00857,G3DSA:1.10.10.2600,IPR036162,PF13408, IPR025827,G3DSA:3.40.50.1390,PS51737,IPR006119,IPR038109, PF07508,IPR011109,SSF53041,PF00239,PTHR30461, PS51736,Coil,cd00338
MSKYCIYLRKSRADLEAEAHGEGETLSRHKTALLELARRKGITISATYEEIVSGETIAARPQMQRLLSEVGAGEWDGVLVMEIERLARGDTMDQGLVAQTFKYSGTKIITPLKTFDPQNEFDEEYFEFGLFMARREFTTTNRRLVRGREASAKEGKYVGSVPPYGYRKVKIPNDKGFTLEIVEEQAKVVRMIFEWYAEGAEVNSQKKRIGPYTIAVRLNELGIKSAGKKDYWTIYGVQNMLINPVYIGKIRWGYRKVKKTVTPEGMKKKSREFAQDGDYIVVDGLHEPILSEELFYKVQDLIAANPPTPIKYRHKNINPFAGLIFCAKCGHCMNYRRGYGRQPDYIGCYTAGCKNKASRFDLVEQRVLSILNSWVKDYSVDKAQIKHEADLNAELSNAISLAEKEIETLQDQLDKVYSFFERGTYTEKIFKQRSSVIEQQIMEIGEKIDRLKAEHQQVLERQNVQAEFVPSIKHLLEIYDTLEPVEKNKWLKQIIDRIVYEKNADGKYHNVDPGDFTIGILPRLPKRGS

SEQ ID NO: 3504 - protein, 529 aa, Unknown
  Description of Unknown: Integrase B3505 sequence
  PTHR30461:SF3,SM00857,G3DSA:1.10.10.2600,IPR036162,PF13408, IPR025827,PS51737,G3DSA:3.40.50.1390,IPR006119,IPR038109, PF07508,IPR011109,SSF53041,PTHR30461,Coil, PS51736,cd00338,PF00239
MSKYCIYLRKSRADLEAEAHGEGETLSRHKTALLELARRMGITISATYEEIVSGETIAARPQMQRLLSEVGAGEWDGVLVMEIERLARGDTMDQGLVAQTFKYSGTKIITPLKTFDPQNEFDEEYFEFGLFMARREFTTTNRRLVRGREASAKEGKYVGSVPPYGYRKVKIPNDKGFTLEIIEEQAKVVRMIFEWYAEGAEVNGQKKRIGPYSIAVRLNELGIKSVAGKDYWTIYGVQHMLINPVYIGKIRWGYRKVKKTVTPEGTKKKSREFAQDGDYIVVDGLHEPILSEELFYKVQDLIAANPPTPIKYRHKNINPFAGLIFCAKCGHCMNYRRGYGRQPDYIGCYTAGCDNKASRFDLIEQRVLSILNSWVKDYSVDKAQIKHEVDLNAELSNAISLAEKEIEALQGQLDNVYSFFERGTYTEKIFKQRSSAIEQQIMEIGEKIDRLKAEHQQVLERQNVQAEFVPSIKHLLEIYDTLEPVEKNKWLKQIIDRIVYEKNADGKYHNVDPGDFTIGILPRLPKKGS

SEQ ID NO: 3505 - protein, 529 aa, Unknown
  Description of Unknown: Integrase B3506 sequence
  PTHR30461:SF3,IPR036162,PS51737,IPR011109,PTHR30461, PF00239,G3DSA:1.10.10.2600,IPR006119,SSF53041,cd00338, SM00857,IPR025827,IPR038109,PS51736,mobidb-lite, PF13408,G3DSA:3.40.50.1390,PF07508,Coil
MAKKKKPAGGNAIIYARYSSHNQRDVSIEQQIEACRKHAAELGLTITDTYEDRAISGRTDNRPAFQRMMRDAEDGKFQYVLAWKSNRMGRNMMQAMVNESRLMDCGVKVFYAEEDFDDSAAGRFALRSMMNVNQFYSDNLAEDVRRGLMDNASKCMANGRQPLGYKRGEGGKVVVDEPAAAIVREIYTRIASGEMFMDIARDLNRRGIKTQSGSEWNKSSFKVLCRNERYRGIYIYGDTRIEGGIPPIVDDVLWYKVQEVLKVKKSKNRHHCPSDEDYLLTGKLRCGKCGGYMIGMSGRSKTGDVHHYYACQNRRVGHTCDKKNIRRDVVEPAVAQAIKQYCLTDDAIEWITDQTIAYWEDEDRKLQIDSIENDLSAVQSSISNVMKAIEMGVITETTRDRLIELERQQTDLKSKLALAKEEIVHVDRKDLISSLLAFRHGNVHDRAYQEKLFNAFLIAVYVYDDDHLKLVFNSFGKDDTVNIALDLGENDDNSGLSDVSKSSPILSNGQPKRTSRTCSAGSFFSLFPL

SEQ ID NO: 3506 - protein, 529 aa, Unknown
  Description of Unknown: Integrase B3507 sequence
  PTHR30461:SF3,SM00857,G3DSA:1.10.10.2600,IPR036162,PF13408, IPR025827,G3DSA:3.40.50.1390,PS51737,IPR006119,IPR038109, PF07508,IPR011109,SSF53041,PF00239,PTHR30461, PS51736,Coil,cd00338
MKKIAIYSRKSVFTGKGESVENQIALCKDYCEKFLRYDNADYIVYEDEGFSGKNINRPQFKLLLDDIKKHKIDILVCYRLDRISRSVADFASTLEILNKYNVDFLSIREKFDTTSANGRAMLNISATFAQLERETIAERVKDNMLQMAKNGYWTGGQLPLGYDSIRYSTIDGTGKERSYSKLKENIKELDVVRLIYSEFLKNNSILDITKLLNENNLKGKNRCDFDRTQVKRILRNPLYVKSSDLTNLYLSNNYSVYGIANGNGYLTYNKSKAKDKWIVSVANHKGIIEDTNWLLVQKILDNNATKVSNRTGTGTGDNTSLFSGILKCSECGENMVIKYNNKNKYGNPNLYYICSSKTRKFTSKCKTKNLNVKATDIKILEDIKSYNKEVLIKKYEEYINELIANNNTGLKEDLKEQIKHKEKQINNLVIKLSNIDTPEISDVILNQLATLTNEVKDLKTKLSNSDIQAANVEKAIGEFKNIKNLLLEFDSSIDSTEDIKVKRQLIRNIVKSVKYNEVDKTFFIEFYHP

SEQ ID NO: 3507 - protein, 529 aa, Unknown
  Description of Unknown: Integrase B3508 sequence
  cd00338,SM00857,G3DSA:1.10.10.2600,IPR036162,PF13408, PS51737,G3DSA:3.40.50.1390,IPR025827,IPR006119,IPR038109, PF07508,SSF53041,IPR011109,PTHR30461,PS51736, Coil,PF00239
MKFTSTWKIADPLAQYIIYLRKSRKDMEAEALGQTDTLKRHRAALLSLSESRGLNVVEICEEVVTGDSIAVRPEVQKVLQFVETGNYAGVIVMEVERLARGDTIDQGIIAQTFKYSNTKIITPNKIYDPNNEMDEEYFEFGLFMSRREYNTIKRRLSRGKEASLREGKWISGKTPFGWSREKLPNDKGYKLVPHPEQAPVLQQIYNWYTGEGCARIGAKAISTRLNSLGVPTNSGSLWRADSVLDILRNPANAGWIKSGGRPETKRIVDGAVVVSRPRTRQEDLKLYKGLHDGLISQEQYDKAVALSYSSASPRGKGAWGTVTSLAGLVRCDQCGRVMVRRPSSGNRRDTLLCPSYGCTTVSAWYDDVEEAVLDALRGWLRELELGEAAAPDDTPMRTALESSIAADRKQLAKLEAQEARAYELVETGVYTPEIFLQRSQALAADKQVIVDRIEASQTTIHDLARARQARARLAPAVRRVLETYPLAASPQEKNALLKTVLQKVLYHKQTKSYTKSGSDMHVTLYPLAD

SEQ ID NO: 3508 - protein, 529 aa, Unknown
  Description of Unknown: Integrase B3509 sequence
  SM00857,G3DSA:1.10.10.2600,IPR036162,PF13408,PS51737, IPR025827,G3DSA:3.40.50.1390,IPR006119,IPR038109,PF07508, IPR011109,SSF53041,PF00239,PTHR30461,PS51736, Coil,cd00338
MNNMRIVEIPASMRENAGRKNTVRKLRVAAYCRVSTEEEEQQGSFEIQKLYYTEKINSTPEWEVAGIYADDGISGVHTKKRDGFNQMIQDCKKRKIDLILTKSISRFARNTLDSIQYVRMLKQMGIAVVFEKENINTATMNSEMILTVLSAFAQAESESISQNVARGKRMGYKHGKFAFPYGRIIGYRKGADGKPEIIPEQAEIIRLIFNSYLQGDSLQSIKAKLETAGALTARGNTAWSAQSIQRILQNEKYCGDVLLQKTFTEDVLTGVHKKNTGQLPQYYIENYHEGIVSKQIFREVQAEIARRNSKSAANQRKRRRGRYNSKYALTERLVCGDCGSPYKRVTWNIHGRKQIVWRCVNRIEYGTKFCGSSPSVPEEKLHRAILKAVQDLAANFTDEVAAQINGILHSIQTGESIKPNLQEQLEQTQQEFDRLLEMSLDFDEDTPFLDDRLKKLNSKIKRLKKAIDDSAAQQEKASQPEMLLSAKNLQIQEYDDALTARIIEKITVRSRNEIEIWFIGGYEKAMPLE

SEQ ID NO: 3509 - protein, 529 aa, Unknown
  Description of Unknown: Integrase B3510 sequence
  PTHR30461:SF3,SM00857,G3DSA:1.10.10.2600,IPR036162,PF13408, IPR025827,G3DSA:3.40.50.1390,PS51737,IPR006119,IPR038109, PF07508,IPR011109,SSF53041,PTHR30461,Coil, PS51736,cd00338,PF00239
MANARKVQVIEATINPKTHLSTTSPRKRRVAAYARVSTDSDEQAGSYDAQIDYYTRYICNRPDWEFVKVYPDDGISGLSTKKREQFMAMINDALAGKIDYIITKSISRFARNTVDTLTYVRMLKDHGVGVYFEKENIDTMDAKGELLITIMSSLAQEESRSISENVIWGQRKRFADGKVTLPYKRFLGYDRGASKDDPPVVNEEQAVWVRYIYSEYMLGKTACAIAKALTASGVPSPSGKPKWSPSTVESILSNEKYKGDALLQKTFTVDFLSKKKKINEGEHPQYYVEHSHEAIIDPREWKLVQLEMERRKSLGMRYSGNCVLATRIVCGDCGSYFGPKVWNSTSKYKRTIWQCNDKFKGETKCRTPHIEEQEIKSRFVSVINSLLPDKQALLEDCRLMQDALTDCTKIDEQLDALVQELEVIAGLTRKCIAENAAEVIDQDEYKKRYDGLNARYDTTREKIEALEKKKAARIGEADKIGAFMFEMLECDEPLDTFDERLWIAVIDHATVYHDGRIVFTFVNGMEAEG

SEQ ID NO: 3510 - protein, 528 aa, Unknown
  Description of Unknown: Integrase B3511 sequence
  SM00857,G3DSA:1.10.10.2600,IPR036162,PS51737,G3DSA:3.40.50.1390, IPR006119,IPR038109,PF07508,IPR011109,SSF53041, PTHR30461,Coil,PS51736,cd00338,PF00239
MQETNISINEIIMYLRKSRSDDPYMTVEEVLARHERQLQEYALSSFGSIIPEERIFREVVSGETIADRPVMQSVMKYLESGQIKGVLVIEPQRLSRGDLEDCGRIINAFRYTNTLVLTPPKTYDLSDEYDRKFFEMELTRGNDYLEYTKKILNRGRLASVKQGNYIGSIAPYGYRKIKTGSGKDTAHTLEIVPEQADAVRMMAQLYLAGNGFTRIAVHLDSLGIKPLKSDHWSSAAISDILSNPVYIGMIRWNHFKTIKTMQNGQIVKSRPTNHDTDYILVPGKHPAILDQGTFDAIAQRRGKSPKIKRGHELRNPFAGLVYCGTAGCGRSMTFKQFTNYRSKVPRRSESMICPNQRICHTKSVQYSAFVERVKEILSKTVDDFEIKLQNDDGNIVRIHENIIRNLEQDLVKLKDKDLRQKDAYEDGIYTKEEYASRNAKLQEQICEVQLSIQRAKDTMPPEVDYQERVSRFSDCLSKFEDTDISASEMNLLLKSCIEKIIYHNSSESKPGIGRFVANPFELDIYLRL

SEQ ID NO: 3511 - protein, 528 aa, Unknown
  Description of Unknown: Integrase B3512 sequence
  PTHR30461:SF3,SM00857,G3DSA:1.10.10.2600,IPR036162,PS51737, G3DSA:3.40.50.1390,IPR006119,IPR038109,PF07508,IPR011109, SSF53041,PF00239,PTHR30461,PS51736, Coil,cd00338
MRYVIYLRKSRADLEAEAHGEGETLSRHKTALLELARRMGITISATYEEIVSGETIAARPQMQRLLSEVGAGEWDGVLVMEIERLARGDTMDQGLVAQTFKYSGTKIITPLKTFDPQNEFDEEYFEFGLFMARREFTTTNRRLVRGREASAKEGKYVGSVPPYGYRKVKIPNDKGFTLEIVEEQAKVVRMIFEWYAEGAEVNDQKKRIGPYTIAVRLNELGIKSVAGKDYWTIYGVQHMLINPVYIGKIRWGYRKVKKTVTPEGMKKKSREFAQDGDYIVVDGLHEPILSEELFYKVQDLIAANPPTPIKYRNNNVNPFAGLIFCAKCGHCLSYRKGYGRHPGYLGCNIAGCDNKAAPFELIEQRVLSILNSWVKDYSVDKAQIKHEADLNVELSNAISLAEKEIETLQDQLDKVYSFFERGTYTEKIFKQRSSAIEQQITDIGEKIDRLKAEHQQVLERQNVQAEFVPSIKHLLEIYDTLEPVEKNKWLKQIIDHMVYEKNADGKYRNVDPGDFTLGILPRLPKKGS

SEQ ID NO: 3512 - protein, 528 aa, Unknown
  Description of Unknown: Integrase B3513 sequence
  cd00338,SM00857,G3DSA:1.10.10.2600,IPR036162,PS51737, G3DSA:3.40.50.1390,IPR006119,IPR038109,PF07508,SSF53041, IPR011109,PTHR30461,PS51736,Coil,PF00239
MQETNISINEIIMYLRKSRSDDPYMTVEEVLARHERQLQEYALSSFGSIIPEERIFREVVSGETIADRPVMQSVMKYLESGQIKGVLVIEPQRLSRGDLEDCGRIINAFRYTNTLVLTPPKTYDLSDEYDRKFFEMELTRGNDYLEYTKKILNRGRLASVKQGNYIGSIAPYGYRKIKTGSGKDTAHTLEIVPEQADAVRMMAQLYLAGNGFTRIAVHLDSLGIKPLKSDHWSPAAISDILSNPVYIGMIRWNHFKTIKTMQNGQIVKSRPTNRGTDYILVPGKHPAILDQGTFDAIAQRRGKSPKIKRGHELRNPFAGLVFCGTAGCGRSMTFKQFTNYRSKVPRRSESMICPNQRICHTKSVQYSAFVERVKEILSKTVDDFEIKLQNDDGNIVRIHENIIRNLEQDLVKLKDKDLRQKDAYEDGIYTKEEYASRNAKLQEQICEVQLSIQRAKDTMPPEVDYQERVSRFSDCLSKFEDTDISASEMNLLLKSCIEKIIYHNSSESKPGIGRFVANPFELDIYLRL

SEQ ID NO: 3513 - protein, 528 aa, Unknown
  Description of Unknown: Integrase B3514 sequence
  SM00857,G3DSA:1.10.10.2600,IPR036162,PS51737, G3DSA:3.40.50.1390,IPR006119,IPR038109,PF07508, IPR011109,SSF53041,PTHR30461,Coil, PS51736,cd00338,PF00239
MAYCIYLRKSRADRELELQGFGETLKRHRDTLIELAKKKNLPIGEIYEEVVSGDSIAARPQMQRLLNDVSDGKWEGVLVMEIERLARGDTSDQGIVTKTFTYSNTLIITPMKTFNPTDEFDQEYFEFGLYMSRREYKTIKRRLHAGMEASCKEGNYIHHTPPFGYSIVKNKKSKGYRLEPKPGEAEIVKLIFQWYTKGILKEDGSYELLGTARIADKLNSEYSIKPLGGVWTIPTISTMLRNEHYLGYIVFGKKKRKKVVENGIIVDKWTRNESYGLYKGKHPALVSQDTFNLAQERLSRNPRRPSKTITNPLAGVIKCGMCGRSMYRRPYQKRCQSASLICSEKTCHNVSSAFYLVEDALLTAIKEWIDGYEIKEEANKYDTSVLESKTKLLEEQQKQLITYKNQLTKVFEAYENGIYDSDTFLNRQKTVSESISSTEEAIVKLNKEIANEREIISHQEEIIPKARKILEIYKTSDDVQLKNDLMKSILDKVVYTKTANGHFKDQRQDDFKLELFPKLPKNKGNSSK

SEQ ID NO: 3514 - protein, 528 aa, Unknown
  Description of Unknown: Integrase B3515 sequence
  SM00857,G3DSA:1.10.10.2600,IPR036162,PF13408,PS51737, G3DSA:3.40.50.1390,IPR025827,IPR006119,IPR038109,PF07508, IPR011109,SSF53041,PTHR30461,Coil,PS51736, cd00338,PF00239
MAYCIYLRKSRADRELELQGFGETLKRHRDTLIELAKKKNLPIGEIYEEVVSGDSIAARPQMQRLLNDVSDGKWEGVLVMEIERLARGDTSDQGIVTKTFTYSNTLIITPMKTFNPTDEFDQEYFEFGLYMSRREYKTIKRRLHAGMEASCKEGNYIHHTPPFGYSIVKNKKSKGYRLEPKPGEAEIVKLIFQWYTKGILKEDGSYELLGTARIADKLNSEYSINPLGGVWTIPTISTMLRNEHYLGYIVFGKKKRKKVVENGIIVDKWTRNESYGLYKGKHPALVSQDTFNLAQERLSRNPRRPSKTITNPLAGVIKCGMCGRSMYRRPYQKRGQSASLICSEKTCHNVSSAFYLVEDALLTAIKEWIDGYEIKEEANKYDTSVLESKTKLLEEQQKQLITYKNQLTKVFEAYENGIYDSDTFLNRQKTVSESISSTEEAIVKLNKEIANEREIISHQEEIIPKARKILEIYKTSDDVQLKNDLMKSILDKVVYTKTANGHFKDQRQDDFKLELFPKLPKNKGNSSE

SEQ ID NO: 3515 - protein, 528 aa, Unknown
  Description of Unknown: Integrase B3516 sequence
  PTHR30461:SF3,IPR036162,PS51737,IPR011109,PTHR30461, PF00239,G3DSA:1.10.10.2600,IPR006119,PF14287,SSF53041, IPR025378,SM00857,IPR025827,cd03770,IPR038109, PF13408,G3DSA:3.40.50.1390,PF07508,Coil
MNTNIKHTALLSRLSREDENIGTSESILTQKTMLTQYAKSHHFKNIIHYVDDGYSGTNFERPDFQRLMQDIKLGKIGVVITKDLSRLGRDYIKIGNLLEEYFPKYQVRYIAINDDIDTINGIPEYVPFKNIINEWYARDISRKIRSAYQTKALNGEFTASYAPYGYKKDENNKHQLIVDEETSWVVKEIFELIANKNSLYQVARILKDKKILKPRAQIMKKEGKYYNELWEKYPYDWSPQTIHRIITNEEYLGHLVCNRNSTISYKSKKLKQNPREKWIIKKHTHQAIIEEELFYLANKALEGSIKKKVIKPRNMFSQLLRCDCCGKALSLYHSDRRVASFCCVTYRSFGKKYCTAHYTRYDTLYRYVLEDIRKHAKKAIKNKEELLQEIINHRTKTNEEEHKNKIKENQRIEKRLKEIKEIMIKLYEDKALNRIKEEMYEELLESYEKEKAEKVLKRNENNIFINESKIKEKEVKKFLECINKYEDLKELNEEILHQLINKIVVYEREIIDGKRIQKIEIEYNFIND

SEQ ID NO: 3516 - protein, 528 aa, Unknown
  Description of Unknown: Integrase B3517 sequence
  SM00857,G3DSA:1.10.10.2600,IPR036162,PS51737,G3DSA:3.40.50.1390, IPR006119,IPR038109,PF07508,IPR011109,SSF53041, PTHR30461,Coil,PS51736,cd00338,PF00239
MQETNISINEIIMYLRKSRSDDPYMTVEEVLARHERQLQEYALSSFGSIIPEERIFREVVSGETIADRPVMQSVMKYLESGQIKGVLVIEPQRLSRGDLEDCGRIINAFRYTNTLVLTPPKTYDLSDEYDRKFFEMELTRGNDYLEYTKKILNRGRLASVKQGNYIGSIAPYGYRKIKTGSGKDTAHTLEIVPEQADAVRMMAQLYLAGNGFTRIAAHLDSLGIKPLKSDHWSPAAISDILSNPVYIGMIRWNHFKTIKTMQNGQIVKSRPTNHDTDYILVPGKHPAILDQGTFDAIAQRRGKSPKIKRGHELRNPFAGLVFCGTTGCGRSMTFKQFTNYRSKVPRRSESMICPNQRICHTKSVQYSAFVERVKEILSKTVDDFEIKLQNDDGNIVRIHENIIRNLEQDLVKLKDKDLRQKDAYEDGIYTKEEYASRNAKLQEQICEVQLSIQRAKDTMLPEVDYQERVSRFSDCLSKFEDTDISASEMNLLLKSCIEKIIYHNSSESKPGIGRFVANPFELDIYLRL

SEQ ID NO: 3517 - protein, 528 aa, Unknown
  Description of Unknown: Integrase B3518 sequence
  SM00857,G3DSA:1.10.10.2600,IPR036162,PF13408, IPR025827,G3DSA:3.40.50.1390,PS51737,IPR006119, IPR038109,PF07508,IPR011109,SSF53041, PF00239,PTHR30461,PS51736,Coil,cd00338
MAYCIYLRKSRADRELELQGFGETLKRHRDTLIELAKKKNLPIGEIYEEVVSGDSIAARPQMQRLLNDVSDGKWEGVLVMEIERLARGDTSDQGIVTKTFTYSNTLIITPMKTFNPTDEFDQEYFEFGLYMSRREYKTIKRRLHAGMEASCKEGNYIHHTPPFGYSIVKNKKSKGYRLEPKPGEAEIVKLIFQWYTKGILKEDGSYELLGTARIADKLNSEYSIKPLGGVWTIPTISTMLRNEHYLGYIVFGKKKRKKVVENGIIVDKWTRNESYGLYKGKHPALVSQETFNLAQERLSRNPRRPSKTITNPLAGVIKCGMCGRSMYRRPYQKRGQSASLICSEKTCHNVSSAFYLVEDALLTAIKEWIDGYEIKEEANKYDTSVLESKTKLLEEQQKQLITYKNQLTKVFEAYENGIYDSDTFLNRQKTVSESISSTEEAIVRLNKEIANEREIISHQEEIIPKAKKILEIYKTSDDVQLKNDLMKSILDKVVYTKTANGHFKDQRQDDFKLELFPKLPKNKGNSSE

SEQ ID NO: 3518 - protein, 528 aa, Unknown
  Description of Unknown: Integrase B3519 sequence
  PTHR30461:SF3,SM00857,G3DSA:1.10.10.2600,IPR036162,PF13408, PS51737,G3DSA:3.40.50.1390,IPR025827,IPR006119,IPR038109, PF07508,IPR011109,SSF53041,PF00239,PTHR30461, PS51736,Coil,cd00338
MKAVIYARFSSHNQREESIEGQVRACQRFAKEHDMTVIEIYADRGLSGLHADNRPEFQRMIADSDRHKFQALIMWNLDRFSRDKYDTAVYKSRLKKNGVTLYYSDQNIPDTPEGIILESLLEGFAQYYSANLSRNAKRGLQENARKCLWNGGGLPLGYTIDETKHFVIDPAGAACVRLIFQMYADNHSIKEIVSALNEKGYRTVKGNKFRLGSIQGVLRNRKYIGEYHASGITVPNGVPAIVDVELFNAVQEKIGVVSAAKARNKAEIPYLLTTKVFCGHCGSPMIGESGTGKGGSTYRYYKCSCRKNRKGQCDKRTEQKEWLEETVVAQTVEKFLHPDVIEDVSNACAAVLEQDCQNNALLKALNAQLADVEKSSRNLIKAIEAGVFTASMRERLAELEQQKEDITVQIAREQLRKPQLSAEQIAFFLRSFLDGDAHDPNFQERIIESLVRRVDVYDEGPGNRKLTVFYNLKKNNHSSVSVKCSDSESVGLPKRSVAKAADFFIRFLQKDENRTAVNTVPFGTVEPS

SEQ ID NO: 3519 - protein, 528 aa, Unknown
  Description of Unknown: Integrase B3520 sequence
  SM00857,G3DSA:1.10.10.2600,IPR036162,PF13408,PS51737, G3DSA:3.40.50.1390,IPR025827,IPR006119,IPR038109,PF07508, IPR011109,SSF53041,PTHR30461,Coil,PS51736, cd00338,PF00239
MAYCIYLRKSRADRELELQGFGETLKRHRDTLIELAKKKNLPIGEIYEEVVSGDSIAARPQMQRLLNDVSDGKWEGVLVMEIERLARGDTSDQGIVTKTFTYSNTLIITPMKTFNPTDEFDQEYFEFGLYMSRREYKTIKRRLHAGMEASCKEGNYIHHTPPFGYSIIKNKKSKGYRLEPKPGEAEIVKLIFQWYTKGILKEDGSYELLGTARIADKLNSEYSIKPLGGVWTIPTISTMLRNEHYLGYIVFGKKKRKKVVENGIIVDKWTRNESYGLYKGKHPALVSQDTFNLAQERLSRNPRRPSKTITNPLAGVIKCGMCGRSMYRRPYQKRGQSASLICSEKTCHNVSSAFYLVEDALLTAIKEWIDGYEIKEEANKYDTSVLESKTKLLEEQQKQLIAYKNQLTKVFEAYENGIYDSDTFLNRQKTVSESISSTEEAIVKLNKEIANEREIISHQEEIIPKAKKILEIYKTSDDVQLKNDLMKSILDKVVYTKTANGHFKDQRQDDFKLELFPKLPKNKGNSSE

SEQ ID NO: 3520 - protein, 528 aa, Unknown
  Description of Unknown: Integrase B3521 sequence
  PTHR30461:SF3,SM00857,G3DSA:1.10.10.2600,IPR036162,PF13408, IPR025827,G3DSA:3.40.50.1390,PS51737,IPR006119,IPR038109, PF07508,IPR011109,SSF53041,PTHR30461,Coil, PS51736,cd00338,PF00239
MRYVIYLRKSRADLEAEAHGEGETLSRHKTALLELARRMGITISATYEEIVSGETIAARPQMQRLLSEVGAGEWDGVLVMEIERLARGDTMDQGLVAQTFKYSGTKIITPLKTFDPQNEFDEEYFEFGLFMARREFTTTNRRLVRGREASAKEGKYVGSVPPYGYRKVKIPNDKGFTLEIIEEQAKVVRMIFEWYAEGAEVNSQKKRIGPYTIAVRLNELGIKSAGKKDYWTIYGVQNMLINPVYIGKIRWGYRKVKKTVTPEGMKKKSREFAQDGDYIVVDGLHEPILSEELFYKVQDLIAANPPTPIKYRHKNINPFAGLIFCAKCGHCMNYRRGYGRQPDYIGCYTAGCKNKASRFDLVEQRVLSILNSWVKDYSVDKAQIKHEADLNAELSNAISLAEKEIETLQDQLDKVYSFFERGTYTEKIFKQRSSAIEQQIMEIGEKIDRLKAEHQQVLERQNVQAEFVPSIKHLLEIYDTLEPVEKNKWLKQIIDRIVYEKNADGKYHNVDPGDFTIGILPRLPKRGS

SEQ ID NO: 3521 - protein, 528 aa, Unknown
  Description of Unknown: Integrase B3522 sequence
  SM00857,G3DSA:1.10.10.2600,IPR036162,PF13408,IPR025827, G3DSA:3.40.50.1390,PS51737,IPR006119,IPR038109,PF07508, SSF53041,IPR011109,PF00239,PTHR30461,PS51736, Coil,cd00338
MAYCIYLRKSRADRELELQGFGETLKRHRDTLIELAKKKNLPIGEIYEEVVSGDSIAARPQMQRLLNDVSDGKWEGVLVMEIERLARGDTSDQGIVTKTFTYSNTLIITPMKTFNPTDEFDQEYFEFGLYMSRREYKTIKRRLHAGMEASCKEGNYIHHTPPFGYSIVKNKKSKGYRLEPKPGEAEIVKLIFQWYTKGILKEDGSYELLGTARIADKLNSEYSIKPLGGVWTIPTISTMLRNEHYLGYIVFGKKKRKKVVENGIIVDKWTRNESYGLYKGKHPALVSQDTFNLAQERLSRNPRRPSKTITNPLAGVIKCGMCGRSMYRRPYQKRGQSASLICSEKTCHNVSSAFYLVEDALLTAIKEWIDGYEIKEEANKYDTSVLESKTKLLEEQQKQLITYKNQLTKVFEAYENGIYDSDTFLNRQKTVSESISSTEEAIVKLNKEIANEREIISHQEEIIPKARKILEIYKTSDDVQLKNYLMKSILDKVVYTKTANGHFKDQRQDDFKLELFPKLPKNKGNSSE

SEQ ID NO: 3522 - protein, 528 aa, Unknown
  Description of Unknown: Integrase B3523 sequence
  PTHR30461:SF3,cd00338,SM00857,G3DSA:1.10.10.2600,IPR036162, PF13408,PS51737,G3DSA:3.40.50.1390,IPR025827,IPR006119, IPR038109,PF07508,IPR011109,SSF53041,PTHR30461, PS51736,Coil,PF00239
MCAKKKPAMLEPDMQDAVIYTRYSSHNQRDCSIEQQVADCEIFARQNNLRVVKVYADRHLSGTTDNRPQFQQMLKDAAHGHWAYVICWKIDRFARNRYDSATYKFRLKKSGVRVLYAKESIPDGPEGILLESVLEGSAEYYSAALAQNIRRGMKYNAEQCKVNSGSIPFGYCKGPDGRFAIHEANAEVVREIFCKAAAGMPFVDIANDLNSRGLKTSRGGRWNKGSFRLLMNEAYIGVYHFSDTRIEGGMPALIDQGTFWAANERLKANSSVRGRHQDGGDYLLTGKLKCAHCGSYMIGFSGTGKSGELHYYYGCQKRRRERACKKANVPREWIERVVVKAALDYVLRPDVMEWIADAVMEYQEREAASAQLAALTAELEENQKATDNVMKAIEAGIITSTTKQRLLDLEAKAQDLKRAIELEKLSHVRLERDQVLFWLDRFRGGSLQSQEFRRKVIDAFVSVVYLSDDHLRIAFNYSGGSNAEADFDLVMDAEAAAGELSKKFAQGHVTSTNKKHLDSLKSRRFSFC

SEQ ID NO: 3523 - protein, 528 aa, Unknown
  Description of Unknown: Integrase B3524 sequence
  SM00857,G3DSA:1.10.10.2600,IPR036162,PS51737,G3DSA:3.40.50.1390, IPR006119,IPR038109,PF07508,IPR011109,SSF53041, PTHR30461,Coil,PS51736,cd00338,PF00239
MQETNISINEIIMYLRKSRSDDPYMTMEEVLARHERQLQEYALSSFGSIIPEERIFREVVSGETIADRPVMQSVMKYLESGQIKGVLVIEPQRLSRGDLEDCGRIINAFRYTNTLVLTPPKTYDLSDEYDRKFFEMELTRGNDYLEYTKKILNRGRLASIKQGNYIGSIAPYGYRKIKTGSGKDTTHTLEIIPEQADAVRMMAQLYLAGNGFTRIAAHLDSLGIKPLKSDHWSPAAISDILSNPVYIGMIRWNHFKTIKTMQNGQIVKSRPTNHGTDYILVPGKHPAILDQETFYAIAERRGKSPKVKRDHELRNPFAGLVYCGTAGCGRSMALKQFTNYRSKVPRRSESMICPNQRICHTKSVQYRAFVERVKEILSKTVDDFEIKLQNDDGNIVRIHENIIRNLEQDLLKLKDKDLRQKDAYEDGIYTKEEYASRNAKLQEQICEVQLSIQRAKDTMPPEVDYQERVSRFSDCLSKFEDTDISASEMNILLKSCIEKIIYHNSSESKPGIGRFVANPFELDIYLRL

SEQ ID NO: 3524 - protein, 528 aa, Unknown
  Description of Unknown: Integrase B3525 sequence
  SM00857,G3DSA:1.10.10.2600,IPR036162,PS51737, G3DSA:3.40.50.1390,IPR006119,IPR038109,PF07508, IPR011109,SSF53041,PF00239,PTHR30461, PS51736,Coil,cd00338
MQETNISINEIIMYLRKSRSDDPYMTVEEVLARHERQLQEYALSSFGSIIPEERIFREVVSGETIADRPVMQSVMKYLESGQIKGVLVIEPQRLSRGDLEDCGRIINAFRYTNTLVLTPPKTYDLSDEYDRKFFEMELTRGNDYLEYTKKILNRGRLASVKQGNYIGSIAPYGYRKIKTGSGKDTAHTLEIVPEQADAVRMMAQLYLAGNGFTRIAAHLDSLGIKPLKSDHWSSAAISDILSNPVYIGMIRWNHFKTIKTMQNGQIVKSRPTNRGTDYILVPGKHPAILDQGTFDAIAQRRGKSPKIKRGHELRNPFAGLVFCGTAGCGRSMTFKQFTNYRSKVPRRSESMICPNQRICHTKSVQYSAFVERVKEILSKTVDDFEIKLQNDDGNIVRIHENIIRNLEQDLVKLKDKDLRQKDAYEDGIYTKEEYASRNAKLQEQICEVQLSIQRAKDTMPPEVDYQERVSRFSDCLSKFEDTDISASEMNLLLKSCIEKIIYHNSSESKPGIGRFVANPFELDIYLRL

SEQ ID NO: 3525 - protein, 528 aa, Unknown
  Description of Unknown: Integrase B3526 sequence
  PTHR30461:SF3,SM00857,G3DSA:1.10.10.2600,IPR036162,PF13408, PS51737,IPR025827,G3DSA:3.40.50.1390,IPR006119,IPR038109, PF07508,IPR011109,SSF53041,PF00239,PTHR30461, Coil,cd00338
MSNYRSALYARVSTQNEEQDTSYHNQQKIKVEGYDIVKTYADRGSGTQVYNRENFKKLLYDCGIDLEKIRNTKTYNFIASDREPLYEAIVVSHTSRFLRNQVMMKTCINALRKKNVEIYFADLGKSSLDKDIDFVMNILFLLDEQESLNTSQKVRRGLERARREKQYIQVASIFGYNYIKEENRLIINEPEAEVVRKIYSMYLEGNGYRKIYDYLQEYYPQYPKKLSHIAYILRNEKYAGYNAYGKWSVNKIEGYKKRNKEYEIFKSDRIEPIVSYEDWCKVQEIISGKKLHTRGLKANTYPLSRKIVCDVCGSTYYRQLEVKGNYSRVYWICREKKQYGAKNCHSAPISEKKLIELIMSEDYGIKSFIRTIELQVNCVLNNMEEVDTSEIEEKLKQVKVKQERMFDSYIEGVTPKDIYNRKQLQLNSEENILNEQLSSLKDKNRAIEDIKNISETYKEKLDNYYKLMQEGKYDEVYNDINKIVIGVWLKQINDDGEVKVIPMLKELKFKGFESLDKLFEGSILIKNF

SEQ ID NO: 3526 - protein, 528 aa, Unknown
  Description of Unknown: Integrase B3527 sequence
  SM00857,G3DSA:1.10.10.2600,IPR036162,PS51737,G3DSA:3.40.50.1390, IPR006119,IPR038109,PF07508,IPR011109,SSF53041, PTHR30461,Coil,PS51736,cd00338,PF00239
MQETNISINEIIMYLRKSRSDDPYMTMEEVLARHERQLQEYALSSFGSIIPEERIFREVVSGETIADRPVMQSVMKYLESGQIKGVLVIEPQRLSRGDLEDCGRIINAFRYTNTLVLTPPKTYDLSDEYDRKFFEMELTRGNDYLEYTKKILNRGRLASVKQGNYIGSIAPYGYRKIKTGSGKDTAHTLEIVPEQADAVRMMAQLYLAGNGFTRIATHLDSLGIKPLKSDHWSPAAISDILSNPVYIGMIRWNHFKTIKTMQNGQIVKSRPTNHGTDYILVPGKHLAILDQETFYAIAERRGKSPKVKRDHELRNPFAGLVYCGTAGCGRSMTFKQFTNYRSKVPRRSESMICSNQRICHTKSVQYSAFVERVKEILSKTVDDFEIKLQNDDGNIVRIHENIIRNLEQDLVKLKDKDLRQKDAYEDGIYTKEEYASRNAKLQEQICEVQLSIQRAKDTMPPEVDYQERVSRFSDCLSKFEDTDISASEMNLLLKSCIEKIIYHNSSESKPGIGRFVSNPFELDIYLRL

SEQ ID NO: 3527 - protein, 528 aa, Unknown
  Description of Unknown: Integrase B3528 sequence
  PTHR30461:SF3,cd00338,SM00857,G3DSA:1.10.10.2600,IPR036162, PF13408,IPR025827,G3DSA:3.40.50.1390,PS51737,IPR006119, IPR038109,PF07508,IPR011109,SSF53041, PTHR30461,Coil,PF00239
MKKFKFPIDLSMLTEEEIDQFKEDPFTLFHGETDVCLYLRFSSERQKEQSIEGQLRDCIAYCKRKNYRIVAIYVDRATTARKDVEKRIHFQEMITASVHQTWKLVIVWKLDRFARNREDSAVFKMRLRRNGVKVESATEGISKNPEGIILEAVLEGMAEYYSADLSQKITRGMRESALKCHSIGGHVPLGYKIEDHKLVINPNTAHIVQEAFELYANGETVADICRMFNNKGYRTAKGAEFNRNSFKSMFRNKRYIGVYTYKEIEKEGGVPAIIDKELFETVQRRLSANAEAPARGKAKVDYLLAGKLFCGHCGGSMNGESGTSKTGTVHNYYTCYTRKRQHSCDKKPLRKEWIEQVVAQDAMNLLTDDAIQEMADMAISQTERDLRENTRIPELSEKMKETENGIANITKAVEKGIASDALMSRLVELEKEKKNLLRLLAEEEKYICKIDRDQIIYWLTKFKDGNIEDEKFKRIIIDLMVNSVTVWDEPDGVRITTAYNLTSCKNKTFRIPSSSDKGFGFEGLESTK

SEQ ID NO: 3528 - protein, 528 aa, Unknown
  Description of Unknown: Integrase B3529 sequence
  SM00857,G3DSA:1.10.10.2600,IPR036162,PF13408,IPR025827, G3DSA:3.40.50.1390,PS51737,IPR006119,IPR038109,PF07508, SSF53041,IPR011109,PF00239,PTHR30461,PS51736, Coil,cd00338
MAYCIYLRKSRADRELELQGFGETLKRHRDTLIELAKKKNLPIGEIYEEVVSGDSIAARPQMQRLLNDVSDGKWEGVLVMEIERLARGDTSDQGIVTKTFTYSNTLIITPMKTFNPTDEFDQEYFEFGLYMSRREYKTIKRRLHAGMEASCKEGNYIHHTPPFGYSIVKNKKSKGYRLEPKPGEAEIVKLIFQWYTKGILKEDGSYELLGTARIADKLNSEYSIKPLGGVWTIPTISTMLRNEHYLGYIVFGKKKRKKVVENGIIVDKWTRNESYGLYKGKHPALVSQDTFNLAQERLSRNPRRPSKTITNPLAGVIKCGMCGRSMYRRPYQKRGQSASLICSEKTCHNVSSAFYLVEDALLTAIKEWIDGYEIKEEANKYDTSVLESKTKLLEEQQKQLITYKNQLTKVFEAYENGIYDSDTFLNRQKTVSESISSTEEAIVRLNKEIANEREIISHQEEIIPKAKKILEIYKTSDDVQLKNDLMKSILDKVVYTKTANGHFKDQRQDDFKLELFPKLPKNKGNSSE

SEQ ID NO: 3529 - protein, 528 aa, Unknown
  Description of Unknown: Integrase B3530 sequence
  SM00857,G3DSA:1.10.10.2600,IPR036162,PS51737,G3DSA:3.40.50.1390, IPR006119,IPR038109,PF07508,IPR011109,SSF53041, PF00239,PTHR30461,PS51736,Coil,cd00338
MQETNISINEIIMYLRKSRSDDPYMTVEEVLARHERQLQEYALSSFGSIIPEERIFREVVSGETIADRPVMQSVMKYLESGQIKGVLVIEPQRLSRGDLEDCGRIINAFRYTNTLVLTPPKTYNLSDEYDRKFFEMELTRGNDYLEYTKKILNRGRLASVKQGNYIGSIAPYGYRKIKTGSGKDTAHTLEIVPEQADAVRMMAQLYLAGNGFTRIAAHLDSLGIKPLKSDHWSSAAISDILSNPVYIGMIRWNHFKTIKTMQNGQIVKSRPTNRGTDYILVPGKHPAILDQGTFDAIAQRRGKSPKIKRGHELRNPFAGLVFCGTAGCGRSMTFKQFTNYRSKVPRRSESMICPNQRICHTKSVQYSAFVERVKEILSKTVDDFEIKLQNDDGNIVRIHENIIRNLEQDLVKLKDKDLRQKDAYEDGIYTKEEYASRNAKLQEQICEVQLSIQRAKDTMPPEVDYQERVSRFSDCLSKFEDTDISASEMNLLLKSCIEKIIYHNSSESKPGIGRFVANPFELDIYLRL

SEQ ID NO: 3530 - protein, 528 aa, Unknown
  Description of Unknown: Integrase B3531 sequence
  PTHR30461:SF3,SM00857,G3DSA:1.10.10.2600,IPR036162,PF13408, IPR025827,PS51737,G3DSA:3.40.50.1390,IPR006119,IPR038109, PF07508,IPR011109,SSF53041,PF00239, PTHR30461,PS51736,Coil,cd00338
MSRTAARSVTVIPPTINPLTHLSGVAKQKRRVAGYARVSTDSDEQFTSYEAQVDYYTQYIQRNPEWEFIKVYTDEGISGTNTKHRVGFNEMIEDALAGKIDLIVTKSVSRFARNTVDSLVTIRKLKEKGVEVYFEKENIYTFDGKGELLLTIMSSLAQEESRSISENVTWGQRKRFADGKVNLPYKQFLGYRKGADGFPEVVPEEAVIVRRIYTRFMEGLTPGAIAKELTADTIPTPSGKQRWQTSTVESILQNEKYKGAALLQKCFTVDFLTKKKKANEGEVPQYYVEHSHEPIITPDEFNKVQVEFERRKRISRQYSGKSIFASRIICGDCGSFFGSKVWNSTSKYRRVIWQCNNKFKGEHKCETPHLDEKTIKARFVAAFNAILDSKDNILEDCRLMQATLTDCTGIDEEIQTLLEEIEVVTELTKRCIAENSQTAQNQEEYAARYNGFVERYEKTKAQLEQLRTTKAAREAQAEAIGAFMFEVQELDALTEFDEKLWLTIIDTATVHADGRMTFKFQGGTEIDV

SEQ ID NO: 3531 - protein, 528 aa, Unknown
  Description of Unknown: Integrase B3532 sequence
  PTHR30461:SF3,cd00338,SM00857,G3DSA:1.10.10.2600,IPR036162, PF13408,IPR025827,PS51737,G3DSA:3.40.50.1390,IPR006119, IPR038109,PF07508,IPR011109,SSF53041,PTHR30461, PS51736,Coil,PF00239
MARKTDKPLSNIAVIYARFSSHNQREESIEQQVAECKVFAAQQGLEVTEIYSDAAQSGRTENRSQFLRLQRDAKKGKFTNIVAYKSNRIARNMVNALTFENDMEKLGVKLYYAKEEFGNNAAGRFALRMMMNVNQFYSENMAEDIRRGMEDNAMKCKVNGPAPYGYKSGKSGTYEIDEPAAAVVREIFTRVACGDSFVDIYTDLNNRGLKTRKGNKWGRSSFQSILKCEKYTGVYIYDNIRVEGGMPEIISKEMFLKVQRILGTKGNPQGRHRINGDYLLTGKLFCGECGHHMMGLSGTGKNGLLHYYYGCSGKKEKPRCSKKNVRRDELEYEVARLVQTYILQDDVITWLADTLIKYQEEHSSDGDMTILNTQLSETEKSIKNLMAAIEQGIITPSTKERLMELESEKSKIENNITLLKADTITVSKEQIGGWLDSFRDGNIKDKRFQKRLFDSFLSAVYVYDDNRVRIVFNLCGLNKGDIDTKLMLGDTEAIEKVSDCSYKRCYGSPNQNPHSWLNKADCGDFSFC

SEQ ID NO: 3532 - protein, 528 aa, Unknown
  Description of Unknown: Integrase B3533 sequence
  SM00857,G3DSA:1.10.10.2600,IPR036162,PS51737,G3DSA:3.40.50.1390, IPR006119,IPR038109,PF07508,IPR011109,SSF53041, PTHR30461,Coil,PS51736,cd00338,PF00239
MQETNISINEIIMYLRKSRSDDPYMTVEEVLARHERQLQEYALSSFGSIIPEERIFREVVSGETIADRPVMQSVMKYLESGQIKGVLVIEPQRLSRGDLEDCGRIINAFRYTNTLVLTPPKTYDLSDEYDRKFFEMELTRGNDYLEYTKKILNRGRLASVKQGNYIGSIAPYGYRKIKTGSGKDTAHTLEIVPEQADAVRMMAQLYLAGNGFTRIAAHLDSLGIKPLKSDHWSPAAISDILSNPVYIGMIRWNHFKTIKTMQNGQIVKSRPTNHDTDYILVPGKHPAILDQGTFDAIAQRRGKSPKIKRGHELRNPFAGLVYCGTAGCRRSMTFKQFTNYRSKVPRRSESMICPNQRICHTKSVQYSAFVERVKEILSKTVDDFEIKLQNDDGNIVRIHENIIRNLEQDLLKLKDKDLRQKDAYEDGIYTKEEYASRNAKLQEQICEVQLSIQRAKDTMPPEVDYQERVSRFSDCLSKFEDTDISASEMNLLLKSCIEKIIYHNSSESKPGIGRFVANPFELDIYLRL

SEQ ID NO: 3533 - protein, 528 aa, Unknown
  Description of Unknown: Integrase B3534 sequence
  PTHR30461:SF3,SM00857,IPR036162,G3DSA:3.40.50.1390,IPR006119, PF07508,IPR011109,SSF53041,PTHR30461,PS51736, cd00338,PF00239
MHFGIYGRKSYFKDTSDSTQMQFSEGDKYITEHFSPDEIESVTYYEDDGWIRSDMDRPDLNRLKDDILAGLINVVVIYKIDRLCCDMADFVPFYAFLKDHGVKFITIKDGIDTTTPIGEAMMYLAVIFSGLEVQTDSLRITDNMNHLAAEGFWCGGKPPIGYNIQEISLGAKSHKTLVFNEDEIRYKNTLIDIFLENHFSLQSMETYCKNHGITSLKGSFLSTTQLYSMFGSPMCVANTPAMYDYFADKGCQMSEGSPRDAWDGKHGIIVYGRTMEKKVSGKKKHIQAPPENWRVSIGYHEPYMTDERFFAIQAQFGHNVFSKQTKYDLPLLKGSLRCKCGRLMSMSRKKKADGSISTWYYCPRRMRSGVEACDMSQVKSDLLDNRVISIFQEIEHDPAALKKYLKEEKKQPQDNAAALRAAMEKCQAKIGKLTATLGLNSESAAAKYIVNEIEKLDIEYNSLRKRMLSANAVDRKNALNMKNAMEKREEIIRLLNDFDNFTPNERNEIAKDVLKECVWDGDTLFLTL

SEQ ID NO: 3534 - protein, 528 aa, Unknown
  Description of Unknown: Integrase B3535 sequence
  SM00857,G3DSA:1.10.10.2600,IPR036162,PS51737,G3DSA:3.40.50.1390, IPR006119,IPR038109,PF07508,IPR011109,SSF53041, PTHR30461,Coil,PS51736,cd00338,PF00239
MQETNISINEIIMYLRKSRSDDPYMTVEKVLARHERQLQDYALSSFGSIIPEERIFREVVSGETIADRPVMQSVMKYLESGQIKGVLVIEPQRLSRGDLEDCGRIINAFRYTNTLVLTPPKTYDLSDEYDRKFFEMELTRGNDYLEYTKKILNRGRLASVKQGNYIGSIAPYGYRKIKTGSGKDTSHTLEIVPEQADAVRMMAQLYLAGNGFTRIAAHLDSLGIKPLKSDHWSSAAISDILSNPVYIGMIRWNHFKTIKTMQNGQIVKSRPTNRGTDYILVPGKHPAILDQGTFDAIAQRRGKSPKIKRGHELRNPFAGLVFCGTAGCGRSMTFKQFTNYRSKVPRRSESMICPNQRICHTKSVQYSAFVERVKEILSKTVDDFEIKLQNDDGNIVRIHENIIRNLEQDLVKLKDKDLRQKDAYEDGIYTKEEYASRNAKLQEQICEVQLSIQRAKDTMPPEVDYQERVSRFSDCLSKFEDTDISASEMNLLLKSCIEKIIYHNSSESKPGIGRFVANPFELDIYLRL

SEQ ID NO: 3535 - protein, 528 aa, Unknown
  Description of Unknown: Integrase B3536 sequence
  SM00857,G3DSA:1.10.10.2600,IPR036162,PF13408, PS51737,IPR025827,G3DSA:3.40.50.1390,IPR006119, IPR038109,PF07508,IPR011109,SSF53041, PF00239,PTHR30461,PS51736,Coil,cd00338
MAYCIYLRKSRADRELELQGFGETLKRHRDTLIELAKKKNLPIGEIYEEVVSGDSIAARPQMQRLLNDVSDGKWEGVLVMEIERLARGDTSDQGIVTKTFTYSNTLIITPMKTFNPTDEFDQEYFEFGLYMSRREYKTIKRRLHAGMEASCKEGNYIHHTPPFGYSIVKNKKSKGYRLEPKPGEAEIVKLIFQWYTKGILKEDGSYELLGTARIADKLNSEYSIKPLGGVWTIPTISTMLRNEHYLGYIVFGKKKRKKVVENGIIVDKWTRNESYGLYKGKHPALVSQDTFNLARERLSRNPRRPSKTITNPLAGVIKCGMCGRSMYRRPYQKRGQSASLICSEKTCHNVSSAFYLVEDALLTAIKEWIDGYEIKEEANKYDTSVLESKTKLLEEQQKQLITYKNQLTKVFEAYENEIYDSDTFLNRQKTVSESISSTEEAIVKLNKEIANEREIISHQEEIIPKAKKILEIYKTSDDVQLKNDLMKSILDKVVYTKTANGHFKDQRQDDFKLELFPKLPKNKGDSSE

SEQ ID NO: 3536 - protein, 528 aa, Unknown
  Description of Unknown: Integrase B3537 sequence
  PTHR30461:SF3,SM00857,G3DSA:1.10.10.2600,IPR036162,PS51737, G3DSA:3.40.50.1390,IPR006119,IPR038109,PF07508,SSF53041, IPR011109,PTHR30461,Coil,PS51736,cd00338, PF00239
MAKVRIIPAQVKQGNRNRQIEESEAKLKVAAYCRVSTLYEDQASSYETQVAHYKEFITKNPKWELAGIYADDGISGTDTKKRNQFNQMIDDAKQGKIDLIVTKSISRFARNTIDCLQYIRELKELHVAVFFEKENINTMDAKGEVLITIMASLAQQESESISRNIKIGLQYRYQRGQVIVNTARFLGYDKDDDGNLVINPEQAKVVKRIFYECLTGKSAIEIARELTKEGIKNGIGRTQWHSSGIIKILRNEKYIGDALLQKTYTVDFLTKKRVKNDGQVPQYYVENNHPAIISRAVFYQVQKLLDMRREGFTTEGGHHHGYTNAYCFSSIVYCGRCKDIYTRCVWYRPRIGEVEKVNVWRCYSRLHWNHKGKRCMGRTITEADLEEASLKAMNELIQQHQLADKQIAANILKVTKGTTGPSLDELDQQLEDQQLLLLNMSTHNKNVEQLTEQVQALRKQREQLIQQEIDHDIKRSNLKNIQSFFQTYQGGLTKFDEKLVRLLIEKITIFKSKIDFTFKDGEVITVKM

SEQ ID NO: 3537 - protein, 528 aa, Unknown
  Description of Unknown: Integrase B3538 sequence
  SM00857,G3DSA:1.10.10.2600,IPR036162,PS51737,G3DSA:3.40.50.1390, IPR006119,IPR038109,PF07508,IPR011109,SSF53041, PTHR30461,Coil,PS51736,cd00338,PF00239
MQETNISINEIIMYLRKSRSDDPYMTVEEVLARHERQLQEYALSSFGSIIPEERIFREVVSGETIADRPVMQSVMKYLESGQIKGVLVIEPQRLSRGDLEDCGRIINAFRYTNTLVLTPPKTYDLSDEYDRKFFEMELTRGNDYLEYTKKILNRGRLASVKQGNYIGSIAPYGYRKIKTGSGKDTAHTLEIVPEQADAVRMMAQLYLAGNGFTRIAVHLDSLGIKPLKSDHWSPAAISDILSNPVYIGMIRWNHFKTIKTMQNGQIVKSRPTNHDTDYILVPGKHPAILDQGTFDAIAQRRGKSPKIKRGHELRNPFAGLVYCGTAGCGRSMTFKQFTNYRSKVPRRSESMICPNQRICHTKSVQYSAFVERVKEILSKTVDDFEIKLQNDDGNIVRIHENIIRNLEQDLLKLKDKDLRQKDAYEDGIYTKEEYASRNAKLQEQICEVQLSIQRAKDTMPPEVDYQERVSRFSDCLSKFEDTDISASEMNLLLKSCIEKIIYHNSSESKPGIGRFVANPFELDIYLRL

SEQ ID NO: 3538 - protein, 528 aa, Unknown
  Description of Unknown: Integrase B3539 sequence
  SM00857,G3DSA:1.10.10.2600,IPR036162,PS51737, G3DSA:3.40.50.1390,IPR006119,IPR038109,PF07508, IPR011109,SSF53041,PTHR30461,Coil, PS51736,cd00338,PF00239
MQETNISINEIIMYLRKSRSDDPYMTVEEVLARHERQLQEYALSSFGSIIPEERIFREVVSGETIADRPVMQSVMKYLESGQIKGVLVIEPQRLSRGDLEDCGRIINAFRYTNTLVLTPPKTYDLSDEYDRKFFEMELTRGNDYLEYTKKILNRGRLASVKQGNYIGSIAPYGYRKIKTGSGKDTAHTLEIVPEQADAVRMMAQLYLAGNGFTRIAVHLDSLGIKPLKSDHWSPAAISDILSNPVYIGMIRWNHFKTIKTMQNGQIVKSRPTNHDTDYILVPGKHPAILDQGTFDAIAQRRGKSPKIKRGHELRNPFAGLVFCGTAGCGRSMTFKQFTNYRSKVPRRSESMICPNQRICHTKSVQYSAFVERVKEILSKTVDDFEIKLQNDDGNIVRIHENIIRNLEQDLLKLKDKDLRQKDAYEDGIYTKEEYASRNAKLQEQICEVQLSIQRAKDTMPPEVDYQERVSRFSDCLSKFEDTDISASEMNLLLKSCIEKIIYHNSSESKPGIGRFVANPFELDIYLRL

SEQ ID NO: 3539 - protein, 528 aa, Unknown
  Description of Unknown: Integrase B3540 sequence
  SM00857,G3DSA:1.10.10.2600,IPR036162,PF13408,IPR025827, G3DSA:3.40.50.1390,PS51737,IPR006119,IPR038109,PF07508, SSF53041,IPR011109,PTHR30461,Coil,PS51736, cd00338,PF00239
MAYCIYLRKSRADRELELQGFGETLKRHRDTLIELAKKKNLPIGEIYEEVVSGDSIAARPQMQRLLNDVSDGKWEGVLVMEIERLARGDTSDQGIVTKTFTYSNTLIITPMKTFNPTDEFDQEYFEFGLYMSRREYKTIKRRLHAGMEASCKEGNYIHHTPPFGYSIVKNKKSKGYRLEPKPGEAEIVKLIFQWYTKGILKEDGSYELLGTARIADKLNSEYSIKPLGGVWTIPTISTMLRNEHYLGYIVFGKKKRKKVVENGIIVDKWTRNESYGLYKGKHPALVSQDTFNLAQERLSRNPRRPSKTITNPLAGVIKCGMCGRSMYRRPYQKRGQSASLICSEKTCHNVSSAFYLVEDALLTAIKEWIDGYEIKEEANKYDTSVLESKTKLLEEQQKQLIAYKNQLTKVFEAYENGIYDSDTFLNRQKTVSESISSTEEAIVKLNKEIANEREIISHQEEIIPKAKKILEIYKTSDDVQLKNDLMKSILDKVVYTKTANGHFKDQRQDDFKLELFPKLPKNKGNSSE

SEQ ID NO: 3540 - protein, 528 aa, Unknown
  Description of Unknown: Integrase B3541 sequence
  PTHR30461:SF3,cd00338,SM00857,G3DSA:1.10.10.2600,IPR036162, PF13408,IPR025827,PS51737,G3DSA:3.40.50.1390,IPR006119, IPR038109,PF07508,IPR011109,SSF53041,PTHR30461, PS51736,Coil,PF00239
MKVVGYCRFSSEGQKDGYSIEAQTEAIRSYCEINNHTLLRFYIDEAKTGTQDDREGFLDMIDDTKSGEFEAIVVHKLDRFARNRYDSAIYGRILEDRKVRLLSVLEPIIADDSPESLLFRGIVETMNEYYSRNLSRETLKGQRIAARNAQHLGGAVPFGYDLTKDKHYTPNPTEAPIVLEIYTRLDAGQSSIAVARWLNTRGLLTRHHKQFTGSSVLNLVKSPIYIGRYVWGATSKRKGVTPIVVENACEPLVPKDLFDRVNAVISARKTGPVGRNRDVEYLLTGVLYCEYCGRHLYGFKSHAHYTLKSTGEVRDYTVYKYRCSHDNRQSFNRKTDDGYVKEVCPLKMLPKDDIESFVGDAVRSVIFAPDSAAWISGVLQERMKTIMPGNPDAVKKVDANIRATSTKQQRLLDLYLDGGIDKAAYNQKSRELNEQMQYLSAERAKMQTPPPDVSIEAIKSAIAKYSESASVKSVESTKMLIDTFVDHIDVSNEHIVIFFNVEFPFLPECSTFDFVRSGKNALTQLFAK

SEQ ID NO: 3541 - protein, 528 aa, Unknown
  Description of Unknown: Integrase B3542 sequence
  cd03768,PTHR30461:SF3,SM00857,IPR036162,PF13408, PS51737,G3DSA:3.40.50.1390,IPR025827,IPR006119,PF07508, SSF53041,IPR011109,PTHR30461,PS51736,Coil, PF00239
MKIAIYSRKSKFTGKGESIQNQIEMCKEYCNKHFGQCEFIIYEDEGFSGGNTDRPQYKRMMEDVGKKKFQAVACYRLDRISRNVSDFSQTLEELNNKNIAFISINEQFDTSTPMGRAMTYIASVFAQLERETIAERVRDNMLQLARSGRWLGGIAPTGYKSEPITYLDSNMKEKKMYKLSPVKQELEVVKLIYKKYLEFQSLSQLETYCLQNNIRTVNNRDFQKYTLRTILTNPVYSKADQSVYNYFYSREAQICNNKNEFTGKYGIMAYNKNLVKKGQSVKTKNMDEWIIAIGKHKGIIEGSEWVMVQNTLNKNKSLAPRQGTSAAAMLSGLLYCKNCGNFMRVKYGQKKKNSDERHYYYVCSMKDNSRGSRCNMKNLKGEDTDQYVIEKLKEMIESGILKDIDNAKKNIEDKKKINKNVYDKITANEKAIENLLKQLSQNENETVAKYIFSEIEKLDKENKELKSKLDKYDSETNITNLELFKEAVVRFYESIDGVPYEQKRNLIQGIVKRIEWDGKDLHIDIFDI

SEQ ID NO: 3542 - protein, 528 aa, Unknown
  Description of Unknown: Integrase B3543 sequence
  SM00857,G3DSA:1.10.10.2600,IPR036162,PF13408,IPR025827, G3DSA:3.40.50.1390,PS51737,IPR006119,IPR038109,PF07508, SSF53041,IPR011109,PF00239,PTHR30461,PS51736, Coil,cd00338
MAYCIYLRKSRADRELELQGFGETLKRHRDTLIELAKKKNLPIGEIYEEVVSGDSIAARPQMQRLLNDVSDGKWEGVLVMEIERLARGDTSDQGIVTKTFTYSNTLIITPMKTFNPTDEFDQEYFEFGLYMSRREYKTIKRRLHAGMEASCKEGNYIHHTPPFGYSIVKNKKSKGYRLEPKPGEAEIVKLIFQWYTKGILKEDGSYELLGTARIADKLNSEYSIKPLGGVWTIPTISTMLRNEHYLGYIVFGKKKRKKVVENGIIVDKWTRNESYGLYKGKHPALVSQDTFNLAQERLSRNPRRPSKTITNPLAGVIKCGMCGRSMYRRPYQKRGQSASLICSEKTCHNVSSAFYLVEDALLTAIKEWIDGYEIKEEANKYDTSVLESKTKLLEEQQKQLITYKNQLTKVFEAYENGIYDSDTFLNRQKTVSESISSTEEAIVKLNKEIANEREIISHQEEIIPKAKKILEIYKTSDDVQLKNDLMKSILDKVVYTKTANGHFKDQRQDDFKLELFPKLPKNKGDSSE

SEQ ID NO: 3543 - protein, 528 aa, Unknown
  Description of Unknown: Integrase B3544 sequence
  SM00857,G3DSA:1.10.10.2600,IPR036162,PF13408,IPR025827, G3DSA:3.40.50.1390,PS51737,IPR006119,IPR038109,PF07508, IPR011109,SSF53041,PF00239,PTHR30461,PS51736, Coil,cd00338
MAYCIYLRKSRADRELELQGFGETLKRHRDTLIELAKKKNLPIGEIYEEVVSGDSIAARPQMQRLLNDVSDGKWEGVLVMEIERLARGDTSDQGIVTKTFTYSNTLIITPMKTFNPTDEFDQEYFEFGLYMSRREYKTIKRRLHAGMEASCKEGNYIHHTPPFGYSIVKNKKSKGYRLEPKPGEAEIVKLIFQWYTKGILKEDGSYELLGTARIADKLNSEYSIKPLGGVWTIPTISTMLRNEHYLGYIVFGKKKRKKVVENGIIVDKWTRNESYGLYKGKHPALVSQDTFNLAQERLSRNPRRPSKTITNPLAGVIKCGMCGRSMYRRPYQKRGQSASLICSEKTCHNVSSAFYLVEDALLTAIKEWIDGYEIKEEANKYDTSVLESKTKLLEEQQKQLITYKNQLTKVFEAYENGIYDSDTFLNRQKTVSESISSTEEAIVKLNKEIANEREIISHQEEIIPKARKILEIYKTSDDVQLKNDLMKSILDKVVYTKTANGHFKDQRQDDFKLELFPKLPKNKGNSSE

SEQ ID NO: 3544 - protein, 528 aa, Unknown
  Description of Unknown: Integrase B3545 sequence
  PTHR30461:SF3,SM00857,G3DSA:1.10.10.2600,IPR036162,PF13408, PS51737,IPR025827,G3DSA:3.40.50.1390,IPR006119,IPR038109, PF07508,IPR011109,SSF53041,PF00239,PTHR30461, PS51736,Coil,cd00338
MKAVIYARFSSHNQREESIEGQVRACQRFAKEHDMTVIEIYADRGLSGLHADNRPEFQRMIADSDRHKFQALIRWNLDRFSRDKYDTAVYKSRLKKNGVTLYYSDQNIPDTPEGIILESLLEGFAQYYSANLSRNAKRGLQENARKCLWNGGGLPLGYTIDETKHFVIDPAGAACVQLIFQMYADNHSIKEIVSALNEKGYRTVKGNKFRLGSIQGVLRNRKYIGEYHASGITVPNGVPAIVDVELFNAVQEKIGVVSAAKARNKAEIPYLLTTKVFCGHCGSPMIGESGTGKGGSTYRYYKCSCRKNRKGQCDKRTEQKEWLEETVVAQTVEKFLHPDVIEDVSNACAAVLEQDCQNNALLKALNAQLADVEKSSRNLIKAIEAGVFTASMRERLAELEQQKEDITVQIAREQLRKPQLSAEQIAFFLRSFLDGDAHDPNFQERIIESLVRRVDVYDEGPGNRKLTVFYNLKKNNHSSVSVKCSDSESVGLPKRSVAKAADFFLCFLQKDENRTAVNTVPFGTVEPS

SEQ ID NO: 3545 - protein, 528 aa, Unknown
  Description of Unknown: Integrase B3546 sequence
  PTHR30461:SF3,SM00857,G3DSA:1.10.10.2600,IPR036162,PF13408, IPR025827,PS51737,G3DSA:3.40.50.1390,IPR006119,IPR038109, PF07508,IPR011109,SSF53041,PF00239,PTHR30461, PS51736,Coil,cd00338
MSTATVRSVTIIPPTINPLTHISMAATRKRRVAGYARVSTDSDEQFTSYEAQIDYYTQYIQRNSEWAFVKVYTDEGISGTSTKNRTGFNEMIDDAMSGKIDLIVTKSVSRFARNTVDSLVTIRKLKEKGVEVYFEKENIYTFDSKGELLLTIMSSLAQEESRSISENVTWGQRKRFADGKVNLPYKQFLGYRKGADGLPEIVPEEAAIVRRIYARFMEGLTPHTIAKELTADGIPTPSGKQCWQTSTVESILQNEKYKGAALLQKCFTVDFLTKKQKVNEGEVPQYYVEHSHEPIIVPEEFDKVQAEFVRRKQFGLQYSGKSIFASRIVCGDCGSFYGAKVWNSNNKYRRVVWQCNNKFKGGHRCETPHLDEKNIKARFVDAFNAVLGGKDGILADCRLMQTTLTDCTGIDAEIERLLTEVDVVTELTHRCISENAQSAQNQQEYTARYNSLVERYEKAKTQLEQLRATKTAREAQAKAIGAFMFEVQELDAFTEFDEKLWLAVIDKVTVHTNGRMTFHFRSGTEIDA

SEQ ID NO: 3546 - protein, 528 aa, Unknown
  Description of Unknown: Integrase B3547 sequence
  PTHR30461:SF3,SM00857,G3DSA:1.10.10.2600,IPR036162,PF13408, PS51737,IPR025827,G3DSA:3.40.50.1390,IPR006119,IPR038109, PF07508,IPR011109,SSF53041,PTHR30461,Coil, PS51736,cd00338,PF00239
MKMMQNDNRTAITYYRYSSHRQGEQSIEGQRAEAERWAKANGYTIVKEYADRAMTGTNDDREQFQLMLRELERLRPAVLILWKVDRMGRNKEEIAFNKYRCKKNGVKVIYTAESIPDTPEGVILESVLEGMAEYYSLQLSQNVRRGHRVSASKCQSTGGACPLGYRVGPDKRLEIDPEKAAIVRQVFERYANGETQPEIIQSLNEQGLRTLRGKPFSRNSLRTLLKNEKYIGVYTYNHGEVRVEGGVPAIIDVEMFQKAQKMLKFNKRSSSHKWTKANYLLTGKLFCGCCGEQMCGVSGYSSTKVKYHYYACSGHHNYKKARSTCRKKNVKKEWIEGLVLREAKLLLLNEDLLDFIAENTYQYYVEANTDTAYTDALQANLREIERSLENIMRAVEAGIFNDTTKARMEELEAQKQQIQHALDLTKLDRGLQLTKDHILYFLKRFRDLDFENAACQRQIIDTFINSVFVYDDHITLTFNYSGDDRTITLAETDAAAGGESFVFAPSCGTKKFRSRFGFGTFFVTCFVL

SEQ ID NO: 3547 - protein, 528 aa, Unknown
  Description of Unknown: Integrase B3548 sequence
  PTHR30461:SF3,SM00857,G3DSA:1.10.10.2600,IPR036162,PF13408, IPR025827,G3DSA:3.40.50.1390,PS51737,IPR006119,IPR038109, PF07508,IPR011109,SSF53041,PTHR30461,Coil, PS51736,cd00338,PF00239
MNTVIYARYSAGPRQTDQSIEGQLRVCTDFCKQRGLTVIDTYCDRHISGRTDERPEFQRLIADAKRKKFEAVVVYKTDRFARNKYDSAVYKRELKRNGIQIFYAAEAIPDGPEGIILESLMEGLAEYYSAELAQKIKRGMHESALKCQSTGSGRPLGYRVDEQKHFQIDPESAQTVQTIFEQYIKGESNAAICELLNSRGLRTAQGKPFNKNSINRIIKNRKYIGEYRYHDIVVEGGMPAIISKDTFNLAQAEMERRRTRKAPKSPKAEYLLAGRLFCGHCKGPMQGVSGTGKSGNKWYYYYCGNTRGKNKTCDKKQVSRDRLERAVVDFTVRYILQEEVLEELARKVHAAQERQNDTASEIAFYEKKLADNKKSIANVLRAIESGTATQTLPARLQELENEQAVILGEISFLKGKRLAFTEDQIFFALMKHLEPYPGESEQDYRRRIISDFVSEVYLYDGRLLIYFNISSEDGKLKSADLSNIEGGEFDEGLVGSTKQVLDEHLFLQRRLRREVFALIHNRKAPSWK

SEQ ID NO: 3548 - protein, 528 aa, Unknown
  Description of Unknown: Integrase B3549 sequence
  SM00857,G3DSA:1.10.10.2600,IPR036162,PF13408,IPR025827, G3DSA:3.40.50.1390,PS51737,IPR006119,IPR038109,PF07508, SSF53041,IPR011109,PF00239,PTHR30461,PS51736, Coil,cd00338
MAYCIYLRKSRADRELELQGFGETLKRHRDTLIELAKKKNLPIGEIYEEVVSGDSIAARPQMQRLLNDVSDGKWEGVLVMEIERLARGDTSDQGIVTKTFTYSNTLIITPMKTFNPTDEFDQEYFEFGLYMSRREYKTIKRRLHAGMEASCKEGNYIHHTPPFGYSIVKNKKSKGYRLEPKPGEAEIVKLIFQWYTKGILKEDGSYELLGTARIADKLNSEYSIKPLGGVWTIPTISTMLRNEHYLGYIVFGKKKRKKVVENGIIVDKWTRNESYGLYKGKHPALVSQDTFNLAQERLSRNPRRPSKTITNPLAGVIKCGMCGRSMYRRPYQKRGQSASLICSEKTCHNVSSAFYLVEDALLTAIKEWIDGYEIKEEANKYDTSVLESKTKLLEEQQKQLITYKNQLTKVFEAYENGIYDSDTFLNRQKTVSESISSTEEAIVKLNKEIANEREIISHQEEIIPKAKKILEIYKTSDDVQLKNDLMKSILDKVVYTKTANGHFKDQRQDDFKLELFPKLPKNKGNSSE

SEQ ID NO: 3549 - protein, 528 aa, Unknown
  Description of Unknown: Integrase B3550 sequence
  SM00857,G3DSA:1.10.10.2600,IPR036162,PS51737,G3DSA:3.40.50.1390, IPR006119,IPR038109,PF07508,IPR011109,SSF53041, PTHR30461,Coil,PS51736,cd00338,PF00239
MKFLDVAKLLNVCIYLRKSRADREAEARGEGETLARHERILLDLAKKRGYNVGAIYREVVSGETISARPVMQQLLQEVEAGKWDGVLVVEVERLARGDTIDQGVVSRAFQFSNTLIITPMKTYDPNNEFDEEYFEFGLFMSRREYKTIKRRLTAGRESSAKEGKYCGSKPPYGYSRVKLEGEKGWTLRPLPEQAEVVRYIFNLYVNGDCGQRVGMSKICRKLNDTGIKTMDGGLWTVPRVQAILRNPVYAGMIRWNSRKAIRHIQNGEIVISRPFTQDHILVEGRHPELVSKDLFRQAQEIVNKNPARPVTSLHVLRNPLAGIICCGKCGHIMTRKAPSKRQGDLLQCAYSSCDNISSKLPLVEKALVDGIQELVNGYKLNSNTSEQGHLCSISEKEKMVQKKQDEIENLRKKKERQYDLLEQGIYSTEEFLERSQNTAREIADCANSINTLQQEIQYEQALYLQQSSFIPKCENLLANYWSWDVLTRNQFLRELIEKAVYTKNTKNTWKNGDNISFSLDIYPKIQRK

SEQ ID NO: 3550 - protein, 528 aa, Unknown
  Description of Unknown: Integrase B3551 sequence
  SM00857,G3DSA:1.10.10.2600,IPR036162,PS51737, G3DSA:3.40.50.1390,IPR006119,IPR038109,PF07508, IPR011109,SSF53041,PTHR30461,Coil, PS51736,cd00338,PF00239
MEQYCMYLRKSRADREAEQRGEMETLSRHEAALLALAARNHHPITKIYREVVSGETIAARPCMQELLSEVEAGIWTGVYVMEVERLARGDTIDQGVVSRAFRLSSTLIITPIKTYHPDNEFDEEYFEFGLFMSRREYATIKRRLQRGRDASVREGKYIGNRTPYGYYREKIPHDKGFRLVPDPDQADVVRNIYKWYCNGIPADGVSPTTFGMAKIRDRLNGLGIPAATGGPWTISSVSGILQNPVYTGKIRHNYRPAEKSLSGGVITVRRPRNGSGDLYDGLHEAIISQESFDMVQDFMKNRKLPSIPYKKKMANPLSGIVRCSVCGKVMIRRPYQSGRQCTLMCQTAHCATVASDLDDVEREILNGLAEWLKDYKLQWNIPDSADSSPAVSMLQTQLVQKRKEEERLQSQLDNTYDLLEQGIYTKDVFLTRNKMVVEKLEDVHISINSLEKEIVLEQKRLQAKIDVIPKVENILDVYWTLPDAKSKNDLLKSVLDKVIYTKSGRNGPHRKVHYTFALDLYPRLPKSP

SEQ ID NO: 3551 - protein, 528 aa, Unknown
  Description of Unknown: Integrase B3552 sequence
  SM00857,G3DSA:1.10.10.2600,IPR036162,PS51737,G3DSA:3.40.50.1390, IPR006119,IPR038109,PF07508,SSF53041,IPR011109, PTHR30461,Coil,PS51736,cd00338,PF00239
MQETNISINEIIMYLRKSRSDDPYMTVEEVLARHERQLQDYALSSFGSIIPEERIFREVVSGETIADRPVMQSVMKYLESGQIKGVLVIEPQRLSRGDLEDCGRIINAFRYTNTLVLTPPKTYDLSDEYDRKFFEMELTRGNDYLEYTKKILNRGRLASVKQGNYIGSIAPYGYRKIKTGSGKDTAHTLEIVPEQADAVRMMAQLYLAGNGFTRIAAHLDSLGIKPLKSDHWSPAAISDILSNPVYIGMIRWNHFKTIKTMQNGQIVKSRPTNRGTDYILVPGKHPAILDQGTFDAIAQRRGKSPKIKRGHELRNPFAGLVFCGTAGCGRSMTFKQFTNYRSKVPRRSESMICPNQRICHTKSVQYSAFVERVKEILSKTVDDFEIKLQNDDGNIVRIHENIIRNLEQDLVKLKDKDLRQKDAYEDGIYTKEEYASRNAKLQEQICEVQLSIQRAKDTMPPEVDYQERVSRFSDCLSKFEDTDISASEMNLLLKSCIEKIIYHNSSESKPGIGRFVANPFELDIYLRL

SEQ ID NO: 3552 - protein, 528 aa, Unknown
  Description of Unknown: Integrase B3553 sequence
  SM00857,G3DSA:1.10.10.2600,IPR036162,PS51737, G3DSA:3.40.50.1390,IPR006119,IPR038109,PF07508, IPR011109,SSF53041,PTHR30461,Coil, PS51736,cd00338,PF00239
MAYCIYLRKSRADRELELQGFGETLKRHRDTLIELAKKKNLPIGEIYEEVVSGDSIAARPQMQRLLNDVSDGKWEGVLVMEIERLARGDTSDQGIVTKTFTYSNTLIITPMKTFNPTDEFDQEYFEFGLYMSRREYKTIKRRLHAGMEASCKEGNYIHHTPPFGYSIVKNKKSKGYRLEPKPGEAEIVKLIFQWYTKGILKEDGSYELLGTARIADKLNSEYSIKPLGGVWTIPTISTMLRNEHYLGYIVFGKKKRKKVVENGIIVDKWTRNESYGLYKGKHPALVSQETFNLAQERLSRNPRRPSKTITNPLAGVIKCGMCGRSMYRRPYQKRGQSASLICPEKTCHNVSSAFYLVEDALLTAIKEWIDGYEIKEEANKYDTSVLESKTKLLEEQQKQLITYKNQLTKVFEAYENGIYDSDTFLNRQKTVSESISSTEEAIVKLNKEIANEREIISHQEDIIPKAKKILEIYKTSDDVQLKNDLMKSILDKVVYTKTANGHFKDQRQDDFKLELFPKLPKNKGNSSE

SEQ ID NO: 3553 - protein, 528 aa, Unknown
  Description of Unknown: Integrase B3554 sequence
  cd00338,SM00857,IPR006118,IPR036162,PF13408, PS51737,IPR025827,G3DSA:3.40.50.1390,IPR006119,IPR011109, SSF53041,PTHR30461,PS00397,Coil,PF00239
MKVPVWSYARVSTLNQVDGFGIQRQVNTINQFIQYLVLDHRLPYVLDTDNITQMVAEGRSAFKGKNWNPKTKLGQYRKMVMDGVVPDSVLIVENIDRLTRLDPFQAVEIISGLINRGTTILEIETGMTYSRYIPESITVLTMQINRANGESKRKSVMMKKSHQNRYGNVSKVRPRWFDVVEVDGIKQYRTNNTAKAIQRMYNDYVNGIGAAQIVRTYGDTDNGKPWTLVTVLRALSDKRVADDARYPSIIDKALYERVQAMKLSPSKGNTHQKYMLNLFAGMSRCPLCGQAIITKRNSHGGLFTVCLGKRTDKTCTARSIAYNALERPLLNAIVGLDFSEVYGQEESNVLTLRDQWIQNERDIAAFRERLTKASRHEKFAILDELEVMNREQDELTIRLKSVDAPKDITLTYDDDKLDMNVEYRIELNNRMKKLIQRIDIVREDVSKTNYKIFCSIKYWTELLTHLVIIDVDVQRIGRGGTNQLTTTLRSVSSLDLEGNIKGNPDMEALEYWQSVVSKATQKAIESLT

SEQ ID NO: 3554 - protein, 528 aa, Unknown
  Description of Unknown: Integrase B3555 sequence
  SM00857,G3DSA:1.10.10.2600,IPR036162,PF13408, IPR025827,G3DSA:3.40.50.1390,PS51737,IPR006119, IPR038109,PF07508,IPR011109,SSF53041, PTHR30461,Coil,PS51736,cd00338,PF00239
MAYCIYLRKSRADRELELQGFGETLKRHRDTLIELAKKKNLPIGEIYEEVVSGDSIAARPQMQRLLNDVSDGKWEGVLVMEIERLARGDTSDQGIVTKTFTYSNTLIITPMKTFNPTDEFDQEYFEFGLYMSRREYKTIKRRLHAGMEASCKEGNYIHHTPPFGYSIVKNKKSKGYRLEPKPGEAEIVKLIFQWYTKGILKEDGSYELLGTARIADKLNSEYSIKPLGGVWTIPTISTMLRNEHYLGYIVFGKKKRKKVVENGIIVDKWTRNESYGLYKGKHPALVSQETFDLAQERLAKNPRRPSKTITNPLAGVIKCGMCGRSMYRRPYQKRGQSASLICSEKTCHNVSSAFYLVEDALLTAIKEWIDGYEIKEEANKYDTSVLESKTKLLEEQQKQLITYKNQLTKVFEAYENGIYDSDTFLSRQKTVSESISSTEDAIIKLNKEIANEREIISHQEEIIPKAKKILEIYKTSDDVQLKNDLMKSILDKVVYTKTANGHFKGQRQDDFKLELFPKLPKNKGDSSE

SEQ ID NO: 3555 - protein, 528 aa, Unknown
  Description of Unknown: Integrase B3556 sequence
  cd03768,PTHR30461:SF3,SM00857,G3DSA:1.10.10.2600,IPR036162, PF13408,IPR025827,G3DSA:3.40.50.1390,PS51737,IPR006119, IPR038109,PF07508,IPR011109,SSF53041,PTHR30461, PS51736,Coil,PF00239
MRIAIYSRKSVFTGKGDSIENQIQLCKEYVNLHYPGENSIEIYEDEGFSGGNINRPKFQELLKDAREKKFDCLICYRLDRISRNVSDFSTLIEELNDLKISFVSIKEQFDTSTPMGRAMMYISSVFAQLERETIAERVRDNMIELAKHGRWLGGTPPLGFDSEAMVYIDEEMKERKMSKLKVNKEEIELVKTIYRKFLELGSIHQATVFLQQNRLCGKRGKLLSASAVSKIITNPVYVKSNDDVLDYLRSIDIQVFGRKDGYGILTYNKRDSKFNKRDKEEWIAAVSKHKGIIEPNDWLLAQRLLDKNREKSKTFRLGTSSKGLFSGLVRCAKCGSPMRITYGRNNKHYYTCTRRVQSKNALCNNPTASGPDFDKAVLDNIMTVDTSKFLNGLNSNSKIIEDDKEKINKINTEINNKKKQLDKLIENMALFDSDVTDILADKINALSREIKELQLQVNEVACTVEDATLENNNYELVINTLDKFKDNFNSIEEIKTKKALLSMLIDEIRWNGDTTEIEIDFWGSKKKV

SEQ ID NO: 3556 - protein, 528 aa, Unknown
  Description of Unknown: Integrase B3557 sequence
  cd00338,SM00857,G3DSA:1.10.10.2600,IPR036162,PS51737, G3DSA:3.40.50.1390,IPR006119,IPR038109,PF07508,IPR011109, SSF53041,PTHR30461,PS51736,Coil,PF00239
MQETNISINEIIMYLRKSRSDDPYMTVEEVLARHERQLQDYALSSFGSIIPEERIFREVVSGETIADRPVMQSVMKYLESGQIKGVLVIEPQRLSRGDLEDCGRIINAFRYTNTLVLTPPKTYDLSDEYDRKFFEMELTRGNDYLEYTKKILNRGRLASVKQGNYIGSIAPYGYRKIKTGSGKDTAHTLEIVPEQADAVRMMAQLYLAGNGFTRIAAHLDSLGIKPLKSDHWSSAAISDILSNPVYIGMIRWNHFKTIKTMQNGQIVKSRPTNRGTDYILVPGKHPAILDQGTFDAIAQRRGKSPKIKRGHELRNPFAGLVFCGTAGCGRSMTFKQFTNYRSKVPRRSESMICPNQRICHTKSVQYSAFVGRVKEILSKTVDDFEIKLQNDEGNIVRIHENIIRNLEQDLVKLKDKDLRQKDAYEDGIYTKEEYASRNAKLQEQICEVQLSIQRAKDTMPPEVDYQERVSRFSDCLSKFEDTDISASEMNLLLKSCIEKIIYHNSSESKPGIGRFVANPFELDIYLRL

SEQ ID NO: 3557 - protein, 528 aa, Unknown
  Description of Unknown: Integrase B3558 sequence
  SM00857,G3DSA:1.10.10.2600,IPR036162,PS51737, G3DSA:3.40.50.1390,IPR006119,IPR038109,PF07508, SSF53041,IPR011109,PF00239,PTHR30461, PS51736,Coil,cd00338
MQETNISINEIIMYLRKSRSDDPYMTVEEVLARHERQLQDYARSSFGSTIPEERIFREVVSGETIADRPVMQSVMKYLESGQIKGVLVIEPQRLSRGDLEDCGRIINAFRYTNTLVLTPPKTYDLSDEYDRKFFEMELTRGNDYLEYTKKILSRGRLTSVKQGNYIGSIAPYGYRKIKTGSGKDTAHTLEIVPEQADAVRMMAQLYLAGNGFTRIAAHLDSLGIKPLKSDHWSPAAISDILSNPVYIGMIRWNHFKTIKTMQNGQIVKSRPTNHGTDYILVPGKHPAILDQETFYAIAERRGKSPKVKRDHELRNPFAGLVYCGTAGCGRSMALKQFTNYRSKVPRRSESMICPNQRICHTKSVQYSTFVKRVKEILSKTVDDFEIKLQNDEGNIVRIHENIIRNLEQDLLKLKDKDLRQKDAYEDGIYTKEEYASRNAKLQEQICEVQLSIQRAKDTMPPEVDYQERVSRFSDCLSKFEDTDISASEMNLLLKSCIEKIIYHNSSESKPGIGRFVANPFELDIYLRL

SEQ ID NO: 3558 - protein, 528 aa, Unknown
  Description of Unknown: Integrase B3559 sequence
  PTHR30461:SF3,SM00857,G3DSA:1.10.10.2600,IPR036162,PS51737, G3DSA:3.40.50.1390,IPR006119,IPR038109,PF07508,SSF53041, IPR011109,PTHR30461,Coil,PS51736,cd00338, PF00239
MPYLIYLRKSRADMDAEARGEGETLARHEKTLIELAKKMNLNVTGIYKEIVSGETIAARPKMQQVIREVEEGLWEGVLVMEVERLARGDTKDQGTVAEAFKFSNTKIITPVKIYDPSNEFDEEYFEFGLFMSRREYKTINRRIQRGRIASVEEGKYIASSAPYGYERVRIKNDKGYTLKIVPSEADIVRLIYDLYTRGELQENGEFKRLGMYLISKRLDSLHIQPRNSTMWSRSTIKDILTNPTYTGKVRWRWRKVEKKIVNGELVEKRPKDYDNCMKIKALHDPIIDEDIFELAQAIMREKKNISISSNQVLQNPFTGLVYCGKCGALMTRAASNTKVNYPVMKCPNRYCDNISSPIFLIEEQLLVALQDWLDRYELPFRQKESPLVSALSLRVSAIKNTEARIETLKKQLLSTYDLLEQGIYTSEVFLERNRSLSDQITEATESLQELQEQYERELLQEQARTKFLPAVRHIIDVYDSMEDASAKNALLKNVIDRIVYVKNERNKKGDLHNINFELTVYPKIPLRP

SEQ ID NO: 3559 - protein, 528 aa, Unknown
  Description of Unknown: Integrase B3560 sequence
  PTHR30461:SF3,cd00338,SM00857,G3DSA:1.10.10.2600,IPR036162, PF13408,IPR025827,PS51737,G3DSA:3.40.50.1390,IPR006119, IPR038109,PF07508,SSF53041,IPR011109,PTHR30461, PS51736,Coil,PF00239
MQKRRTKYANSQGDNAVIYARYSSHNQKDTSIEQQIEVCTKYARDNGYRITNIYADRAISGKTDARPQFRLMMQDAREHKFDVVISWKSSRLGRDMLDAMTNDIILRNLGIKCFYTEENFDDTAAGRFALRNMMNVNQFYIENMAEDILRGMRDNAKKCRVNNGSPPLGYRRGADGKYEIVPEEAETVREIFTKVLAGMAFVDIANELNARGIKTKKGAPWGRSSFSRLLSNERYIGTYKWSDIVIENGMPAIIDREVFEMAQKKIKGERPLRRRHNENGDYLLTGKLFCGKCDSPMTGMSGTSKSGAKHHYYACYSARKDGSCDKKAVKRDWVEKTVALFIKEHVLRDEVIEWMVDQYMVYQKATFESQRIMEMRNQLKDVQSQLDNLVDAIARGMYTDSTKDKLLKLEADKKEIEQDIRLATYNLKEYDREHVRCYFLSFKEGSVESKDYLKRLFDQFVTKIYLYDDEIRIAFSGTKDDSPVSFKIIDEAEELAVSSVRLSSASSHQNNIIRTLYRLVMGSDLLFL

SEQ ID NO: 3560 - protein, 528 aa, Unknown
  Description of Unknown: Integrase B3561 sequence
  SM00857,G3DSA:1.10.10.2600,IPR036162,PS51737,G3DSA:3.40.50.1390, IPR006119,IPR038109,PF07508,IPR011109,SSF53041, PTHR30461,Coil,PS51736,cd00338,PF00239
MAYCIYLRKSRADRELELQGFGETLKRHRDTLIELAKKKNLPIGEIYEEVVSGDSIAARPQMQRLLNDVSDGKWEGVLVMEIERLARGDTSDQGIVTKTFTYSNTLIITPMKTFNPTDEFDQEYFEFGLYMSRREYKTIKRRLHAGMEASCKEGNYIHHTPPFGYSIVKNKKSKGYRLEPKPGEAEIVKLIFQWYTKGILKEDGSYELLGTARIADKLNSEYSIKPLGGVWTIPTISTMLRNEHYLGYIVFGKKKRKKVVENGIIVDKWTRNESYGLYKGKHPALVSQDTFNLAQERLSRNPRRPSKTITNPLAGVIKCGMCGRSMYRRPYQKRCQSASLICSEKTCHNVSSAFYLVEDALLTAIKEWIDGYEIKEEANKYDTSVLESKTKLLEEQQKQLITYKNQLTKVFEAYENGIYDSDTFLNRQKTVSESISSTEEAIVKLNKEIANEREIISHQEEIIPKARKILEIYKTSDDVQLKNDLMKSILDKVVYTKTANGHFKDQRQDDFKLELFPKLPKNKGNSSE

SEQ ID NO: 3561 - protein, 528 aa, Unknown
  Description of Unknown: Integrase B3562 sequence
  SM00857,G3DSA:1.10.10.2600,IPR036162,PF13408, IPR025827,G3DSA:3.40.50.1390,PS51737,IPR006119, IPR038109,PF07508,SSF53041,IPR011109, PF00239,PTHR30461,PS51736,Coil,cd00338
MAYCIYLRKSRADRELELQGFGETLKRHRDTLIELAKKKNLPIGEIYEEVVSGDSIAARPQMQRLLNDVSDGKWEGVLVMEIERLARGDTSDQGIVTKTFTYSNTLIITPMKTFNPTDEFDQEYFEFGLYMSRREYKTIKRRLHAGMEASCKEGNYIHHTPPFGYSIVKNKKSKGYRLEPKPGEAEIVKLIFQWYTKGILKEDGSYELLGTARIADKLNSEYSIKPLGGVWTIPTISTMLRNEHYLGYIVFGKKKRKKVVENGIIVDKWTRNESYGLYKGKHPALVSQDTFNLAQERLSRNPRRPSKTITNPLAGVIKCGMCGRSMYRRPYQKRGQSASLICSEKTCHNVSSAFYLVEDALLTAIKEWIDGYEIKEEANKYDTSVLESKAKLLEEQQKQLITYKNQLTKVFEAYENGIYDSDTFLNRQKTVSESISSTEKAIVKLNKEIANEREIISHQEEIIPKAKKILEIYKTSDDVQLKNDLMKSILDKVVYTKTANGHFKDQRQDDFKLELFPKLPKNKGDSSE

SEQ ID NO: 3562 - protein, 528 aa, Unknown
  Description of Unknown: Integrase B3563 sequence
  PTHR30461:SF3,SM00857,G3DSA:1.10.10.2600,IPR036162,PF13408, IPR025827,G3DSA:3.40.50.1390,PS51737,IPR006119,IPR038109, PF07508,IPR011109,SSF53041,PTHR30461,Coil, PS51736,cd00338,PF00239
MAKKQTNGNLALEQQRVIVIPAHDEIVARKLRVAAYARVSSSSEDQLNSYRVQNQYYSELISSNPDWEMVDIYADEGITGTSVEKREDFQRMMQDCRKGKIDRILVKSISRFARNTKDCLAAVRELKELGVSVQFEEQGIDTSKVSSEMVTAIMASLAQKGSESISGNVQWGYQKRMESGKFNTCKAPYGFTLHEGKLSIKEDEATVVRFIFQLYLNGLNGYEIANTLSQQEIPPGREMGTWKDSSIYYILKNERYAGKAMVGKSYSTTTFPHKKVRNHGEREMYLLSDSNPPIVSPEVFDRVQTLLQSRKNAHIGSTNQTFSRKLYCANCGRSLKRKFTNDKMYWVCNTHFQNAASCPTPPYHTPDIEQAFCRMYYKLKHHGDPIFTQMLSNLQKIRYSRMLWSEDVISLNKKISDILSQVQFLTQLQQAGGVDPDTFISSNNKLSEQLRRLKQEKARLLDTDSDDLADRTRDLMDALEDGPDFLDSFDAELFDALVEKIIVDSNERLRFRLKNGLELLEQIERTRR

SEQ ID NO: 3563 - protein, 528 aa, Unknown
  Description of Unknown: Integrase B3564 sequence
  SM00857,G3DSA:1.10.10.2600,IPR036162,PF13408,IPR025827, G3DSA:3.40.50.1390,PS51737,IPR006119,IPR038109,PF07508, IPR011109,SSF53041,PTHR30461,Coil,PS51736, cd00338,PF00239
MAYCIYLRKSRADRELELQGFGETLKRHRDTLIELAKKKNLPIGEIYEEVVSGDSIAARPQMQRLLNDVSDGKWEGVLVMEIERLARGDTSDQGIVTKTFTYSNTLIITPMKTFNPTDEFDQEYFEFGLYMSRREYKTIKRRLHAGMEASCKEGNYIHHTPPFGYSIVKNKKSKGYRLEPKPGEAEIVKLIFQWYTKGILKEDGSYELLGTARIADKLNSEYSIKPLGGVWTIPTISTMLRNEHYLGYIVFGKKKRKKVVENGIIVDKWTRNESYGLYKGKHPALVSQETFDLAQERLAKNPRRPSKTITNPLAGVIKCGMCGRSMYRRPYQKRGQSASLICSEKTCHNVSSAFYLVEDALLTAIKEWIDGYEIKEEANKYDTSVLESKTKLLEEQQKQLITYKNQLTKVFEAYENGIYDSDTFLSRQKTVSESISSTEDAIIKLNKEIANEREIISHQEEIIPKAKKILEIYKTSDDVQLKNDLMKSILDKVVYTKTANGHFKDQRQDDFKLELFPKLPKNKGDSSE

SEQ ID NO: 3564 - protein, 528 aa, Unknown
  Description of Unknown: Integrase B3565 sequence
  SM00857,G3DSA:1.10.10.2600,IPR036162,PS51737,G3DSA:3.40.50.1390, IPR006119,IPR038109,PF07508,IPR011109,SSF53041, PTHR30461,Coil,PS51736,cd00338,PF00239
MQETNISINEIIMYLRKSRSDDPYMTVEEVLARHERQLQEYALSSFGSIIPEERIFREVVSGETIADRPVMQSVMKYLESGQIKGVLVIEPQRLSRGDLEDCGRIINAFRYTNTLVLTPPKTYDLSDEYDRKFFEMELTRGNDYLEYTKKILNRGRLASVKQGNYIGSIAPYGYRKIKTGSGKDTAHTLEIVPEQADAVRMMAQLYLAGNGFTRIAAHLDSLGIKPLKSDHWSSAAISDILSNPVYIGMIRWNHFKTIKTMQNGQIVKSRPTNRGTDYILVPGKHPAILDQGTFDAIAQRRGKSPKIKRGHELRNPFAGLVFCGTTGCGRSMTFKQFTNYRSKVPRRSESMICPNQRICHTKSVQYSAFVERVKEILSKTVDDFEIKLQNDDGNIVRIHENIIRNLEQDLLKLKDKDLRQKDAYEDGIYTKEEYASRNAKLQEQICEVQLSIQRAKDTMPPEVDYQERVSRFSDCLSKFEDTDISASEMNLLLKSCIEKIIYHNSSESKPGIGRFVANPFELDIYLRL

SEQ ID NO: 3565 - protein, 528 aa, Unknown
  Description of Unknown: Integrase B3566 sequence
  PTHR30461:SF3,SM00857,IPR036162,G3DSA:3.40.50.1390,IPR006119, PF07508,IPR011109,SSF53041,PTHR30461,PS51736, cd00338,PF00239
MHFGIYGRKSYFKDTSDSTQMQFSEGDKYIAEHFSPDEIESVTYYEDDGWIRSDMDRPDLNRLKDDILAGLINVVVIYKIDRLCCDMADFVPFYAFLKDHGVKFITIKDGIDTTTPIGEAMMYLAVIFSGLEVQTDSLRITDNMNHLAAEGFWCGGKPPIGYNIQEISLGAKSHKTLVFNEDEIRYKNTLIDIFLENHFSLQSMETYCKNHGITSLKGSFLSTTQLYSMFGSPMCVANTPAMYDYFADKGCQMSEGSPRDAWDGRHGIIVYGRTMEKKVSGKKKHIQAPPENWRVSIGYHEPYMTDERFFAIQAQFGHNVFSKQSKYDLPLLKGSLRCKCGRLMSMSRKKKADGSISTWYYCPRRMRNGVDACDMIQTKADLLDNRVISIFLEIEHDPAALKKYLKEEKRQPQDNAAALRAAMEKCQAKIGKLTATLSLNSESAAAKYIVNEIEKLDIEYNSLRKRMLSANAVDRKNALNMKNAMEKREEIIRLLNDFDNFTPNERNEIAKDVLKECVWDGDTLFLTL

SEQ ID NO: 3566 - protein, 528 aa, Unknown
  Description of Unknown: Integrase B3567 sequence
  SM00857,G3DSA:1.10.10.2600,IPR036162,PS51737,G3DSA:3.40.50.1390, IPR006119,IPR038109,PF07508,IPR011109,SSF53041, PTHR30461,Coil,PS51736,cd00338,PF00239
MEQYCMYLRKSRADREAEQRGEMETLSRHEAALLALAARNHHPITKIYREVVSGETIAARPCMQELLSEVEAGIWTGVYVMEVERLARGDTIDQGVVSRAFRLSSTLIITPIKTYHPDNEFDEEYFEFGLFMSRREYATIKRRLQRGRDASVREGKYIGNRSPYGYYREKIPHDKGFRLVPDPDQADVVRNIYKWYCNGIPADGVSPTTFGMAKIRDRLNALGVPAATGGPWTISSISGILQNPVYTGKIRHNYRPAEKSLSGGVITVRRPRNGSGDLYDGLHEAIISQESFDMVQDFMKNRKLPSIPYKKKMANPLSGIVRCSVCGKVMIRRPYQSGRQCTLMCQTAHCATVASDLDDVEREILNGLAEWLKDYKLQWNIPDSADSSPAVSMLQTQLVQKRKEEERLRSQLDNTYDLLEQGIYTKDVFLTRNKMVVEKLEEVHISIDSLEKEIALEQKRLQAKIDVIPKVENILDVYWTLPDVKSKNDLLKSVLDKVVYTKSGRNGPHKKVHYAFTLDLYPKLPKSP

SEQ ID NO: 3567 - protein, 528 aa, Unknown
  Description of Unknown: Integrase B3568 sequence
  PTHR30461:SF3,SM00857,G3DSA:1.10.10.2600,IPR036162,PF13408, PS51737,IPR025827,G3DSA:3.40.50.1390,IPR006119,IPR038109, PF07508,IPR011109,SSF53041,PF00239, PTHR30461,PS51736,Coil,cd00338
MSTAAVRSVTIIPPTINILTHLSTATTQKRRVAGYARVSTDSDEQFTSYEAQIDYYTQYIRCNPEWEFVKVYADEGISGTSTKHRTGFNEMIDDAMSGKIDLIVTKSVSRFARNTVDGLVTIRKLKEKGVEVYFEKENIYTFDSKGELLLTIMSSLAQEESRSISENVTWGQRKRFADGKVNLPYKQFLGYRKGADGLPEIVPEEAAIVRRIYARFMEGLTPHTIAKELTTDGIPTPSGKTNWPTSTVESILQNEKYKGAALLQKCFTVDFLTKKKKLNEGEVPQYYVEHSHEPIITPEEFDKVQTELARRKRISRQYSGKSIFSSRIVCGDCGSYFGSKVWNSTSKYRRVIWQCNCKFKGEHKCETPHLDEKTIKAQFVAALNAIIDSKDNILEDCRLVQATLTDCTGVDAEIDSLLTEVDVVTELTRRCISENAQSSQNQQEYTARYNGLAERYEKVKAQLEQLRATKTAREAQADAIGAFMFEVQELDVLTEFDEKLWLAVIDKVTVHTNGRMTFRFRSGTEIDV

SEQ ID NO: 3568 - protein, 528 aa, Unknown
  Description of Unknown: Integrase B3569 sequence
  PTHR30461:SF3,SM00857,G3DSA:1.10.10.2600,IPR036162,PS51737, G3DSA:3.40.50.1390,IPR006119,IPR038109,PF07508,SSF53041, IPR011109,PF00239,PTHR30461,PS51736,Coil, cd00338
MLKVAAYARVSTDKDDQINSLTNQREYFESYIKSNGDWEFVEVYFDEGITGTQTKKRKGFNRMINDCKNGKIDLILTKEVSRFARNTVDTLNYTRMLKEYDVGVFFINDNIDTRQNDGEFRLAIMASVAQEESRKISERVKWGQRRAMENGVVFGNNSIVGFDINDGVLSVNESEAEVVKLIFHKYVNEGKGTHIVARELYEDGIKPPKSSKDFWSSTMILNILRNEKYVGDLLQKKYVTKDYLTHHKVINESEDKIYIENHHEGIISRKMWNMAQAELQRRSVDKSTKKKYSNRYWCSGKIICSECGSRFVIRKSKKKSGIYITWACHERTAHGNKKLDKNNNQIGCNMRTVNNKSLLTCMKFITEQIDVDINNIADDILNEINNSADTSEDNTQNLTLQIQDIQNKKMRMLDSYYSGDINKDEMTALKDKYDKEIEKINAILQKQQNNQTAIQERQNNTDELRNIIINAVCSENVYGEIVDKIIVYDDYMLVKLKYIDFAFKIKYSTHGYMEKYTTVIESCEIVSF

SEQ ID NO: 3569 - protein, 528 aa, Unknown
  Description of Unknown: Integrase B3570 sequence
  SM00857,G3DSA:1.10.10.2600,IPR036162,PF13408,IPR025827, G3DSA:3.40.50.1390,PS51737,IPR006119,IPR038109,PF07508, IPR011109,SSF53041,PF00239,PTHR30461,PS51736, Coil,cd00338
MAYCIYLRKSRADRELELQGFGETLKRHRDTLIELAKKKNLPIGEIYEEVVSGDSIAARPQMQRLLNDVSDGKWEGVLVMEIERLARGDTSDQGIVTKTFTYSNTLIITPMKTFNPTDEFDQEYFEFGLYMSRREYKTIKRRLHAGMEASCKEGNYIHHTPPFGYSIVKNKKSKGYRLEPKPGEAEIVKLIFQWYTKGILKEDGSYELLGTARIADKLNSEYSIKPLGGVWTIPTISTMLRNEHYLGYIVFGKKKRKKVVENGIIVDKWTRNESYGLYKGKHPALVSQDTFNLAQERLSRNPRRPSKTITNPLAGVIKCGMCGRSMYRRPYQKRGQSASLICSEKTCHNVSSAFYLVEDALLTAIKEWIDGYEIKEEANKYDTSVLESKTKLLEEQQKQLITYKNQLTKVFEAYENRIYDSDTFLNRQKTVSESISSTEEAIVKLNKEIANEREIISHQEEIIPKARKILEIYKTSDDVQLKNDLMKSILDKVVYTKTANGHFKDQRQDDFKLELFPKLPKNKGNSSE

SEQ ID NO: 3570 - protein, 528 aa, Unknown
  Description of Unknown: Integrase B3571 sequence
  SM00857,G3DSA:1.10.10.2600,IPR036162,PS51737,G3DSA:3.40.50.1390, IPR006119,IPR038109,PF07508,IPR011109,SSF53041, PF00239,PTHR30461,PS51736,Coil,cd00338
METYCIYLRKSRADADAEARGEGETLARHEHILSELAKKQKYHISKVYREIVSGETIAARPQMQQLLQDVESGIYAGVLVMEVERLARGDTIDQGIVAQAFKYSDTKIITPVKTYDPNNEYDEEYFEFSLFMSRREYKTIKRRMQAGRFAAAKEGKYVGNVPPYGYDRQKLDHDSGFTLVPNPEEAKIVKMIFEWYVHGAIMEDGTKQRLGSTLIAYRLHDMGFTTRKGERWSLNTVRSILTNPVYAGMIRWGYRSQKKIMKNGAVINSRPNATTDDYVLVKGLHEPLVSQEDYDTAQELAHGKRTIPKVNMGKTLQNPLAGILICKKCGRSMTRRPYGVKLRQDTILCKTPDCDNVASDLYLVEQRILDSLQAWLHQYEVQWQEHQPSTGIDNSEQIAAIDALKKEQAKAKQQLEKAYDLLEQGIYDTNTFVERSTTLKAKISDTQKKIEKLEHNMQEQSSRDREMQELIPKVRHLLAVYDTLPDATAKNQMLCQVIEKAEYYKAHSARWHGSVDDFDVVVYPKLPR

SEQ ID NO: 3571 - protein, 528 aa, Unknown
  Description of Unknown: Integrase B3572 sequence
  SM00857,G3DSA:1.10.10.2600,IPR036162,PS51737, G3DSA:3.40.50.1390,IPR006119,IPR038109,PF07508, SSF53041,IPR011109,PTHR30461,Coil, PS51736,cd00338,PF00239
MPYCLYLRKSRTDLDAEANGETETLARHEKILLDLAKRMHLDVTEIYREVVSGETISSRPVVQRVLNEVENGLWDGVLVVEVERLARGDTIDQGIVSRAFKFSNTKIITPLKTYDPNNEYDEEYFEFGLFMSRREYKTIRRRLTQGRISSAKEGKHTASTPPYGYDRVHVESGKGYTLIPNEKEAPVVEMMFDWFVNGELLEDGSCKNLGTMAIANRLTSLQLPTPRGGNVWSQRTVYWILHNPVYTGRIRWGYKKDKKMIVDGVVKRKRVISSEKDQVLVEGLHPAIISEDLFEQAQSIFAEGGTPSVTANRELKNPLSGIVVCGICGAPLRYKIGYNRCSNMLHCRTRGCECKGSYFDLVEKRLLEALQEWVDHYKMSWDDMPEETHSLLTLKKQAYDTSIKELNTLTKQLDKTHDLLEQGVYDTDTFLSRSKSLSEKIATAEKNIQKLSADIQNERLRENNRKNLIPMAENLIDVYWQLPTATAKNEMLKEVLERVEYTKLQAGNRSGKGKDDFELILYPKLPKS

SEQ ID NO: 3572 - protein, 528 aa, Unknown
  Description of Unknown: Integrase B3573 sequence
  SM00857,G3DSA:1.10.10.2600,IPR036162,PS51737,G3DSA:3.40.50.1390, IPR006119,IPR038109,PF07508,SSF53041,IPR011109, PF00239,PTHR30461,PS51736,Coil,cd00338
MLETNISINEIIMYLRKSRSDDPYMTVEEVLARHERQLQDYALSSFGSIIPEERIFREVVSGETIADRPVMQSVMKYLESGQIKGVLVIEPQRLSRGDLEDCGRIINAFRYTNTLVLTPPKTYDLSDEYDRKFFEMELTRGNDYLEYTKKILNRGRLASVKQGNYIGSIAPYGYRKIKTGSGKDTAHTLEIVPEQADAVRMMAELYLAGNGFTRIAAHLDSLGIKPLKSDHWSPAAISDILSNPVYIGMIRWNHFKTIKTMQNGQIVKSRPTNHGTDYILVPGKHPAILDQETFYAIAQRRGKSPKIKRGHELRNPFAGLVFCGTAGCGRSMTFKQFTNYRSKVPRRSESMICPNQRICHTKSVQYSAFVERVKEILSKTVDDFEIKLQNDDGNIVRIHENIIRNLEQDLVKLKDKDLRQKDAYEDGIYTKEEYASRNAKLQEQICEVQLSIQRAKDTMPPEVDYQERVSRFSDCLSKFEDTDISASEMNILLKSCIEKIIYHNSSESKPGIGRFVANPFELDIYLRL

SEQ ID NO: 3573 - protein, 528 aa, Unknown
  Description of Unknown: Integrase B3574 sequence
  SM00857,G3DSA:1.10.10.2600,IPR036162,PS51737, G3DSA:3.40.50.1390,IPR006119,IPR038109,PF07508, IPR011109,SSF53041,PTHR30461,Coil, PS51736,cd00338,PF00239
MQETNISINEIIMYLRKSRSDDPYMTVEEVLARHERQLQDYALSSFGSIIPEERIFREVVSGETIADRPVMQSVMKYLESGQIKGVLVIEPQRLSRGDLEDCGRIINAFRYTNTLVLTPPKTYNLSDEYDRKFFEMELTRGNDYLEYTKKILNRGRLASVKQGNYIGSIAPYGYRKIKTGSGKDTSHTLEIVPEQADAVRMMAQLYLAGNGFTRIAAHLDSLGIKPLKSDHWSPAAISDILSNPVYIGMIRWNHFKTIKTMQNGQIVKSRPTNHDTDYILVPGKHPAILDQGTFDAIAQRRGKSPKIKRGHELRNPFAGLVFCGTTGCGRSMTFKQFTNYRSKVPRRSESMICPNQRICHTKSVQYSDFVERVKEILSKTVDDFEIKLQNDDGNIVRIHENIIRNLEQDLVKLKDKDLRQKDAYEDGIYTKEEYASRNAKLQEQICEVQLSIQRAKDTMPPEVDYKERVSRFSDCLSKFEDTDISASEMNLLLKSCIEKIIYHNSSESKPGIGRFVANLFELDIYLRL

SEQ ID NO: 3574 - protein, 528 aa, Unknown
  Description of Unknown: Integrase B3575 sequence
  SM00857,G3DSA:1.10.10.2600,IPR036162,PS51737,G3DSA:3.40.50.1390, IPR006119,IPR038109,PF07508,IPR011109,SSF53041, PTHR30461,Coil,PS51736,cd00338,PF00239
MQETNISINEIIMYLRKSRSDDPYMTVEEVLARHERQLQEYALSSFGSIIPEERIFREVVSGETIADRPVMQSVMKYLESGQIKGVLVIEPQRLSRGDLEDCGRIINAFRYTNTLVLTPPKTYDLSDEYDRKFFEMELTRGNDYLEYTKKILNRGRLASVKQGNYIGSIAPYGYRKIKTGSGKDTAHTLEIVPEQADTVRMMAQLYLAGNGFTRIAAHLDSLGIKPLKSDHWSSAAISDILSNPVYIGMIRWNHFKTIKTMQNGQIVKSRPTNRGTDYILVPGKHPAILDQGTFDAIAQRRGKSPKIKRGHELRNPFAGLVYCGTAGCGRSMTFKQFTNYRSKVPRRSESMICPNQRICHTKSVQYSAFVERVKEILSKTVDDFEIKLQNDDGNIVRIHENIIRNLEQDLVKLKDKDLRQKDAYEDGIYTKEEYASRNAKLQEQICEVQLSIQRAKDTMPPEVDYQERVSRFSDCLSKFEDTDISASEMNLLLKSCIEKIIYHNSSESKPGIGRFVANPFELDIYLRL

SEQ ID NO: 3575 - protein, 528 aa, Unknown
  Description of Unknown: Integrase B3576 sequence
  cd00338,SM00857,G3DSA:1.10.10.2600,IPR036162, PS51737,G3DSA:3.40.50.1390,IPR006119,IPR038109, PF07508,IPR011109,SSF53041,PTHR30461, PS51736,Coil,PF00239
MQETNISINEIIMYLRKSRSDDPYMTVEEVLARHERQLQDYALSSFGSIIPEERIFREVVSGETIADRPVMQSVMKYLESGQIKGVLVIEPQRLSRGDLEDCGRIINAFRYTNTLVLTPPKTYNLSDEYDRKFFEMELTRGNDYLEYTKKILNRGRLASVKQGNYIGSIAPYGYRKIKTGSGKDTAHTLEIVPEQADAVRMMAQLYLAGNGFTRIAAHLDSLGIKPLKSDHWSSAAISDILSNPVYIGMIRWNHFKTIKTMQNGQIVKSRPTNRGTDYILVPGKHPAILDQGTFDAIAQRRGKSPKIKRGHELRNPFAGLVFCGTAGCGRSMTFKQFTNYRSKVPRRSESMICPNQRICHTKSVQYSAFVERVKEILSKTVDDFEIKLQNDDGNIVRIHENIIRNLEQDLVKLKDKDLRQKDAYEDGIYTKEEYASRNAKLQEQICEVQLSIQRAKDTMPPEVDYQERVSRFSDCLSKFEDTDISASEMNLLLKSCIEKIIYHNSSESKPGIGRFVANPFELDIYLRL

SEQ ID NO: 3576 - protein, 528 aa, Unknown
  Description of Unknown: Integrase B3577 sequence
  SM00857,G3DSA:1.10.10.2600,IPR036162,PF13408,PS51737, G3DSA:3.40.50.1390,IPR025827,IPR006119,IPR038109,PF07508, IPR011109,SSF53041,PTHR30461,Coil,PS51736, cd00338,PF00239
MAYCIYLRKSRADRELELQGFGETLKRHRDTLIELAKKKNLPIGEIYEEVVSGDSIAARPQMQRLLNDVSDGKWEGVLVMEIERLARGDTSDQGIVTKTFTYSNTLIITPMKTFNPTDEFDQEYFEFGLYMSRREYKTIKRRLHAGMEASCKEGNYIHHTPPFGYSIVKNKKSKGYRLEPKPGEAEIVKLIFQWYTKGILKEDGSYELLGTARIADKLNSEYSIKPLGGVWTIPTISTMLRNEHYLGYVVFGKKKRKKVVENGIIVDKWTRNESYGLYKGKHPALVSQETFNLAQERLSRNPRRPSKTITNPLAGVIKCGMCGRSMYRRPYQKRGQSASLICSEKTCHNVSSAFYLVEDALLTAIKEWIDGYEIKEEANKYDTSVLESKTKLLEEQQKQLITYKNQLTKVFEAYENGIYDSDTFLNRQKTVSESISSTEEAIVRLNKEIANEREIISHQEEIIPKAKKILEIYKTSDDVQLKNDLMKSILDKVVYTKTANGHFKDQRQDDFKLELFPKLPKNKGNSSE

SEQ ID NO: 3577 - protein, 528 aa, Unknown
  Description of Unknown: Integrase B3578 sequence
  SM00857,G3DSA:1.10.10.2600,IPR036162,PS51737,G3DSA:3.40.50.1390, IPR006119,IPR038109,PF07508,IPR011109,SSF53041, PTHR30461,Coil,PS51736,cd00338,PF00239
MQETNISINEIIMYLRKSRSDDPYMTVEEVLARHERQLQDYARSSFGSTIPEERIFREVVSGETIADRPVMQSVMKYLESGQIKGVLVIEPQRLSRGDLEDCGRIINAFRYTNTLVLTPPKTYDLSDEYDRKFFEMELTRGNDYLEYTKKILSRGRLTSVKQGNYIGSIAPYGYRKIKTGSGKDTAHTLEIVPEQADAVRMMAQLYLAGNGFTRIAAHLDSLGIKPLKSDHWSPAAISDILSNPVYIGMIRWNHFKTIKTMQNGQIVKSRPTNHGTDYILVPGKHPAILDQETFYAIAERRGKSPKVKRDHELRNPFAGLVYCGTVGCGRSMALKQFTNYRSKVPRRSESMICPNQRICHTKSVQYSAFVERVKEILSKTVDDFEIKLQNDDGNIVRIHENIIRNLEQDLVKLKDKDLRQKDAYEDGIYTKEEYASRNAKLQEQICEVQLSIQRAKDTMPPEVDYQERVSRFSDCLSKFEDTDISASEMNILLKSCIEKIIYHNSSESKPGIGRFVANPFELDIYLRL

SEQ ID NO: 3578 - protein, 528 aa, Unknown
  Description of Unknown: Integrase B3579 sequence
  SM00857,G3DSA:1.10.10.2600,IPR036162,PF13408, IPR025827,G3DSA:3.40.50.1390,PS51737,IPR006119, IPR038109,PF07508,SSF53041,IPR011109, PTHR30461,Coil,PS51736,cd00338,PF00239
MKMMQNDNRTAITYYRYSSHRQGEQSIEGQRAEAERWAKANGYTIVKEYADRAMTGTNDDRDQFQLMLRELERLRPAVLILWKVDRMGRNKEEIAFNKYRCKKNGTRVIYTAESIPDTPEGVILESVLEGMAEYYSLQLSQNVRRGHRVSASKCQSTGGACPLGYRVGPDKHLEIDPEKAAIVRQVFERYANGETQPEIIQSLNEQGLRTLRGKPFSRNSLRTVLKNEKYIGVYTYNHGEVRVEGGVPAIIDVEMFQKAQKMLKFNKRSSSHKWTKANYLLTGKLFCGCCGEQMCGVSGYSSTKVKYHYYACSGHHNYKKARSTCRKKNVKKEWIEGLVLREAKLLLLNEDLLDFIAENTYQYYVEANTDTAYTDALQANLREIERSLENIMRAVEAGIFNDTTKARMEELEAQKQQIQHALDLTKLDRGLQLTKDHILYFLKRFRDLDFENAACQRQIIDTFINSVFVYDDHITLTFNYSGDDRTITLAETDAAAGGESFVFAPSCGTKKGLSQNDFSKSYEAVPFF

SEQ ID NO: 3579 - protein, 528 aa, Unknown
  Description of Unknown: Integrase B3580 sequence
  cd00338,SM00857,G3DSA:1.10.10.2600,IPR036162,PS51737, G3DSA:3.40.50.1390,IPR006119,IPR038109,PF07508,SSF53041, IPR011109,PTHR30461,PS51736,Coil,PF00239
METYCIYLRKSRADADAEARGEGETLARHEHILSELAKKQKYHISKVYREIVSGETIAARPQMQQLLQDVESGIYAGVLVMEVERLARGDTIDQGIVAQAFKYSDTKIITPVKTYDPNNEYDEEYFEFSLFMSRREYKTIKRRMQAGRFAAAKEGKYVGNVPPYGYDRQKLDHDSGFTLVPNPEEAKIVKMIFEWYVHGAIMEDGTKQRLGSTLIAYRLHDMGFTTRKGERWSLHTVRSILTNPVYAGMIRWGYRPQKKIMKNGAVTRSRPNITTDDYVLVRGLHEPLISQEDYDAAQELAHDKRTIPKVNVDKTLKNPLAGIVICKKCGRSMTRRPYGAKLRQDTILCKTPDCDNVASDLYLVEQRILDSLQAWLHQYEMQWQEHQPSTGIDNSEQIAAIDALKKEQEKAKQQLEKAYDLLEQGIYDTNTFVERSTTLKAKIADTQKRIEKLEHNMQEQSSREREMQELIPKVRHLLAVYDTLPDAAAKNQMLCQVIEKAEYYKAHSARWHGSVDDFDVVVYPKLPR

SEQ ID NO: 3580 - protein, 528 aa, Unknown
  Description of Unknown: Integrase B3581 sequence
  SM00857,G3DSA:1.10.10.2600,IPR036162,PF13408, IPR025827,G3DSA:3.40.50.1390,PS51737,IPR006119, IPR038109,PF07508,IPR011109,SSF53041, PF00239,PTHR30461,PS51736,Coil,cd00338
MAYCIYLRKSRADRELELQGFGETLKRHRDTLIELAKKKNLPIGEIYEEVVSGDSIAARPQMQRLLNDVSDGKWEGVLVMEIERLARGDTSDQGIVTKTFTYSNTLIITPMKTFNPTDEFDQEYFEFGLYMSRREYKTIKRRLHAGMEASCKEGNYIHHTPPFGYSIVKNKKSKGYRLEPKPGEAEIVKLIFQWYTKGILKEDGSYELLGTARIADKLNSEYSIKPLGGVWTIPTISTMLRNEHYLGYIVFGKKKRKKVVENGIIVDKWTRNESYGLYKGKHPALVSQETFNLAQERLSRNPRRPSKTITNPLAGVIKCGMCGRSMYRRPYQKRGQSASLICSEKTCHNVSSAFYLVEDALLTAIKEWIDGYEIKEEANKYDTSVLESKTKLLEEQQKQLITYKNQLTKVFEAYENGIYDSDTFLNRQKTVSESISSTEEAIVRLNKEIANEREIISHQEEIIPKAKKILEIYKTSDDVQLKNDLMKSILDKVVYTKTANGHFKDQRLDDFKLELFPKLPKNKGNSSE

SEQ ID NO: 3581 - protein, 528 aa, Unknown
  Description of Unknown: Integrase B3582 sequence
  PTHR30461:SF3,cd00338,SM00857,G3DSA:1.10.10.2600,IPR036162, PF13408,IPR025827,G3DSA:3.40.50.1390,PS51737,IPR006119, IPR038109,PF07508,SSF53041,IPR011109,PTHR30461, PS51736,Coil,PF00239
MDSSPFLMQERMGIELMAKNKKAGFEPDMQDAVIYTRYSSHNQRDCSIEQQVADCEIFARQNNLRVVKVYADRHLSGTTDNRPQFQQMLKDATHGHWAYVICWKIDRFARNRYDSATYKFRLKKAGVRVLYAKESIPDGPEGILLESVLEGSAEYYSAALAQNIRRGMKYNAEQCKVNSGSIPFGYCKGADGRFAIHEANAEVVREIFRKAAGGMPFVDIANDLNSRGLKTSRGGRWNKGSFRLLMNEAYIGVYHFSDTRIEGGMPALIDQGTFWAANERLKANSSVRGRHQDGGDYLLTGKLKCAHCGSYMIGFSGTGKNGELHYYYGCQKRRRERACKKANVPREWIERVVVKAALDYVLRPDVMEWIADAVMEYQERGAASAQLAALTAELEENQKATDNVMKAIEAGIITSTTKQRLLDLEAKAQDLKRAIELEKLSHVRLERDQVLFWLDRFRGGSLQSQEFRRKVIDAFVSVVYLSDDHLRIAFNYSGGSNAEADFDLVMDAEAAAGELSKKFAQGHVASTN

SEQ ID NO: 3582 - protein, 528 aa, Unknown
  Description of Unknown: Integrase B3583 sequence
  SM00857,G3DSA:1.10.10.2600,IPR036162,PF13408,PS51737, IPR025827,G3DSA:3.40.50.1390,IPR006119,IPR038109,PF07508, IPR011109,SSF53041,PTHR30461,Coil,PS51736, cd00338,PF00239
MAYCIYLRKSRADRELELQGFGETLKRHRDTLIELAKKKNLPIGEIYEEVVSGDSIAARPQMQRLLNDVSDGKWEGVLVMEIERLARGDTSDQGIVTKTFTYSNTLIITPMKTFNPTDEFDQEYFEFGLYMSRREYKTIKRRLHAGMEASCKEGNYIHHTPPFGYSIVKNKKSKGYRLEPKPGEAEIVKLIFQWYTKGIVKEDGSYELLGTARIADKLNSEYSIKPLGGVWTIPTISTMLRNEHYLGYIVFGKKKRKKVVENGIIVDKWTRNESYGLYKGKHPALVSQDTFNLAQERLSRNPRRPSKTITNPLAGVIKCGMCGRSMYRRPYQKRGQSASLICSEKTCHNVSSAFYLVEDALLTAIKEWIDGYEIKEEANKYDTSVLESKTKLLEEQQKQLITYKNQLTKVFEAYENGIYDSDTFLNRQKTVSESISSTEEAIVKLNKEIANEREIISHQEEIIPKAKKILEIYKTSDDVQLKNDLMKSILDKVVYTKTANGHFKGQRQDDFKLELFPKLPNNKGDSSE

SEQ ID NO: 3583 - protein, 528 aa, Unknown
  Description of Unknown: Integrase B3584 sequence
  PTHR30461:SF3,SM00857,G3DSA:1.10.10.2600,IPR036162,PF13408, IPR025827,PS51737,G3DSA:3.40.50.1390,IPR006119,IPR038109, PF07508,IPR011109,SSF53041,PF00239,PTHR30461, PS51736,Coil,cd00338
MKAVIYARFSSHNQREESIEGQVRACQRFAKEHDMTVIEIYADRGLSGLHADNRPEFQRMIADSDRHKFQALIMWNLDRFSRDKYDTAVYKSRLKKNGVTLYYSDQNIPDTPEGIILESLLEGFAQYYSANLSRNAKRGLQENARKCLWNGGGLPLGYTIDETKHFVIDPAGAACVRLIFQMYADNHSIKEIVSTLNEKGYRTVKGNKFRLGSIQGVLRNRKYIGEYHASGITVPNGVPAIVDVELFNAVQEKIGVVSTAKARNKAEIPYLLTTKVFCGHCGSPMIGESGTGKGGSTYRYYKCSCRKNRKGQCDKRTEQKEWLEETVVAQTVEKFLHPNVIEDVSNACAAVLEQDCQNNALLKALNAQLADVEKSSRNLIKAIEAGVFTASMRERLAELEQQKEDITVQIAREQLRKPQLSAEQIAFFLRSFLDGDAHDPNFQERIIESLVRRVDVYDEGSGNRKLTVFYNLKKNNHSSVSVKCSDSESVGLPKRSVAKAADFFIRFLQKDENRTAVNTVPFGTVEPP

SEQ ID NO: 3584 - protein, 528 aa, Unknown
  Description of Unknown: Integrase B3585 sequence
  SM00857,G3DSA:1.10.10.2600,IPR036162,PF13408,IPR025827, G3DSA:3.40.50.1390,PS51737,IPR006119,IPR038109,PF07508, SSF53041,IPR011109,PF00239,PTHR30461,PS51736, Coil,cd00338
MAYCIYLRKSRADRELELQGFGETLKRHRDTLIELAKKKNLPIGEIYEEVVSGDSIAARPQMQRLLNDVSDGKWEGVLVMEIERLARGDTSDQGIVTKTFTYSNTLIITPMKTFNPTDEFDQEYFEFGLYMSRREYKTIKRRLHAGMEASCKEGNYIHHTPPFGYSIVKNKKSKGYRLEPKPGEAEIVKLIFQWYTKGILKEDGSYELLGTARIADKLNSEYSIKPLGGVWTIPTISTMLRNEHYLGYIVFGKKKRKKVVENGIIVDKWTRNESYGLYKGKHPALVSQETFNLAQERLSRNPRRPSKTITNPLAGVIKCGMCGRSMYRRPYQKRGQSASLICSEKTCHNVSSAFYLVEDALLTAIKEWIDGYEIKEEANKYDTSVLESKTKLLEEQQKQLITYKNQLTKVFEAYENGIYDSDTFLNRQKTVSESISSTEEAIVKLNKEIANEREIISHQEEIIPKAKKILEIYKTSDDVQLKNDLMKSILDKVVYTKTANGHFKDQRQDDFKLELFPKLPKNKGDSSE

SEQ ID NO: 3585 - protein, 528 aa, Unknown
  Description of Unknown: Integrase B3586 sequence
  PTHR30461:SF3,cd00338,SM00857,G3DSA:1.10.10.2600,IPR036162, PF13408,IPR025827,G3DSA:3.40.50.1390,PS51737,IPR006119, IPR038109,PF07508,IPR011109,SSF53041,PTHR30461, PS51736,Coil,PF00239
MKVVGYCRFSSEGQKDGYSIEAQTEAIRSYCEINNHTLLRFYIDEAKTGTQDDREGFLDMIDDTKSGEFEAIVVHKLDRFARNRYDSAIYGRILEDRKVRLLSVLEPIIADDSPESLLFRGIVETMNEYYSRNLSRETLKGQRIAARNAQHLGGAVPFGYDLTKDKHYTPNPTEAPIVLEIYTRLDAGQSSIAVARWLNTRGLLTRHHKQFTGSSVLNLVKSPIYIGRYVWGATSKRKGVTPIVVENACEPLVPKDLFDRVNAVISARKTGPVGRNRDVDYLLTGVLYCEYCGRHLYGFKSHAHYTLKSTGEVRDYTVYKYRCSHDNRQSFNRKTDDGYVKEVCPLKMLPKDDIESFVGDAVRSVIFAPDSAAWISGVLQERMKTIIPGNPDAVKKVDANIRATSTKQQRLLDLYLDGGIDKAAYNQKSRELNEQMQYLSAERAKMQTPPPDVSIEAIKSAIAKYSESASVKSVESTKMLIDTFVDHIDVSNEHIVIFFNVEFPFLPECSTFDFVRSGKNALPKLFAK

SEQ ID NO: 3586 - protein, 528 aa, Unknown
  Description of Unknown: Integrase B3587 sequence
  SM00857,G3DSA:1.10.10.2600,IPR036162,PS51737,G3DSA:3.40.50.1390, IPR006119,IPR038109,PF07508,IPR011109,SSF53041, PTHR30461,Coil,PS51736,cd00338,PF00239
MQETNISINEIIMYLRKSRSDDPYMTVEKVLARHERQLQDYALSSFGSIIPEERIFREVVSGETIADRPVMQSVMKYLESGQIKGVLVIEPQRLSRGDLEDCGRIINAFRYTNTLVLTPPKTYDLSDEYDRKFFEMELTRGNDYLEYTKKILNRGRLASVKQGNYIGSIAPYGYRKIKTGSGKDTSHTLEIVPEQADAVRMMAQLYLAGNGFTRIAAHLDSLGIKPLKSDHWSPAAISDILSNPVYIGMIRWNHFKTIKTMQNGQIVKSRPTNHDTDYILVPGKHPAILDQGTFDAIAQRRGKSPKIKRGHELRNPFAGLVFCGTTGCGRSMTFKQFTNYRSKVPRRSESMICPNQRICHTKSVQYSAFVERVKEILSKTVDDFEIKLQNDDGNIVRIHENIIRNLEQDLVKLKDKDLRQKDAYEDGIYTKEEYASRNAKLQEQICEMQLSIQRAKDTMPPEVDYQERVSRFSDCLSKFEDTDISASEMNLLLKSCIEKIIYHNSSESKPGIGRFVANPFELDIYLRL

SEQ ID NO: 3587 - protein, 528 aa, Unknown
  Description of Unknown: Integrase B3588 sequence
  SM00857,G3DSA:1.10.10.2600,IPR036162,PS51737, G3DSA:3.40.50.1390,IPR006119,IPR038109,PF07508, IPR011109,SSF53041,PTHR30461,Coil, PS51736,cd00338,PF00239
MQETNISINEIIMYLRKSRSDDPYMTVEEVLARHERQLQEYALSSFGSIIPEERIFREVVSGETIADRPVMQSVMKYLESGQIKGVLVIEPQRLSRGDLEDCGRIINAFRYTNTLVLTPPKTYDLSDEYDRKFFEMELTRGNDYLEYTKKILNRGRLASVKQGNYIGSIAPYGYRKIKTGSGKDTAHTLEIVPEQADAVRMMAQLYLAGNGFTRIAAHLDSLGIKPLKSDHWSPAAISDILSNPVYIGMIRWNHFKTIKTMQNGQIVKSRPTNHDTDYILVPGKHPAILDQGTFDAIAQRRGKSPKIKRGHELRNPFAGLVYCGTAGCGRSMTFKQFTNYRSKVPRRSESMICPNQRICHTKSVQYSAFVERVKEILSKTVDDFEIKLQNDDGNIVRIHENIIRNLEQDLLKLKDKDLRQKDAYEDGIYTKEEYASRNAKLQEQICEVQLSIQRAKDTMPPEVDYQERVSRFSDCLSKFEDTDISASEMNLLLKSCIEKIIYHNSSESKPGIGRFVANPFELDIYLRL

SEQ ID NO: 3588 - protein, 528 aa, Unknown
  Description of Unknown: Integrase B3589 sequence
  SM00857,G3DSA:1.10.10.2600,IPR036162,PS51737,G3DSA:3.40.50.1390, IPR006119,IPR038109,PF07508,IPR011109,SSF53041, PTHR30461,Coil,PS51736,cd00338,PF00239
MQETNISINEIIMYLRKSRSDDPYMTVEKVLARHERQLQDYALSSFGSIIPEERIFREVVSGETIADRPVMQSVMKYLESGQIKGVLVIEPQRLSRGDLEDCGRIINAFRYTNTLVLTPPKTYDLSDEYDRKFFEMELTRGNDYLEYTKKILNRGRLASVKQGNYIGSIAPYGYRKIKTGSGKDTSHTLEIVPEQADAVRMMAQLYLAGNGFTRIAAHLDSLGIKPLKSDHWSPAAISDILSNPVYIGMIRWNHFKTIKTMQNGQIVKSRPTNHDTDYILVPGKHPAILDQGTFDAIAQRRGKSPKIKRGHELRNPFAGLVFCGTTGCGRSMTFKQFTNYRSKVPRRSESMICPNQRICHTKSVQYSAFVERVKEILSKTVDDFEIKLQNDDGNIVRIHENIIRNLEQDLVKLKDKDLRQKDAYEDGIYTKEEYASRNAKLQEQICEVQLSIQRAKDTMPPEVDYQERVSRFSDCLSKFEDTDISASEMNLLLKSCIEKIIYHNSSESKPGIGRFVANPFELDIYLRL

SEQ ID NO: 3589 - protein, 527 aa, Unknown
  Description of Unknown: Integrase B3590 sequence
  cd00338,SM00857,G3DSA:1.10.10.2600,IPR036162, PF13408,IPR025827,PS51737,G3DSA:3.40.50.1390, IPR006119,IPR038109,PF07508,IPR011109, SSF53041,PTHR30461,PS51736,Coil,PF00239
MYYLMYLRKSRADLEAEARGEGETLARHRRALRELAARNGHEIRREYAEIVSGETIASRPQMQHLLMDIADPECEGVYVMEVERLARGDTMDQGRVAQAFLYSNTKIITPAKTYDPRNEFDQEYFEFGLFMSRREYKTINRRIQAGRIQSVQEGKFPSSVAAYGYRKVRVPGGKGYTLEVNPEEAAVVRQIYQWYVHGIDGKPAGVARIVRQLEKLSIPSGERSPGWRAARINRMLHNEVYIGKVRWGHISVQRTLTPDGVQAKRAVSHNYRLYEGLHPAIVEEELFQAAQRKLTGTRVPLRNGMALANPLAGLVFCKHCGHQMTGQTASGKRAAQIFCKMHGCPTVANARGPVEDAILGELRAWLDDYQAHIDPFRKLTQGDNEERSLLEKALAQQEEQKKKLLKQKSSLHDLLEEGVYDVTTFQERLAALQIRLRETDAAMEAAKAQLGTLGPQYRPAEQLMPAVQHVLDVYHTTASAQEKNDLLKSVISRIVYDKTVRGTTSPKSNPNSFQLDIFPALLTDLRP

SEQ ID NO: 3590 - protein, 527 aa, Unknown
  Description of Unknown: Integrase B3591 sequence
  PTHR30461:SF3,SM00857,G3DSA:1.10.10.2600,IPR036162,PS51737, G3DSA:3.40.50.1390,IPR006119,IPR038109,PF07508,IPR011109, SSF53041,PTHR30461,Coil,PS51736,cd00338, PF00239
MYELTQSMESLSVDEIIVYLRKSRSDSPEMSVEDVLKKHEEMIQDYANTHFGSPIPEKNIYREVVSGETIDSRPQVKIVLQKIESPQIKAVLIVEPQRLSRGDLEDCGRLINILRYTNTMVLTLTHSFNLQEEYERKFFEMEITRGNDYLEYTKRILRRGRESSAAKGHYIGSVDPYGYRKIVIKKDGVNCHTLEIVPEEANVVKLIHELYAYTPGGIGFTNIAHKLDSMNLKPKKAAHWTPAIISSILCNPLYLGLIRWDTRKVVKYINNGQLEKSRPRSSDAKYYKGLHEPIISQELYDACMARRGTNPSLRRNKALCNPFAGLLYCGTCGHAMSLKIYKNHNSVSQIILCNHQSYCHTKSVLYSAFLERFISSMENTIHDFELALLADDGNAQAVNQSIVANLETRLKKLQEKDMRQKDAYEDGIYSKEEFLERNIKTQQEIASTITALTAAKETKENYVDYGEKIRRFRDCINALNDPELSATEKNQFLKSCVSKIIYYNNMESKAGVGRYVENVFSLEIQYI

SEQ ID NO: 3591 - protein, 527 aa, Unknown
  Description of Unknown: Integrase B3592 sequence
  PTHR30461:SF3,cd00338,SM00857,G3DSA:1.10.10.2600,IPR036162, PF13408,PS51737,G3DSA:3.40.50.1390,IPR025827,IPR006119, IPR038109,PF07508,IPR011109,SSF53041,PTHR30461, PS51736,Coil,PF00239
MARKKNIAAGQNAVIYARYSSHNQREVSIEQQVRECMKHAAELGLHVVGTYEDRAISGKTDKRPNFQRMMRDAEKGKFQAVVAWKSNRIGRNMLQAMVNEAKLEDCGVKVFYAEEDFDDTAAGRFALRNMMNVNQFYSENMAEDITRGLYDNASKCMANGRQPLGYKRGEDGRVVLDEANAAVVREIFTRVAAGDLFVDIARDLNAQGIKTSKGANWNKGSFQSICQNERYRGIYIYGDVRVADGIPRIVSDDLWYRVQEAMRMKKNPVGTRHRVGAEDYLLTGKLRCGHCGSYMTGVSGTSRNGELHYYYTCQKRRTEHACDKKNIRRDVIEPAVAQAIKMYCLTDDVIAWIADRTVEYWEKHDNDLQIEALEQQLEENKKATSNMLKAIEMGIITEATRTRMVELETEQSRLSVQLNVAKEDVVKIDREQIISYLELLQQGDIHDRDFQMELFKNFLVAVYVYDDNRMKLVFSCMGDQNSVEIPLETGEDPPDGGLSPDAKMFVLTPDSSTRNESTTQKCVVLFC

SEQ ID NO: 3592 - protein, 527 aa, Unknown
  Description of Unknown: Integrase B3593 sequence
  PTHR30461:SF3,SM00857,G3DSA:1.10.10.2600,IPR036162,PF13408, PS51737,G3DSA:3.40.50.1390,IPR025827,IPR006119,IPR038109, PF07508,SSF53041,IPR011109,PTHR30461,Coil, cd00338,PF00239
MPKKTAKHPAKPKRGKKLEIEEPGVLYGRYSSHNQKDISVEQQFEKGYELAAEYGIRIIDTYADRAVSGRTDKRKDFQRMMSEAAKGKFRYVIAWKSNRMGRNMLEALINEARLQELGVRVLYVEEDFDDTAAGRFAARSMMNVNQFYSENMAEDIKRGLYDNASNCMVANGHLPYGYKRDETLHYVIDEPKAAVIREIFTRVAAGEPFVDIMNSLNARGIKTSYNRPWGRSSFQKILSNERYRGIYIYGDVRKEDGIPRIISDELFFKVQEVITTKKNPQGRHRVNGDYLLTGKLFCGKCKSPMVGISGTGRSGKLHYYYVCQKHRTEKTCGKKNVRRDEIELQVAQAIKDYALKDDVIEWIADSTVAYNERKEAESKVGILEDQLTGTERSIKNIMSAIEQGIITETTKSRLVELESERATIKAKIAAARADIVTVSRDDIISGLEMFRDGDVYDKKYQARLFDTFLVAVYVYDDDLRLVFSFSGNKNTIQIPIESAVNAVENNAAECSFKLCSAPPEHRKPAIH

SEQ ID NO: 3593 - protein, 527 aa, Unknown
  Description of Unknown: Integrase B3594 sequence
  PTHR30461:SF3,SM00857,G3DSA:1.10.10.2600,IPR036162,PS51737, G3DSA:3.40.50.1390,IPR006119,IPR038109,PF07508,IPR011109, SSF53041,PTHR30461,Coil,PS51736,cd00338, PF00239
MYELTQSMESLSVDEIIVYLRKSRSDSPEMSVEDVLKKHEEMIQDYANTHFGSPIPEKNIYREVVSGETIDSRPQVKIVLQKIESPQIKAVLIVEPQRLSRGDLEDCGRLINILRYTNTMVLTLTHSFNLQEEYERKFFEMEITRGNDYLEYTKRILRRGRESSAAKGHYIGSVDPYGYRKIVIKKDGVNCHTLEIVPEEANVVKLIHELYAYTPGGIGFTNIAHKLDSMNLKPKKAAHWTPAIISSILCNPLYLGLIRWDTRKVVKYINDGRLEKSRPRSSDAKYYKGLHEPIISQELYDACMARRGTNPRLRRNKELCNPFAGLLYCGTCDHAMSLKIYKNHNSVSQIMLCNHQSYCHTKSVLYSAFLERFISSMENTIHDFELALLADNGNAQAVNQSIVANLETRLKKLQEKDMRQKDAYEDGIYSKEEFLERNIKTQQEIASTITALTAAKETKENYVDYGEKIRRFRDCINALNDPELSATEKNQFLKSCVSKIIYYNNMESKAGVGRYVENVFSLEIQYI

SEQ ID NO: 3594 - protein, 527 aa, Unknown
  Description of Unknown: Integrase B3595 sequence
  PTHR30461:SF3,SM00857,G3DSA:1.10.10.2600,IPR036162,PF13408, IPR025827,G3DSA:3.40.50.1390,PS51737,IPR006119,IPR038109, PF07508,SSF53041,IPR011109,PTHR30461,Coil, PS51736,cd00338,PF00239
MNIVIYARYSSHSQTEQSIEGQLQTCYEFAKNNGHIVIGEYIDRAQSGTTDSRAEFQRMIADSDRHTFEAVLVYQLDRFARNRYDSAINKAKLKKNGVRVISARENISDDASGILVEGVLESMAEYYSAELSQKIRRGMDINAEKCLSNGSNPGLGYYVDEERRFYVDPEGAAVVREIFEMYASGKTVADITKYLNAKQVKTSLGKEFNKNSLHRLLRNKRYIGYYIYKDTETPDGMPRIIEDELFERVQHILDRNKKAPARSRGKEEYLLTTKLFCGYCREMMTGYGGTGKSGKTYHYYACNNFKRRKCKKKVVNKQRIEDRVVLECRKLLTESNIEKIAISVSAACEADYDSSAIKRIKAAIQEADTAIENLWKALERGQSVDMITERIEKRKREKDELQGQLAIEMGKQITFTAPQIKAFLYSLKRGNINDEHNRRGIINIFLRAIYLFDDRFTLILNGGDRQITIDNILIDEIEEHFEDAVSSHAECSPLVADAPLHDVNPNLFVLTKNASHYGFGVLFGKEV

SEQ ID NO: 3595 - protein, 527 aa, Unknown
  Description of Unknown: Integrase B3596 sequence
  PTHR30461:SF3,cd00338,SM00857,G3DSA:1.10.10.2600,IPR036162, PF13408,IPR025827,G3DSA:3.40.50.1390,PS51737,IPR006119, IPR038109,PF07508,SSF53041,IPR011109,PTHR30461, PS51736,Coil,PF00239
MAKKKKPAGGNAIIYARYSSHNQRDVSIEQQIEACRKHAAELGLTITDTYEDRAISGRTDNRPAFQRMMRDAEDGKFQYVLAWKSNRMGRNMMQAMVNESRLMDCGVKVFYAEEDFDDSAAGRFALRSMMNVNQFYSDNLAEDVRRGLMDNASKCMANGRQPLGYKRGEDGKVVVDEPAAAIVREIYTRIASGEMFMDIARDLNRRGIKTQSGSEWNKSSFKVLCRNERYRGIYIYGDTRIEGGIPPIVDDVLWYKVQEVLKVKKSKNRHHCPSDEDYLLTGKLRCGKCGGYMIGMSGRSKTGDVHHYYACQNRRVGHTCDKKNIRRDVVEPAVAQAIKQYCLTDDAIEWITDQTIAYWEDEDRKLQIDSIENDLSAVQSSISNVMKAIEMGVITETTRDRLIELERQQTDLKSKLALAKEEIVHVDRKDLISSLLAFRHGNVHDRAYQEKLFNAFLIAVYVYDDDHLKLVFNSFGKDDTVNIALDLGENDDNSGLSDVSKSSPILSNGQPKDIRTFRMSFFVLFYL

SEQ ID NO: 3596 - protein, 527 aa, Unknown
  Description of Unknown: Integrase B3597 sequence
  PTHR30461:SF3,cd00338,SM00857,G3DSA:1.10.10.2600,IPR036162, PF13408,PS51737,G3DSA:3.40.50.1390,IPR025827,IPR006119, IPR038109,PF07508,IPR011109,SSF53041,PTHR30461, PS51736,Coil,PF00239
MYEEIKTACLYLRYSSSNQTEQSIEGQMHVCQDFCKRHNIRIVEMYIDRATSASKDIEKRVEFLKMIKDSEKGNFDAVIVYKLDRFARSRYDSATYKYRLKRNGVQLVSATENITQDPEGIILESVLEGMAEFYSAELSQKINRGMRESAMKHNSIGGAIPLGYKTVDKKLIVDETTAPIVREAFQMYADGESVAEICRTFNNRGYKTSKGTRFGKSSFTKIFRNEKYIGVYKYHDYRAEDVIPPIIDKALWDRVQVRIGKIKKAPARNKARHTYLLTGKLFCGHCGSAMNADGNSNGYLYYRCYGKKNLDKQCNKRNMEKNLIERLVAQDAMSFLTDEYIEKIATIACDRNRQEIESDSPIPVIRDRIRQVDVSLNNLLKAIETGSAPDMLVKRMGELETEKKDMEVQLKKEMAHQVYIDKEQVIFWLEKFREGDINDEEFCQTVIDLFVNSVTVWDEPDDKFRITIAYNLTSIPQKTYRLSKDGRLSDYASNTPPLSANPMISGSIMIHTFTVTVHPQKRGRKTL

SEQ ID NO: 3597 - protein, 527 aa, Unknown
  Description of Unknown: Integrase B3598 sequence
  PTHR30461:SF3,SM00857,G3DSA:1.10.10.2600,IPR036162,PS51737, G3DSA:3.40.50.1390,IPR006119,IPR038109,PF07508,SSF53041, IPR011109,PTHR30461,Coil,PS51736,cd00338, PF00239
MYELTQSMESLSVDEIIVYLRKSRSDSPEMSVEDVLKKHEEMIQDYANTHFGSPIPEKNIYREVVSGETIDSRPQVKIVLQKIESPQIKAVLIVEPQRLSRGDLEDCGRLINILRYTNTMVLTLTHSFNLTEEYERKFFEMEITRGNDYLEYTKRILRRGRESSAAKGHYIGSVDPYGYRKIVIKKDGVNCHTLEIVPEEANVVKLIHELYAYTPGGIGFTNIAHKLDSMNLKPKKAAHWTPAIISSILCNPLYLGLIRWDTRKVVKYISDGRLEKSRPRSSDAKYYKGLHEPIISQELYDACMARRGTNPRLRRNKELCNPFAGLLYCGTCDHAMSLKIYKNHNSVSQIMLCNHQSYCHTKSVLYSAFLERFISSMENTIHDFELALLADNGNAQAVNQSIVANLETRLKKLQEKDMRQKDAYEDGIYSKEEFLERNIKTQQEIASTITALTAAKETKENYVDYGEKIRRFRDCINALNDPELSATEKNQFLKSCVSKIIYYNNMESKAGVGRYVENVFSLEIQYI

SEQ ID NO: 3598 - protein, 527 aa, Unknown
  Description of Unknown: Integrase B3599 sequence
  SM00857,G3DSA:1.10.10.2600,IPR036162,PS51737,G3DSA:3.40.50.1390, IPR006119,IPR038109,PF07508,IPR011109,SSF53041, PTHR30461,Coil,PS51736,cd00338,PF00239
MQENISINQIIMYLRKSRSDDPCMTVEEVLARHERQLQDYAVASFGSPVPEHHIFREVVSGETIADRPVMRQLMHLLESGSVRGVLVIEPQRLSRGDLEDCGRIINAFRYTNTLVLTPPKTYDLSDEYDRKFFEMELTRGNDYLEYTKKILNRGRLASVKQGNYIGSVAPYGYRKVKIGSGKDTAHTLEIVPEQADAVRMMFQLYLAGNGFTRIAAELDALGIKPLKSDHWSPAAISDILSNPVYIGMIRWNHFKTIKTMQNGQIVKSRPTNHGTDYILVPGKHPAILDQETFYAIAERRGKSPKVKRDHELRNPFAGLVYCGTVGCGRSMALKQFTNYRSKVPRRSESMICPNQRICHTKSVQYSAFVERVKEILSKTVDDFEIKLQNDDGNIVRIHENIIRNLEQDLVKLKDKDLRQKDAYEDGIYTKEEYASRNAKLQEQICEVQLSIQRAKDTMPPEVDYQERVSRFSDCLSKFEDTDISASEMNILLKSCIEKIIYHNSSESKPGIGRFVANPFELDIYLRL

SEQ ID NO: 3599 - protein, 527 aa, Unknown
  Description of Unknown: Integrase B3600 sequence
  SM00857,G3DSA:1.10.10.2600,IPR036162,PS51737, G3DSA:3.40.50.1390,IPR006119,IPR038109,PF07508, IPR011109,SSF53041,PF00239,PTHR30461, PS51736,Coil,cd00338
MAYCLYLRKSRADIEAEAHGEGETLARHEKLLLEVAKRGHYNITQIYREIVSGETIAARPVVQKLLQEVEDGKWEGVLVVEVERLARGDTIDQGVMAQAFKYSGTKIITPLKVYDPANEFDEEYFEFGLFMSRREYKTIKRRLVRGRNASAKEGKWVSGLAPYGYERVRIKGDKGWTLRPVEEQADIVRFIFKLYTSGEEDDNGEVRRLGTYTISKRLDSLGVAPPSSAQYWNDRTVQCILQNPAYIGKVRWGVNKSKKRIVNNSIEVERYKAPADEVIYVDGLHSAIVDEAIFQKAQDLLKRSGPPPVPKRNSVVNPLAGILVCGKCGRSIVLRRGRIDILICHNRICDNVGSKYEYVEERLLQALSSWLDGYRLEWSDKLPADEQAILDLKQKALRKTVAELETLHKQLDRTHDLLEQGVYDTDTFLVRSRSLTERIAAAEEDISTLTAEVQADKERAASRLNVIPKVEKLLEVYPVLPSAQAKNEMLKEVLEKVEYAKNERSGRNGPFDNFELVLYPKLPPKIE

SEQ ID NO: 3600 - protein, 527 aa, Unknown
  Description of Unknown: Integrase B3601 sequence
  PTHR30461:SF3,SM00857,G3DSA:1.10.10.2600,IPR036162,PF13408, PS51737,IPR025827,G3DSA:3.40.50.1390,IPR006119,IPR038109, PF07508,IPR011109,SSF53041,PTHR30461,Coil, PS51736,cd00338,PF00239
MNVYRTREILKTCSIFDLKLKVAFYARVSTESEDQQVSIHHQDEYYRNFIAQNKNWVFVGAYIDNGISGIRTEKRDEFQRMMADAKTGKIDMIVTKEITRFARNTLDSIRYTRELLMYGVCVWFQNDNINTIDEDSELRLTIMSGIAQDESRKLSNRIKFGHAQSIKNGVVLGTRIYGYIKKDGKLTIDPKTAPMVKEIFEKYSTGEWSTSTIEKYLYKKGYRNYKGGKLSRDNIKKIIKNPKYKGYYCGGKVKIVDMFTKKQEFLPEDEWTMYKDDGNHVPQIVDESVWDKANVIMQTRSDAIKSHRTSFKQNNLFTGYIFCGNDGAPYWMKQHTIRGREDARWVCSYRIKNGAQSCNSFGIRERELRVMLADLINKSGDIQTAIEKYISLVEKNIDFSNDGTEISRLKNMILQIEKKKDKLLDLNLDGIITNSEYIEKSEKFKDEIESINNKLSELESKEEASKDFHLKLKEIGMILNDLQGVGPEDITKTVLGEFLDKIVINPKHPQECEILFFLKTGDVKKSQ

SEQ ID NO: 3601 - protein, 527 aa, Unknown
  Description of Unknown: Integrase B3602 sequence
  PTHR30461:SF3,cd00338,SM00857,G3DSA:1.10.10.2600,IPR036162, PF13408,IPR025827,G3DSA:3.40.50.1390,PS51737,IPR006119, IPR038109,PF07508,SSF53041,IPR011109,PTHR30461, PS51736,Coil,PF00239
MNTAVRTVTVIPPSINPMTHLTDTPLYKLRVAAYARVSTDSDEQFTSYEAQIDYYTQYIQRNQEWTFVKVYTDEGISGTNTKHRAGFNEMIEDALAGKIDLIVTKSVSRFARNTVDSLVTIRKLKEKGVQVYFEKENIYTFDGKGELLLTIMSSLAQEESRSISENVTWGQRKRFADGKVNLPYKQFLGYRKGADGFPEVVPEEAVIVRRIYTRFMEGLTPGAIAKELTADGIPTPSGKQRWQTSTVESILQNEKYKGAALLQKCFTVDFLTKKRKVNEGEVPQYYVEHSHEPIITPEEFDKVQTELARRKRISRQYSGKSIFSSRIVCGDCGSYFGSKVWNSTSKYRRVIWQCNGKFKGEHKCETPHLDEETIKARFVAATNAIIDSKDNILEDCRLMQTTLTDCTGIDAEIESLLEEIDVVAELTKRCIAENSQTAQNQNEYAARYNGFLERYEKAKAQLEQLRATKVAREAQAEAIGAFMFEVQELDALTNFDEKLWLTVIDTVTVHADGRMTFKFQGGTEIEA

SEQ ID NO: 3602 - protein, 527 aa, Unknown
  Description of Unknown: Integrase B3603 sequence
  PTHR30461:SF3,cd00338,SM00857,G3DSA:1.10.10.2600,IPR036162, PF13408,PS51737,G3DSA:3.40.50.1390,IPR025827,IPR006119, IPR038109,PF07508,IPR011109,SSF53041,PTHR30461, PS51736,Coil,PF00239
MSSVDKIAVIYARYSSHGQTEQSIEGQIAAAQKYAEQHGYTIIHIYADRAMTGRNDDREQFQKMLSDTAMHQFGVILLWKIDRFGRNREEIAFNRYRCKKNGVRVERVAEDVPDGPEGVILDSVLEGMAEYYSLQLAQNVRRGQRESAKKSMSIGGNKMLGYVVNPETKRYESDPKTASYVTEIFKRYANGETISEIVAWLNAQGIRTTRGSEFTVNSLHRLLKNEKYTGVYIFHDIRNEGGMPALTDRATFDKVQEMLKVNRRAPVRVWSKTEYLLTDKLFCGHCGAIMVGESGHGRNGTKHSYYTCLNRKKKKSCDKKPVRQDVIEPLVLRAIGKLLENPATLENIADQVWAAYERSDTSGDTIKALDKQIADVDRALSNVMKAIEMGIINEMTKTRMDELTNQKQALSQSRAEAGLTGGFKLTRDMILFFLQEMAALDMADRDSQKRLIKTFVNAIYLYDDHFDIAFNYTDNGKVAVRMQEINDAASGEVFGCCAQSPTKFKATFNENLNVAFTLYMRTKSLML

SEQ ID NO: 3603 - protein, 527 aa, Unknown
  Description of Unknown: Integrase B3604 sequence
  PTHR30461:SF3,cd00338,SM00857,G3DSA:1.10.10.2600,IPR036162, PF13408,IPR025827,G3DSA:3.40.50.1390,PS51737,IPR006119, IPR038109,PF07508,IPR011109,SSF53041,PTHR30461, PS51736,Coil,PF00239
MARKKNIAAGLDAVIYARYSSHNQREVSIEQQIAECTKHAAALGLRIVGTYEDRAISGKTDNRPRFQQMMRDAEKGKFQAVVAWKSNRIGRNMLQAMVNEAKLDDYGVKVFYAEEDFDDTAAGRFALRNMMNVNQFYSENMAEDITRGLYDNANKCMANGRQPLGYKRGEDGKVMLDEPAAAVVREIFTRVAAGDLFVDIARDLNAKGIKTSKGAAWNKGSFQSICQNERYKGIYIYGNVRIVDGIPRIVSDELWYRVQEAMRMKKNPVGTRHRVGAEDYLLTGKLRCGHCGSYMTGVSGTSRNGELHYYYTCQKRRTEHACNKKNVRRDVIEPAIAQAIKMYCLTDDVIEWMADQTVQYWEKHDNDLQIEALEQQLAENKKATSNMLKAIEMGIITEATRSRMVELETENSKLTAQLSAAKRDVVKINREDLIDELHILRSKDIHDREVQAELFKDFLVAAYIYDDNRLKLVFSFMGKDNSVEIPLETGEDPPDGEDSPDAKMFVLTPDCSTRNESTTQKCVVLFC

SEQ ID NO: 3604 - protein, 527 aa, Unknown
  Description of Unknown: Integrase B3605 sequence
  PTHR30461:SF3,IPR036162,PS51737,IPR011109,PTHR30461, PF00239,G3DSA:1.10.10.2600,IPR006119,PF14287,SSF53041, IPR025378,SM00857,IPR025827,cd03770,IPR038109, PS51736,PF13408,G3DSA:3.40.50.1390,PF07508
MIYNAALYCRLSKDDNNVGDSSSIVTQKDMLTRYAHEQNFCIYDVYIDDGYSGTNFDRPAFQKMKQDIENGKVNLVITKDLSRLGRDYIISGQLIEEYFPKHNVRYIAITDGFDSINKYNDIAPFKNVVNELYARDISKKIRSAFETKMKEGKFIGNFAPYGYKKDSEDKNKLIINEEIAPIVQYIFKLAEEGYRPIDIARALNEKHILPPALYRCSKNPKLNVDNYSKRKEWTSPNIQKMLKNITYIGHTAQHKTTKISFKSKVTLANQKKDWIIVENTHEPIIDKQTFEIVQKMIVSRKNPPKSDFKNIFSGIAICADCGSNMSTTGTRKKDSKYNLVCGKYKLYGSKECTNHFIDYDVLYKLVLTNINKHLKITPELRKKILSQLEQTKNNSTGADKRFIELNKRKTEIQTIIQKLYEDNYLGRINEDHFNMVLNSLTKEETQIDAEMSILTHKSNESEYDNYNRFFKLLDNFSDLTELNQDVIRRLIDVIYIYQGSYRTINGIKSKEQKIVIKYKYIGKSIIA

SEQ ID NO: 3605 - protein, 527 aa, Unknown
  Description of Unknown: Integrase B3606 sequence
  PTHR30461:SF3,SM00857,G3DSA:1.10.10.2600,IPR036162,PF13408, PS51737,G3DSA:3.40.50.1390,IPR025827,IPR006119,IPR038109, PF07508,IPR011109,SSF53041,PF00239,PTHR30461, PS51736,Coil,cd00338
MAREVRVIPASVHKFTTVPFGSTVRKKVAGYARVSTDLEEQLTSYEAQVDYYTKYIQNNPDWDFVEVYTDEGISATSTKRRDGFNRMIQDALDGKIDLIITKSVSRFARNTVDTLTTVRQLKEKGIEVYFEKENIHTLDSKGELLITIMSSLAQEESRSISENVTWGQRKRFADGKVSMPYKQFLGYDKGPGKHGTPVINEEQAEIVRLIYRLFLEGKTPSGIARYLTEQQIPTPGGKTKWQSGTVLSILTNEKYKGDAILQKCFTVDFLTKKQKVNEGEVPQYYVENSHPAIISPEVFDMVQTEVERRRSLPTRHSGVGLFASRIFCGDCGAAFGAKVWHSNDKYRKVIYQCNHKFKGKEKCSTPKLEEEQIKELFVKAVNLLITDAKEIIRNYEEVRPLIFDTACFDAEITELQEEMTVTAELIQKCVDENAHTAINQDKYKKKYDALVKRFEKAKKRLQEIHDTKRDREARRLQTDHFMRELKKQECIITEFDEVLWYTMVDRITVYNETDIRFTFKDGTEYRV

SEQ ID NO: 3606 - protein, 527 aa, Unknown
  Description of Unknown: Integrase B3607 sequence
  SM00857,G3DSA:1.10.10.2600,IPR036162,PF13408,IPR025827, G3DSA:3.40.50.1390,PS51737,IPR006119,IPR038109,PF07508, IPR011109,SSF53041,PTHR30461,Coil,PS51736, cd00338,PF00239
MAKKKKSLGGNAIVYARYSSHSQRDVSIEQQIDACKKHAEELGLTVIATYEDRAVSGRTDNRPAFQRMMRDAEAGKFRYVLAWKSNRIGRNMMQAMVNESRLMDCGVKVFYAEEDFDDSAAGRFALRSMMNVNQFYVENMVEDVKRGLYDNAKKGLVNGALPLGYKRGTDGKAEIDEPKAAIVREIYTRVAAGELFADIAADLNARGIRTARGREWSKGSFHVLCHNERYRGIYIYGDVRIPGGMPRIISDELFYDAQEAYNMKKDNRYGRTRVGADNYLLTGKLRCGHCGSYMVGVSGTSKTGDAHYYYSCQKHRLEHACNKKPIRRDIIESAVAQAIMTHCLNDDTIRFIVDSTISYFKQKEHELHIEEMENELASVNLSISNLMKAIEAGIITPTTRTRLMDLEDQQSRLSAKINTAKTNRVRINRNDLIAGLQLFRKGNIKDKKFLAKLFNTFLIAVYLYDDNRLKIVFSFAGNNSRVELPLELDQSYPEEDFDCIPLDMDVGRSSIKQVRTSPLLPHHKKRR

SEQ ID NO: 3607 - protein, 527 aa, Unknown
  Description of Unknown: Integrase B3608 sequence
  cd00338,SM00857,G3DSA:1.10.10.2600,IPR036162,PS51737, G3DSA:3.40.50.1390,IPR006119,IPR038109,PF07508,IPR011109, SSF53041,PTHR30461,PS51736,Coil,PF00239
MDAIDSTKSYAMYLRKSRKDDYNEDISEVLARHKTTLTALAKNMHLHVTKIYQEVVSGENISNRPEVQNLLRDVEKGLYAGVLVMEVERLARGDAIDQGIIQRTFFVTGTKIVTPMKTYDPLNEFDEEYFEYGLYRSRSEYKTIRRRINAGRMHSVKEGKWIASTAPYGYERKKLEKERGYTLIKVPEEAEIVELIFDLYINGMNGEIFGAGKISNYLDAMGIKPRISKHWSSATIRDMLKNPAYIGKVAWGREKDVKFVENGKIITKRIKQDDYMLYDAVWDDIISCESFEKAQQIMKSHVKPAVKKTDKLANPLSGIVYCEKCGRLMTRLGPNKHCKFDTLRCMTKGCDNISAPIYAIEDEIVSFLKSWITEQAITFQGNESISDKKNTELLTKQLALANQELFELNKQLEKTYDLLEREIYTEELFTQRNKTISENIKTIQKQVRHYESELKQLSENEKKRTLWLPKSIKLINAYDVTDSAELRNNLLKQLIYRVTYLKTERNHRGTVDNRNFKLSITPKIPQV

SEQ ID NO: 3608 - protein, 527 aa, Unknown
  Description of Unknown: Integrase B3609 sequence
  PTHR30461:SF3,SM00857,G3DSA:1.10.10.2600,IPR036162,PS51737, G3DSA:3.40.50.1390,IPR006119,IPR038109,PF07508,IPR011109, SSF53041,PTHR30461,Coil,PS51736, cd00338,PF00239
MYELTQSMESLNVDEIIVYLRKSRSDSPEMSVEDVLKKHEEMIQDYANTHFGSPIPEKNIYREVVSGETIDSRPQVKIVLQKIESPQIKAVLIVEPQRLSRGDLEDCGRLINILRYTNTMVLTLTHSFNLQEEYERKFFEMEITRGNDYLEYTKRILRRGRESSAAKGHYIGSVDPYGYRKIVIKKDGVNCHTLEIVPEEANVVKLIHELYAYTPGSIGFTNIAHKLDSMNLKPKKAAHWTPAIISSILCNPLYLGLIRWDTRKVVKYINDGQLEKSRPRSSDAKYYKGLHEPIISQDLYDACMARRGTNPSLRRNKELCNPFAGLLYCGTCDHAMSLKIYKNPNSVSQIMLCNHQSYCHTKSVLYSAFLERFISSMENTIHDFELALLADDGNAQAVNQSIVANLETRLKKLQEKDMRQKDAYEDGIYSKEEFLERNIKTQQEIASTITALTAAKETKENYVDYGEKIRRFRDCINALNDPELSATEKNQFLKSCVSKIIYYNNMESKAGVGRYVENVFSLEIQYI

SEQ ID NO: 3609 - protein, 527 aa, Unknown
  Description of Unknown: Integrase B3610 sequence
  SM00857,G3DSA:1.10.10.2600,IPR036162,PF13408,PS51737, G3DSA:3.40.50.1390,IPR025827,IPR006119,IPR038109,PF07508, IPR011109,SSF53041,PTHR30461,Coil,PS51736, cd00338,PF00239
MPEQYCLYLRKSRADMDAEKSGDEDTLLRHEKLLMQVAKSKNLNITDIYREVVSGETISARPQMQRLLSAVGQGVYTGVLVVEVERLARGDTIDQGLVAQAFKFSNTLIITPTKTYDPNNEFDEEYFEFGLFMSRREYKTINRRLQRGRIASVQEGKFVGSITPYGYDKVKLEHDKGYMLVPNPDEAPTVRLIFSLYVNGLPQEDGTTRRLGVTMICRYLNEHSIPNRTGNVWVNATVRDMIRNIVYDGKTRWNWRPTHKKMVDGIVKLERPRTKPDTWIISDGMHEPLIDHDTFVKAQVLIDSNPPRPIGERETVRNPLAGIVICGKCGRRMVRRPKGSRQPEDVIMCGCAACHNVSVYSRYLEGAIIDGLKSWVDTYKLQCSDDDVGTETIAALSEQRAAINKQIQDYKRQRENVYTLLEQGVYTTETFLQRLKIISDKIGVATSSLADLEQVVADEERRLRGKKSIIPKIENLLAAYWSLDSAAAKNDMLKEVIEKVVYEKDKGGRWADPTDFRIKIYPRLPRN

SEQ ID NO: 3610 - protein, 527 aa, Unknown
  Description of Unknown: Integrase B3611 sequence
  SM00857,G3DSA:1.10.10.2600,IPR036162,PS51737,G3DSA:3.40.50.1390, IPR006119,IPR038109,PF07508,IPR011109,SSF53041, PTHR30461,Coil,PS51736,cd00338,PF00239
MAYCLYLRKSRADIEAEAHGEGETLARHEKLLLEVAKRGHYNITQIYREIVSGETIAARPVVQKLLQEVEDGKWEGVLVVEVERLARGDTIDQGVMAQAFKYSGTKIITPLKVYDPANEFDEEYFEFGLFMSRREYKTINRRLVRGRNASAKEGKWVSGLAPYGYERVRIKGDKGWTLRPVEEQADIVRFIFKLYTSGEEGESGEVRQLGTYTISKRLDSLGVAPPSSAQYWNDRTVQCILQNPAYIGKVRWGVNKSKKRIVNNSIEIERYKAPADEVIYVDGLHPAIVDEAVFQKAQNLLKRSGPPPVPKRNSVVNPLAGILVCGKCGRSIVLRRGRIDILICHNRICDNVGSKYEYVEERLLQALSSWLDGYRLEWSDKLPADEQAILDLKQKALRKTVTELETLHKQLERTHDLLEQGVYDTDTFLVRSRSLTERIAAAEEDISALTAEVQADKERAASRLNVIPKVEKLLEVYPVLPSAQAKNEMLKEVLEKVEYTKNERSGRNGPFDNFELVLYPKLPPKIE

SEQ ID NO: 3611 - protein, 527 aa, Unknown
  Description of Unknown: Integrase B3612 sequence
  PTHR30461:SF3,SM00857,G3DSA:1.10.10.2600,IPR036162,PF13408, PS51737,IPR025827,G3DSA:3.40.50.1390,IPR006119,IPR038109, PF07508,IPR011109,SSF53041,PTHR30461, Coil,cd00338,PF00239
MKAVIYARYSPGPNQKDKSVEEQIADCRQFARENDIMIVGDYADRKKTGRNDNRAEFQKMLKDSAKGLFDAVIVWKIDRFGRNREEIAINKVKLRRNGVRVMYAKEHIPDGPEGIILESTLEGLAEYYSANLSQNIMRGMRGVAMKGQSTGGGGHSLGYYVDQDKYFQIDEHGAQIVRQIFEMYSSGKQASEIIKELNGRGLKTANGKPFNHNSIARILSNRRYIGEYRWHDILIPDGMPRIIDDETFERVQKRLEKNKKAPARKIQAGSEEEFLLTTKLFCGHCGATMIGDSGTGKSGKKYSYYTCSTRKRRKDGRKCDKKSVRKDELERYIVEQTVAHVLVDDVIEYIADKVVELQRKELQDTSMLDYYKSSLRDTEKSLKNIVTAIEQGIFTPTTKDRLLELEAEKADLEECIQKEEIARPTFSKEQIIFFLERFKGGDVNDQSYQRQIIDTFVSRIWIYDDKTVITYNYSGEGNTITLEAAEKAADEAAGGCSAQLPPSPPNANSANTILFFTGRVFGIVLRE

SEQ ID NO: 3612 - protein, 527 aa, Unknown
  Description of Unknown: Integrase B3613 sequence
  PTHR30461:SF3,cd00338,SM00857,G3DSA:1.10.10.2600,IPR036162, PF13408,PS51737,G3DSA:3.40.50.1390,IPR025827,IPR006119, IPR038109,PF07508,IPR011109,SSF53041,PTHR30461, PS51736,Coil,PF00239
MYEEIKTACLYLRYSSSNQTEQSIEGQMHVCQDFCKRHNIRIVEMYIDRATSASKDIEKRVEFLKMIKDSEKGNFDAVIVYKLDRFARSRYDSATYKYRLKRNGVQLVSATENITQDPEGIILESVLEGMAEFYSAELSQKINRGMRESAMKHNSIGGAIPLGYKTVDKKLIVDETTAPIVREAFQMYADGESVAEICRTFNNRGYKTSKGTRFGKSSFTKIFRNEKYIGVYKYHDYRAEDVIPPIIDKALWDRVQVRIGKIKKAPARNKARHTYLLTGKLFCGHCGSAMNADGNSNGYLYYRCYGKKNLDKQCNKRNMEKNLIERLVAQDAMSFLTDEYIEKIATIACDRNRQEIESDSPIPVIRDRIRQVDVSLNNLLKAIETGSAPDMLVKRMGELETEKKDMEVQLKKEMAHQVYIDKEQVIFWLEKFREGDINDEEFCQTVIDLFVNSVTVWDEPDNKFRITIAYNLTSIPQKTYRLSKDGRLSDYASNTPPLSANPMISGSLMIHTFTVTVHPQKRGRKTL

SEQ ID NO: 3613 - protein, 527 aa, Unknown
  Description of Unknown: Integrase B3614 sequence
  PTHR30461:SF3,cd00338,SM00857,G3DSA:1.10.10.2600,IPR036162, PF13408,IPR025827,G3DSA:3.40.50.1390,PS51737,IPR006119, IPR038109,PF07508,IPR011109,SSF53041,PTHR30461, PS51736,Coil,PF00239
MARKKNIAAGLDAVIYARYSSHNQREVSIEQQIAECTKHAAALGLRIVGTYEDRAISGKTDNRPRFQQMMRDAEKGKFQAVVAWKSNRIGRNMLQAMVNEAKLDDYGVKVFYAEEDFDDTAAGRFALRNMMNVNQFYSENMAEDITRGLYDNANKCMANGRQPLGYKRGADGKVMLDEPAAAVVREIFTRVAAGDLFVDIARDLNAKGIKTSKGATWNKGSFQSICQNERYKGIYIYGNVRIVDGIPRIVSDELWYKVQEAMRMKKNPVGTRHRVGAEDYLLTGKLRCGHCGSYMTGVSGTSRNGELHYYYTCQKRRTEHACNKKNVRRDVIEPAIAQAIKMYCLTDDVIEWVANRTVEYWEKHDNDLHIEALEQQLEENKKATSNMLKAIEMGIITDATRSRMIELETEQSKLAVQLNAAKADVVKIDRDDLIDELQIFRDMDVNNRSVQAELFKDFLVAAYIYDDNRLKLVFSFMGKDNSIEIPLETGEDPPDGEDSPDAKMFVLTPDCSTRKKSIAQKCAVLFY

SEQ ID NO: 3614 - protein, 527 aa, Unknown
  Description of Unknown: Integrase B3615 sequence
  PTHR30461:SF3,SM00857,G3DSA:1.10.10.2600,IPR036162,PF13408, IPR025827,G3DSA:3.40.50.1390,PS51737,IPR006119,IPR038109, PF07508,IPR011109,SSF53041,PTHR30461,Coil, PS51736,cd00338,PF00239
MNVYRTREILKTCSIFDLKLKVAFYARVSTESEDQQVSIHHQDEYYRNFIAQNKNWVFVGAYIDNGISGIRTEKRDEFQRMMADAKTGKIDMIVTKEITRFARNTLDSIKYTRELLMYGVCVWFQNDNINTIDEDSELRLTIMSGIAQDESRKLSNRIKFGHAQSIKNGVVLGSRIYGYIKKDGKLTIDPKTAPMVKEIFEKYSTGEWSTSAIEKYLYKKGYRNYKGGKLSRDNIKKIIKNPKYKGYYCGGKVKIVDMFTKKQEFLPEDEWTMYKDDGNHVPQIVDESVWNKANAIMQTRSDAIKSHRTSFKQNNLFTGYIFCGNDGAPYWMKQHTIRGREDARWVCSYRIKNGAQSCNSFGIREKELRVMLADLINKSGDIQTAIEKYISLVEKNIDFSNDGAEISRLKNMILQIEKKKDKLLDLNLDGIITNSEYIEKSEKFKDEIEIINNKLSELESKEEASKDFHLKLKEIGMILNDLQGVGPEDITKTVLGEFLDKIVINPKHPQECEILFFLKTGDVKKSQ

SEQ ID NO: 3615 - protein, 527 aa, Unknown
  Description of Unknown: Integrase B3616 sequence
  PTHR30461:SF3,SM00857,G3DSA:1.10.10.2600,IPR036162,PS51737, G3DSA:3.40.50.1390,IPR006119,IPR038109,PF07508,IPR011109, SSF53041,PTHR30461,Coil,PS51736,cd00338, PF00239
MYELTQSMESLSVDEIIVYLRKSRSDSPEMSVEDVLKKHEEMIQDYANAHFGSPIPEKNIYREVVSGETIDSRPQVKIVLQKIESPQIKAVLIVEPQRLSRGDLEDCGRLINILRYTNTMVLTLTHSFNLQEEYERKFFEMEITRGNDYLEYTKRILRRGRESSAAKGHYIGSVDPYGYRKIVIKKDGVNCHTLEIVPEEANVVKLIHELYAYTPGGIGFTNIAHKLDSMNLKPKKATHWTPAIISSILCNPLYLGLIRWDTRKVVKYINNGQLEKSRPRSSDAKYYKGLHEPIISQELYDACMARRGTNPSLRRNKALCNPFAGLLYCGTCGHAMSLKIYKNHNSVSQIMLCNHQSYCHTKSVLYSAFLERFISSMENTIHDFELALLADNGNAQAVNQSIVANLETRLKKLQEKDMRQKDAYEDGIYSKEEFLERNIKTQQEIASTITALTAAKETKENYVDYGEKIRRFRDCINALNDPELSATEKNQFLKSCVSKIIYYNNMESKAGVGRYVENVFSLEIQYI

SEQ ID NO: 3616 - protein, 527 aa, Unknown
  Description of Unknown: Integrase B3617 sequence
  PTHR30461:SF3,IPR036162,PS51737,IPR011109,PTHR30461, PF00239,G3DSA:1.10.10.2600,PF14287,IPR006119,SSF53041, IPR025378,SM00857,IPR025827,cd03770,IPR038109, PF13408,G3DSA:3.40.50.1390,PF07508,Coil
MNIQQNRITALYCRLSRDDDFGGDSASIQTQKTMLSQYARDNGFTVTEFYVDDGYSGTNFDRPDFCRMIDDIERGKIGAVIVKDLSRLGREYLKTGYYTEIFFPEHDVRFIAVNDNVDSDHGENEFAPFKNIINEWYAKDCSRKIKSALHLKARNGEFLGGYPAYGYRRSNGDRHSIVPDENAPIVKQIFELLLEGKSCYEVAKYLEQNLILTPRAFLAEKYGVYKNSASAKHPYAWEDRSVYSIATNPVYVGDLVNGRRKCKSFKSKKVCKTSEDEWIVVRDNHEPLVSREDFEAVGQRLAVKQHRKVENPDNIFRGLMVCGECGRKMVFSKSGKSGRYSCAIYKRYGKSECSRHSITLKQIKQVVLTSIQRNAALSSEGKDRFVEQMLSASSSKKSAELSALKKEAEKLTARKLALAKIFQSLYEDKALGKLSEEVYSELSGNVERERTEIQERLRQISEQLGKSQLLTENAEKFAELIRRYTDITELSEELVHLLIEKIVVHERDCVTNTMRVEIYYRFIGKVD

SEQ ID NO: 3617 - protein, 527 aa, Unknown
  Description of Unknown: Integrase B3618 sequence
  PTHR30461:SF3,SM00857,G3DSA:1.10.10.2600,IPR036162,PF13408, PS51737,G3DSA:3.40.50.1390,IPR025827,IPR006119,IPR038109, PF07508,IPR011109,SSF53041,PF00239,PTHR30461, Coil,cd00338
MYEEIKTACLYLRYSSSNQTEQSIEGQMHVCQDFCKRHNIRIVEMYIDRATSASKDIEKRVEFLKMIKDSEKGNFNAVIVYKLDRFARSRYDSATYKYRLKRNGVQLISATENITQDPEGIILESVLEGMAEFYSAELSQKINRGMRESAMKHNSIGGAIPLGYKTVDKKLVIDETTAPIVREAFQMYADGESVAEICRTFNNRGYKTSKGTHFGKSSFTKIFRNEKYIGVYKYHDYRAEDVIPPIIDKDLWDRVQVRVGKIKKAPARNKARHTYLLTGKLFCGHCGSAMNADGNSQGYLYYRCYGKKNLDKQCNKRNMEKNLIERLVAQDAMSFLTDEYIEKIATIACDRNKQEIESDSPIPVIRDRIRQVDVSLNNLLKAIETGSAPDMLVKRMGELETEKKDMEVQLKKEMAHQVYIDKEQVIFWLEKFREGDINDEEFCQTVIDLFVNSVTVWDEPDDKFKITIAYNLTSIPQKTYRLSKDGRLSDYASNTPPLSANPMILGSLMIHTFTVTVHPQKRGKKTV

SEQ ID NO: 3618 - protein, 527 aa, Unknown
  Description of Unknown: Integrase B3619 sequence
  PTHR30461:SF3,cd00338,SM00857,G3DSA:1.10.10.2600,IPR036162, PF13408,IPR025827,PS51737,G3DSA:3.40.50.1390,IPR006119, IPR038109,PF07508,IPR011109,SSF53041,PTHR30461, PS51736,Coil,PF00239
MARKKNIAAGLDAVIYARYSSHNQREVSIEQQIAECTKHAAALGLRIVGTYEDRAISGKTDNRPRFQQMMRDAEKGKFQAVVAWKSNRIGRNMLQAMVNEAKLDDYGVKVFYAEEDFDDTAAGRFALRNMMNVNQFYSENMAEDITRGLYDNANKCMANGRQPLGYKRGADGKVMLDEPAAAVVREIFTRVAAGDLFVDIARDLNAKGIKTSKGAAWNKGSFQSICQNERYKGIYIYGNVRIVDGIPRIVSDELWYKVQEAMRVKKNPVGTRHRVGAEDYLLTGKLRCGHCGSYMTGVSGTSRNGELHYYYTCQKRRTEHACNKKNVRRDVIEPAIAQAIKMYCLTDDVIEWMADQTVQYWEKHDNDLQIEALEQQLAENKKATSNMLKAIEMGIITEATRSRMVELETENSKLTAQLSAAKRDVVKINREDLIDELHVLRSKDIHDREVQAELFKDFLVAAYIYDDNRLKLVFSFMGKDNSVEIPLETGEDPPDGEDSPDAKMFVLTPDCSTRTKAPHGNVWCFFR

SEQ ID NO: 3619 - protein, 527 aa, Unknown
  Description of Unknown: Integrase B3620 sequence
  PTHR30461:SF3,SM00857,G3DSA:1.10.10.2600,IPR036162,PF13408, PS51737,IPR025827,G3DSA:3.40.50.1390,IPR006119,IPR038109, PF07508,IPR011109,SSF53041,PF00239,PTHR30461, mobidb-lite,Coil,cd00338
MPKKPTKHPAKPKRGKKLETEEPGVLYGRYSSHNQKDISVEQQFEKGYELAAEYGIKIIDTYADRAVSGRTDKRKDFQRMMSDAAKGKFRYVIAWKSNRMGRNMLEALINEARLQELGVRVLYVEEDFDDTAAGRFAARSMMNVNQFYSENMAEDIRRGLYDNASNCMVANGHLPYGYKRDDTLHYVIDEPKAAVIREIFTRVAAGEPFVDIMSSLNARGIKTSYNRPWGRSSFQKILSNERYRGIYIYGDVRKEDGIPRIISDELFFKVQEVITTKKNPQGRHRVNGDYLLTGKLFCGKCKSPMVGISGTGRSGKLHYYYVCQKHRTEKTCDKKNVRRDEIEMQVAQAIKDYALKDDVIEWIADSTVAYNERKEAESKVGILEDQLAGTERGIKNIMSAIEQGIITETTKSRLVELESERATIKAKIAAARADIVTVSRDDIISGLEMFRDGDVHDKKYQARLFDTFLVAVYVYDNDLRLVFSFSGNKNTVQIPIESAVNAVENNEAECSFKLCSAPPKIPITLLG

SEQ ID NO: 3620 - protein, 527 aa, Unknown
  Description of Unknown: Integrase B3621 sequence
  PTHR30461:SF3,SM00857,G3DSA:1.10.10.2600,IPR036162,PF13408, PS51737,G3DSA:3.40.50.1390,IPR025827,IPR006119,IPR038109, PF07508,SSF53041,IPR011109,PF00239,PTHR30461, PS51736,Coil,cd00338
MVVQKKVTTIPASLTRFTATPITELKKRRVAGYARVSTDHDDQFTSYAAQIDYYTNYIKSRDDWEFVEVYTDEGITGTSVKHREGFKRMVADALAGKIDLIVTKSVSRFARNTVDSLTTIRQLKEKGIEVYFEKENIWTFDGKGELLLTIMSSLAQEESRSISENCTWGQRKRFADGKVTVPFNRFLGYDRGPDGNLVVNPEQAVIVQQIYAMFLQGMSYHGIAKKLTADGIPTPGGKEKWSISTVRSILSNEKYKGDALLQKSYTVDFLTKKTKINEGEIPQYYVEDNHEAIISPEIFAMVQREMTKRGRGKNYHSSVHAFSSKIKCGHCGSWYGSKVWHSNSQYRKTIWQCNHKFDGDERCDTPHLCDEDIQRLFLSAANKLLVDKAEVIANCREMMDLLFNTTELEAEQATLLEETQLISDMVQQTIYENAHVALDQTEYQKRYDNLTQRFETAKQRLETVMAELDRMQTQRADIEAFVESFEALPDTLTEFKLENWHSLVDFATVYSTDDIRFTFKHGQEVQA

SEQ ID NO: 3621 - protein, 527 aa, Unknown
  Description of Unknown: Integrase B3622 sequence
  SM00857,G3DSA:1.10.10.2600,IPR036162,PS51737,G3DSA:3.40.50.1390, IPR006119,IPR038109,PF07508,IPR011109,SSF53041, PF00239,PTHR30461,PS51736,Coil,cd00338
MAYCLYLRKSRADIEAEAHGEGETLARHEKLLLEVAKRGHYNITQIYREIVSGETIAARPVVQKLLQEVEDGKWEGVLVVEVERLARGDTIDQGVMAQAFKYSGTKIITPLKVYDPANEFDEEYFEFGLFMSRREYKTIKRRLVRGRNASAKEGKWVSGLAPYGYERVRIKGDKGWTLRPVEEQADIVRFIFKLYTSGEEDDNGEVRRLGTYTISKRLDSLGVAPPSSAQYWNDRTVQCILQNPAYIGKVRWGVNKSKKRIVNNSIEVERYKAPAEEVIYVDGLHSAIVDEAIFQKAQDLLQRSGPPPVPKRNSVVNPLAGILVCGKCGRSIVLRRGRIDILICHNRICDNVGSKYEYVEERLLQALSSWLDGYRLEWSDKLPADEQAILDLKQKALRKTVAELETLHKQLDRTHDLLEQGVYDTDTFLVRSRSLTERIAAAEEDISTLTAEVQADKERAASRLNVIPKVEKLLEVYPVLPSAQAKNEMLKEVLEKVEYTKNERSGRNGPFDNFELVLYPKLPPKIE

SEQ ID NO: 3622 - protein, 527 aa, Unknown
  Description of Unknown: Integrase B3623 sequence
  PTHR30461:SF3,SM00857,G3DSA:1.10.10.2600,IPR036162,PF13408, IPR025827,G3DSA:3.40.50.1390,PS51737,IPR006119,IPR038109, PF07508,IPR011109,SSF53041,PF00239, PTHR30461,PS51736,Coil,cd00338
MESTALADVVVYARYSSAGQNDQSIEGQVKTCREFAAQRGFRVVYEYADRAISGRHAETRPAFQQMIVDAKKRTFQYILVWKLDRFARNRYDSAIYKKELRKYGVRVLSVTEGIDEGNESILLEAILEAMAEEYSRQLSQNVRRGMRQNAEKNLSIGGVTPLGYKLENRTYVIDEKEAQIVRYIHEAYANGKPSREIVEECKKRGYRSRKGAEINMDAIARMIANDKYAGTYAYNGEIQVDSLYPAIVSSQLKEKAKKRLALKARAPAHEKAKVEYLLHGKLFCGYCGKTMVGESGRSASGAIYNYYACAEKKKRRGCKKKNERKDFLEWYLAEQITEFVLTDDRIDEISDAVVAEYQRSFDASGIKQLEKNIRETDAELDRLVDALIKTDAEAALKRINDRISELEQYRAQMQGDLASLRIASRAEVNREDVVRWLKFMRRGDLMDEEYRKKIIELFINAVYLYDDRVAIFFNVKDCKQVSYIDMIDATGWGACSDLKAYGSPVTDLSEHGKIIVLNGAIGFLLRR

SEQ ID NO: 3623 - protein, 527 aa, Unknown
  Description of Unknown: Integrase B3624 sequence
  PTHR30461:SF3,SM00857,G3DSA:1.10.10.2600,IPR036162,PF13408, PS51737,G3DSA:3.40.50.1390,IPR025827,PS51736,IPR006119, IPR038109,PF07508,IPR011109,SSF53041,PTHR30461, mobidb-lite,cd00338,PF00239
MSKRESKSGQKCLAAEQIGVIYARYSSHNQKEESIEQQIAECSDFAAKNGIRIVGIYADKAVSGRSDRRPNFQRMMRDAEKRQFQIVVAYKSNRIARNMLNALQYEARLDLLGIKTLYAKEEFGNTAAGRFALRTMMNVNQFYSENMGEDIKRGMVDNANECKVNGMLPLGYVKSKEGKYAIAPDEAAVVREIFDSVLKDVPVAEIARSLNQRGIRTKLGREWNKNSFHIMLKNDNYIGVYRHSGVVVEDGIPPILEKEVFTAVQEKLANKKKTAGRRSANGEYLLTGKLFCGYCGSYMIGVSGTGENGTVHNYYQCQKRHAEGRCEKKNVRRDFIEKLIARLTQDYILQDDTIEWIADSTMSFQAMARRESGVAQLERDLADNRKVAKNIMAAIEQGIITETTKARLLEVEGTIHDLERSLSIAKAASQPIERERVVFSLEQMREGNVGSKEHQKKLIDTFVKSVTLWDDRIQIDYYHTPGKHKFSYSLEELTSKAENESNASDVRTDSLELHHQAAPKKMPLRKA

SEQ ID NO: 3624 - protein, 527 aa, Unknown
  Description of Unknown: Integrase B3625 sequence
  SM00857,G3DSA:1.10.10.2600,IPR036162,PF13408,IPR025827, G3DSA:3.40.50.1390,PS51737,IPR006119,IPR038109,PF07508, IPR011109,SSF53041,PF00239,PTHR30461,PS51736, Coil,cd00338
MGKFIKNKADIKRVVAYARFSSNNQRDESIDAQLRAIRNYCEDNDIKLVAIYTDEAQSAKTDNRDDFRIMIDDILKGKHDIDGVLVHKFNRFARNKYDSALYKKRLRDIDIKVVSVTQPIDDSPEGRILESLIEAMDEYYSENLALEVKKGMLENALKGKHTGGGKLLGLSVDDEGYYYPDENAPIIYRIFKEYADGVPKTQIVKRLNSEGYRNQYGRKFNTRTITDLLQNEKYIGNFIYNHTQTEVIRLEGIIKNPIVDEDLWERVQKLRKDANKPKHRKRKYLMTGKLRCGICGFTYCGSGAKKKNKNGDMSAYYKCQGKIKNQNGCTNTSLNKDYYEKLVIDNITENVLTDNAIDEIAVSVTTQLENERKAPLIPTAKLRKQLEKVKDKQARLMELYLDGGMERKVLDEKNNALKEERKHIEEQIERNLYLEQLNIIDIQDIKDMILEFREELKDNPDFDFAQVVFNTFVDSIVVYPDTLEVNLRVDFSTLGGDKRKNRGASHPINPLLINKSIKRKTHQQPLK

SEQ ID NO: 3625 - protein, 527 aa, Unknown
  Description of Unknown: Integrase B3626 sequence
  PTHR30461:SF3,SM00857,G3DSA:1.10.10.2600,IPR036162,PF13408, PS51737,G3DSA:3.40.50.1390,IPR025827,IPR006119,IPR038109, PF07508,IPR011109,SSF53041,PF00239,PTHR30461, Coil,cd00338
MYEEIKTACLYLRYSSSNQTEQSIEGQMHVCQDFCKRHNIRIVEMYIDRATSASKDIEKRVEFLKMIKDSEKGNFNAVIVYKLDRFARSRYDSATYKYRLKRNGVQLISATENITQDPEGIILESVLEGMAEFYSAELSQKINRGMRESAMKHNSIGGAIPLGYKTVDKKLVIDETTAPIVREAFQMYADGESVAEICRTFNNRGYKTSKGTRFGKSSFTKIFRNEKYIGVYKYHDYRAEDVIPPIIDKDLWDRVQVRVGKIKKAPARNKARHTYLLTGKLFCGHCGSAMNADGNSQGYLYYRCYGKKNLDKQCNKRNMEKNLIERLVAQDAMSFLTDEYIEKIATIACDRNKQEIESDSPIPVIRDRIRQVDVSLNNLLKAIETGSAPDMLVKRMGELETEKKDMEVQLKKEMAHQVYIDKEQVIFWLEKFREGDINDEEFCQTVIDLFVNSVTVWDEQDDKFKITIAYNLTSIPQKTYRLSKDGRLSDYASNTPPLSANPMILGSLMIHTFTVTVHPQKRGKKTV

SEQ ID NO: 3626 - protein, 527 aa, Unknown
  Description of Unknown: Integrase B3627 sequence
  PTHR30461:SF3,cd00338,SM00857,G3DSA:1.10.10.2600,IPR036162, PF13408,PS51737,G3DSA:3.40.50.1390,IPR025827,IPR006119, IPR038109,PF07508,IPR011109,SSF53041,PTHR30461, PS51736,Coil,PF00239
MARKKNIAAGLDAVIYARYSSHNQREVSIEQQIAECTKHAAALGLRIVGTYEDRAISGKTDNRPRFQQMMRDAEKGKFQAVVAWKSNRIGRNMLQAMVNEAKLDDYGVKVFYAEEDFDDTAAGRFALRNMMNVNQFYSENMAEDITRGLYDNANKCMANGRQPLGYKRGADGKVEMDEPAAAVVREIFTRVAAGDLFVDIARDLNAKGIKTSKGATWNKGSFQSICQNERYKGIYIYGNVRIVDGIPRIVSDELWYKVQEAMRMKKNPVGTRHRVGAEDYLLTGKLRCGHCGSYMTGISGTSRNGELHYYYTCQKRRTEHACSKKNVRRDIIEPAIAQAIRMYCLTDDVIEWMADRTVQYWEKHDNDLQIEALEQQLAENKKATSNMLKAIEMGIITAATRSRMVELETENSKLTAQLSAAKRDVVKINREDLIDELHILRSKDIHDREVQAELFKDFLVAAYIYDDSRLKLVFSFMGKDNSVEIPLETGEDPPDGEDSPDAKMFVLTPDCSTRTKSTAQKCVVLFY

SEQ ID NO: 3627 - protein, 527 aa, Unknown
  Description of Unknown: Integrase B3628 sequence
  PTHR30461:SF3,SM00857,G3DSA:1.10.10.2600,IPR036162,PS51737, G3DSA:3.40.50.1390,IPR006119,IPR038109,PF07508,IPR011109, SSF53041,PTHR30461,Coil,PS51736,cd00338, PF00239
MYELTQSMESISVDEIIVYLRKSRSDSPEMSVEDVLKKHEEMIQDYANTHFGSPIPEKNIYREVVSGETIDSRPQVKIVLQKIESPQIKAVLIVEPQRLSRGDLEDCGRLINILRYTNTMVLTLTHSFNLQEEYERKFFEMEITRGNDYLEYTKRILRRGRESSAAKGHYIGSVDPYGYRKIVIKKDGVNCHTLEIVPEEANVVKLIHELYAYTPGGIGFTNIAHKLDSMNLKPKKAAHWTPAIISSILCNPLYLGLIRWDTRKVVKYINDGQLEKSRPRSSDAKYYKGLHEPIISQELYDACMARRGTNPSLRRNKALCNPFAGLLYCGTCGHAMSLKIYKNHNSVSQIMLCNHQSYCHTKSVLYSAFLERFISSMENTIHDFELALLADNGNAQAVNQSIVANLETRLKKLQEKDMRQKDAYEDGIYSKEEFLERNIKTQQEIASTITALTAAKETKENYVDYGEKIRRFRDCINALNDPELSATEKNQFLKSCVSKIIYYNNMESKAGVGRYVENVFSLEIQYI

SEQ ID NO: 3628 - protein, 527 aa, Unknown
  Description of Unknown: Integrase B3629 sequence
  PTHR30461:SF3,SM00857,G3DSA:1.10.10.2600,IPR036162,PS51737, G3DSA:3.40.50.1390,IPR006119,IPR038109,PF07508,IPR011109, SSF53041,PTHR30461,Coil,PS51736,cd00338, PF00239
MYELTQSMESLSVDEIIVYLRKSRSDSPEMSVEDVLKKHEEMIQDYANTHFGSPIPEKNIYREVVSGETIDSRPQIKIVLQKIESPQIKAVLIVEPQRLSRGDLEDCGRLINILRYTNTMVLTLTHSFNLQEEYERKFFEMEITRGNDYLEYTKRILRRGRESSAAKGHYIGSVDPYGYRKIVIKKDGVNCHTLEIVPEEANVVKLIHELYAYTPDGIGFTNIAHKLDSMNLKPKRAAHWTPAIISSILCNPLYLGLIRWDTRKVVKYINDGRLEKSRPRSSDAKYYKGLHEPIISQELYDACMARRGTNPSLRRNKELCNPFAGLLYCGTCDHAMSLKIYKNHNSVSQIMLCNHQSYCHTKSVLYSAFLERFISSMENTIHDFELALLADNGNAQAVNQSIVANLETRLKKLQEKDMRQKDAYEDGIYSKEEFLERNIKTQQEIASTITALTAAKETKENYVDYGEKIRRFRDCINALNDPELSATEKNQFLKSCVSKIIYYNNMESKAGVGRYVENVFSLEIQYI

SEQ ID NO: 3629 - protein, 527 aa, Unknown
  Description of Unknown: Integrase B3630 sequence
  PTHR30461:SF3,SM00857,G3DSA:1.10.10.2600,IPR036162,PS51737, G3DSA:3.40.50.1390,IPR006119,IPR038109,PF07508,IPR011109, SSF53041,PTHR30461,Coil,PS51736,cd00338, PF00239
MYELTQSMESLSVDEIIVYLRKSRSDSPEMSVEDVLKKHEEMIQDYANTHFGCPIPEKNIYREVVSGETIDSRPQVKIVLQKIESPQIKAVLIVEPQRLSRGDLEDCGRLINLLRYTNTMVLTLTHSFNLQEEYERKFFEMEITRGNDYLEYTKRILRRGRESSAAKGHYIGSVDPYGYRKTVIKKDGVNCHTLEIVPEEANVVKLIHELYAYTPGGIGFTNIAHKLDSMNLKPKKAAHWTPAIISSILCNPLYLGLIRWDTRKVVKYINDGRLEKSRPRSSDAKYYKGLHEPIISQELYDACMARRGTNPSLRRNKELCNPFAGLLYCGTCDHAMSLKIYKNHNSVSQIMLCNHQSYCHTKSVLYSAFLERFISSMENTIHDFELALLADNGNAQAVNQSIVANLEIRLKKLQEKDMRQKDAYEDGIYSKEEFLERNIKTQQEIASTITALTAAKETKENYVDYGEKIRRFRDCINALNDPELSATEKNQFLKSCVSKIIYYNNMESKAGVGRYVENVFSLEIQYI

SEQ ID NO: 3630 - protein, 527 aa, Unknown
  Description of Unknown: Integrase B3631 sequence
  PTHR30461:SF3,SM00857,G3DSA:1.10.10.2600,IPR036162,PS51737, G3DSA:3.40.50.1390,IPR006119,IPR038109,PF07508,IPR011109, SSF53041,PTHR30461,Coil,PS51736,cd00338, PF00239
MYELTQSMESLSVDEIIVYLRKSRSDSPEMSVEDVLKKHEEMIQDYANTHFGSPIPEKNIYREVVSGETIDSRPQVKIVLQKIESPQIKAVLIVEPQRLSRGDLEDCGRLINILRYTNTMVLTLTHSFNLQEEYERKFFEMEITRGNDYLEYTKRILRRGRESSAAKGHYIGSVDPYGYRKIVIKKDGVNCHTLEIVPEEANVVKLIHELYAYTPGGIGFTNIAHKLDSMNLKPKKAAHWTPAIISSILCNPLYLGLIRWDTRKVVKYINDGRLEKSRPRSSDAKYYKGLHEPIISQDLYDACMARRGTNPSLRRNKELSNPFAGLLYCGTCDHAMSLKIYKNHNSVSQIMLCNHQSYCHTKSVLYSAFLERFISSMENTIHDFELALLADNGNAQAVNQSIVANLEIRLKKLQEKDMRQKDAYEDGIYSKEEFLERNIKTQQEIASTITALTAAKETKENYVDYGEKIRRFRDCINALNDPELSATEKNQFLKSCVSKIIYYNNMESKAGVGRYVENVFSLEIQYI

SEQ ID NO: 3631 - protein, 527 aa, Unknown
  Description of Unknown: Integrase B3632 sequence
  SM00857,G3DSA:1.10.10.2600,IPR036162,PS51737,G3DSA:3.40.50.1390, IPR006119,IPR038109,PF07508,IPR011109,SSF53041, PTHR30461,Coil,PS51736,cd00338,PF00239
MAYCLYLRKSRADIEAEAHGEGETLARHEKLLLEVAKRGHYNITQIYREIVSGETIAARPVVQKLLQEVEDGKWEGVLVVEVERLARGDTIDQGVMAQAFKYSGTKIITPLKVYDPANEFDEEYFEFGLFMSRREYKTINRRLVRGRNASAKEGKWVSGLAPYGYERVRIKGDKGWTLRPVEEQADIVRFIFKLYTSGEEGESGEVRQLGTYTISKQLDSLGVAPPSSAQYWNDRTVQCILQNPAYIGKVRWGVNKSKKRIVNNSIEVERYKAPADEVIYVDGLHPAIVDEAVFQKAQDLLKRSGPPPVPKRNSVVNPLAGILVCGKCGRSIVLRRGRLDMLICHNRLCDNVGSKYEYVEERLLQALSSWLEGYRLEWSDKLPADEQSLLDLKQKALRKTVTELETLHKQLDRTHDLLEQSVYDTDTFLVRSRSLTERIAAAKEDISALTAEVQADKERAASRLNVIPKVEKLLEVYPVLPSAQAKNEMLKEVLEKVEYTKNERSGRNGPFDNFELVLYPKLPPKIE

SEQ ID NO: 3632 - protein, 527 aa, Unknown
  Description of Unknown: Integrase B3633 sequence
  SM00857,G3DSA:1.10.10.2600,IPR036162,PS51737, G3DSA:3.40.50.1390,IPR006119,IPR038109,PF07508, SSF53041,IPR011109,PTHR30461,Coil, PS51736,cd00338,PF00239
MQENISINQIIMYLRKSRSDDPCMTVEEVLARHERQLQDYAVASFGSPVPEHHIFREVVSGETIADRPVMRQLMHLLESGSVRGVLVIEPQRLSRGDLEDCGRIINAFRYTNTLVLTPPKTYDLSDEYDRKFFEMELTRGNDYLEYTKKILNRGRLASVKQGNYIGSVAPYGYRKIKTGSGKDTAHTLEIVPEQADAVRMMAQLYLAGNGFTRIAAHLDSLGIKPLKSDHWSPAAISDILSNPVYIGMIRWNHFKTIKTMQNGQIVKSRPTNHGTDYILVPGKHPAILDQETFYAIAERRGKSPKVKRDHELRNPFAGLVYCGTAGCGRSMALKQFTNYRSKVPRRSESMICPNQRICHTKSVQYSAFVERVKEILSKTVDDFEIKLQNDDGNIVRIHENIIRNLEQDLVKLKDKDLRQKDAYEDGIYTKEEYASRNAKLQEQICEVQLSIQRAKDTMPPEVDYQERVSRFSDCLSKFEDTDISASEMNLLLKSCIEKIIYHNSSESKPGIGRFVANPFELDIYLRL

SEQ ID NO: 3633 - protein, 527 aa, Unknown
  Description of Unknown: Integrase B3634 sequence
  PTHR30461:SF3,SM00857,G3DSA:1.10.10.2600,IPR036162,PS51737, G3DSA:3.40.50.1390,IPR006119,IPR038109,PF07508,IPR011109, SSF53041,PTHR30461,Coil,PS51736,cd00338, PF00239
MYELTQSMESLSVDEIIVYLRKSRSDSPEMSVEDVLKKHEEMIQDYANTNFGSPIPEKNIYREVVSGETIDSRPQVKIVLQKIESPQIKAVLIVEPQRLSRGDLEDCGRLINILRYTNTMVLTLTHSFNLQEEYERKFFEMEITRGNDYLEYTKRILRRGRESSAAKGHYIGSVDPYGYRKIVIKKDGVNCHTLEIVPEEANVVKLIHELYAYTPGGIGFTNIAHKLDSMNLKPKKATHWTPAIISSILCNPLYLGLIRWDTRKVVKYINDGRLEKSRPRSSDAKYYKGLHEPIISQELYDACMARRGTNPSLRRNKELCNPFAGLLYCGTCDHAMSLKIYKNHNSVSQIMLCNHQSYCHTKSVLYSAFLERFISSMENTIHDFELALLADDGNAQAVNQSIVANLETRLKKLQEKDMRQKDAYEDGIYSKEEFLERNIKTQQEIASTITALTAAKETKENYVDYGEKIRRFRDCINALNDPELSATEKNQFLKSCVSKIIYYNNMESKAGVGRYVENVFSLEIQYI

SEQ ID NO: 3634 - protein, 527 aa, Unknown
  Description of Unknown: Integrase B3635 sequence
  PTHR30461:SF3,SM00857,G3DSA:1.10.10.2600,IPR036162,PF13408, PS51737,IPR025827,G3DSA:3.40.50.1390,IPR006119,IPR038109, PF07508,IPR011109,SSF53041,PTHR30461,Coil, PS51736,cd00338,PF00239
MEMRETMKAVIYARYSSEKQQEISIEGQLRICREFAAREGYEIVGTYADRALSASHNVERREDFQRMIRDSAHRNFDVVIVYKFSRFARNRYDSAVYKARLRQNGVKVLSACEPISANPEGALIEGIFESLDEFYSKSLAQDVSRGMHENATKALSTGGTIPLGYVSVDKRLQIDPATAPAVRTAFEMYAEGYSCARIADTLNAKGYRTRTGKPFNRSSFSTLFSNPKYIGTYHYNGEVELAGQVPAIVDPGTYRQVQTRLRKNSMAPSRSKATVDYLLSTKVSCGECGRPMAGESGHSHTGARYYYYACSGKKRRLGCNLPSLRKDDLEKLVVEHARALLAPDCIKGLAHAAAEEYTRQANDHSAAVALKQQLAEVTRSIDNLILMVERGAASATLVNRLNDLEARKASLTDELSAELRGVPELTEVDILRWLSCFADGSADDPDYRRNMIDMLINSVTVQKNPNRKGFLILIAYNLSGRSEELSGSDLSGLVHQARPKPNFCTIPAMPCNTFILYHACAIFQLAA

SEQ ID NO: 3635 - protein, 527 aa, Unknown
  Description of Unknown: Integrase B3636 sequence
  SM00857,G3DSA:1.10.10.2600,IPR036162,PS51737,G3DSA:3.40.50.1390, IPR006119,IPR038109,PF07508,IPR011109,SSF53041, PTHR30461,Coil,PS51736,cd00338,PF00239
MAHCLYLRKSRADIEAEAHGEGETLARHEKLLLEVAKRGHYNITQIYREIVSGETIAARPVVQKLLQEVEDGKWEGVLVVEVERLARGDTIDQGVMAQAFKYSGTKIITPLKVYDPANEFDEEYFEFGLFMSRREYKTINRRLVRGRNASAKEGKWVSGLAPYGYERVRIKGDKGWTLRPVEEQADIVRFIFKLYTSGEEDENGEVRRLGTYTISKRLDSLGVAPPSSAQYWNDRTVQCILQNPAYIGKVRWGVNKSKKRIVNNSIEVERYKAPADEVIYVDGLHPAIVDEAIFRKAQDLLKRSGPPPVPKRNSVVNPLAGILVCGKCGRSIVLRRGRLDMLICHNRLCDNVGSKYEYVEERLLQALSSWLEGYRLEWSDKLPADEQTLLDLKQKALRKTVTELETLHKQLDRTHDLLEQGVYDTNTFLVRSRSLTERIAAAKEDISALTAEVQEDKERAASRLNVIPKVEKLLEVYPVLPSAQAKNEMLKEVLEKVEYTKNERSGRNGPFDNFELVLYPKLPPKIE

SEQ ID NO: 3636 - protein, 527 aa, Unknown
  Description of Unknown: Integrase B3637 sequence
  SM00857,G3DSA:1.10.10.2600,IPR036162,PF13408, IPR025827,G3DSA:3.40.50.1390,PS51737,IPR006119, IPR038109,PF07508,SSF53041,IPR011109, PF00239,PTHR30461,PS51736,Coil,cd00338
MPEQYCLYLRKSRADMDAEKAGDEDTLLRHEKLLMQVAKSKNLNITDIYREVVSGETISARPQMQRLLSAVGQGVYTGVLVVEVERLARGDTIDQGLVAQAFKFSSTLIITPTKTYDPNNEFDEEYFEFGLFMSRREYKTINRRLQRGRIASVQEGKFVGSITPYGYDKVKLEHDKGYMLVPNPDEAPTVRLIFSLYVNGLPQEDGTTRRLGVAMICRYLNEHSIPNRTGNVWVNATVRDMIRNIVYDGKTRWNWRPTHKKMVDGIVKLERPRTKPDTWIISDGMHEPLIDHDTFVKAQVLIDSNPPRPIGERGTVRNPLAGIVICGKCGRRMVRRPKGSRQPEDVIMCGCAACHNVSVYSRYLEGAIIDGLKSWVDTYKLQCSDDDVGTETIAALSEQRAAINKQIQDYKRQRENVYTLLEQGVYTTETFLQRLKIISDKIGVATSSLADLEQVVADEERRLRGKKSIIPKIENLLAAYWSLDSAAAKNDMLKEVIEKVVYEKDKGGRWADPTDFRIKIYPRLPKN

SEQ ID NO: 3637 - protein, 527 aa, Unknown
  Description of Unknown: Integrase B3638 sequence
  cd03768,SM00857,IPR006118,IPR036162,PS51737, G3DSA:3.40.50.1390,IPR006119,IPR011109,SSF53041,PTHR30461, PS00397,PS51736,Coil,PF00239
MEDIVVYLRVSTEEQDYNRQLIDLENWASGRFNIIKVFAEKLSGLDDERPQLILLKQYLISNPNIKIIATWELSRVSRKKSFLFTFFEWCAEREINLFLYKQNLWLLDSDKKINSQIDLQLTLLSYFAQSEVMMMRERIKSKMNQLKSEGKFLGGQIAFGYKLDKNNRYIKDEVNAEIVADLFQFYNRQGESLITTAQYILMKYNINITKSRLRNILRRDYYRGIKAERIVSDELFNSVQLKLTANQTKAKGAKKKQGRLLDYLIKCPYCGGNFSSKTTTDMYCCSHSPGYGIYEPNNICHQSVGISCNHIDSIIWRLLKYILYNNDDFFEKLNQESDKIIETLSNECFTITDNINKLKNQIKKENIKLDAESIDIETFKSNIKKLNEGIKSFESEIKARNEKIDAITKNKNIHSQSYSRYEYIDSIKEYNSIKDLIKDYIEEINIYKVGNKRSERKIKVKFYNIEQPYYLYRNMCSRSIENDKYAFYAKYDFTDFEFNEEDTIPMMVIQYKLLNFTSLKIAKNKSD

SEQ ID NO: 3638 - protein, 527 aa, Unknown
  Description of Unknown: Integrase B3639 sequence
  SM00857,G3DSA:1.10.10.2600,IPR036162,PS51737, G3DSA:3.40.50.1390,IPR006119,IPR038109,PF07508, IPR011109,SSF53041,PTHR30461,Coil, PS51736,cd00338,PF00239
MAYCLYLRKSRADIEAEAHGEGETLARHEKLLLEVAKRGHYNITQIYREIVSGETIAARPVVQKLLQEVEDGKWEGVLVVEVERLARGDTIDQGVMAQAFKYSGTKIITPLKVYDPANEFDEEYFEFGLFMSRREYKTIKRRLVRGRNASAKEGKWVSGLAPYGYERVRIKGDKGWTLRPVEEQADIVRFIFKLYTSGEEDDNGEVRRLGTYTISKRLDSLGVAPPSSAQYWNDRTVQCILQNPAYIGKVRWGVNKSKKRIVNNSIEVERYKAPADEVIYVDGLHSAIVDEAIFQKAQDLLKRSGPPPVPKRNSVVNPLAGILVCGKCGRSIVLRRGRIDILICHNRICDNVGSKYEYVEERLLQALSSWLDGYRLEWSDKLPADEQAILDLKQKALRKTVTELETLHKQLERTHDLLEQGVYDTDTFLVRSRSLTERIAAAEEDISTLTAEVQADKERAASRLNVIPKVEKLLEVYPVLPSAQAKNEMLKEVLEKVEYTKNERSGRNGPFDNFELVLYPKLPPKIE

SEQ ID NO: 3639 - protein, 527 aa, Unknown
  Description of Unknown: Integrase B3640 sequence
  PTHR30461:SF3,cd00338,SM00857,G3DSA:1.10.10.2600,IPR036162, PF13408,IPR025827,G3DSA:3.40.50.1390,PS51737,IPR006119, IPR038109,PF07508,SSF53041,IPR011109,PTHR30461, PS51736,Coil,PF00239
MKKENEIRAVVYARYSSHSQTEQSIEGQISAAQVYAKAKGYTIVKEYVDRAKTGKNDNREAFQQMLSDTAKHEFSVIIVWKVDRFGRNREEITFNKYRCKKNDVRVEYIAEAVPDSPEGVILESVLEGMAEYYSLQLAQNIRRGIRASAEKCQAIGGHCSLGYAIDPKTKKYVIDPDTAPTVQLVFEKYAEGYTGMDIVRLLNEKGLRTVRGKPFTKNSLWTILKNERYAGVYLFKDEVRVEGGIPALVSRETFDKVQEMLEINHRSPVNTWNRATYLLTDKLFCGHCGSKMVGECGTSRTGATYNYYICAGKKRERNCSKKAVRQDWIEKVVLQQIRRVLFDQEFLEFIAHKAYTYYLEEKKKLDQSAAIKAQLSSVESSIDNLIRAMEAGIFSASTKSRLDDLENQKAALTRTLAEIKLSEESFDLTEDRILFFLESMRGLDMDDVDSRKRLVKTFVNAVYLYDDKITLAFNFTDSCEKPEIIELTDIADGVVEKFVHRASCSTKKALYFVGSMVLFFLLSWRSH

SEQ ID NO: 3640 - protein, 527 aa, Unknown
  Description of Unknown: Integrase B3641 sequence
  PTHR30461:SF3,SM00857,G3DSA:1.10.10.2600,IPR036162,PS51737, G3DSA:3.40.50.1390,IPR006119,IPR038109,PF07508,IPR011109, SSF53041,PTHR30461,Coil,PS51736,cd00338, PF00239
MYELTQSMESLSVDEIIVYLRKSRSDSPEMSVEDVLKKHEEMIQDYANTHFGSPIPENNIYREVVSGETIDSRPQVKIVLQKIESPQIKAVLIVEPQRLSRGDLEDCGRLINLLRYTNTMVLTLTHSFNLQEEYERKFFEMEITRGNDYLEYTKRILRRGRESSAAKGHYIGSVDPYGYRKIVIKKDGVNCHTLEIVPEEANVVKLIHELYAYTPGGIGFTNIAHKLDSMNLKPKKATHWTPAIISSILCNPLYLGLIRWDTRKVVKYINDGRLEKSRPRSSDAKYYKGLHEPIISQDLYDACMARRGTNPSLRRNKELCNPFAGLLYCGTCGHAMSLKIYKNHNSVSQIMLCNHQSYCHTKSVLYSAFLERFISSMENTIHDFELALLADDGNAQAVNQSIVANLETRLKKLQEKDMRQKDAYEDGIYSKEEFLERNIKTQQEIASTITALTAAKETKENYVDYGEKIRRFRDCINALNDPELSATEKNQFLKSCVSKIIYYNNMESKAGVGRYVENVFSLEIQYI

SEQ ID NO: 3641 - protein, 527 aa, Unknown
  Description of Unknown: Integrase B3642 sequence
  PTHR30461:SF3,cd00338,SM00857,G3DSA:1.10.10.2600,IPR036162, PF13408,IPR025827,G3DSA:3.40.50.1390,PS51737,IPR006119, IPR038109,PF07508,IPR011109,SSF53041,PTHR30461, PS51736,Coil,PF00239
MYEEIKEVALYVRYSSANQTEQSIEGQIRVCTDFCQRHGFRIVEIYADRATSASKDIEKRVEFLRMIKDSEKKNFQAVIVYKLDRFARSRYDSANYKYRLRKNGVQLISATENISNDPEGIILESVLEGMAEFYSAELSQKINRGMKESAYKHNSIGGVIPLGYKSEGKKLVIDEETAPIVRQAFEMYAEGHSVAEICRLFNARGYKTSKGTRFGKSSFSRMFHNERYIGVYQYHDYRAEDAIPAIIDKKLFYQVQARMKSNNRSPGQHKAKHFYLLSGKLYCGHCGSKMNASSNTTSGYTYYECYGKKNLHVDCHKRNLRQDFIEDVVIRDAMSLLTDENIEQIAEVAIRTNLHDVEGNTDIPAIKDRLHETTLSLSNLVKAIESGLAPETLVKRMVELEKDKKTLEEELKREEKKVIYLDKEQVIFWLEQFKGGDIEDDDFRRLLVNLFVNSVTVWDEEDDHFKVTIAYNLSSLNEKTYHLKRGGRQSDFNLNAPAFGTNPTIHGTLLYHTTTCCMKRRNINQEV

SEQ ID NO: 3642 - protein, 527 aa, Unknown
  Description of Unknown: Integrase B3643 sequence
  PTHR30461:SF3,SM00857,G3DSA:1.10.10.2600,IPR036162,PF13408, PS51737,G3DSA:3.40.50.1390,IPR025827,IPR006119,IPR038109, PF07508,SSF53041,IPR011109,PF00239,PTHR30461, PS51736,Coil,cd00338
MRVSVNLNAQKPDTTTNAVIYARYSSHGQTEQSIEGQLAKGHEYAAAQGYTVVHEYIDRAMTGRNDNREAFQKMLSDTGKHQFQVVIVWKVDRFGRNREEIAFNKHTCKKNGVRVEYVAESLPNSPEAVILESVLEGMAEYYSIQLSQNIRRGQLESAKKCQCVGGSVPLGYTLDSDKHFVIDPQTAPVVKKIFDLYAEGATISEITGQLNEQGIRTIRKQLFTKNSLTKLLKNEKYIGIYAYKDVVRVEGGVPAIVDKSTFDRVQELLKINRRAPSHTWTKVEYLLTDKLFCGHCGSPMVGESGFSHTGAKYSYYGCIKRRREKACDKKPVRQDWIEALVLDETVKLLHDDELMEYIIDRTWEYYQITDKVQEEKAVLEAQLAEVDKAINNLVRAIEAGIFNAATKSRMDELDAQKAALTASLADLELTSGIRITRDHIEYFLLRLRDLDVKDRECQKRLVQTFVNAVFVYDDGRVKITYNYSGQSSTITLNQIASAEKGKGFVCCLPCSTSSPRFPRGVAAFFVF

SEQ ID NO: 3643 - protein, 527 aa, Unknown
  Description of Unknown: Integrase B3644 sequence
  PTHR30461:SF3,SM00857,G3DSA:1.10.10.2600,IPR036162,PS51737, G3DSA:3.40.50.1390,IPR006119,IPR038109,PF07508,IPR011109, SSF53041,PTHR30461,Coil,PS51736,cd00338, PF00239
MYELTQSMESLSVDEIIVYLRKSRSDSPEMSVEDVLKKHEEMIQDYANTHFGSPIPEKNIYREVVSGETIDSRPQVKIVLQKIESPQIKAVLIVEPQRLSRGDLEDCGRLINILRYTNTMVLTLTHSFNLQEEYERKFFEMEITRGNDYLEYTKRILRRGRESSAAKGHYIGSVDPYGYRKIVIKKDGVNCHTLEIVPEEANVVKLIHELYAYTPGGIGFTNIAHKLDSMNLKPKKAAHWTPAIISSILCNPLYLGLIRWDTRKVVKYINDGQLEKSRPRSSDAKYYKGLHEPIISQDLYDACMARRGTNPSLRCNKELCNPFAGLLYCGTCNHAMSLKIYKNHNSVSQIMLCNHQSYCHTKSVLYSAFLERFISSMENTIHDFELALLADNGNAQAVNQSIVANLETRLKKLQEKDMRQKDAYEDGIYSKEEFLERNIKTQQEIASTITALTAAKETKENYVDYGEKIRRFRDCINALNDPELSATEKNQFLKSCVSKIIYYNNMESKAGVGRYVENVFSLEIQYI

SEQ ID NO: 3644 - protein, 527 aa, Unknown
  Description of Unknown: Integrase B3645 sequence
  PTHR30461:SF3,SM00857,G3DSA:1.10.10.2600,IPR036162,PF13408, IPR025827,G3DSA:3.40.50.1390,PS51737,IPR006119,IPR038109, PF07508,SSF53041,IPR011109,PTHR30461,Coil, PS51736,cd00338,PF00239
MSRVTVIPAKLDRATFMPLDKPIKRRVAGYARVSTDSEEQQTSYEAQVSYYTEYIQKRDDWEFAGVYTDQGISATNTKHRDGFNRMIADALDGKIDLIVTKSVSRFARNTVDSLTTVRKLKEKGVEVYFEKENIYTLDSKGELFITIMSSLAQEESRSISENVTWGQRKRMADGKVTMPYGRFLGYRKGEDGLPEIVPEEAEVVKLIYKSFMEGLSYYKIAKMLMEREIPAPAGGEKWHRRTVESILTNEKYKGSALLQKKFTMDFLTKKQKVNEGEVPQYFVEHSHDAIIDPEEFELVQAEIERRKGLGKEYSGSSIFSAKLVCSCCGGFFGSKVWHSTSKYRRIIWQCNHKFSKSSGNKKCKTPHLYEDEIKKRFIEVCNRIASDKEDFLISCQQIVEILSNTAALDRKIEAQYIYLNGLAVSMQEFIKENAMQPQGEDFYDTKLAEYEKQRAEGETRLKGLQSQKATKLSRKELLDGLVNVLEENGILIDKFDERLWRLMVEKVVVGIEGELTFTLRNGMEIEV

SEQ ID NO: 3645 - protein, 527 aa, Unknown
  Description of Unknown: Integrase B3646 sequence
  PTHR30461:SF3,SM00857,G3DSA:1.10.10.2600,IPR036162,PS51737, G3DSA:3.40.50.1390,IPR006119,IPR038109,PF07508,SSF53041, IPR011109,PTHR30461,Coil,PS51736,cd00338, PF00239
MYELTQSMESLSVDEIIVYLRKSRSDSPEMSVEDVLKKHEEMIQDYANTHFGSPIPEKNIYREVVSGETIDSRPQVKIVLQKIESPQIKAVLIVEPQRLSRGDLEDCGRLINILRYTNTMVLTLTHSFNLQEEYERKFFEIEITRGNDYLEYTKRILRRGRESSAAKGHYIGSVDPYGYRKIVMKKDGVNCHTLEIVPEEANVVKLIHELYAYTPGGIGFTNIAHKLDSMNLKPKKAAHWTPAIISSILCNPLYLGLIRWDTRKVVKYINDGRLEKSRPRSSDAKYYKGLHEPIISQELYDACMARRGTNPRLRRNKELCNPFAGLLYCGTCDHAMSLKIYKNHNSVSQIMLCNHQSYCHTKSVLYSAFLERFISSMENTIHDFELALLADNGNAQTVNQSIVANLEIRLKKLQEKDMRQKDAYEDGIYSKEEFLERNIKTQQEIASTITALTAAKETKENYVDYGEKIRRFRDCINALNDPELSATEKNQFLKSCVSKIIYYNNMESKAGVGRYVENVFSLEIQYI

SEQ ID NO: 3646 - protein, 527 aa, Unknown
  Description of Unknown: Integrase B3647 sequence
  PTHR30461:SF3,cd00338,SM00857,G3DSA:1.10.10.2600,IPR036162, PF13408,IPR025827,G3DSA:3.40.50.1390,PS51737,IPR006119, IPR038109,PF07508,IPR011109,SSF53041,PTHR30461, PS51736,Coil,PF00239
MYEEIKTACLYLRYSSSNQTEQSIEGQMHVCQDFCKRHNIRIVEMYIDRATSASKDIEKRVEFLKMIKDSEKGNFDAVIVYKLDRFARSRYDSATYKYRLKRNGVQLVSATENITQDPEGIILESVLEGMAEFYSAELSQKINRGMRESAMKHNSIGGAIPLGYKTVDKKLIVDETTAPIVREAFQMYADGESVAEICRTFNNRGYKTSKGTRFGKSSFTKIFRNEKYIGVYKYHDYRAEDVIPPIIDKALWDRVQVRVGKIKKAPARNKARHTYLLTGKLFCGHCGSAMNADGNSNGYLYYRCYGKKNLDKQCNKRNMEKNLIERLVAQDAMSFLTDEYIEKIATIACDRNKQEIESDSPIPVIRDRIRQVDVSLNNLLKAIETGSAPDMLVKRMGELETEKKDMEVQLKKEMAHQVYIDKEQVIFWLEKFREGDINDEEFCQTVIDLFVNSVTVWDEPDDKFKITIAYNLTSIPQKTYRLSKDGRLSDYASNTPVLLSHSDCRTVFSVICVHLCQRFICLISCIF

SEQ ID NO: 3647 - protein, 527 aa, Unknown
  Description of Unknown: Integrase B3648 sequence
  PTHR30461:SF3,cd00338,SM00857,G3DSA:1.10.10.2600,IPR036162, PF13408,PS51737,G3DSA:3.40.50.1390,IPR025827,IPR006119, IPR038109,PF07508,IPR011109,SSF53041,PTHR30461, PS51736,Coil,PF00239
MYEEIKTACLYLRYSSSNQTEQSIEGQMHVCQDFCKRHNIRIVEMYIDRATSASKDIEKRVEFLKMIKDSEKGNFNAVIVYKLDRFARSRYDSATYKYRLKRNGVQLISATENITQDPEGIILESVLEGMAEFYSAELSQKINRGMRESALKHNSIGGAIPLGYKTVDKKLVIDETTAPIVREAFQMYADGESVAEICRTFNNRGYKTSKGTRFGKSSFTKIFRNEKYIGVYKYHDYRAEDVIPPIIDKDLWDRVQVRVGKIKKAPARNKARHTYLLTGKLFCGHCGSAMNADGNSQGYLYYRCYGKKNLDKQCNKRNMEKNLIERLVAQDAMSFLTDEYIEKIATIACDRNKQEIESDSPIPVIRDRIRQVDVSLNNLLKAIETGSAPDMLVKRMGELETEKKDMEVQLKKEMAHQVYIDKEQVIFWLEKFREGDINDEEFCQTVIDLFVNSVTVWDEPDDKFKITIAYNLTSIPQKTYRLSKDGRLSDYASNTPPLSANPMILGSLMIHTFTVTVHPQKRGKKTV

SEQ ID NO: 3648 - protein, 526 aa, Unknown
  Description of Unknown: Integrase B3649 sequence
  SM00857,G3DSA:1.10.10.2600,IPR036162,PF13408,IPR025827, PS51737,G3DSA:3.40.50.1390,IPR006119,IPR038109,PF07508, SSF53041,IPR011109,PTHR30461,Coil,PS51736, cd00338,PF00239
MQYCLYLRKSRADSEAEARGEGETLSRHEKALLDLAKKLNLNITAIYREIVSGETIAARPVMQQLLQEVEQGIWDGVLVMEVERLARGDTIDQGIVAQTFKFSDTKIITPIKTYNPNNEFDEEYFEFGLFMSRREYKTINRRLQRGRMASVKDGKYVANKAPYGYNRIRIENDKGWTLEINKEEADVVRLIFELYTVGEKQSDNTFNRLGTGFIAKRLNAMKVPPKRGKVWVVASIRDILINPVYIGMIRWNWRPQQKKMIDGQLHISRPRATDYVLCNGLHPPIISKETFDMAQELMRHNPARPIGEKNTVKNSLSGIVICGNCGRHMVRRPHTKYPDMLICSEPTCNNVGAQLRVVEERILQSLKEWLGEYKISWDITSPPVERISQVSINKKALQKEQHELDTLNKQISKTHDLLEQGIYTTDVFLERSRALSLRINEVKEHIAILDKELKTEITREDSAVNIIPKVEKLLEVYHDLPSPKAKNDMLKDVLEKVVYTKKERSKKGNLDNFNITIYPKIPKYIT

SEQ ID NO: 3649 - protein, 526 aa, Unknown
  Description of Unknown: Integrase B3650 sequence
  SM00857,G3DSA:1.10.10.2600,IPR036162,PF13408,IPR025827, PS51737,G3DSA:3.40.50.1390,IPR006119,IPR038109,PF07508, IPR011109,SSF53041,PF00239,PTHR30461,PS51736, Coil,cd00338
MAKPEVSELAVVYARYSSHSQGEQSIEGQLSNARDYAAAHGYTIVHEYVDRAKSGRTDNRAEFQQMLKDTAKRQFSVIILWKVDRFGRNREEIAINKMKCRKNGVRVEYVAETIPDSPEGVILESVLEGFAEYYSLQLSQNIRRGRAESAEKCQSLGGNRPLGYKTGPDKKFIIDENTAPTVKMIFTMYADGKTVTEIVDKLNEMGLRTLRGGPFTKNSLHSILKNKKYIGIYEYQGREIMDGVPRIIEDDVFNKVQEMLKINKRAPAKTWSRADYILTDKLFCGKCGALMFGESGTSHTGAKHNYYICSNKKRFRSCDKKAVRQADIEDTVLNATHELLQDDELLDYIVDRTWEYYLAQDNSQEELRNLQRQLAQTDTAISNLIRAIEAGILTEETKKRMDELTQQKADLKASIADREIARGFHLQKSHIAFYLRSLRDADWSDKEAQKRLIQTFVNAVFVYDDHITLTYNFSGDKSTITLRDMQRFEDGEEFGCRASRSTIGRISEPYIAWGTVFVQTKRHSLP

SEQ ID NO: 3650 - protein, 526 aa, Unknown
  Description of Unknown: Integrase B3651 sequence
  SM00857,G3DSA:1.10.10.2600,IPR036162,PF13408,IPR025827, G3DSA:3.40.50.1390,PS51737,IPR006119,IPR038109,PF07508, SSF53041,IPR011109,PTHR30461,Coil,PS51736, cd00338,PF00239
MQYCLYLRKSRADSEAEARGEGETLARHEKALLDLAKKLNLNITAIYREIVSGETIAARPVMQQLLQEVEQGIWDGVLVMEVERLARGDTIDQGIVAQTFKFSDTKIITPIKTYNPNNEFDEEYFEFGLFMSRREYKTINRRLQRGRMASVKDGKYVANKAPYGYNRIRIENDKGWTLEINKEEADVVRLIFELYTVGEKQSDNTFNRLGTGFIAKRLNTMKVSPKRGKVWVVASIRDILINPVYIGMIRWNWRPQQKKMIDGQLHISRPRATDYVLCNGLHPPIISKETFDMAQELMRHNPARPIGEKNTVKNSLSGIVICGNCGRHMVRRPHTKYPDMLICSEPTCNNVGAQLRVVEERILQSLKEWLGEYKISWDITSPPVERISQVSIKKKALQKEQHELDTLNKQISKTHDLLEQGIYTTDVFLERSRALSLRIDEVKEHIAILDKELKTEITREDSAVNIIPKVEKLLEVYHDLPSPKAKNDMLKDVLEKVVYTKKERSKKGNLDNFNITIYPKIPKYIT

SEQ ID NO: 3651 - protein, 526 aa, Unknown
  Description of Unknown: Integrase B3652 sequence
  SM00857,G3DSA:1.10.10.2600,IPR036162,PF13408,PS51737, IPR025827,G3DSA:3.40.50.1390,IPR006119,IPR038109,PF07508, IPR011109,SSF53041,PTHR30461,Coil,PS51736, cd00338,PF00239
MQYCLYLRKSRADSEAEARGEGETLARHEKALLDLAKKLNLNITAIYREIVSGETIAARPVMQQLLQEVEQGIWDGVLVMEVERLARGDTIDQGIVAQTFKFSDTKIITPIKTYNPNNEFDEEYFEFGLFMSRREYKTINRRLQRGRMASVKDGKYVANKAPYGYNRIRIENDKGWTLEINKEEADVVRLIFELYTVGEKQSDSTFNRLGTGFIAKRLNAMKVPPKRGKVWVVASIRDILINPVYIGMIRWNWRPQQKKMIDGQLHISRPRATDYMLCKGLHPPIISKETFDIAQDLMRHNPARPIGEKNTVKNSLSGIVICGNCGRHMVRRPHTKYPDMLICSEPTCNNVGSQLRVVEERILQSLKEWLGEYKISWDITSPQIERISQVSIKKKALQKEQHELDTLNKQISKTHDLLEQGIYTTDVFLERSRALSLRMDEVKEHIAILDKELKTEITREDSAVNIIPKVEKLLEVYHDLPSPKAKNDMLKDVLEKVVYTKKERSKKGNLDNFNITIYPKIPKYIT

SEQ ID NO: 3652 - protein, 526 aa, Unknown
  Description of Unknown: Integrase B3653 sequence
  PTHR30461:SF3,SM00857,G3DSA:1.10.10.2600,IPR036162,PS51737, G3DSA:3.40.50.1390,IPR006119,IPR038109,PF07508,IPR011109, SSF53041,PTHR30461,Coil,PS51736,cd00338, PF00239
MINMVSFDNIIIYLRKSRSDDPAQTVEEVLAKHERILQDYCIKEYGKVIPEKRIYREVVSGETIQDRPVMQKLLKELETNNIYGVLIVEPQRLSRGDLQDCGQIINSFRYTNTAVITPGKTYNLQDEYDRKFFEMELTRGNDYLEYTKKILNRGRVASVKQGNYICSVRPYGYKKVVIGTGKDKCHTLEIIPEEAETIKLMYHLYLDENMGFTNIARTLDSMHIKPLKSSNWSAATIRDMIDNPIYIGKIVWNNRKVVKKWENEQIIKVRPRNKGDDVICVDGKHEAIIDEETFNAARQKRGLTPKVRKFKELRNPLAGILFCSTCGHSMSMKKYVDNRSHTGKVTTIMLCNKQAVCHTKSAQYEQIVAKIKESLADAIANFEIKMKEQENNNIDIHKQRITSLKDELNRLYNKDVRQKDAFEDGIYTKEEYIERNSKLQSQILNIKAEIENEKNNTPVIIDYQNKITTFTECLTSLDDDSISAADKNSLLKNCIDKIIYHNDMPSLPGIGRYIENSFRLEIFLKM

SEQ ID NO: 3653 - protein, 526 aa, Unknown
  Description of Unknown: Integrase B3654 sequence
  PTHR30461:SF3,SM00857,G3DSA:1.10.10.2600,IPR036162,PS51737, G3DSA:3.40.50.1390,IPR006119,IPR038109,PF07508,IPR011109, SSF53041,PF00239,PTHR30461,PS51736,Coil, cd00338
MPYCIYLRKSRADAEAELAGEGETLARHEKTLLALAKKLKLPITKIYKEILSGETIAGRPVMQQLLQDVEAGIWQGVLVMEVERLGRGNTLDQGIILNAFKYSSTKIITPMKSYDPNDEFDEEYFEFSQFMSRREYKTILRRMQRGREASVKEGKFAGSIAPFGYRRVKLPQEKGFTLEIDDIEATAVKLAYELYAYGDPQPDGTFADIGRATIAKRLDQMGIRNRKGGTWATASVTRMLQNPVYIGKVHWNRRPEKKHTENGKIKKTRPLAENYLLVDGLHEPIISEELWNLAQAKMKQHYRPTGVNGIMQNPLAGLVHCSYCGNAMQRRPYLKTGQPASLICHTHFCPQISSPLYMVEGKILEALSLWMKQHEPTWEDESSINVFSTKIMALEHTIADMEQELQGLQFQFEKIFEFLETGIYTPEVFTARNKTLSEKMAEIRSAIEETQAELSNLKAARKNQVSMIPKIKNILDTYETLTPAEKNKLLKEVLDHVEYHKKIKGKKNVSADNFEIILFPKISPEN

SEQ ID NO: 3654 - protein, 526 aa, Unknown
  Description of Unknown: Integrase B3655 sequence
  SM00857,G3DSA:1.10.10.2600,IPR036162,PF13408,PS51737, G3DSA:3.40.50.1390,IPR025827,IPR006119,IPR038109,PF07508, IPR011109,SSF53041,PTHR30461,Coil,PS51736, cd00338,PF00239
MQYCLYLRKSRADSEAEALGEGETLARHEKALLDLAKKLNLNITAIYREIVSGETIAARPVMQQLLQEVEQGIWDGVLVMEVERLARGDTIDQGIVAQTFKFSDTKIITPIKTYNPNNEFDEEYFEFGLFMSRREYKTINRRLQRGRMASVKDGKYVANKAPYGYNRIRIENDKGWTLEINKEEADVVRLIFELYTVGEKQSDNTFNRLGTGFIAKRLNTMKVSPKRGKVWVVASIRDILINPVYIGMIRWNWRPQQKKMIDGQLHISRPRATDYMLCKGLHPPIISKETFDIAQDLMQHNPARPIGEKNTVKNSLSGIVVCGDCGRHMVRRPHTKYPDMLICSEPTCNNVGSQLRVVEERILQSLKEWLGEYKISWDITSPPVERISQVSIKKKALQKEQHELDTLNKQISKTHDLLEQGIYTTDVFLERSRALSLRIDEVKEHIAILDKELKTEITREDSAVNIIPKVEKLLEVYHDLPSPKAKNDMLKDVLEKVVYTKKERSKKGNLDNFNITIYPKIPKYIT

SEQ ID NO: 3655 - protein, 526 aa, Unknown
  Description of Unknown: Integrase B3656 sequence
  PTHR30461:SF3,SM00857,G3DSA:1.10.10.2600,IPR036162,PF13408, IPR025827,G3DSA:3.40.50.1390,PS51737,IPR006119,IPR038109, PF07508,IPR011109,SSF53041,PTHR30461,Coil, PS51736,cd00338,PF00239
MNTVIYARYSAGPRQTDQSIEGQLRVCTDFCKQRGLTVIDTYCDRHISGRTDERPEFQRLITDAKRKKFEAVVVYKTDRFARNKYDSAVYKRELKRNGIQIFYAAEAIPDGPEGIILESLMEGLAEYYSAELAQKIKRGMHESALKCQSTGSGRPLGYRVDEQKHFQIDPESAQTVQTIFEQYIKGESNAAICELLNSRGLRTAQGKPFNKNSINRIIKNRKYIGEYRYHDIIVEGGMPAIISKDTFNLAQAEMERRRTRKAPKSPKAEYLLAGRLFCGHCKGPMQGVSGTGKSGNKWYYYYCGNTRGKNKTCDKKQVSRDRLERAVVDFTVRYILQEEVLEELARKVHAAQERQNDTASEIAFYEKKLADNKKSIANVLRAIESGTATQTLPARLQELENEQAVILGEISFLKGKRLAFTEDQIFFALMKHLKPYPGESEQDYRRRIISDFVSEVYLYDGRLLIYFNISSEDGKLKSADLSNIEGGEFDEGLVGSTNLIAGRTPKVTIVVLPYGFVLAAQIKDRP

SEQ ID NO: 3656 - protein, 526 aa, Unknown
  Description of Unknown: Integrase B3657 sequence
  PTHR30461:SF3,SM00857,G3DSA:1.10.10.2600,IPR036162,PS51737, G3DSA:3.40.50.1390,IPR006119,IPR038109,PF07508,SSF53041, IPR011109,PTHR30461,Coil,PS51736,cd00338, PF00239
MPYCIYLRKSRADAEAELAGEGETLARHEKTLLALAKKLKLPITKIYKEILSGETIAGRPVMQQLLQDVEAGIWQGVLVMEVERLGRGNTLDQGIILNAFKYSSTKIITPMKSYDPNDEFDEEYFEFSQFMSRREYKTILRRMQRGREASVKEGKFAGSIAPFGYRRVKLPQEKGFTLEIEDAEAAAVRLAYELYAYGDPQPDGTFADIGRATIAKRLDQMGIRNRKGGTWATASVTRMLQNPVYIGKVHWNRRPEKKHTENGKIKKARPLAENYLLVDGLHEPIIPEELWNLAQAKMKQHYRPTGVNGIMQNPLAGLVHCSYCGNAMQRRPYLKTGQPASLICTTHFCPQISSPLYMVEGKILEALSLWMKQHEPTWEEESSADVFSTKIMALEHAIADMEQELQGLQSQFEKIFEFLETGIYTPEVFTARNKTLSEKMAEIRSAIEETQAELSKLKAARKNQVSMIPKIKNILDTYETLTPAEKNKLLKEVLDHVEYHKKIKGKKNVPADNFEIILFPKISPEN

SEQ ID NO: 3657 - protein, 526 aa, Unknown
  Description of Unknown: Integrase B3658 sequence
  PTHR30461:SF3,SM00857,G3DSA:1.10.10.2600,IPR036162,PS51737, G3DSA:3.40.50.1390,IPR006119,IPR038109,PF07508,IPR011109, SSF53041,PTHR30461,Coil,PS51736,cd00338, PF00239
MDEYCLYLRKSRIDLEAEANGQGDTLARHRAALLKLAQKRGFNITGCYEEVRSGESIAARPEMQRLLNDVEDGRWAGVLVMEVERLARGNTTDQGIVADTFKYSDTKIVTPNKIYDPGDEFDEEYFEFGLFMSRREYKTINRRLQRGRRASLSEGKYIAGKATYGYERYKLSGEKGYSLRIIPEQAEIVRQIYNWYVNGELLPDGTLRPLGSYTIAKRLDARGIPSPTGGKWPPCTVKDILTNPTYIGKLRWSYRPTVKRMVDGELVKTRPVDRSVHLSDGRHEPILDEVLWHRAQLMLKNRSHAPVPKSTNIRNPLAGLLICSKCGRSMERRKFKHGRDTVACPNKDCTCKSSVLEEVEAGMPDSLRIWLSDYKVKLAQSQETISHTGPTAEQEITSLQRTLGTLQAQMENLYNLVEQGVYSTDLFLQRSQALTARMAEVNQQIESTQAALTASRRIARNRFEIIPRIERVLALYPTLTDPREKNTILKEVLEKILYTKTTGSRWEASDMNLYVFPRVETDGEQL

SEQ ID NO: 3658 - protein, 526 aa, Unknown
  Description of Unknown: Integrase B3659 sequence
  SM00857,G3DSA:1.10.10.2600,IPR036162,PF13408,PS51737, IPR025827,G3DSA:3.40.50.1390,IPR006119,IPR038109,PF07508, IPR011109,SSF53041,PTHR30461,Coil,PS51736, cd00338,PF00239
MQYCLYLRKSRADSEAEALGEGETLARHEKALLDLAKKLNLNITAIYREIVSGETIAARPVMQQLLQEVEQGIWDGVLVMEVERLARGDTIDQGIVAQTFKFSDTKIITPIKTYNPNNEFDEEYFEFGLFMSRREYKTINRRLQRGRMASVKDGKYVANKAPYGYNRIRIENDKGWTLEINKEEADVVRLIFELYTVGEKQSDNTFNRLGTGFIAKRLNAMKVPPKRGKVWVVASIRDILINPVYIGMIRWNWRPQQKKMIDGQLHISRPRATDYLLCKGLHPPIISKETFNIAQDLMRHNPARPIGEKNTVKNSLSGIVVCGNCGRHMVRRPHTKYPDMLICSEPTCNNVGSQLRVVEERILQSLKEWLGEYKISWDITSPPVERISQVSIKKKALQKEQHELDTLNKQISKTHDLLEQGIYTTDVFLERSRALSLRMDEVKEHIAILDKELKTEITREDSAVNIIPKVEKLLEVYHDLPSPKAKNDMLKDVLEKVVYTKKERSKKGNLDNFNITIYPKIPKYIT

SEQ ID NO: 3659 - protein, 526 aa, Unknown
  Description of Unknown: Integrase B3660 sequence
  SM00857,G3DSA:1.10.10.2600,IPR036162,PF13408,PS51737, IPR025827,G3DSA:3.40.50.1390,IPR006119,IPR038109,PF07508, IPR011109,SSF53041,PF00239,PTHR30461,PS51736, Coil,cd00338
MAKVTIIPSKINPITLTPVGQVAKRKVAAYARVSTDSDEQYTSYDAQVTYYTNFINGKPNWEFVKVYADEGISGTSTKRRDEFKEMIESALNGKIDLIITKSISRFARNTLDTISITRQLKAKGIEVYFEKENLWSLDDKTEFLLTIMASIAQEESRSISQNITIGKRWGMKEGKVSFAYKNFLGYKKVDGKIVIDEAQAETVRLIYMMFLKEGKTCTGIAEFLKSKGIPTPSGKSCNWTKNTVYSILTNEKYKGDALLQKKYTADYLEHRVVPNNGELPQYYVENNHPAIIEREVWEMVQTEMMRRSMLGAAYSGNSIFASKLICGDCGKPYGKKKWHSTSKYAREIYRCNAKYNKGQTQCQTPSLTEEDIKARFIKAYNLVMCDKQQVIEDTLAVIELLADTTDLDAEIANLQTEIERISSDVSLMVRENARTQQDQIKFAARYEELTKEYETQKAALEKAVKEKAYKTGKATKMRAYLETMKQADDFLEEWSDEAWILMVETATVNRDKTITFKFANGKEIAV

SEQ ID NO: 3660 - protein, 526 aa, Unknown
  Description of Unknown: Integrase B3661 sequence
  PTHR30461:SF3,SM00857,G3DSA:1.10.10.2600,IPR036162,PF13408, IPR025827,G3DSA:3.40.50.1390,PS51737,IPR006119,IPR038109, PF07508,IPR011109,SSF53041,PF00239,PTHR30461, PS51736,Coil,cd00338
MKKKPIEPEMQDAVIYTRYSSHNQRDCSIEQQVADCEIFARQNNLRVVKVYADRHLSGTTDNRPQFQQMLKDASHGHWAYVICWKIDRFARNRYDSATYKFRLKKAGVRVLYAKESIPDGPEGILLESVLEGSAEYYSAALAQNIRRGMKFNAEQCKVNSGSIPFGYCKGPDGRFAVHEANAEVVREIFRKAAAGMPFVDIANDLNSRGLKTSRGGRWNKGSFRLLMNEAYIGVYHFSDTRIEGGMPALIDQGTFWAANERLKANSSVRGRHQDGGDYLLTGKLKCAHCGSYMIGFSGTGKSGELHYYYGCQKRRRERACKKANVPREWIERVVVKAALDYVLRPEVMEWIADAVMEYQEREAASAQLAALTAELEENRKATDNVMKAIEAGIITSTTKQRLLDLEAKAQDLKRAIELEKLSHVRLERDQILFWLDRFRGGSLQSQEFRRKVIDAFVSVVYLFDDHLRIAFNYSGGSNAEADFDLVMDAEAAAGELSKKFAQVKGRGYLVLLFSDSIGYSRLYFCC

SEQ ID NO: 3661 - protein, 526 aa, Unknown
  Description of Unknown: Integrase B3662 sequence
  PTHR30461:SF3,SM00857,G3DSA:1.10.10.2600,IPR036162,PF13408, PS51737,IPR025827,G3DSA:3.40.50.1390,IPR006119,IPR038109, PF07508,IPR011109,SSF53041,PF00239,PTHR30461, PS51736,Coil,cd00338
MARKKKFAPNDNNLAIAYYRFSSHSQNEASIDQQRELAHEWADAHGFKIVQEYEDAAISGTTDARPGFQQMLSEVAKIRPHTLIMWKTDRLGRDKYVLAMAKKKIRDAGCEIHLLAEHIPTEGPEGVLIEGLMEAMAEYYSRQLSQNIQRGMDYNAQHALYNGHKLFGYDVDRSTKKYIPDPNTAPFVQWAFGEYASGKPLKTIAEEMNAQGLRTPRNAKFSVNMLNKMLKNRAYIGEYHHGDITVASGMPVLVDEATFDRAQRRFAENKRKGSQRAHGMDDAEAPRYWLTGKLYCGECGSTMQGVSGTSKTGRTYYYYYCSAQRRKECHLHKARKRDLEDMVLFALHNIVDDEENVTALALDAAEYYEKNHNDTAYLEALEAKRREVEKSLANLVKVIERGVVSDTVTERLTQLEEQKSALNDAIETENVRASLCEDRHSIQAYFDKFLHADVNDPEIRDQVFEYFVDKVYLYDDKLVVSMWFSEDDKQEITWRDWFSLDEYWTDESPFVKGEAAEFDCFPLGST

SEQ ID NO: 3662 - protein, 526 aa, Unknown
  Description of Unknown: Integrase B3663 sequence
  PTHR30461:SF3,SM00857,G3DSA:1.10.10.2600,IPR036162,PS51737, G3DSA:3.40.50.1390,IPR006119,IPR038109,PF07508,IPR011109, SSF53041,PTHR30461,Coil,PS51736,cd00338, PF00239
MPYCIYLRKSRADAEAELAGEGETLARHEKTLLALAKKLKLPITKIYKEILSGETIAGRPVMQQLLQDVEAGIWQGVLVMEVERLGRGNTLDQGIILNAFKYSSTKIITPMKSYDPNDEFDEEYFEFSQFMSRREYKTILRRMQRGREASVKEGKFAGSIAPFGYRRVKLPQEKGFTLEIEDAEAAAVRLAYELYAYGDPQPDGTFADIGRATIAKRLDQMGIRNRKGGTWATASVTRMLQNPVYIGKVHWNRRPEKKHTENGKIKKTRPLAENYLLVDGLHEPIISEELWNLAQAKMKQHYRPTGVNGIIQNPLAGLVHCSYCGNAMQRRPYLKTGQPASLICHTHFCPQISSPLYMVEGKILEALSLWMKQHEPTWEEESSADVFSTKIMALEHAIADMEQELQGLQSQFEKIFEFLETGIYTPEVFTARNKTLSEKIAEIRSAIEETQAELSKLKAARKNQVSMIPKIKNILDTYETLTPAEKNKLLKEVLDHVEYHKKIKGKKNVPADNFEIILFPKISPEN

SEQ ID NO: 3663 - protein, 526 aa, Unknown
  Description of Unknown: Integrase B3664 sequence
  PTHR30461:SF3,SM00857,G3DSA:1.10.10.2600,IPR036162,PF13408, IPR025827,G3DSA:3.40.50.1390,PS51737,IPR006119,IPR038109, PF07508,IPR011109,SSF53041,PTHR30461,Coil, PS51736,cd00338,PF00239
MNTVIYARYSAGPRQTDQSIEGQLRVCTDFCKQRGLTVIDTYCDRHISGRTDERPEFQRLIADAKRKKFEAVVVYKTDRFARNKYDSAVYKRELKRNGIQIFYAAEAIPDGPEGIILESLMEGLAEYYSAELAQKIKRGMHESALKCQSTGSGRPLGYRVDEQKHFQIDPESAQTVQTIFEQYIKGESNAAICELLNSRGLRTAQGKPFNKNSINRIIKNRKYIGEYRYHDIVVEGGIPAIISKDTFNLAQAEMERRRTRKAPKSPKAEYLLAGRLFCGHCKGPMQGVSGTGKSGNKWYYYYCGNTRGKNKTCDKKQVSRDRLERAVVDFTVRYILQEEVLEELARKVHAAQERQNDTASEIAFYEKKLADNKKSIANVLRAIESGAATQTLPARLQELENEQAVILGELSFLKGKRLAFTEDQILFALMKHLEPYPGEPEQDYRRRIISDFVSEVYLYDDQLLIYFNISSEDGKLKSADLSNIECGEFDEGLISSTNLIAGRTPEVTIVVLPYGFVLATQIKDRL

SEQ ID NO: 3664 - protein, 526 aa, Unknown
  Description of Unknown: Integrase B3665 sequence
  SM00857,G3DSA:1.10.10.2600,IPR036162,PF13408,PS51737, G3DSA:3.40.50.1390,IPR025827,IPR006119,IPR038109,PF07508, IPR011109,SSF53041,PTHR30461,Coil,PS51736, cd00338,PF00239
MQYCLYLRKSRADSEAEARGEGETLARHEKALLDIAKKLNLNITAIYREIVSGETIAARPVMQQLLQEVEQGIWDGVLVMEVERLARGDTIDQGIVAQTFKFSDTKIITPIKTYNPNNEFDEEYFEFGLFMSRREYKTINRRLQRGRMASVKDGKYVANKAPYGYNRIRIENDKGWTLEINKEEADVVRLIFELYTVGEKQSDNTFNRLGTGFIAKRLNAMKVPPKRGKVWVVASIRDILINPVYIGMIRWNWRPQQKKMIDGQLHISRPRATDYLLCKGLHPPIISKETFNIAQDLMRHNPARPIGEKNTVKNSLSGIVVCGNCGRHMVRRPHTKYPDMLICSEPTCNNVGSQLRVVEERILQSLKEWLGEYKISWDITSPPVERISQVSIKKKALQKEQHELDTLNKQISKTHDLLEQGIYTTDVFLERSRALSLRMDEVKEHIAILDKELKTEITREDSAVNIIPKVEKLLEVYHDLPSPKAKNDMLKDVLEKVVYTKKERSKKGNLDNFNIAIYPKIPKYIT

SEQ ID NO: 3665 - protein, 526 aa, Unknown
  Description of Unknown: Integrase B3666 sequence
  PTHR30461:SF3,cd00338,SM00857,G3DSA:1.10.10.2600,IPR036162, PF13408,IPR025827,PS51737,G3DSA:3.40.50.1390,IPR006119, IPR038109,PF07508,IPR011109,SSF53041,PTHR30461, PS51736,Coil,PF00239
MKKKPIEPEMQDAVIYTRYSSHNQRDCSIEQQVADCEIFARQNNLRVVKVYADRHLSGTTDNRPQFQQMLKDASHGHWAYVICWKIDRFARNRYDSATYKFRLKKAGVRVLYAKESIPDGPEGILLESVLEGSAEYYSAALAQNIRRGMKFNAEQCKVNSGSIPFGYCKGPDGRFAIHEANAEVVREIFRKAAAGMPFVDIANDLNSRGLKTSRGGRWNKGSFRLLMNEAYIGVYHFSDTRIEGGMPALIDQGTFWAANERLKANSSVRGRHQDGGDYLLTGKLKCAHCGSYMIGFSGTGKSGELHYYYGCQKRRLERACKKANVPREWIERVVVKAALDYVLRPEVMEWIADAVMEYQEREAASAQLAALTAELEENRKATDNVMKAIEAGIITSTTKQRLLDLEAKAQDLKRAIELEKLSHVRLERDQILFWLDRFRGGSLQSQEFRRKVIDAFVSVVYLFDDHLRIAFNYSGGSNAEADFDLVMDAEAAAGELSKKFAQGHVASTKQQPEINVVLLISGCFSL

SEQ ID NO: 3666 - protein, 526 aa, Unknown
  Description of Unknown: Integrase B3667 sequence
  PTHR30461:SF3,cd00338,SM00857,G3DSA:1.10.10.2600,IPR036162, PF13408,PS51737,G3DSA:3.40.50.1390,IPR025827,IPR006119, IPR038109,PF07508,IPR011109,SSF53041,PTHR30461, Coil,PF00239
MKRVLCLYRVSTIGQVDHDDIPMQRVACREFIDRQKDWTLVDEVLEKGVSGYKTKTADRDALTEIKAKATAKKFDILLVFMFDRLGRREDETPFVVQWFVENGIEVWSVKEGQQRFDTHVDKLLNYIRFWQASGESEKTSLRIRTKHLQMIQEGLYRGGLVPFGYRLEHLGRTNKKNQSVRDLVIDETESAIVKEIYYKIISEGWGTNRIANWLNERGIQTKRGKPGAFWRATSIRAIVRNPIYIGKIRFGDELSESFEHLRIIDDFSFNLCEQILEERIPAASRDRTRSLRSTSPALLTGILFCGSCGGRMCFNHNSTVKYLADGTKRAYERDVYRCYRKVSHHGGCSGRSTYPLEKIEEAVLKIVHQYFENIRSVPTVQMLAAARQRSDSVDEIALANAEEALQKAQAEMSALEDEAVKALTGESKLDISFINGLIPKRRATLEKATEELARLRGVIAETEKKNASINQELKIILSWADAFDSASTDVKRSIISALIDRITVYDDCSLDIHFRISAEQFLGKAA

SEQ ID NO: 3667 - protein, 526 aa, Unknown
  Description of Unknown: Integrase B3668 sequence
  SM00857,G3DSA:1.10.10.2600,IPR036162,PF13408,IPR025827, PS51737,G3DSA:3.40.50.1390,IPR006119,IPR038109,PF07508, IPR011109,SSF53041,PTHR30461,Coil,PS51736, cd00338,PF00239
MQYCLYLRKSRADSEAEALGEGETLARHEKALLDLAKKLNLNITAIYREIVSGETIAARPVMQQLLQEVEQGIWDGVLVMEVERLARGDTIDQGIVAQTFKFSDTKIITPIKTYNPNNEFDEEYFEFGLFMSRREYKTINRRLQRGRMASVKDGKYVANKAPYGYNRIRIENDKGWTLEINKEEADVVRLIFELYTVGEKQSDNTFNRLGTGFIAKRLNAMKVPPKRGKVWVVASIRDILINPVYIGMIRWNWRPQQKKMIDGQLHISRPRATDYLLCKGLHPPIISKETFNIAQDLMRHNPARPIGEKNTVKNSLSGIVVCGDCGRHMVRRPHTKYPDMLICSEPTCNNVGSQLRVVEERILQSLKEWLGEYKISWDITSPPVERISQVSIKKKALQKEQHELDTLNKQISKTHDLLEQGIYTTDVFLERSRALSLRMDEVKEHIAILDKELKTEITREDSAVNIIPKVEKLLEVYYDLPSPKAKNDMLKDVLEKVVYTKKERSKKGNLDNFDIAIYPKIPKYIT

SEQ ID NO: 3668 - protein, 526 aa, Unknown
  Description of Unknown: Integrase B3669 sequence
  SM00857,G3DSA:1.10.10.2600,IPR036162,PF13408,PS51737, IPR025827,G3DSA:3.40.50.1390,IPR006119,IPR038109,PF07508, IPR011109,SSF53041,PTHR30461,Coil,PS51736, cd00338,PF00239
MQYCLYLRKSRADSEAEALGEGETLARHEKALLDLAKKLNLNVTAIYREIVSGETIAARPVMQQLLQEVEQGIWDGVLVMEVERLARGDTIDQGIVAQTFKFSDTKIITPIKTYNPNNEFDEEYFEFGLFMSRREYKTINRRLQRGRMASVKDGKYVANKAPYGYNRIRIENDKGWTLEINKEEADVVRLIFELYTVGEKQSDNTFNRLGTGFIAKRLNTMKVSPKRGKVWVVASIRDILINPVYIGMIRWNWRPQQKKMIDGQLHISRPRATDYMLCKGLHPPIISKETFDIAQDLMQHNPARPIGEKNTVKNSLSGIVVCGDCGRHMVRRPHTKYPDMLICSEPTCNNVGSQLRVVEERILQSLKEWLGEYKISWDITSPPVERISQVSIKKKALQKEQHELDTLNKQISKTHDLLEQGIYTTDVFLERSRALSLRMDEVKEHIAILDKELKTEITREDSAVNIIPKVEKLLEVYHDLPSPKAKNDMLKDVLEKVVYTKKERSKKGNLDNFNITIYPKIPKYIT

SEQ ID NO: 3669 - protein, 526 aa, Unknown
  Description of Unknown: Integrase B3670 sequence
  SM00857,G3DSA:1.10.10.2600,IPR036162,PF13408,PS51737, G3DSA:3.40.50.1390,IPR025827,IPR006119,IPR038109,PF07508, SSF53041,IPR011109,PTHR30461,Coil,PS51736, cd00338,PF00239
MQYCLYLRKSRADSEAEARGEGETLARHEKALLDLAKKLNLNITAIYREIVSGETIAARPVMQQLLQEVEQGIWDGVLVMEVERLARGDTIDQGIVAQTFKFSDTKIITPIKTYNPNNEFDEEYFEFGLFMSRREYKTINRRLQRGRMASVKDGKYVANKAPYGYNRIRIENDKGWTLEINKEEADVVRLIFELYTVGEKQSDNTFNRLGTGFIAKRLNAMKVPPKRGKVWVVASIRDILINPVYIGMIRWNWRPQQKKMIDGQLHISRPRATDYLLCKGLHPPIISKETFNIAQDLMRHNPARPIGEKNTVKNSLSGIVVCGNCGRHMVRRPHTKYPDMLICSEPTCNNVGSQLRVVEERILQSLKEWLGEYKISWDITSPPVERISQVSIKKKALQKEQHELDTLNKQISKTHDLLEQGIYTTDVFLERSRALSLRMDEVKEHIAILAKELKTEITREDSAVNIIPKVEKLLEVYHDLPSPKAKNDMLKDVLEKVVYTKKERSKKGNLDNFNITIYPKIPKYIT

SEQ ID NO: 3670 - protein, 526 aa, Unknown
  Description of Unknown: Integrase B3671 sequence
  PTHR30461:SF3,SM00857,G3DSA:1.10.10.2600,IPR036162,PF13408, PS51737,G3DSA:3.40.50.1390,IPR025827,IPR006119,IPR038109, PF07508,IPR011109,SSF53041,PTHR30461,PS51736, cd00338,PF00239
MSTNAVIYARFSSDKQREESIDGQIRECKAFAKANQLNVIAIYIDRAMSARTDHRPDFLRMIKDSRSGAFDYVLVYQLDRFSRSRYDSAIYKHELKKNGVKVLSAKENITDSPTGIMLEAMLEGYAEYYSAELSQKVRRGMTENLLEHKWNGSPVPLGYALDANHRLVIDPDMAPHVKALFEMFLAGKSYAELARYLDEKHIRTVTGRKYTGPTVHNLMSRQLYTGTYTWGGQVIEDFCPAIISKSDFSRAALRMANRKRTAKDGIPMSVRRSPEYVLTGIIYCGECGRTMTGYSGRGQNGDRYYYYRCNSNNNRCRQTEKIKCKNHPIRRNRLEDLVLQTTVNILSDKEAVAAIAEQVSRIKLENPYASELSNIKSRLADLKKRHDNSVKAIEAGVMSQAIMDNVCKYEAEMDNLKARQEKIKLATPSLRIDPVAVEYFLKNLLLNKKQHDKYRLDFFEVFIHRVVVYHDKVEIQYNYLPGHKLENPITTPLPGCSNLNKVVVRNVINSKPIYFTDDYFYILCSA

SEQ ID NO: 3671 - protein, 526 aa, Unknown
  Description of Unknown: Integrase B3672 sequence
  PTHR30461:SF3,cd00338,SM00857,G3DSA:1.10.10.2600,IPR036162, PF13408,PS51737,G3DSA:3.40.50.1390,IPR025827,IPR006119, IPR038109,PF07508,IPR011109,SSF53041,PTHR30461, PS51736,Coil,PF00239
MAQRKVTAIPATISRYTATPINSTKKRRVAGYARVSTDHEDQTTSYEAQVDYYTNYIRSRDDWEFVAIYTDEGISATNTKKREGFKTMIADALAGKIDLIVTKSVSRFARNTVDSLTTVRKLKDKGIEIYFEKENIWTLDSKGELLITIMSSLAQEESRSISENVTWGQRKRMADGKVSFAYSRFLGLDKDKETGKIVVNPEQAETVRLIFHLFLEGMTPHSIAAELTSRGIKTPAGKDVWNQQTVRRMLSNEKYKGDALLQKEFTVDFLQKKMKKNEGEVPQYYVEGNHEAIISPAVFDLVQAELAKRTKGGSRYSGVSIFSNKIKCGDCGGWYGSKVWHSTDRYRKVIYRCNRKYNGEKCGTPHVTEDEVKAAFISAYNQLVTEKKEIIANAELIRRTLCVTDSLQEEKSKLEEEIAVLVEMTQNIVAENARVAQDQDEYQKRYDSLVERYDTAKARYDEVVEAIAAKEAQSERLSNFIKVLKSQDGTIREFDGKLWGSVVEFVTVGRDKAITVTFRDGSEIQA

SEQ ID NO: 3672 - protein, 526 aa, Unknown
  Description of Unknown: Integrase B3673 sequence
  PTHR30461:SF3,SM00857,G3DSA:1.10.10.2600,IPR036162,PS51737, G3DSA:3.40.50.1390,IPR006119,IPR038109,PF07508,IPR011109, SSF53041,PF00239,PTHR30461,PS51736,Coil, cd00338
MINMVSFDNIIIYLRKSRSDDPAQTVEEVLAKHERILQDYCIKEYGKVIPEKRIYREVVSGETIQDRPVMQKLLKELETNNIYGVLIVEPQRLSRGDLQDCGQIINSFRYTNTAVITPGKTYNLQDEYDRKFFEMELTRGNDYLEYTKKILNRGRVASVKQGNYICSVRPYGYKKVVIGTGKDKCHTLEIIPEEAEAIKLMYHLYLDENMGFTNIARTLDSMHIKPLKSSNWSAATIRDMIDNPIYIGKIVWNNRKVVKKWENEQIIKVRPRNKGDDVICVDGKHEAIIDEETFNAARQKRGLTPKVRKFKELRNPLAGILFCSTCGHSMSMKKYVDNRSHTGKVTTIMLCNKQAVCHTKSAQYEQIVAKIKESLADAIANFEIKMKEQENNNIDIHKQRITSLKDELNRLYNKDVRQKDAFEDGIYTKEEYIERNSKLQSQILNIKAEIENEKNNTPVIIDYQNKITTFTECLTSLDDDSISAADKNSLLKNCIDKIIYHNDMPSLPGIGRYIENSFRLEIFLKM

SEQ ID NO: 3673 - protein, 526 aa, Unknown
  Description of Unknown: Integrase B3674 sequence
  PTHR30461:SF3,cd00338,SM00857,G3DSA:1.10.10.2600,IPR036162, PF13408,PS51737,G3DSA:3.40.50.1390,IPR025827,IPR006119, IPR038109,PF07508,IPR011109,SSF53041,PTHR30461, PS51736,Coil,PF00239
MYEDIKTACLYVRFSSHNQTEQSIEGQTRVCRDFCKRHNIRIVEIYADRATSASKDIEKRVQFLKMIKDSEKGLFDAVIVYKLDRFARSRYDSATYKYRLKRNGVQLISATENISNDPEGIILESVLEGMAEFYSAELSQKINRGMRESAYKHNSIGGAVPLGYKIEDKKLVIDPKTAPIVKEAFEKYADGETVAEICRQFNARGYKTSKGTAFGKSSFTKIFRNERYIGVYTFHDYRAEDAIPAIIDKDLWDRVQLRVGKIKNAPARNKAKVVYLLSGKIFCGHCGSKMNGNCNAGNYYYYQCYGKKNGNVDCKKKNIRKEFIERLVAQDALSLLTDEYIEQIATIACEKNQHEIELDSALPTIRDRIHQVDLSLNNLLKAIESGSAPDMLVKRMGELEKEKKDLQVQAKKESEDIVELDKAQVIYWLEQFRGGSIEDEEFCRMLIDLFVNSVTVWDEDDNTYKVTVAYNLTSLPTKTYRLNKGGTLSDFASNAPDRESNKDGVVFVHVITLGGDDRARGRDNVQ

SEQ ID NO: 3674 - protein, 526 aa, Unknown
  Description of Unknown: Integrase B3675 sequence
  SM00857,G3DSA:1.10.10.2600,IPR036162,PF13408,PS51737, IPR025827,G3DSA:3.40.50.1390,IPR006119,IPR038109,PF07508, IPR011109,SSF53041,PTHR30461,Coil,PS51736, cd00338,PF00239
MQYCLYLRKSRADSEAEARGEGETLARHEKALLDLAKKLNLNITAIYREIVSGETIAARPVMQQLLQEVEQGIWDGVLVMEVERLARGDTIDQGIVAQTFKFSDTKIITPIKTYNPNNEFDEEYFEFGLFMSRREYKTINRRLQRGRMASVKDGKYVANKAPYGYNRIRIENDKGWTLEINKEEADVVRLIFELYTVGEKQSDNTFNRLGTGFIAKRLNAMKVPPKRGKVWVVASIRDILINPVYIGMIRWNWRPQQKKMIDGQLHISRPRATDYVLCNGLHPPIISKETFDMAQELMRHNPARPIGEKNTVKNSLSGIVVCGDCGRHMVRRPHTKYPDMLICSEPTCNNVGAQLRVVEERILQSLKEWLGEYKISWDITSPPVERISQVSIKKKALQKEQHELDTLNKQISKTHDLLEQGIYTTDVFLERSRALSLRMDEVKEHIAILDKELKTEITREDSAVNIIPKVEKLLEVYHDLPSPKAKNDMLKDVLEKVVYTKKERSKKGNLDNFNITIYPKIPKYIT

SEQ ID NO: 3675 - protein, 526 aa, Unknown
  Description of Unknown: Integrase B3676 sequence
  SM00857,G3DSA:1.10.10.2600,IPR036162,PF13408,IPR025827, G3DSA:3.40.50.1390,PS51737,IPR006119,IPR038109,PF07508, IPR011109,SSF53041,PTHR30461,Coil,PS51736, cd00338,PF00239
MQYCLYLRKSRADSEAEALGEGETLARHEKALLDLAKKLNLNITAIYREIVSGETIAARPVMQQLLQEVEQGIWDGVLVMEVERLARGDTIDQGIVAQTFKFSDTKIITPIKTYNPNNEFDEEYFEFGLFMSRREYKTINRRLQRGRMASVKDGKYVANKAPYGYNRIRIENDKGWTLEINKEEADVVRLIFELYTVGEKQSDNTFNRLGTGFIAKRLNTMKVSPKRGKVWVVASIRDILINPVYIGMIRWNWRPQQKKMIDGQLHISRPRATDYMLCKGLHPPIISKETFDIAQDLMQHNPARPIGEKNTVKNSLSGIVVCGDCGRHMVRRPHTKYPDMLICSEPTCNNVGSQLRVVEERILQSLKEWLGEYKISWDITSPPVERISQVSIKKKALQKEQHELDTLNKQISKTHDLLEQGIYTTDVFLERSRALSLRMDEVKEHIAILDKELKTEITREDSAVNIIPKVEKLLEVYHDLPSPKAKNDMLKDVLEKVVYTKKERSKKGNLDNFNITIYPKIPKYIT

SEQ ID NO: 3676 - protein, 526 aa, Unknown
  Description of Unknown: Integrase B3677 sequence
  SM00857,G3DSA:1.10.10.2600,IPR036162,PF13408,PS51737, IPR025827,G3DSA:3.40.50.1390,IPR006119,IPR038109,PF07508, IPR011109,SSF53041,PTHR30461,Coil,PS51736, cd00338,PF00239
MQYCLYLRKSRADSEAEARGEGETLARHEKALLDLAKKLNLNITAIYREIVSGETIAARPVMQQLLQEVEQGIWDGVLVMEVERLARGDTIDQGIVAQTFKFSDTKIITPIKTYNPNNEFDEEYFEFGLFMSRREYKTINRRLQRGRMASVKDGKYVANKAPYGYNRIRIENDKGWTLEINKEEADVVRLIFELYTVGEKQSDSTFNRLGTGFIAKRLNAMKVPPKRGKVWVVASIRDILINPVYIGMIRWNWRPQQKKMIDGQLHISRPRATDYMLCKGLHPPIISKETFDIAQDLMRHNPARPIGEKNTVKNSLSGIVICGNCGRHMVRRPHTKYPDMLICSEPTCNNVGSQLRVVEERILQSLKEWLGEYKISWDITSPQIERISQVSIKKKALQKEQHELDTLNKQISKTHDLLEQGIYTTDVFLERSRALSLRMDEVKEHIAILDKELKTEITREDSAVNIIPKVEKLLEVYYDLPSPKAKNDMLKDVLEKVVYTKKERSKKGNLDNFDIAIYPKIPKYIT

SEQ ID NO: 3677 - protein, 526 aa, Unknown
  Description of Unknown: Integrase B3678 sequence
  SM00857,G3DSA:1.10.10.2600,IPR036162,PF13408,IPR025827, PS51737,G3DSA:3.40.50.1390,IPR006119,IPR038109,PF07508, IPR011109,SSF53041,PTHR30461,Coil,PS51736, cd00338,PF00239
MQYCLYLRKSRADSEAEARGEGETLARHEKALLDLAKKLNINITAIYREIVSGETIAARPVMQQLLQEVEQGIWDGVLVMEVERLARGDTIDQGIVAQTFKFSDTKIITPIKTYNPNNEFDEEYFEFGLFMSRREYKTINRRLQRGRMASVKDGKYVANKAPYGYNRIRIENDKGWTLEINKEEADVVRLIFELYTVGEKQSDNTFNRLGTGFIAKRLNAMKVPPKRGKVWVVASIRDILINPVYIGMIRWNWRPQQKKMIDGQLHISRPRATDYMLCKGLHPPIISKETFDIAQDLMRHNPARPIGEKNTVKNSLSGIVVCGDCGRHMVRRPHTKYPDMLICSEPTCNNVGSQLRVVEERILQSLKEWLGEYKISWDITSPPVERISQVSIKKKALQKEQHELDTLNKQISKTHDLLEQGIYTTDVFLERSRALSLRMDEVKEHIAILDKELKTEITREDSAVNIIPKVEKLLEVYHDLPSPKAKNDMLKDVLEKVVYTKKERSKKGNIDNFNITIYPKIPKYIT

SEQ ID NO: 3678 - protein, 526 aa, Unknown
  Description of Unknown: Integrase B3679 sequence
  SM00857,G3DSA:1.10.10.2600,IPR036162,PF13408,IPR025827, G3DSA:3.40.50.1390,PS51737,IPR006119,IPR038109,PF07508, IPR011109,SSF53041,PTHR30461,Coil,PS51736, cd00338,PF00239
MQYCLYLRKSRADSEAEALGEGETLARHEKALLDLAKKLNLNITAIYREIVSGETIAARPVMQQLLQEVEQGIWDGVLVMEVERLARGDTIDQGIVAQTFKFSDTKIITPIKTYNPNNEFDEEYFEFGLFMSRREYKTINRRLQRGRMASVKDGKYVANKAPYGYNRIRIENDKGWTLEINKEEADVVRLIFELYTVGEKQSDNTFNRLGTGFIAKRLNTMKVSPKRGKVWVVASIRDILINPVYIGMIRWNWRPQQKKMIDGQLHISRPRATDYVLCNGLHPPIISKETFDMAQELMRHNPARPIGEKNTVKNSLSGIVICGNCGRHMVRRPHTKYPDMLICSEPTCNNVGSQLRVVEERILQSLKEWLGEYKISWDITSPPVERISQVSIKKKALQKEQHELDTLNKQISKTHDLLEQGIYTTDVFLERSRALSLRMDEVKEHIAILDKELKTEITREDSAVNIIPKVEKLLEVYHDLPSPKAKNDMLKDVLEKVVYTKKERSKKGNLDNFNITIYPKIPKYIT

SEQ ID NO: 3679 - protein, 526 aa, Unknown
  Description of Unknown: Integrase B3680 sequence
  PTHR30461:SF3,SM00857,G3DSA:1.10.10.2600,IPR036162,PF13408, IPR025827,G3DSA:3.40.50.1390,PS51737,IPR006119,IPR038109, PF07508,IPR011109,SSF53041,PF00239,PTHR30461,PS5173 6,Coil,cd00338
MNTVIYARYSAGPRQTDQSIEGQLRVCTDFCKQRGLTVIDTYCDRHISGRTDERPEFQRLIADAKRKKFEAVVVYKTDRFARNKYDSAVYKRELKRNGIQIFYAAEAIPDGPEGIILESLMEGLAEYYSAELAQKIKRGMHESALKCQSTGSGRPLGYRVDEQKRFQIDPESAQTVQTIFEQYIKGESNAAICELLNSRGLRTAQGKPFNKNSINRIIKNRKYIGEYRYHDIVVEGGMPAIISKDTFNLAQAEMERRRTRKAPKSPKAEYLLAGRLFCGHCKGPMQGVSGTGKSGNKWYYYYCGNTRGKNKTCDKKQVSRDRLERAVVDFTVRYILQEDVLEELARKVHAAQERQNDTASEIAFYEKKLADNKKSIANVLRAIESGAATQTLPARLQELENEQAVILGELSFLKGKHLAFTEDQILFALMKRLEPYPGESEQDYRRRIISDFVSEVYLYDDRLLIYFNISSEDGKLKSADLSNIEGSEFDEGLVSSTNLIAGRTPEVTIVVLPYGFVLAAQIKDRL

SEQ ID NO: 3680 - protein, 526 aa, Unknown
  Description of Unknown: Integrase B3681 sequence
  PTHR30461:SF3,SM00857,G3DSA:1.10.10.2600,IPR036162,PS51737, G3DSA:3.40.50.1390,IPR006119,IPR038109,PF07508,IPR011109, SSF53041,PTHR30461,Coil,PS51736,cd00338, PF00239
MINMVSFDNIIIYLRKSRSDDPAQTVEEVLAKHEHILQDYCLKEYNKVIPEKRIYREVVSGETIQDRPVMQKLLKELETDNISGVLIVEPQRLSRGDLQDCGQIINSFRYTNTAVITPTKTYNLSDEYDRKFFEMELTRGNDYLEYTKKILNRGRVASVKQGNYICPVRPYGYKKIVKGTGKDKCHTLEIIPEEAEAIKLMYHLYLDENMGFTNIARTLDSLHIKPLKSNNWSAATIRDMIDNPIYIGKVVWNNRKVVKKWENEQIIKVRPRNKGDDVICVDGKHEAIIDEETFNAARQKRGLTPKVRKFKELRNPLAGILFCSTCGHSMSMKKYVDKRSHTGKVTTIMLCNKQAICHTKSAQYEQIVAKIKESLADAIADFEIKMKEQENNNIDIHKQRITSLKDELNKLYNKDVRQKDAYEDGVYTKEEYIERNAKLQSQILTIKSEIEDEQNNTPVRIDYQNKITTFTECLTSLDDDSISAADKNSLLKNCIDKIIYHNDMPSLPGIGRYIENSFRLEIFLKM

SEQ ID NO: 3681 - protein, 526 aa, Unknown
  Description of Unknown: Integrase B3682 sequence
  PTHR30461:SF3,SM00857,G3DSA:1.10.10.2600,IPR036162,PF13408, IPR025827,PS51737,G3DSA:3.40.50.1390,IPR006119,IPR038109, PF07508,SSF53041,IPR011109,PTHR30461,Coil, PS51736,cd00338,PF00239
MNTVIYARYSAGPRQTDQSIEGQLRVCTDFCKQRGLTVIDTYCDRHISGRTDERPEFQRLITDAKRKKFEAVVVYKTDRFARNKYDSAVYKRELKRNGIQIFYAAEAIPDGPEGIILESLMEGLAEYYSAELAQKIKRGMHESALKCQSTGSGRPLGYRVDEQKHFQIDPESAQTVQTIFEQYIKGESNAVICELLNSRGLRTAQGKPFNKNSINRIIKNRKYIGEYRYHDIVVEGGMPAIISKDTFNLAQAEMERRRTRKAPKSPKAEYLLAGRLFCGHCKGPMQGVSGTGKSGNKWYYYYCGNTRGKNKTCDKKQVSRDRLERAVVDFTVRYILQEEVLEELARKVHAAQERQNDTASEIAFYEKKLADNKKSIANVLRAIESGTATQTLPARLQELENEQAVILGEISFLKGKRLAFTEDQIFFALMKHLEPYPGESEQDYRRRIISDFVSEVYLYDGRLLIYFNISSEDGKLKSADLSNIEGGEFDEGLVGSTNLIAGRTPEVTIVVLPYGFVLATQIKDRL

SEQ ID NO: 3682 - protein, 526 aa, Unknown
  Description of Unknown: Integrase B3683 sequence
  SM00857,G3DSA:1.10.10.2600,IPR036162,PF13408,IPR025827, G3DSA:3.40.50.1390,PS51737,IPR006119,IPR038109,PF07508, IPR011109,SSF53041,PTHR30461,Coil,PS51736, cd00338,PF00239
MNTTNAVIYARYSSDKQTEQSIEGQLRYCTEYAKRCGYTIVDSYIDRAASGTTDRRPQFQQMIEDSKKGQFNFILVWKLDRFARNRYDSAIYKTKLKKNGVRVVSATETLGNGDESIILEAMLEAMAEVYSRQISQNASRGMRESALKGQTTGGNIPLGYKIDNKFLVEDTKTSAVVKFIFNQFAAGKSQTEICKMCNEKGYRTKNGKLFYTNCLPSILRNKMYIGDYTYKGEIERSCPALIDIDTFKRCQARLEQSRRTRGQKKSEDIDFLLTGKLFCGMCGTTMVGDSGTSRNGSKHYYYTCRNKRKRKGCKKKSEKKDFIEWYIVEQTVKYVLTAERRHYIAEKIVLQYNSEFSAEQVAELERRLVNIDIEINNCAEALINARSAAVIDKINNKADCLQLQKEDTEIELAKLKIACDISLTVEEVELWLQSFCGGDLMDLDFRKKIIDVFINSIYLYDDKVVIYYNVKDSRQISYMEMLADLEQLDDSLKCSDSSVQGEPKLNQSELLFVFVDGVFGVVIPRV

SEQ ID NO: 3683 - protein, 526 aa, Unknown
  Description of Unknown: Integrase B3684 sequence
  PTHR30461:SF3,SM00857,G3DSA:1.10.10.2600,IPR036162,PF13408, PS51737,G3DSA:3.40.50.1390,IPR025827,IPR006119,IPR038109, PF07508,IPR011109,SSF53041,PTHR30461,Coil, PS51736,cd00338,PF00239
MDEYCLYLRKSRIDLEAEANGQGDTLARHRAALLKLAQKRGFNITGCYEEVRSGESIAARPEMQRLLNDVEDGRWAGVLVMEVERLARGNTTDQGIVADTFKYSDTKIVTPNKIYDPGDEFDEEYFEFGLFMSRREYKTINRRLQRGRRASLSEGKYIAGKATYGYERYKLSGEKGYSLRIIPEQAEIVRQIYNWYVNGELLPDGPLRPLGSYTIAKRLDARGIPSPTGGKWPPCTVKDILTNPTYIGKLRWSYRPTVKRMVDGELVKTRPVDRSVHLSDGRHEPILDEVLWHRAQLMLKNRSHAPVPKSTNIRNPLAGLLICSKCGRSMERRKFKHGRDTVACPNKDCTCKSSVLEEVEAGMLDSLRIWLSDYKVKLAQSQENISHTGPTAEQEITSLQRTLGTLQAQMENLYNLVEQGVYSTDLFLQRSQALTARMAEVNQQIESTQAALTASRRIARNRFEIIPRIERVLALYPTLTDPREKNTILKEVLEKILYTKTTGSRWEASDMNLYVFPRVETDGEQL

SEQ ID NO: 3684 - protein, 526 aa, Unknown
  Description of Unknown: Integrase B3685 sequence
  cd00338,SM00857,G3DSA:1.10.10.2600,IPR036162,PF13408, IPR025827,G3DSA:3.40.50.1390,PS51737,IPR006119,IPR038109, PF07508,IPR011109,SSF53041,PTHR30461,PS51736, Coil,PF00239
MQYCLYLRKSRADSEAEARGEGETLARHEKALLDLAKKLNINITAIYREIVSGETIAARPVMQQLLQEVEQGIWDGVLVMEVERLARGDTIDQGIVAQTFKFSDTKIITPIKTYNPNNEFDEEYFEFGLFMSRREYKTINRRLQRGRMASVKDGKYVANKAPYGYNRIRIENDKGWTLEINKEEADVVRLIFELYTVGEKQSDNTFNRLGTGFIAKRLNTMKVSPKRGKVWVVASIRDILINPVYIGMIRWNWRPQQKKMIDGQLHISRPRATDYMLCKGLHPPIISKETFDIAQDLMRHNPARPIGEKNTVKNSLSGIVVCGDCGRHMVRRPHTKYPDMLICSEPTCNNVGSQLRVVEERILQSLKEWLGEYKISWDITSPPVERISQVSIKKKALQKEQHELDTLNKQISKTYDLLEQGIYTTDVFLERSRALSLRIDEVKEHIALLDKELKTEITREDNAVNIIPKVEKLLEVYHDLPSPKAKNDMLKDVLEKVVYTKKERSKKGNLDNFNITIYPKIPKYIT

SEQ ID NO: 3685 - protein, 526 aa, Unknown
  Description of Unknown: Integrase B3686 sequence
  PTHR30461:SF3,SM00857,G3DSA:1.10.10.2600,IPR036162,PS51737, G3DSA:3.40.50.1390,IPR006119,IPR038109,PF07508,IPR011109, SSF53041,PF00239,PTHR30461,PS51736,Coil, cd00338
MTATDEMIEKACNKYKKTRYAMYLRKSRADLELEAMGEEETLARHKAMLFSLAAKHEIHPDQITIYHELVSGDSIDERPEMQRLLADVYAKTYAGVLVVEVERLARGNTKDQGEVADAFQASNTHIITPAKVYDPNNEFDQEYFEFGLFMSRREYKTIKRRLEAGKKQSVMEGNYILPQRVFGYDILRTTKKDRTLIIRPEEAKYVKMIFDWHIKEKRATGWMARQMTLMGIPTTKGRPEWNRGTIRDMLANPIYAGKVTWGKRRTVKEYDPELGKLVKVIKEDGQMEIYEGKHEGIISEEEFAEAQRVTETMKNPSAKVSTGLKNPFAGLMECCTCGRNIIAMTYNDGRRARLSHARDTICTKKSLPIDEVSEVFISTLQAYIEDFRTKMEIDDNKDEMEAFKARLNAMETELEKLERKRKNLFADYEDGIYTRDEFLERKLHYNEKIDNTKKQIQEARKSTPEPVDYSEQISNLHAMIDCMKDDGLSVKQKNDFLKQFISKITYDSISYGQRRGGKAILEVFLK

SEQ ID NO: 3686 - protein, 526 aa, Unknown
  Description of Unknown: Integrase B3687 sequence
  PTHR30461:SF3,IPR036162,PS51737,IPR011109,PTHR30461, PF00239,G3DSA:1.10.10.2600,IPR006119,SSF53041,cd00338, SM00857,IPR025827,IPR038109,PS51736,mobidb-lite, PF13408,G3DSA:3.40.50.1390,PF07508,Coil
MHGAYILARYSTDRQNEDSIEVQVSACRKWCDERSLPVLDVFADEATSGMKATRPEYARMMWQLEHGGADTVVIYDQSRMFRKLTAWFDFRDQLARLGVDVVSVTQPMIGGDLRDPANFLTEGSMALFNQMWVLQTRQKVVAKMRYMAEQGLHTGGTPPLGYKVVDGRLVIDAAEAETVRLIFGLYASGMTYREIIRRLNAEERRTKRGGNFGVNSLHDLLKNPKYVGDLVYGKVAKRPDGSRNSHAVAEDAIVVKDVLPAIVDRETWEKVQLKMQENKRSAAGRPASARAYPLKGKVFCRECKSAMLVTAAKRRGKRYYYYTCGAKHRKGLCDNSQIPVSALEGIVANAVRQRLSEPESVGGLIRILRDERAKLSEAAVQRLRAMQKRDREIAKQLDAAVNAVLGGLHSPILTAKVNALEAERAKISHDMQQLRAQVSGAEIDEPRLRELLALAMQDDAAVLSIVVRVEVGKDEIAVWTLLDADPNGDFDFAEDGVPITPSEVAPSYNNSGCPRWSTKKEASFVR

SEQ ID NO: 3687 - protein, 526 aa, Unknown
  Description of Unknown: Integrase B3688 sequence
  PTHR30461:SF3,SM00857,G3DSA:1.10.10.2600,IPR036162,PS51737, G3DSA:3.40.50.1390,IPR006119,IPR038109,PF07508,SSF53041, IPR011109,PF00239,PTHR30461,PS51736,Coil, cd00338
MINMVSFDNIIIYLRKSRSDDPAQTVEEVLAKHERILQDYCIKEYGKVIPEKRIYREVVSGETIQDRSVMQKLLKELETNNIYGVLIVEPQRLSRGDLQDCGQIINSFRYTNTAVITPGKTYNLQDEYDRKFFEMELTRGNDYLEYTKKILNRGRVASVKQGNYICSVRPYGYKKVVIGTGKDKCHTLEIIPEEAEAIKLMYHLYLDENMGFTNIARTLDSMHIKPLKSSNWSAATIRDMIDNPIYIGKIVWNNRKVVKKWENEQIIKVRPRNKGDDVICVDGKHEAIIDEETFNAARQKRGLTPKVRKFKELRNPLAGILFCSTCGHSMSMKKYVDKRSHTGKVTTIMLCNKQAVCHTKSAQYEQIVAKIKESLADAIANFEIKMKEQENNNIDIHKQRITSLKDELNRLYNKDVRQKDAFEDGIYTKEEYIERNSKLQSQILNIKAEIENEKNNTPVIIDYQNKITTFTECLTSLDDDSISAADKNSLLKNCIDKIIYHNDMPSLPGIGRYIENSFRLEIFLKM

SEQ ID NO: 3688 - protein, 526 aa, Unknown
  Description of Unknown: Integrase B3689 sequence
  PTHR30461:SF3,SM00857,G3DSA:1.10.10.2600,IPR036162,PF13408, IPR025827,G3DSA:3.40.50.1390,PS51737,IPR006119,IPR038109, PF07508,IPR011109,SSF53041,PTHR30461,Coil, PS51736,cd00338,PF00239
MNAVIYARFSSHSQREQSIEGQLRDCYEYAKRYDINIVGEYIDRAISGMTDDRPDFQRMIADAPKKQFERIIVWKLDRFARNRYDSALYKHKLKQYGIRVISAMENVGEGDESILLEALLEASAEYYSLDLKKKILRGQRETIAKGRWCGGPIPYGYKAVDGKLVADEKTAPIIRYVFEQYAQGVPMKEIIDELKRRGVRSSRGGELTYTTFSRALTNPVYIGNFMYKGELVPGVADALIDEDTYNKVQIIVKANAHAPAANKAKVEYLLQGKAFCGHCGSHMVGESGKSRNGDVYYYYSCAARKKAHKCRKKNEKKDFIEWYVVEQTLQYVLTPARMRDIAKAVVAEYDKEFAGSRVEEYEKAIKQYERELDKLVDALVDAPKVAHKRIYEKMETLETQKASMENELVKLRIASEIRFTEEEVRAWLRRFCTGDLFDPEFRRNIIDTFINCIYLYDDRIIIFYNIKGGKQVSFVDLAESLDNESESSGSDLNANAPLHRRNPNLIPVGNGFGFLYFVKKAENMQG

SEQ ID NO: 3689 - protein, 526 aa, Unknown
  Description of Unknown: Integrase B3690 sequence
  PTHR30461:SF3,cd00338,SM00857,G3DSA:1.10.10.2600,IPR036162, PF13408,PS51737,G3DSA:3.40.50.1390,IPR025827,IPR006119, IPR038109,PF07508,IPR011109,SSF53041,PTHR30461, PS51736,Coil,PF00239
MYEDIKTACLYVRFSSHNQTEQSIEGQTRVCRDFCKRHNIRIVEIYADRATSASKDIEKRVQFLKMIKDSEKGLFDAVIVYKLDRFARSRYDSATYKYRLKRNGVQLISATENISNDPEGIILESVLEGMAEFYSAELSQKINRGMRESAYKHNSIGGAVPLGYKIEDKKLVIDPKTAPIVKEAFEKYADGETVAEICRQFNARGYKTSKGTAFGKSSFTKIFRNERYIGVYTFHDYRAEDAIPAIIDKDLWDRVQLRVGKIKNAPARNKAKVVYLLSGKLFCGHCGSKMNGNCNAGNYCYYQCYGKKNGNVDCKKKNIRKEFIERLVAQDALSLLTDEYIEQIATIACEKNQNEIELDSALPTIRDRIHQVDLSLNNLLKAIESGSAPDMLVKRMGELEKEKKDLQAQAKKESEDIIELDKAQVIYWLEQFRGGSIEDEEFCRMLIDLFVNSVTVWDEDDDTYKVTVAYNLTSLPTKTYRLNKGGTLSDFASNAPQYQSPHRSAHWYLRKQSAALPEFLFHSDGQ

SEQ ID NO: 3690 - protein, 526 aa, Unknown
  Description of Unknown: Integrase B3691 sequence
  PTHR30461:SF3,SM00857,G3DSA:1.10.10.2600,IPR036162,PF13408, IPR025827,G3DSA:3.40.50.1390,PS51737,IPR006119,IPR038109, PF07508,IPR011109,SSF53041,PTHR30461,Coil, PS51736,cd00338,PF00239
MPKVTMIPATVNSLTHLPKASVQKRRVAGYARVSTDSDEQFTSYEAQVDYYTRYIQSKPEWDFVRVYTDEGISGTNTKRREGFKEMIADALAGKIDLIVTKSVSRFARNTVDSLVTIRKLKENGVECYFEKEGIYTFDGKGELLITIMSSLAQEESRSISENITWGQRKSFADGKIHLAYKHFLGYKKGEDGRPAIVEEEAVVVRLIYRLFLDGKTQAGICRYLEDLEIPSPSGKAKWSKTTVTSILTNEKYKGDALLQKSFTVDFLQKKTKLNEGEVPQYYVEGSHPAIIEPDEWNHVQAEFARRKALGNAYSGKSVLSAKLVCEDCGGFFGSKVWHSTDRYRRTVWQCNNKFKGGERCLTPTVDTETVQQLFIKAYNQMMGNRKQIIEDCELMRKKLTDFKSLDADIERHLEETQIVAELVKAAVKDNAVTAQSQEAYLKKYESLTKRYETAAAELARLQNLRTLRSQKDKAVALYIRTLKKQPTVLSEWNDTLWTVMVEKAIVHRNSEITFAFYNGTKVKVRQ

SEQ ID NO: 3691 - protein, 526 aa, Unknown
  Description of Unknown: Integrase B3692 sequence
  PTHR30461:SF3,SM00857,G3DSA:1.10.10.2600,IPR036162,PF13408, PS51737,IPR025827,G3DSA:3.40.50.1390,IPR006119,IPR038109, PF07508,IPR011109,SSF53041,PTHR30461,Coil, PS51736,cd00338,PF00239
MSEKSAVIYARYSSHNQREESIEGQIRECKRYARDNDITIIAEYADRATSGRTDNRAEFQKMIRDAEKGSFSLVIVYKLDRFARNRYDSAMYKAKLKKCGVKVISATEGLTDTPESIILEAMLEGMAEYYSANLSQNVKRGMVENAMKCLATGGGRCLGYYTGSDKRYYIDEAGASTVRMIYEMYDQGHTYADIVNALNEQGRKTLRGSPFNKNSLGKILHNRRYIGDYVWDEIVIEGGMPQIIDRDLWERVQKKLSRKEKASARARGEYDYILSGKLFCGHCGKPMIGDSGTSRNGTKHYYYTCSTKKHGGGCSKQSVRAAAIEDEVIRTTIQTVLTDDMLEHIADKVMEYQSRDTDSAILIEQYKNQLKETETAIAGILRAVEAGMFSPSMKDRMDELECQKAELNADIEREEINQQKVSRDEVLFFLSQFKGGDPDDPEYKQRLVDIFVNSVWLYDDKLVLTYNYSGEDNKVTLDLVDKALSGAASGCSDSACQAPPIETKANTMIICSGVFALVKTNAGSTQ

SEQ ID NO: 3692 - protein, 526 aa, Unknown
  Description of Unknown: Integrase B3693 sequence
  PTHR30461:SF3,SM00857,G3DSA:1.10.10.2600,IPR036162,PF13408, PS51737,G3DSA:3.40.50.1390,IPR025827,IPR006119,IPR038109, PF07508,IPR011109,SSF53041,PTHR30461,Coil, PS51736,cd00338,PF00239
MDEYCLYLRKSRIDLEAEANGQGDTLARHRAALLKLAQKRGFNITGCYEEVRSGESIAARPEMQRLLNDVEDGRWAGVLVMEVERLARGNTTDQGIVADTFKYSDTKIVTPNKIYDPGDEFDEEYFEFGLFMSRREYKTINRRLQRGRRASLSEGKYIAGKATYGYERYKLSGEKGYSLRIIPEQAEIVRQIYNWYVNGELLPDGTLRPLGSYTIAKRLDARGIPSPTGGKWPPCTVKDILTNPTYIGKLRWSYRPTVKRMVDGELVKTRPVDRSVHLSDGRHEPILDEVLWHRAQLMLKNRSHAPVPKSTNIRNPLAGLLICSKCGRSMERRKFKHGRDTVACPNKDCTCKSSVLEEVEAGMLDSLRIWLSDYKVKLAQSQETISHTGPTAEQEITSLQRTLGTLQAQMENLYNLVEQGVYSTDLFLQRSQALTARMAEVNQQIESTQAALTASRRIARNRFEIIPRIERVLALYPTLTDPREKNTILKEVLEKILYTKTTGSRWEASDMNLYVFPRVETDGEQL

SEQ ID NO: 3693 - protein, 526 aa, Unknown
  Description of Unknown: Integrase B3694 sequence
  PTHR30461:SF3,cd00338,SM00857,G3DSA:1.10.10.2600,IPR036162, PF13408,PS51737,G3DSA:3.40.50.1390,IPR025827,IPR006119, IPR038109,PF07508,IPR011109,SSF53041,PTHR30461, PS51736,Coil,PF00239
MATVLKIPAKFHPITHLPEIKVQKRRVAAYARVSTDSEEQQTSYAAQVDCYTKYIQERADWEFVAVYTDEGISALNTKHRDGFNRMVADALDGKIDLIVTKSVSRFARNTVDSLTTVRKLKEKGVEVFFEKENIYTLDSKGELLITIMSSLAQEESRSISENVTWGQRKRMADGKVSLPYKHFLGYRKGADGLPEIVPEEAEIVRNIYRWFMEGKTPTGIARTLTEQGVPTPAGKEQWCSSTVKSILINEKYKGSALLQKRFTVDFLTKKSKVNEGEVPQYYIEESHPAIIVPEEFELVQAELLRRQNLRRQYNGKSVFAARLVCGDCGNFFGAKVWHSNSKYRQVIWQCNHKFQGVCKCQTPHLQESVIQQRFQAAVQELLQKRKAILENCQVMLELLTDCTDLEYQLQELETQKMRISEQVQGYVRENSEIVQDQEKYEERYQALVGQYEPLQKQETALQEQRAERLARREQIQGFQRALSGQNGMLPEFDTQLWLAAVEKAVVHRDGKIVFVLKDGTELVQKI

SEQ ID NO: 3694 - protein, 526 aa, Unknown
  Description of Unknown: Integrase B3695 sequence
  PTHR30461:SF3,SM00857,G3DSA:1.10.10.2600,IPR036162,PS51736, PS51737,G3DSA:3.40.50.1390,PF13408,IPR025827,IPR006119, IPR038109,PF07508,IPR011109,SSF53041,PTHR30461, mobidb-lite,cd00338,PF00239
MAKRSAKKNEYQSAEQVGVIYARYSSHNQKEESIEQQISECSDFAAKNGIRIVGIYADKAVSGRSDRRPNFQRMMRDAEKRQFQIVIAYKSNRIARNMLNALQYEARLDLLGIKTLYAKEEFGNTAAGRFALRTMMNVNQFYSENMGEDIKRGMVDNANECKVNGMLPLGYVKSKEGKYAIAPDEAAVVREIFDSVLKDVPVAEIARSLNQRGIHTKLGREWNKNSFHIMLKNDNYIGVYRHSGVVVEDGIPPILEKEVFTAVQEKLANKKKTAGRRSANGEYLLTGKLFCGYCGSYMIGVSGTGENGTVHNYYQCQKRHAEGRCEKKNVRRDFIEKLIARLTQDYILQDDTIEWIADSTMSFQAMARRESGVAQLERDLADNRKVAKNIMAAIEQGIITETTKARLLEVEGTIHDLERSLSIAKAASQPIERERVVFSLEQMREGNVGSKDHQKKLIDTFVKSVTLWDDRIQIDYYHTPGKHKFSYSLEELTSKAENESNASDVRTDSLELHHQAAPKKMPLRKA

SEQ ID NO: 3695 - protein, 526 aa, Unknown
  Description of Unknown: Integrase B3696 sequence
  SM00857,G3DSA:1.10.10.2600,IPR036162,PF13408,IPR025827, G3DSA:3.40.50.1390,PS51737,IPR006119,IPR038109,PF07508, IPR011109,SSF53041,PTHR30461,Coil,PS51736, cd00338,PF00239
MQYCLYLRKSRADSEAEARGEGETLARHEKALLDLAKKLNLNITAIYREIVSGETIAARPVMQQLLQEVEQGIWDGVLVMEVERLARGDTIDQGIVAQTFKFSDTKIITPIKTYNPNNEFDEEYFEFGLFMSRREYKTINRRLQRGRMASVKDGKYVANKAPYGYNRIRIENDKGWTLEINKEEADVVRLIFELYTVGEKQSDNTFNRLGTGFIAKRLNTMKVSPKRGKVWVVASIRDILINPVYIGMIRWNWRPQQKKMIDGQLHISRPRATDYMLCKGLHPPIISKETFDIAQDLMRHNPARPIGEKNTVKNSLSGIVVCGDCGRHMVRRPHTKYPDMLICSEPTCNNVGSQLRVVEERILQSLKEWLGEYKISWDITSPPVERISQVSIKKKALQKEQHELDTLNKQISKTHDLLEQGIYTTDVFLERSRALSLRMDEVKEHIAILDKELKIEITREDSTVNIIPKVEKLLEVYHDLPSPKAKNDMLKDVLEKVVYTKKERSKKGNLDNFNITIYPKIPKYIT

SEQ ID NO: 3696 - protein, 526 aa, Unknown
  Description of Unknown: Integrase B3697 sequence
  PTHR30461:SF3,SM00857,G3DSA:1.10.10.2600,IPR036162,PF13408, PS51737,IPR025827,G3DSA:3.40.50.1390,IPR006119,IPR038109, PF07508,IPR011109,SSF53041,PF00239,PTHR30461, PS51736,Coil,cd00338
MNTVIYARYSAGPRQTDQSIEGQLRVCTDFCKQRGLTVIDTYCDRHISGRTDERPEFQRLIADAKRKKFEAVVVYKTDRFARNKYDSAVYKRELKRNGIQIFYAAEAIPDGPEGIILESLMEGLAEYYSAELAQKIKRGMHESALKCQSTGSGRPLGYRVDEQKHFQIDPEAAQTVQTIFEQYIKGESNAAICELLNSRGLRTAQGKPFNKNSINRIIKNRKYIGEYRYHDIVVEGGMPAIISKDTFNLAQAEMERRRTRKAPKSPKAEYLLAGRLFCGHCKGPMQGVSGTGKSGNKWYYYYCGNTRGKNKTCDKKQVSRDRLERAVVDFTVRYILQEDVLEELARKVHAAQERQNDTTSEIVFYEKKLADNKKSIANVLRAIESGAATQTLPARLQELENEQAVILGELSFLKGKRLAFTEDQILFALMKHLEPYPGEPEQDYRRRIISDFVSEVYLYDDRLLIYFNISSEDGKLKSADLSNIEGGEFDEGLVGSTNLIAGRTPEVTIVVLPYGFVLAAQIKDRL

SEQ ID NO: 3697 - protein, 526 aa, Unknown
  Description of Unknown: Integrase B3698 sequence
  PTHR30461:SF3,SM00857,G3DSA:1.10.10.2600,IPR036162,PF13408, PS51737,G3DSA:3.40.50.1390,IPR025827,IPR006119,IPR038109, PF07508,SSF53041,IPR011109,PTHR30461,Coil, PS51736,cd00338,PF00239
MQEMNISINDLIMYLRKSRSDDPYMTVEEVLARHEQQLQDYALSSFGAVLPEEKIFREVVSGETISDRPVMQNVMKYLETGLIKGVLVIEPQRLSRGDLEDCGRIINTFRYTDTLVITPPKIYNLSDEYDRKFFEMELTRGNDYLEYTKKILNRGRIASVKQGNFIGTIPPYGYRKVMIGSGKNTRHTLEIIPEQAEAVRLMFHLFVDEGYGFTRIARYLDRVGIRPLHSECWNPASLKDILENPVYIGKIRWNWRKTQKKMVNGQIIKTRPKTKDSSAWIYVDGIHEPIIDEKTYQAALDRRTDNPRIRKGTELKNPYAGLLFCGTCGRAMNYKRTHNKKYGSICENMLCSNQANCHTHSVKFSTFQERVITSLKETIADFEIKLEEDNGSSLRFHMAQVNRLRSELDKLKEKDERQKNAYENGIYTMEEFAPRNAKLQEQICQMQQKIRNMEHAVPEAIDYKEKIMRFRDCLDALQDPNISAEEKNNFLKSCIDKIMYYNDLESRSGIGRYIQNEFRLDIFLRL

SEQ ID NO: 3698 - protein, 526 aa, Unknown
  Description of Unknown: Integrase B3699 sequence
  SM00857,G3DSA:1.10.10.2600,IPR036162,PF13408,IPR025827, G3DSA:3.40.50.1390,PS51737,IPR006119,IPR038109,PF07508, IPR011109,SSF53041,PTHR30461,Coil,PS51736, cd00338,PF00239
MQYCLYLRKSRADSEAEARGEGETLARHEKALLDLAKKLNLNITAIYREIVSGETIAARPVMQQLLQEVEQGIWDGVLVMEVERLARGDTIDQGIVAQTFKFSDTKIITPIKTYNPNNEFDEEYFEFGLFMSRREYKTINRRLQRGRMASVKDGKYVANKAPYGYNRIRIENDKGWTLEINKEEADVVRLIFELYTVGEKQSDSTFNRLGTGFIAKRLNAMKVPPKRGKVWVVASIRDILINPVYIGMIRWNWRPQQKKMIDGQLHISRPRATDYLLCKGLHPPIISKETFNIAQDLMRHNPARPIGEKNTVKNSLSGIVVCGNCGRHMVRRPHTKYPDMLICSEPTCNNVGSQLRVVEERILQSLKEWLGEYKISWDITSPPVERISQVSIKKKALQKEQHELDTLNKQISKTHDLLEQGIYTTDVFLERSRALSLRMDEVKEHIAILDKELKTEITREDSAVNIIPKVEKLLEVYHDLPSPKAKNDMLKDVLEKVVYTKKERSKKGNLDNFNIAIYPKIPKYIT

SEQ ID NO: 3699 - protein, 526 aa, Unknown
  Description of Unknown: Integrase B3700 sequence
  SM00857,G3DSA:1.10.10.2600,IPR036162,PF13408,PS51737, IPR025827,G3DSA:3.40.50.1390,IPR006119,IPR038109,PF07508, SSF53041,IPR011109,PTHR30461,Coil,PS51736, cd00338,PF00239
MQYCLYLRKSRADSEAEARGEGETLARHEKALLDLAKKLNLNITAIYREIVSGETIAARPVMQQLLQEVEQGIWDGVLVMEVERLARGDTIDQGIVAQTFKFSDTKIITPIKTYNPNNEFDEEYFEFGLFMSRREYKTINRRLQRGRMASVKDGKYVANKAPYGYNRIRIENDKGWTLEINKEEADVVRLIFELYTVGEKQSDNTFNRLGTGFIAKRLNAMKVPPKRGKVWVVASIRDILINPVYIGMIRWNWRPQQKKMIDGQLHISRPRATDYLLCKGLHPPIISKETFNIAQDLMRHNPARPIGEKNTVKNSLSGIVVCGNCGRHMVRRPHTKYPDMLICSEPTCNNVGSQLRVVEERILQSLKEWLGEYKISWDITSPPVERISQVSIKKKALQKEQHELDTLNKQISKTHDLLEQGIYTTDVFLERSRALSLRMDEVKEHIAILDKELKTEITREDSAVNIIPKVEKLLEVYHDLPSPKAKNDMLKDVLEKVVYTKKERSKKGNLDNFNIAIYPKIPKYIT

SEQ ID NO: 3700 - protein, 526 aa, Unknown
  Description of Unknown: Integrase B3701 sequence
  PTHR30461:SF3,SM00857,G3DSA:1.10.10.2600,IPR036162,PF13408, IPR025827,G3DSA:3.40.50.1390,PS51737,IPR006119,IPR038109, PF07508,IPR011109,SSF53041,PTHR30461,Coil, PS51736,cd00338,PF00239
MNTVIYARYSAGPRQTDQSIEGQLRVCTDFCKQRGLTVIDTYCDRHISGRTDERPEFQRLITDAKRKKFEAVVVYKTDRFARNKYDSAVYKRELKRNGIQIFYAAEAIPDGPEGIILESLMEGLAEYYSAELAQKIKRGMHESALKCQSTGSGRPLGYRVDEQKHFQIDPESAQTVQTIFEQYIKGESNAAICELLNSRGLRTAQGKPFNKNSINRIIKNRKYIGEYRYHDIVVEGGMPAIISKDTFNLAQAEMERRRTRKAPKSPKAEYLLAGRLFCGHCKGPMQGVSGTGKSGNKWYYYYCGNTRGENKTCDKKQVSRDRLERAVVDFTVRYILQEEVLEELARKVHAAQERQNDTASEIAFYEKKLADNKKSIANVLRAIESGAMTQTLPARLQELENEQAVILGEISFLKGKRLAFTEDQIFFALMKHLEPYPGESEQDYRRRIISDFVSEVYLYDDRLLIYFNISSEDGKLKSTDLSNIEGGEFDEGLVSSTNLIAGRTPEVTIVVLPYGFVLATQIKDRL

SEQ ID NO: 3701 - protein, 526 aa, Unknown
  Description of Unknown: Integrase B3702 sequence
  SM00857,G3DSA:1.10.10.2600,IPR036162,PF13408,PS51737, G3DSA:3.40.50.1390,IPR025827,IPR006119,IPR038109,PF07508, IPR011109,SSF53041,PTHR30461,Coil,PS51736, cd00338,PF00239
MAKPEVSELAVVYARYSSHSQGEQSIEGQLSNARDYAAAHGYTIVHEYVDRAKSGRTDNRAEFQQMLKDTAKRQFSVIILWKVDRFGRNREEIAINKMKCRKNGVRVEYVAETIPDSPEGVILESVLEGFAEYYSLQLSQNIRRGRAESAEKCQSLGGNRPLGYKTGPDKKFVIDENTAPTVKMIFTMYADGKTVTEIVDKLNEMGLRTLRGGPFTKNSLHSILKNKKYIGVYEYQGREIKDGVPRIIEDDVFSKVQEMLKINKRAPAKTWSRADYILTDKLFCGKCGALMFGESGTSKTGVKHNYYICSNKKRFRSCDKKAVRQADIEDTVLNATHELLQDDELLDYIVDRTWEYYLAQDNSQEELRNLQRQLAQTDTAISNLIRAIEAGILTEETKKRMDELTQQKADLKASIADREIARGFHLQKSHIAFYLRSLRDADWSDKEAQKRLIQTFVNAVFVYDDHITLTYNFSGDKSTITLHDMQRFEDGEEFGCRASRSTIGRISEPYIAWGTVFVQTKRHSLP

SEQ ID NO: 3702 - protein, 526 aa, Unknown
  Description of Unknown: Integrase B3703 sequence
  PTHR30461:SF3,SM00857,G3DSA:1.10.10.2600,IPR036162,PF13408, IPR025827,G3DSA:3.40.50.1390,PS51737,IPR006119,IPR038109, PF07508,SSF53041,IPR011109,PTHR30461,Coil, PS51736,cd00338,PF00239
MNTVIYARYSAGPRQTDQSIEGQLRVCTDFCKQRGLTVIDTYCDRHISGRTDERPEFQRLIADAKRKKFEAVVVYKTDRFARNKFVSAVYKRELKRNGIQIFYAAEAIPDGPEGIILESLMEGLAEYYSAELAQKIKRGMHESALKCQSTGSGRPLGYRVDEQKRFQIDPESAQTVQTIFEQYIKGESNAAICELLNSRGLRTAQGKPFNKNSINRIIKNRKYIGEYRYHDIVVEGGMPAIISKDTFNLAQAEMERRRTRKAPKSPKAEYILAGRLFCGHCKGPMQGVSGTGKSGNKWYYYYCGNTRGKNKTCDKKQVSRDRFERAVVDFTVRYILQEEVLEELARKVHAAQERQNDTASEIAFYEKKLADNKKSIANVLRAIESGAATQTLPARLQELENEQAVILGELNFLKGKRLAFTEDQILFALMKHLEPYPGESEQDYRRRIISDFVSEVYLYDDRLLIYFNISSEDGKLKSADLSNIEGGEFDEGLISSTNLIASRTPEVTIVVLPYGFVLATQIKDRL

SEQ ID NO: 3703 - protein, 526 aa, Unknown
  Description of Unknown: Integrase B3704 sequence
  PTHR30461:SF3,cd00338,SM00857,G3DSA:1.10.10.2600,IPR036162, PS51737,G3DSA:3.40.50.1390,IPR006119,IPR038109,PF07508, IPR011109,SSF53041,PTHR30461,PS51736,Coil, PF00239
MTAFEKNNIVESSIPTHMDKYVIYLRKSRADVEAEKLGEGETLARHKKILTELAARKGLYVEKIYEEIVSGETIEARPEIQKMIQECYDGKYKGIIIVEVTRLSRGNQGDAQIILDCLKYSNRNNGVLVITPTKTYDVAHSQEDEEYMEFELFMSRREYKMIQKRMDRGRKQAVVEGNFMGSYRPYGYNILKTKTSRTLIPNPDEAPYVKKIYEWAVVENLSPYKIAKRLDNMGVPTYYGDVEWSKDTIKTILTNPTYIGKVRWNDRMQVKTMSNGELVTSRPRSNHTDHYMEYDGKHLKDALIDEETFHKAKSRFATDSTKSNLKLANPLAGILKCKNCGRVLAYQSYKSRKTYTPPRYNHVPSQRCKVKSVVVDDVLKAVIHALKLYIEDFELKLDNIPDSNENEISKQIELMRKEIQKIERKLSKLFDSWEDERITDNEFVKRKTVHNRRIESIKEEIENLEYSIPEKEEYQEKIVLLSEALQAINDDTLDAEIKNEYLKRIINTIEFSRENNSEFILDINLH

SEQ ID NO: 3704 - protein, 526 aa, Unknown
  Description of Unknown: Integrase B3705 sequence
  PTHR30461:SF3,SM00857,G3DSA:1.10.10.2600,IPR036162,PS51737, G3DSA:3.40.50.1390,IPR006119,IPR038109,PF07508,SSF53041, IPR011109,PF00239,PTHR30461,PS51736,Coil, cd00338
MPYCIYLRKSRADAEAELAGEGETLARHEKTLLALAKKLKLPITKIYKEILSGETIAGRPVMQQLLQDVEAGIWQGVLVMEVERLGRGNTLDQGIILNAFKYSSTKIITPMKSYDPNDEFDEEYFEFSQFMSRREYKTILRRMQRGREASVKEGKFAGSIAPFGYRRVKLPQEKGFTLEIEDTEAAAVKLAYELYAYGDPQPDGTFADIGRATIAKRLDQMGIRNRKGGTWATASVTRMLQNPVYIGKVHWNRRPEKKHTENGKIKKTRPLAENYLLVDGLHEPIISEELWNLAQAKMKQHYRPTGVNGIMQNPLAGLVHCSYCGNAMQRRPYLKTGQPASLICHTHFCPQISSPLYMVEGKILEALSLWMKQHEPTWEDESSINVFSTKIMALEHTIADMEQELQGLQFQFEKIFEFLETGIYTPEVFTARNKTLSEKMAEIRSAIEETQAELSKLKAARKNQVSMIPKIKNILDTYETLTPAEKNKLLKEVLDHVEYHKKIKGKKNVPADNFEIILFPKISPEN

SEQ ID NO: 3705 - protein, 526 aa, Unknown
  Description of Unknown: Integrase B3706 sequence
  PTHR30461:SF3,SM00857,G3DSA:1.10.10.2600,IPR036162,PS51737, G3DSA:3.40.50.1390,IPR006119,IPR038109,PF07508,SSF53041, IPR011109,PTHR30461,Coil,PS51736,cd00338, PF00239
MPYCIYLRKSRADAEAELLGEGETLARHEKTLLALAKKLKLPITKIYKEILSGETIAGRPVMQQLLQDVEAGIWQGVLVMEVERLGRGNTLDQGIILNAFKYSSTKIITPMKSYDPNDEFDEEYFEFSQFMSRREYKTILRRMQRGREASVKEGKFAGSIAPFGYRRVKLPQEKGFTLEIEDTEAAAVKLAYELYAYGDPQPDGTFADIGRATIAKRLDQMGIRNRKGGTWATASVTRMLQNPVYIGKVHWNRRPEKKHTENGKIKKTRPLAENYLLVDGLHEPIISEELWNLAQAKMKQHYRPTGVNGIMQNPLAGLVHCSYCGNAMQRRPYLKTGQPASLICHTHFCPQISSPLYMVEGKILEALSLWMKQHEPTWEEESSINVFSTKIMALEHTIADMEQELQGLQFQFEKIFEFLETGIYTPEVFTARNKTLSEKMAEIRSAIEETQAELSKLKAARKNQVSMIPKIKNILDTYETLTPAEKNKLLKEVLDHVEYHKKIKGKKNVSADNFEIILFPKISPEN

SEQ ID NO: 3706 - protein, 526 aa, Unknown
  Description of Unknown: Integrase B3707 sequence
  PTHR30461:SF3,SM00857,G3DSA:1.10.10.2600,IPR036162,PS51737, G3DSA:3.40.50.1390,IPR006119,IPR038109,PF07508,IPR011109, SSF53041,PTHR30461,Coil,PS51736,cd00338, PF00239
MINMVSFDNIIIYLRKSRSDDPAQTVEEVLAKHERILQDYCIKEYGKVIPEKRIYREVVSGETIQDRPVMQKLLKELETNNIYGVLIVEPQRLSRGDLQDCGQIINSFRYTNTAVITPGKTYNLQDEYDRKFFEMELTRGNDYLEYTKKILNRGRVASVKQGNYICSVRPYGYKKVVIGTGKDKCHTLEIIPEEAEAIKLMYHLYLDENMGFTNIARTLDSMHIKPLKSSNWSAATIRDMIDNPIYIGKIVWNNRKVVKKWENEQIIKVRPRNKGDDVICVDGKHEAIIDEETFNAARQKRGLTPKVRKFKELRNPLAGILFCSTCGHSMSMKKYVDKRSHTGKVTTIMLCNKQAVCHTKSAQYEQIVAKIKESLADAIANFEIKMKEQENNNIDIHKQRITSLKDELNRLYNKDVRQKDAFEDGIYTKEEYIERNSKLQSQILNIKAEIENEKNNTPVIIDYQNKITTFTECLTSLDDDSISAADKNSLLKNCIDKIIYHNDMPSLPGIGRYIENSFRLEIFLKM

SEQ ID NO: 3707 - protein, 526 aa, Unknown
  Description of Unknown: Integrase B3708 sequence
  PTHR30461:SF3,cd00338,SM00857,G3DSA:1.10.10.2600,IPR036162, PF13408,IPR025827,PS51737,G3DSA:3.40.50.1390,IPR006119, IPR038109,PF07508,IPR011109,SSF53041,PTHR30461, PS51736,Coil,PF00239
MCAKKKPAMLEPDMQDAVIYTRYSSHNQRDCSIEQQVADCEIFARQNNLRVVKVYADRHLSGTTDNRPQFQQMLKDASHGHWAYVICWKIDRFARNRYDSATYKFRLKKAGVRVLYAKESIPDGPEGILLESVLEGSAEYYSAALAQNIRRGMKFNAEQCKVNSGSIPFGYCKGPDGRFAIHEANAEVVREIFRKAAAGMPFVDIANDLNSRGLKTSRGGRWNKGSFRLLMNEAYIGVYHFSDTRIEGGMPALIDQGTFWAANERLKANSSVRGRHQDGGDYLLTGKLKCAHCGSYMIGFSGTGKSGELHYYYGCQKRRRERACKKANVPREWIERVVVKAALDYVLRPDVMEWIADAVMEYQEREAASAQLAALTAELEENQKATDNVMKAIEAGIITSTTKQRLLDLEAKAQDLKRAIELEKLSHVRLERDQVLFWLDRFRVGSLQSQEFRRKVIDAFVSVVYLSDDHLRIAFNYSGGSNAEADFDLVMDAEAAAGELSKKFAQGHVASTNLPHRFVRCGVFYA

SEQ ID NO: 3708 - protein, 526 aa, Unknown
  Description of Unknown: Integrase B3709 sequence
  PTHR30461:SF3,SM00857,G3DSA:1.10.10.2600,IPR036162,PF13408, IPR025827,G3DSA:3.40.50.1390,PS51737,IPR006119,IPR038109, PF07508,SSF53041,IPR011109,PTHR30461,Coil, PS51736,cd00338,PF00239
MNTVIYARYSAGPRQTDQSIEGQLRVCTDFCKQRGLTVIDTYCDRHISGRTDERPEFQRLITDAKRKKFEAVVVYKTDRFARNKYDSAVYKRELKRNGIQIFYAAEAIPDGPEGIILESLMEGLAEYYSAELAQKIKRGMHESALKCQSTGSGRPLGYRVDEQKHFQIDPESAQTVQTIFEQYIKGESNAAICELLNSRGLRTAQGKPFNKNSINRIIKNRKYIGEYRYHDIVVEGGMPAIISKDTFNLAQAEMERRRTRKAPKSPKAEYLLAGRLFCGHCKGPMQGVSGTGKSGNKWYYYYCGNTRGENKTCDKKQVSRDRLERAVVDFTVRYILQEEVLEELARKVHAAQERQNDTASEIAFYEKKLADNKKSIANVLRAIESGAATQTLPARLQELENEQAVILGEISFLKGKRLAFTEDQILFALMKHLEPYPGESEQDYRRRIISDFVSEVYLYDDRLLIYFNISSEDGKLKSADLSNIEGGEFDEGLVSSTNLIAGRTPEVTIVVLPYGFVLATQIKDRL

SEQ ID NO: 3709 - protein, 526 aa, Unknown
  Description of Unknown: Integrase B3710 sequence
  SM00857,G3DSA:1.10.10.2600,IPR036162,PF13408,IPR025827, PS51737,G3DSA:3.40.50.1390,IPR006119,IPR038109,PF07508, SSF53041,IPR011109,PTHR30461,Coil,PS51736, cd00338,PF00239
MQYCLYLRKSRADSEAEARGEGETLARHEKALLDLAKKLNLNITAIYREIVSGETIAARPVMQQLLQEVEQGIWDGVLVMEVERLARGDTIDQGIVAQTFKFSDTKIITPIKTYNPNNEFDEEYFEFGLFMSRREYKTINRRLQRGRMASVKDGKYVANKAPYGYNRIRIENDKGWTLEINKEEADVVRLIFELYTVGEKQSDNTFNRLGTGFIAKRLNTMKVSPKRGKVWVVASIRDILINPVYIGMIRWNWRPQQKKMIDGQLHISRPRATDYMLCKGLHPPIISKETFDIAQDLMRHNPARPIGEKNTVKNSLSGIVVCGDCGRHMVRRPHTKYPDMLICSEPTCNNVGSQLRVVEERILQSLKEWLGEYKISWDITSPPVERISQVSIKKKALQKEQHELDTLNKQISKTHDLLEQGIYTTDVFLERSRALSLRMDEVKEHIAILDKELKTEITREDSAVNIIPKVEKLLEVYHDLPSPKAKNDMLKDVLEKVVYTKKERSKKGNLDNFNITIYPKIPKYIT

SEQ ID NO: 3710 - protein, 526 aa, Unknown
  Description of Unknown: Integrase B3711 sequence
  PTHR30461:SF3,SM00857,G3DSA:1.10.10.2600,IPR036162,PS51737, G3DSA:3.40.50.1390,IPR006119,IPR038109,PF07508,SSF53041, IPR011109,PF00239,PTHR30461,PS51736,Coil, cd00338
MPYCIYLRKSRADAEAELLGEGETLARHEKTLLALAKKLKLPITKIYKEILSGETIAGRPVMQQLLQDVEAGIWQGVLVMEVERLGRGNTLDQGIILNAFKYSSTKIITPMKSYDPNDEFDEEYFEFSQFMSRREYKTILRRMQRGREASVKEGKFAGSIAPFGYRRVKLPQEKGFTLEIEDTEAAAVKLAYELYAYGDPQPDGTFADIGRATIAKRLDQMGIRNRKGGTWATASVTRMLQNPVYIGKVHWNRRPEKKHTENGKIKKTRPLAENYLLVDGLHEPIISEELWNLAQAKMKQHYRPTGVNGIMQNPLAGLVHCSYCGNAMQRRPYLKTGQPASLICHTHFCPQISSPLYMVEGKILEALSLWMKQHEPTWEDESSINVFSTKIMALEHTIADMEQELQGLQFQFEKIFEFLETGIYTPEVFTARNKTLSEKMAEIRSAIEETQAELSNLKAARKNQVSMIPKIKNILDTYETLTPAEKNKLLKEVLDHVEYHKKIKGKKNVSADNFEIILFPKISPEN

SEQ ID NO: 3711 - protein, 526 aa, Unknown
  Description of Unknown: Integrase B3712 sequence
  SM00857,G3DSA:1.10.10.2600,IPR036162,PF13408,IPR025827, G3DSA:3.40.50.1390,PS51737,IPR006119,IPR038109,PF07508, IPR011109,SSF53041,PTHR30461,Coil,PS51736, cd00338,PF00239
MQYCLYLRKSRADSEAEARGEGETLARHEKALLDLAKKLNLNITAIYREIVSGETIAARPVMQQLLQEVEQGIWDGVLVMEVERLARGDTIDQGIVAQTFKFSDTKIITPIKTYNPNNEFDEEYFEFGLFMSRREYKTINRRLQRGRMASVKDGKYVANKAPYGYNRIRIENDKGWTLEINKEEADVIRLIFELYTVGEKQSDNTFNRLGTGFIAKRLNAMKVPPKRGKVWVVASIRDILINPVYIGMIRWNWRPQQKKMIDGQLHISRPRATDYMLCKGLHPPIISKETFDIAQDLMRHNPARPIGEKNTVKNSLSGIVVCGDCGRHMVRRPHTKYPDMLICSEPTCNNVGSQLRVVEERILQSLKEWLGEYKISWDITSPPVERISQVSIKKKALQKEQHELDTLNKQISKTHDLLEQGIYTTDVFLERSRALSLRIDEVKEHIAILDKELKTEITREDSAVNIIPKVEKLLEVYHDLPSPKAKNDMLKDVLEKVVYTKKERSKKGNLDNFNITIYPKIPKYIT

SEQ ID NO: 3712 - protein, 526 aa, Unknown
  Description of Unknown: Integrase B3713 sequence
  PTHR30461:SF3,SM00857,G3DSA:1.10.10.2600,IPR036162,PS51737, G3DSA:3.40.50.1390,IPR006119,IPR038109,PF07508,IPR011109, SSF53041,PTHR30461,Coil,PS51736,cd00338, PF00239
MPYCIYLRKSRADAEAELLGEGETLARHEKTLLALAKKLKLPITKIYKEILSGETIAGRPVMQQLLQDVEAGIWQGVLVMEVERLGRGNTLDQGIILNAFKYSSTKIITPMKSYDPNDEFDEEYFEFSQFMSRREYKTILRRMQRGREASVKEGKFAGSIAPFGYRRVKLPQEKGFTLEIEDAEAAAVRLAYELYAYGDPQPDGTFADIGRATIAKRLDQMGIRNRKGGTWATASVTRMLQNPVYIGKVHWNRRPEKKHTENGKIKKTRPLAENYLLVDGLHEPIISEELWNLAQAKMKQHYRPTGVNRIMQNPLAGLVHCSYCGNAMQRRPYLKTGQPASLICHTHFCPQISSPLYMVEGKILEALSLWMKQHEPTWEDESSINVFSTKIMALEHTIADMEQELQGLQFQFEKIFEFLETGIYTPEVFTARNKTLSEKMAEIRSAIEETQAELSNLKAARKNQVSMIPKIKNILDTYETLTPAEKNKLLKEVLDHVEYHKKIKGKKNVSADNFEIILFPKISPEN

SEQ ID NO: 3713 - protein, 526 aa, Unknown
  Description of Unknown: Integrase B3714 sequence
  PTHR30461:SF3,SM00857,G3DSA:1.10.10.2600,IPR036162,PF13408, IPR025827,PS51737,G3DSA:3.40.50.1390,IPR006119,IPR038109, PF07508,SSF53041,IPR011109,PF00239,PTHR30461, PS51736,Coil,cd00338
MDYTNLNLANVVIYARYSSDRQNEQSIDGQLDKCHEYAQQRGFRVVGEYCDRALSGRYAETRPEFQRMIADSAKHAFEYVLVWKLDRFSRDRYDSAIYKKKLRANGVRVLSVTEGIDESSESVLLEAILEAMAEEYSRQLAQNVKRGMRQNAEKGLSLGGIAPLGYRVVNKRYEINEDAAKIVRFIHEQYADGVGQKQIVADCERLGYRNQRGNPIDLHAVKRILSNERYVGTYDYLGEVVIEDAFPAIVSKALKKKVRDRLKANAKAPGHAKAKVEYLLHGKLFCGVCGSPMVGECGRSSTGVVHYYYACAAKKKQHTCKKRSERKDKLEQYITDYIGAHILTDKWIDAAADRVVAEYQKSYDASGIKPLEKQIREADKEIDKLVDTLISATADTARRRINERIEAAEVKKKALEEQLASLRIASRVILKKEDIVAWLNQFRTGNSADLEYRKKVIELFVNAIYIYDNKIKMFFNVTDSAQITYPEMLALEEPESSDLGSSGVPDVALSERTVFVNGVIGIIVHR

SEQ ID NO: 3714 - protein, 526 aa, Unknown
  Description of Unknown: Integrase B3715 sequence
  SM00857,G3DSA:1.10.10.2600,IPR036162,PF13408,IPR025827, G3DSA:3.40.50.1390,PS51737,IPR006119,IPR038109,PF07508, IPR011109,SSF53041,PF00239,PTHR30461,PS51736, Coil,cd00338
MQYCLYLRKSRADSEAEALGEGETLARHEKALLDLAKKLNLNITAIYREIVSGETIAARPVMQQLLQEVEQGIWDGVLVMEVERLARGDTIDQGIVAQTFKFSDTKIITPIKTYNPNNEFDEEYFEFGLFMSRREYKTINRRLQRGRMASVKDGKYVANKAPYGYNRIRIENDKGWTLEINKEEADVVRLIFELYTVGEKQSDNTFNRLGTGFIAKRLNTMKVSPKRGKVWVVASIRDILINPVYIGMIRWNWRPQQKKMIDGQLHISRPRATDYVLCNGLHPPIISKETFDMAQELMRHNPARPIGEKNTVKNSLSGIVICGNCGRHMVRRPHTKYPDMLICSEPTCNNVGAQLRVVEERILQSLKEWLGEYKISWDITSPPVERISQVSIKKKALQKEQHELDTLNKQISKTHDLLEQGIYTTDVFLERSRALSLRMDEVKEHIAILDKELKTEITREDSAVNIIPKVEKLLEVYYDLPSPKAKNDMLKDVLEKVVYTKKERSKKGNLDNFDIAIYPKIPKYIT

SEQ ID NO: 3715 - protein, 526 aa, Unknown
  Description of Unknown: Integrase B3716 sequence
  PTHR30461:SF3,SM00857,G3DSA:1.10.10.2600,IPR036162,PF13408, PS51737,G3DSA:3.40.50.1390,IPR025827,IPR006119,IPR038109, PF07508,IPR011109,SSF53041,PTHR30461,Coil, PS51736,cd00338,PF00239
MDEYCLYLRKSRIDLEAEANGQGDTLARHRAALLKLAQKRGFNITGCYEEVRSGESIAARPEMQRLLNDVEDGRWAGVLVMEVERLARGNTTDQGIVADTFKYSDTKIVTPNKIYDPGDEFDEEYFEFGLFMSRREYKTINRRLQRGRRASLSEGKYIAGKATYGYERYKLSGEKGYSLRIIPEQAEIVRQIYDWYVNGELLPDGTLRPLGSYTIAKRLDARGIPSPTGGKWPPCTVKDILTNPTYIGKLRWSYRPTVKRMVDGELVKTRPVDRSVHLSDGRHEPILDEVLWHRAQLMLKNRSHAPVPKSTNIRNPLAGLLICSKCGRSMERRKFKHGRDTVACPNKDCTCKSSVLEEVEAGMLDSLRIWLSDYKVKLAQSQETISHTGPTAEQEITSLQRTLGTLQAQMENLYNLVEQGVYSTDLFLQRSQALTARMAEVNQQIESTQAALTASRRIARNRFEIIPRIERVLALYPTLTDPREKNTILKEVLEKILYTKTTGSRWEASDMNLYVFPRVETDGEQL

SEQ ID NO: 3716 - protein, 526 aa, Unknown
  Description of Unknown: Integrase B3717 sequence
  cd00338,SM00857,G3DSA:1.10.10.2600,IPR036162,PF13408, PS51737,IPR025827,G3DSA:3.40.50.1390,IPR006119,IPR038109, PF07508,IPR011109,SSF53041,PTHR30461,PS51736, Coil,PF00239
MELRKDGLYFAYLRKSREDRDAEQHGEVETLERHRKMLCDMASRYGITVATWYKEVVSGETIAARPEMLKMLEAIEDMRPDGVLVVELERLARGDTRDQGLIMETFKYAGTQIITPLKIYNPNNESDEEYAEFGLFMSRREYKTINRRLQRGRNISTSEGKWIGNKPPYGYERVKIPNDKGFTLRPIPEEATVVRLIYNMYVHGTPESGNIPVGTATIGHILDDMGVKPPNGSYWPTCTVRRIVENPVYIGKLQHGYRPQQKRTVNGKITVSRPINKNCELYNGLHTPIIDQEIFALAGQKRKESYRKPFFHGIKNPLAGLIYCTECGKSMYRRPASPTCRDDTIMCSTRGCKTSASYYYLIEDRLLRALNQWLDEYRGQIEDTSLELNRAQLERYKTQLASAQEVETTAQKQLEKAMDLLEKEVYSIEMFQQRATALNEKIALARRETKELSEKIRKLEKLTADKQTIVARWEHVLEEYPNVDSPVVKNTMLKEIIERVEYSKPYKGNRKSGGMDKFTLKIFPRL

SEQ ID NO: 3717 - protein, 526 aa, Unknown
  Description of Unknown: Integrase B3718 sequence
  SM00857,G3DSA:1.10.10.2600,IPR036162,PF13408,PS51737, IPR025827,G3DSA:3.40.50.1390,IPR006119,IPR038109,PF07508, IPR011109,SSF53041,PF00239,PTHR30461,PS51736, Coil,cd00338
MPTLSSAGNYCMYLRRSRADEDAERMGAGETLTRHQTMLQELAQRLIGHEIPGPAIYREIVSGDTVANRPEMRRLLADVERGQWDGVLVADIDRLARGDTMDQGLVAQTFLYSHTLILTPMKTYDPADPADSEFFEIRLFFARREYQLIKRRMQAGRANAAREGLYPGGRNPYGYERYKLPDRRGWSLRIVPEQAAVVRMIYDWYLHGIDGETVGCGRIASRLNDIGARQQAGGLWEDGNVLHVLKNPIYTGYVTWNAHVQKTEMVDGQKQKKRVRGTDPIRVKGLHPPIISEHDFDAVQHRIASRHAVPAPANRATVNVLAGLARCGVCGRAMRYFSPKNRPEKWAVLKCSNPNPCGNHSAAYRIVLAAVLDTLRDWATYDQGKLPTPAEDPDPSAELRATQEKQLSTLQRQLARLRDLLEQGVYDVDTYLSRQRDIRERMDACATAIAQLQPPPKSRAETLAELAPAVRNVLDAYSTAGTPGEQNALLKSVISRIVYYKRDNVAPGQSPADAITLEIFPLLPSE

SEQ ID NO: 3718 - protein, 526 aa, Unknown
  Description of Unknown: Integrase B3719 sequence
  PTHR30461:SF3,SM00857,G3DSA:1.10.10.2600,IPR036162,PF13408, IPR025827,PS51737,G3DSA:3.40.50.1390,IPR006119,IPR038109, PF07508,IPR011109,SSF53041,PF00239,PTHR30461, PS51736,Coil,cd00338
MDYINLNLANVVIYARYSSDRQNEQSIDGQLDKCHEYAQQRGFRVVGEYCDRALSGRYAETRPEFQRMIADSAKHAFEYVLVWKLDRFSRDRYDSAIYKKKLRANGVRVLSVTEGIDESSESVLLEAILEAMAEEYSRQLAQNVKRGMRQNAEKGLSLGGIAPLGYRVVNKRYEIDEDAAKIVRFIHEQYADGLGQKQIVADCERLGYRNQRGKPIDLYAVKRILSNERYVGTYDYLGEVVIEDAFPAIVSKELKMKVRDRLKANAKAPGHAKAKVEYLLHGKLFCGVCGSPMVGECGRSSTGVVHYYYACAAKKKHHTCKKRSERKDKLEQYITDYIGAHILTDKWIDAAADRVVAEYQKSYDASGIKPLEKQIREADKEIDKLVDTLISATADTARRRINERIEAAEVKKKALEEQLASLRIASRVILKKEDIVAWLNQFRTGNSADLEYRKKVIELFVNAIYIYDNKIKMFFNVTDSAQITYPEMLALEESESSDLGSSGVPDVALSERTVFVNGVIGIIVHR

SEQ ID NO: 3719 - protein, 526 aa, Unknown
  Description of Unknown: Integrase B3720 sequence
  SM00857,G3DSA:1.10.10.2600,IPR036162,PF13408,PS51737, IPR025827,G3DSA:3.40.50.1390,IPR006119,IPR038109,PF07508, IPR011109,SSF53041,PTHR30461,Coil,PS51736, cd00338,PF00239
MQYCLYLRKSRADSEAEARGEGETLARHEKALLDLAKKLNLNITAIYREIVSGETIAARPVMQQLLQEVEQGIWDGVLVMEVERLARGDTIDQGIVAQTFKFSDTKIITPIKTYNPNNEFDEEYFEFGLFMSRREYKTINRRLQRGRMASVKDGKYVANKAPYGYNRIRIENDKGWTLEINKEEADVVRLIFELYTVGEKQSDNTFNRLGTGFIAKRLNAMKVPPKRGKVWVVASIRDILINPVYIGMIRWNWRPQQKKMIDGQLHISRPRATDYLLCKGLHPPIISKETFNIAQDLMRHNPARPIGEKNTVKNSLSGIIVCGNCGRHMVRRPHTKYPDMLICSEPTCNNVGSQLRVVEERILQSLKEWLGEYKISWDITSPPVERISQVSIKKKALQKEQHELDTLNKQISKTHDLLEQGIYTTDVFLERSRALSLRMDEVKEHIAILDKELKTEITREDSAVNIIPKVEKLLEVYHDLPSPKAKNDMLKDVLEKVVYTKKERSKKGNLDNFNIAIYPKIPKYIT

SEQ ID NO: 3720 - protein, 526 aa, Unknown
  Description of Unknown: Integrase B3721 sequence
  PTHR30461:SF3,SM00857,G3DSA:1.10.10.2600,IPR036162,PF13408, PS51737,G3DSA:3.40.50.1390,IPR025827,IPR006119,IPR038109, PF07508,IPR011109,SSF53041,PTHR30461,PS51736, cd00338,PF00239
MAKRSAKKNEYQSAEQVGVIYARYSSHNQKEESIEQQIAECSDFAAKNGIRIVGIYADKAVSGRSDRRPNFQRMMRDAEKRQFQIVVAYKSNRIARNMLNALQYEARLDLLGIKTLYAKEEFGNTAAGRFALRTMMNVNQFYSENMGEDIKRGMVDNANECKVNGMLPLGYVKSKEGKYAIAPDEAAVVREIFDSVLKDVPVAEIARSLNQRGIHTKLGREWNKNSFHIMLKNDNYIGVYRHSGVVVEDGIPPILKKEVFAAVQEKLANKKKTAGRRSANGEYLLTGKLFCGYCGSYMIGVSGTGENGTVHNYYQCQKRHAEGRCEKKNVRRDFIEKLIARLTQDYILQDDTIEWIADSTMSFQAMARRESGVAQLERDLADNRKVAKNIMAAIEQGIITETTKARLLEVEGTIHDLERSLSIAKAASQPIERERVVFSLEQMREGNVVSKEHQKKLIDTFVKSVTLWDDRIQIDYYHTPGKHKFSYSLEELTSKAENESNASDVRTGSLELHHKRTLILIEWLSR

SEQ ID NO: 3721 - protein, 526 aa, Unknown
  Description of Unknown: Integrase B3722 sequence
  PTHR30461:SF3,IPR036162,PS51737,IPR011109,PTHR30461, PF00239,G3DSA:1.10.10.2600,IPR006119,SSF53041,cd00338, SM00857,IPR025827,IPR038109,PS51736,mobidb-lite, PF13408,G3DSA:3.40.50.1390,PF07508,Coil
MHGAYILARYSTDRQNEDSIEVQVSACRKWCDERSLPVLDVFADEATSGMKATRPEYARMMWQLEHGGADTVVIYDQSRMFRKLTAWFDFRDQLARLGVDVVSVTQPMIGGDLRDPANFLTEGSMALFNQMWVLQTRQKVVEKMRFMARQGLHTGGTPPLGYKVVDGRLVIDAAEAETVRLIFGLYASGMTYREIIRRLNAEERRTKRGGNFGVNSLHDLLKNPKYVGDLVYGKVAKRPDGSRNSHAVAEDAIVVKDVLPAIVDRETWEKVQLKMQENKRSAAGRPASARAYPLKGKVFCRECKSAMLVTAAKRRGKRYYYYTCGAKHRKGLCDNSQIPVSALEGIVANAVRQRLSEPESVGGLIRILRDERAKLSEAAVQRLRAMQKRDREIAKQLDAAVNAVLGGLHSPILTAKVNALEAERAKISHDMQQLRAQVSGAEIDEPRLRELLALAMQDDAAVLSIVVRVEVGKDEIAVWTLLDADPNGDFDFAEDGVPITPSEVAPSYNNSGCPRWSTKKEASFVR

SEQ ID NO: 3722 - protein, 526 aa, Unknown
  Description of Unknown: Integrase B3723 sequence
  PTHR30461:SF3,SM00857,IPR036162,PF13408,IPR025827, G3DSA:3.40.50.1390,IPR006119,PF07508,IPR011109,SSF53041, PTHR30461,Coil,PS51736,cd00338,PF00239
MNFGIYGRKSYFVDTSESTQMQFDVCKEHIRLHFPEEEISSITLYEDDGYVRSDMDRPGMNQLKEDIAAGLIDCVIIYKIDRICCDMMDFCVFYSFLKEHEIKFITVKDGIDTTTPLGEAMMYLAVIFSGLEVRTDSLRITDNMNHLAESGFWCGGRAPIGYNITTVDLGPKSHKTLEFNQEEIDYKNNLIRIFLDNNFSLQNMETYCKNNGLTTLNGKFLSTTQLYSMFTSPHCVEDTAAMYDYFEAKGCQMTSPREEWDGSHGIIIYGRTMEKKVNGKKKHQLAPPENWRVSIGYHLPYMKAETYFQLQAQFGHNIFSKKPKYDLPLLKGSLRCKCGRMMSMSRKKKVDGSVSTWYYCPKRMRSGVDACDMGHIKSDLLDEKVLDVFREIKHDPAAIRKYVKGIDKKPKDNSVALRTKMQQCQDKIEKLTAALAANSESAAAKYIVNEIEKLDCEYNNLKRKAASQSAEERRAAVKYKNAMEKRDEIIRLLDDFDNFSADERNAIARDVLKECKWDGETLFIML

SEQ ID NO: 3723 - protein, 526 aa, Unknown
  Description of Unknown: Integrase B3724 sequence
  PTHR30461:SF3,SM00857,IPR036162,PF13408,IPR025827, G3DSA:3.40.50.1390,IPR006119,PF07508,IPR011109,SSF53041, PTHR30461,Coil,PS51736,cd00338, PF00239
MNFGIYGRKSYFVDTSESTQMQFDVCKEHIRLHFPEEEISSITLYEDDGYVRSDMDRPGMNQLKEDIAAGLIDCVIIYKIDRICCDMMDFCVFYSFLKEHEIKFITVKDGIDTTTPLGEAMMYLAVIFSGLEVRTDSLRITDNMNHLAESGFWCGGRPPIGYSITTVDLGPKSHKTLEFNQEEIDYKNNLVRIFLDNNFSLQNMETYCKNNGLTTLNGKFLSTTQLYSMFTSPHCVEDTAAMYDYFEAKGCQMTSPREEWDGSHGIIIYGRTMEKKVNGKKKHQLAPPENWRVSIGYHLPYMKAETYFQLQAQFGHNIFSKKPKYDLPLLKGSLRCKCGRMMSMSRKKKVDGSVSTWYYCPKRMRSGVDACDMGHIKSDLLDEKVLDVFREIKHDPAAIRKYVKGIDKKPKDNSVTLRTKMQQCQDKIEKLTAALAANSESAAAKYIVNEIEKLDCEYNNLKRKAASQSAEERRAAVKYKNAMEKRDEIIRLLDDFDNFSADERNAIARDVLKECKWDGETLFIML

SEQ ID NO: 3724 - protein, 526 aa, Unknown
  Description of Unknown: Integrase B3725 sequence
  PTHR30461:SF3,cd00338,SM00857,G3DSA:1.10.10.2600,IPR036162, PS51737,G3DSA:3.40.50.1390,IPR006119,IPR038109,PF07508, SSF53041,IPR011109,PTHR30461,PS51736,Coil, PF00239
MTATDEIIKKACNKYKKTRYAMYLRKSRADLELEAMGEEETLARHKAMLFSLAAKHEIHPDQITIYHELVSGDSIDERPEMQRLLADVYAKTFAGVLVVEVERLARGNTKDQGEVADAFQASNTHIITPAKVYDPNNEFDQEYFEFGLFMSRREYKTIKRRLEAGKKQSVMEGNYILPQRVFGYDILRTTKKDRTLIIRPEEAKYVKMIFDWHIKEKRATGWMARQMTLMGIPTTKGRPEWNRGTIRDMLANPIYAGKVTWGKRRTVKEYDPELGKLVKVIKEDGKMEIYEGKHEGIISEEEFAEAQRVTETMKNPSAKVSTELKNPFAGLMECCTCGRNIIAMTYNDGRRARLSHARDTICTKKSLPIDEVSEVFISTLQAYIEDFRTKMEIDDNKDEMEAFKARLNAMETELEKLEWKRKNLFADYEDGIYTRDEFLERKLHYNEKIDNTKKQIQEARKSTPEPVDYSEQISNLHAMIDCMKDDGLSVKQKNDFLKQFISKITYDSISYGQRRGGKAILEVFLK

SEQ ID NO: 3725 - protein, 526 aa, Unknown
  Description of Unknown: Integrase B3726 sequence
  PTHR30461:SF3,cd00338,SM00857,G3DSA:1.10.10.2600,IPR036162, PF13408,PS51737,G3DSA:3.40.50.1390,IPR025827,IPR006119, IPR038109,PF07508,IPR011109,SSF53041,PTHR30461, PS51736,Coil,PF00239
MGKVRVIPSTINPLTHQSIVANVKRKVAAYARVSTDSDEQYTSYEAQVNYYTGYIQSRVDWEYINVYADEGISGTNTKKRVQFNKMIEDALEGKINLIITKSISRFARNTLDTISYIRKLKAAGVEVFFEKENLWTFDSKSEMVLSMLAAIAQEESRSISENVKIGKRWGFKEGKVSMPYKIFLGYDKVDGKIVINEEQAKVVRLIYRLYAREGYSRAAIADYLNEMKVPKPSNPEGKWSINNITAILTNEKYKGDALLQKGYVDNYLDHTVKKNKGVLPQYYVENSHPAIIDKDEWNMVQEELKKRDKFRYAYSKNNPFSSKLICGCCGHFYGLKVWHSNTQYRKEIMQCNKKYSTKDDKCDTPSVLREDVNKRFIEAYNAIMINKEEVIKSAKELIGLLTDTTKIDKRIEELNGNISDTKTLVENLIHDNALKAQDQDAYIKKCNSMTAQYDILKQQLDEAISERDSREIKSKSMNLFITDIKEAPIMINEFDLTLWNIMLDEAIVNKDGSITFKFKNGMEYKN

SEQ ID NO: 3726 - protein, 526 aa, Unknown
  Description of Unknown: Integrase B3727 sequence
  PTHR30461:SF3,cd00338,SM00857,G3DSA:1.10.10.2600,IPR036162, PF13408,IPR025827,PS51737,G3DSA:3.40.50.1390,IPR006119, IPR038109,PF07508,SSF53041,IPR011109,PTHR30461, PS51736,Coil,PF00239
MAKKKKPAGGNAIIYARYSSHNQRDVSIEQQIEACRKHAAELGLTITDTYEDRAISGRTDNRPAFQRMMRDAEDGKFQYVLAWKSNRMGRNMMQAMVNESRLMDCGVKVFYAEEDFDDSAAGRFALRSMMNVNQFYSDNLAEDVRRGLMDNASKCMANGRQPLGYKRGEGGKVVVDEPAAAIVREIYTRIASGEMFMDIARDLNRRGIKTQSGSEWNKSSFKVLCRNERYRGIYIYGDTRIEGGIPPIVDDVLWYKVQEVLKVKKSKNRHHCPSDEDYLLTGKLRCGKCGGYMIGMSGRSKTGDVHHYYACQNRRVGHTCDKKNIRRDVVEPAVAQAIKQYCLTDDAIEWITDQTIAYWEDEDRKLQIDSIENDLSAVQSSISNVMKAIEMGVITETTRDRLIELERQQTDLKSKLALAKEEIVHVDRKDLISSLLAFRHGNVHDRAYQEKLFNAFLIAVYVYDDDHLKLVFNSFGKDDTVNIALDLGENDDNSGLSDVSKSSPILSNGQPVWPSGNNRVVFLFVL

SEQ ID NO: 3727 - protein, 526 aa, Unknown
  Description of Unknown: Integrase B3728 sequence
  PTHR30461:SF3,SM00857,G3DSA:1.10.10.2600,IPR036162,PS51737, G3DSA:3.40.50.1390,IPR006119,IPR038109,PF07508,SSF53041, IPR011109,PTHR30461,Coil,PS51736,cd00338, PF00239
MPYCIYLRKSRADAEAELLGEGETLARHEKTLLALAKKLKLPITKIYKEILSGETIAGRPVMQQLLQDVEAGIWQGVLVMEVERLGRGNTLDQGIILNAFKYSSTKIITPMKSYDPNDEFDEEYFEFSQFMSRREYKTILRRMQRGREASVKEGKFAGSIAPFGYRRVKLPQEKGFTLEVDDTEAAAVKLAYELYAYGDPQPDGTFADIGRATIAKRLDQMGIRNRKGGTWATASVTRMLQNPVYIGKVHWNRRPEKKHTENGKIKKTRPLAENYLLIDGLHEPIISEELWNLAQAKMKQHYRPTGVNGIIQNPLAGLVHCSYCGNAMQRRPYLKTGQPASLICHTHFCPQISSPLYMVEGKILEALSLWMKQHEPTWEEESSADVFSTKIMALEHAIAEMEQELQGLQFQFEKIFEFLETGIYTPEVFTARNKTLSEKMAEIRSAIEETQAELSKLKAARKNQVSMIPKIKNILDTYETLTPAEKNKLLKEVLDHVEYHKKIKGKKNVPADNFEIILFPKISPEN

SEQ ID NO: 3728 - protein, 526 aa, Unknown
  Description of Unknown: Integrase B3729 sequence
  SM00857,G3DSA:1.10.10.2600,IPR036162,PF13408,PS51737, IPR025827,G3DSA:3.40.50.1390,IPR006119,IPR038109,PF07508, IPR011109,SSF53041,PTHR30461,Coil,PS51736, cd00338,PF00239
MQYCLYLRKSRADSEAEALGEGETLARHEKALLDLAKKLNLNITAIYREIVSGETIAARPVMQQLLQEVEQGIWDGVLVMEVERLARGDTIDQGIVAQTFKFSDTKIITPIKTYNPNNEFDEEYFEFGLFMSRREYKTINRRLQRGRMASVKDGKYVANKAPYGYNRIRIENDKGWTLEINKEEADVVRLIFELYTVGEKQSDNTFNRLGTGFIAKRLNTMKVSPKRGKVWVVASIRDILINPVYIGMIRWNWRPQQKKMIDGQLHISRPRATDYMLCKGLHPPIISKETFDIAQDLMQHNPARPIGEKNTVKNSLSGIVVCGDCGRHMVRRPHTKYPDMLICSEPTCNNVGSQLRVVEERILQSLKEWLGEYKISWDITSPPVERISQVSIKKKALQKEQHELDTLNKQISKTHDLLEQGIYTTDVFLERSRALSLRMDEVKEHIAILDKELKTEITREDSAVNIIPKVEKLLEVYYDLPSPKAKNDMLKDVLEKVVYTKKERSKKGNLDNFDIAIYPKIPKYIT

SEQ ID NO: 3729 - protein, 526 aa, Unknown
  Description of Unknown: Integrase B3730 sequence
  PTHR30461:SF3,cd00338,SM00857,G3DSA:1.10.10.2600,IPR036162, PS51737,G3DSA:3.40.50.1390,IPR006119,IPR038109,PF07508, SSF53041,IPR011109,PTHR30461,PS51736,Coil, PF00239
MLYELSPSDISHIIIYLRKSRSDDPYMSVEEVLSKHETQLQEHAVSVFGQRIPEEHIFREVVSGETIADRPVMKQVMKLLETGSIKGVLVIEPQRLSRGDLEDCGRIINAFRYTNTLVLTPPKNYNLADEYDRKFFEMELTRGNDYLEYTKKILNRGRIASVKQGNFIGSVPPYGYRKVQIGTGKSTYHSLEVIPEQADAVKLMFKLYLAGNGFTNIAKKLDELGIKPLKSSVWSPAAISDMLENPVYIGKIRWNWRKTEKKIVNGQIVKTRPKTSDVSEWVYVDGRHEPIIDLATFEAAQERRGKTPKVKKNNELKNPFAGLLFCGTCGKAMSLKIYTQKNGSKCEMMLCNKQSWCNTKSVKYDVFVDRIIETLENTIADFELKLENDDSSTADLQESMISNLQNELKRLKEKDIRQKDAYEDGIYTKEEYASRNAKLQEEIAKASAALEQARTSIPATIDYREKIARFTDCLAALKNPDMSATEKNILLKSCIDKIVYHNHMESKPGIGRYVENVFTIDVFLRL

SEQ ID NO: 3730 - protein, 525 aa, Unknown
  Description of Unknown: Integrase B3731 sequence
  PTHR30461:SF3,cd00338,SM00857,G3DSA:1.10.10.2600,IPR036162, PF13408,IPR025827,G3DSA:3.40.50.1390,PS51737,IPR006119, IPR038109,PF07508,IPR011109,SSF53041,PTHR30461, PS51736,Coil,PF00239
MSSVDKTAVIYARYSSHGQTEQSIEGQIAAAQKYAEGKGYTIIHIYADRAMTGRNDDREQFQKMLSDTATHQFGVILLWKIDRFGRNREEIAFNRYRCKKNGVRVERVAEDVPDGPEGVILDSVLEGMAEYYSLQLAQNVRRGQRESAKKSQTVGGCNIIGYKVNPDTKRYEVDPKTAPFVTEVFKRYANGETISEIVAWLNVQGVRATRGGEFTVNSLHRLLKNEKYTGVYIFHDIRNEGGMPALTDRATFDKVQEMLKVNRRAPARVWSKTEYLLTDKLFCGHCGAMMVGESGHGRNGTKHSYYTCWNRKKKKSCSKKPVRQDVIEPMVLRVISKMLSDEATLEYIADQVWAVYERSDTSGDTIKALDKQIADVDRALSNVMKAIEMGIINEMTKARMDELTDQKQALSVARAEAGLAGGFKLTRDMILFFLHDMAATNMTDRDCQKRLIKTFVNAIYLYDDHFDIAFNYTSNGKMVVKMQEINDTTSGEVFGRCAQSPAKSTAVVIQMYRKTAVFFVCGSIR

SEQ ID NO: 3731 - protein, 525 aa, Unknown
  Description of Unknown: Integrase B3732 sequence
  SM00857,G3DSA:1.10.10.2600,IPR036162,PF13408,IPR025827, G3DSA:3.40.50.1390,PS51737,IPR006119,IPR038109,PF07508, IPR011109,SSF53041,PTHR30461,Coil,PS51736, cd00338,PF00239
MVKNRAAIYARFSSHNQRSESIEIQVENSRTYCEREGLQVVREYCDYAQTGRNVNRAEFQRMMNDAKLGLFDYVVIYKVTRIMRNRDEMALARIMLRKAGVEILYAGEEIASGSSGVLQLGMLEVLAEWESAIDSERIRDGIQKNAARCLANGHSLYGWDIVDGRYSVNEREAALMRKMKNMLFSGHSVADIVRALEGEKTRNGKPFNQDKVTKLLRRVQNGGTYSYAGHVVEGGMPGLWPQVEQDMIESVLNDRHRPRRKVDSSKEFPLSGKLYCTKCGMPMAGMSGTSKTGKAYHYYRCRKCRRTVRRDLIEDAVVDMTLQAVARDDVRQRIAQGMALYQSEQEETKPESYYLKKELRRIDAAFERIWQAIEDGIAPPGGKERTDELKRRKAEIEAQLRIAERGESMSFGVDELMLWLDEIATELTPLDILNKFVRFAEIDGKSNRIRVYFAFDKHGDGFSPNSADKGEHLYEERCSPNSTLVELMRKTANSTGTANRSAIQLDTCIVRVSKNWFVVVGTCQK

SEQ ID NO: 3732 - protein, 525 aa, Unknown
  Description of Unknown: Integrase B3733 sequence
  PTHR30461:SF3,cd00338,SM00857,G3DSA:1.10.10.2600,IPR036162, PF13408,IPR025827,G3DSA:3.40.50.1390,PS51737,IPR006119, IPR038109,PF07508,SSF53041,IPR011109,PTHR30461, PS51736,Coil,PF00239
MPTVKVIPATRDFHTGIEKTTTRKKRVGAYARVSTDSDDQLSSYEAQCDYYTRYIKSRPDWEFVGLYADEGISGTNTKHRDRFNAMIADALNGKIDLIITKSVSRFARNTVDSLTTVRKLKEKGVEVYFEKENIYTLDSKGELLITIMSSLAQEESRSISENVTWGKRKLFADGKVTLPYSSFVGYRKGANGLPEIEPEGAKIVRRIYTEFLNGRTARQIADGLSADGIPTPRRAKKWRCTTIISILTNEKYKGAALLQKSFTVNFLTKKMKPNEGEVPQYYIENSHPAIIDPVEFDLVQAEMQRRRKLGKIYSGNSIFASKIICGDCGEFYGEKVWHSNDRYRKTIFRCNHKYNNEKGKCQTPVISEQQIKETFVVAYNALMADKAGVIADCRALQHMLTDATAMEQEIADLSKQLGDSTAELRQHVEGNMRSAMNQEQFWKRYNTLEEQCNCLSDRLAKLQSSVKERKQRADVIGGFMFEIKERDGIIDEFDEELWTALLESVTITRDGKWQFKFKNERVIEV

SEQ ID NO: 3733 - protein, 525 aa, Unknown
  Description of Unknown: Integrase B3734 sequence
  PTHR30461:SF3,cd00338,SM00857,G3DSA:1.10.10.2600,IPR036162, PF13408,IPR025827,G3DSA:3.40.50.1390,PS51737,IPR006119, IPR038109,PF07508,SSF53041,IPR011109,PTHR30461, PS51736,Coil,PF00239
MYEEVKTACIYARYSSNNQTEQSIEGQLRVCREFCNRYNIKIVEIYTDRATSASKDIEKRVSFLKMIKDSEKGNFDAVIVYKLDRFARSRYDSATYKYRLRKNGVQLISATENISNDPEGIILESVLEGMAEFYSAELSQKIHRGLRESAYKHNSIGGQIPLGYKTEGKKLVIDEETAPIVREAFEMYAEGHSVADICRTFNARGYKTSKGTRFGKSSFSKIFRNEKYIGVYQFHDYRAEDAIPALIDRKTFNLVQARLKAVGKTPGQFKAKRMYLLSGKLYCGHCGCKMNGNCNTNDYSYYECYGKKNLHKDCHKRNLRKDFIEDIVVRDALSLLTPERIEEIATVAIQTNTYEVETTTDIPAIRGRLHETKLSLENITKAIEGGLAPETLVKRMVELEKEKKVLEGELKKEEKGVTYLDREQVVYWLNQFKDGDIEDEDFRRQLIDLFVNSVTVWDEPDDFFKITIAYNLTSLQEKTYRLPKGGTLSDLELNAPALKSNPIIEGNLLFHTTFQQYIPYKRYGK

SEQ ID NO: 3734 - protein, 525 aa, Unknown
  Description of Unknown: Integrase B3735 sequence
  SM00857,G3DSA:1.10.10.2600,IPR036162,PS51737,G3DSA:3.40.50.1390, IPR006119,IPR038109,PF07508,SSF53041,IPR011109, PF00239,PTHR30461,PS51736,Coil,cd00338
MAYCLYLRKSRSDIEAEAHGEEETLARHERILLDLAKRCEYNVTQIYREVVSGETIASRPVMQQVLQEVEQGMWDGVLVVEVERLARGDTIDQGIVAQAFKYSDTKIITPIKVYDPTNEFDEEYFEFGLFMSRREYKTINRRLQRGRLAASQEGKFVSGSKPYGYERVRCSDGKGWTLRPVEDEADIVRYIFKLYAYGIESESGEVHYPGTASIATMLDKLGVKTPSGGDTWQSHTVYKILQNPVYIGKVRWGERQTKRISENGVIKKKRVHVPESEWLLVDGLHPAIIDVATFNRAADMMKQKGPVPLPGTYSLSNPLAGIVVCAKCGRNLTQRNSQSYPMLCCPNKRCTNVGAKLSLIEERILQGLSGWLADYRLKWDDGSAAPDTQIPETEKAITRAKSEVATLRKQLSRTHDLLEQSVYDTDTFLLRSRDVNERITAAEKKVSKLTELLAELKRREDSKKNIVPKVEKLLEVYETFPNAQAKNDMLKGILEKVVYLRENRSNKGGPLDNFELTLFPKIPRS

SEQ ID NO: 3735 - protein, 525 aa, Unknown
  Description of Unknown: Integrase B3736 sequence
  SM00857,G3DSA:1.10.10.2600,IPR036162,PF13408, IPR025827,G3DSA:3.40.50.1390,PS51737,IPR006119, IPR038109,PF07508,IPR011109,SSF53041, PTHR30461,Coil,PS51736,cd00338,PF00239
MVKNRAAIYARFSSHNQRSESIEIQVENSRAYCEREGLQVVREYCDYAQTGRNVNRAEFQRMMNDAKLGLFDFVVIYKVTRIMRNRDEMALARIMLRKAGVEILYAGEEIASGSSGVLQLGMLEVLAEWESAIDSERIRDGIQKNAARCLANGHSLYGWDIVDGRYSVNEREAALMRKMKNMLFSGHSVADIVRALEGEKTRNGKPFNQDKVTKLLRRVQNGGTYSYAGHVVEGGMPGLWPQVEQDMIESVLNDRHRPRRKVDSSKEFPLSGKLYCTKCGMPMAGMSGTSKTGKAYHYYRCRKCRRTVRRDLIEDAVVDMTLQAVARDDVRQRIAQGMALYQSEQEEMKPESYYLKKELRRIDAAFERIWQAIEDGIAPPGGKERTDELKRRKAEIEAQLRIAERGESMSFGVDELMLWLDEIATELTPLDILNKFVRFAEIDNKNNRIRVYFAFDNHGDGFTPNDADKGEHLYEERCSPNSTLVELMRKTANSTNTATRAAIQLDTCIVRVSKNWFVVVGTYQK

SEQ ID NO: 3736 - protein, 525 aa, Unknown
  Description of Unknown: Integrase B3737 sequence
  PTHR30461:SF3,IPR036162,PS51737,IPR011109,PTHR30461, PF00239,G3DSA:1.10.10.2600,IPR006119,SSF53041,cd00338, SM00857,IPR025827,IPR038109,PS51736,PF13408, G3DSA:3.40.50.1390,PF07508,cd09005,Coil
MGRKVTVIPPTISLQTHLPTTQKVKRKVAGYARVSTDFEEQLTSYEAQVDYYTKYIQEREDWEFVKVYTDEGISATSTVHRDGFNQMVADALDGKIDLIVTKSVSRFARNTVDSLTTVRKLKEKGVEVFFEKEDIYTLDSKGELLITIMSSLAQEESRSISENVTWGQRKRFADGKVSLPYKHFLGYRKGADGLPEIVPEEAEIVRSIYRWFMEGMTPYKIACILIEKGIPTPSGKEQWHLSTVKSILTNEKYKGSALLQKKFTVDFLTKKTKVNEGEVPQYYVEESHPAIISPEEFELVQAEMARRKELGKRYHSGNIFTAKIVCGECGGFYGPKIWHSNSRYRRVIWRCNKKYTNACYCKTPHIDEDTIKQGFLKAYNQLLTDKGSVLSLCEMLLRAFSDCSDLDAKMSVLDDEEKQITKNIREMVVINSRTVQKQPEYTLEYQSYEREYEALKAKYQKLQAEKLDRINKTTVIQDFMEQIKKRKEPIKVFSSDVWLAAIETVTICEKGELQFRFKNGTEITV

SEQ ID NO: 3737 - protein, 525 aa, Unknown
  Description of Unknown: Integrase B3738 sequence
  SM00857,G3DSA:1.10.10.2600,IPR036162,PF13408,IPR025827, G3DSA:3.40.50.1390,PS51737,IPR006119,IPR038109,PF07508, SSF53041,IPR011109,PTHR30461,Coil,PS51736, cd00338,PF00239
MAKNRAAIYARFSSHNQRSESIEIQVENSREYCEREGLQVVREYCDYAQTGRNVNRAEFQRMMNDAKLGLFDYVVIYKVTRIMRNRDEMALARIMLRKAGVEILYAGEEIASGSSGVLQLGMLEVLAEWESAIDSERIRDGIQKNAARCLANGHALYGWDIVDGRYSVNEREASLMRKMKNMLFSGRSVADIVRALEGEKTRNGKPFNQDKVTKLLRRVQNGGTYSYAGHVVDGGMPGLWPQVEQDMIESILNDRHRPRRKVDSAKEFPLSGKLYCSKCGMPMAGMSGTSKTGRAYHYYRCRKCRRTVRRDLIEDAVVDMTLQAVAREDVRKRIAQGMALYQSEQEETKPESYYLKKELRRIDAAFERIWQAIEDGIAPPGGKERTDELKRRKSEIEAQLRIAERGESLTFGVDELMLWLGEIATELTPLDILNKFVRFAEIDSKNNRVRVYFAFDKHGDGFTPNDVDKGEHLYEERCSPNSTLVELMRKTANSTSTASRAAIQLDTCVVRVSKNWFVVVGTCQK

SEQ ID NO: 3738 - protein, 525 aa, Unknown
  Description of Unknown: Integrase B3739 sequence
  PTHR30461:SF3,SM00857,G3DSA:1.10.10.2600,IPR036162,PF13408, PS51737,IPR025827,G3DSA:3.40.50.1390,IPR006119,IPR038109, PF07508,SSF53041,IPR011109,PTHR30461,cd00338, PF00239
MPRKPAKHPAKPKRGKKLEIEEPGVLYGRYSSHNQKDISIEQQFEKCYELAAEYGIRIIDTYADRAVSGRTDKRVDFQRMMADAAKGKFRYVLAWKSNRIGRNMLEALVNEARFQELGVRVLYVEEDFDDTAAGRFAARSMMNVNQFYSENMAEDIKRGLYDNAANCMVTNGHLPYGYKADETLHYAIDEPRAAVIREIFTRVSCGEAFVDIMSSLNARGITTSYGRPWGRSSFQKILSNERYRGIYIYGDVRIEGGIPRIVSDELYFKVQEAITTKKNPQGRHRVNGDYLLTGKLFCGHCKSPMTGISGTGRAGKLHFYYVCQKRRTEKTCHKKNVRRDVIELKIAQAIRDYALKDDIIEWIADSCVEDHDRRVSESHLSVFEDQLAEVNRSIKNVMSAIEKGIITETTKGRLMELEAERTAIEGKICAAKAAIVPTNRERLVEWLRSLREGDVHDKKYQAGLFDTFLVAAYLYDDNRVKIVFSFAGDKNTIEIPLEDIIDSIDDEASCVRLSSTLSHQNQKSC

SEQ ID NO: 3739 - protein, 525 aa, Unknown
  Description of Unknown: Integrase B3740 sequence
  SM00857,G3DSA:1.10.10.2600,IPR036162,PS51737,G3DSA:3.40.50.1390, IPR006119,IPR038109,PF07508,SSF53041,IPR011109, PTHR30461,Coil,PS51736,cd00338,PF00239
MNESVCIYLRKSRADREAEAHGEGETLARHERILLDLAKKKEYIVGAIYREVVSGETIADRPVMQQLLREVESGIWDGVLVVEVERLARGDTIDQGVVSRAFQYSDTKIITPTKIYDPNNEFDEEYFEFGLFMSRREYKTIKRRLNAGRISSVKEGKYCGNKPPYGYERVKLEKEKGYTLRPVPTQAEIVKMIYTWYAGDGCEQIGVAKIVRKLNEMGIESALGDDWTPASIQGILTNPVYIGKIRWNGRKTVKTIQNGQVIKARPRSKDTLICDGLHPAIISEDLYNSVQEIRKKNPPRPVSIANSIRNPLAGIVYCSKCGRAMVRRPYQKRGQEDTLMCPYTSCPTVSSKLSLVEKSVIDGIREIVEEYKLNNDINASSQAIDLTIISKQNLIHEKENELESLNAQKAKQYDLLEQGIYTTEVFLERAKTISASIQSCSDTIEKLKEEIKHDENIIKQQSDFIPRCEELLDNYWSLDTESKNKMLKSLIEKVAYSKDTKNAYGKGNEIGFQLDIFPKIQKNNQ

SEQ ID NO: 3740 - protein, 525 aa, Unknown
  Description of Unknown: Integrase B3741 sequence
  PTHR30461:SF3,SM00857,G3DSA:1.10.10.2600,IPR036162,PF13408, PS51737,G3DSA:3.40.50.1390,mobidb-lite,IPR025827,IPR006119, IPR038109,PF07508,SSF53041,IPR011109, PTHR30461,PS51736,cd00338,PF00239
MARSAKKIEYALAEQIGVIYARYSSHNQKEESIEQQIAECTEFAEKNGIRIIGIYADKAVSGRSDRRPNFQRMMRDAEKRHFQIVVAYKSNRIARNMLNALQYEAKLDLFGIKTLYAKEEFGNTAAGRFALRTMMNVNQFYSENMGEDIKRGMVDNANECKVNGMLPLGYVKSKEGKYAIAPDEAAVVREIFDSVLKDVPVAEIARSLNQRGIHTKLGREWNKNSFHIMLKNDNYIGVYRHSGVVVEDGIPPILEKEVFAAVQEKLANKKKTAGRRSANGEYLLTGKLFCGYCGSYMIGVSGTGENGTVHNYYQCQKRHAEGRCEKKNVRRDFIEKLIARLTQDYILQDDTIEWIADSTMSFQAMARRESGVAQLERDLADNRKVAKNIMAAIEQGIITETTKARLLEVEGTIHDLERSLSIAKAASQPIERERVVFSLEQMREGNVGSKDHQKKLIDTFVKSVTLWDDRIQIDYYHTPGKHKFSYSLEELTSKAENESNASDVRTDSLELHHQAAPKKMPLRKA

SEQ ID NO: 3741 - protein, 525 aa, Unknown
  Description of Unknown: Integrase B3742 sequence
  SM00857,G3DSA:1.10.10.2600,IPR036162,PF13408,PS51737, G3DSA:3.40.50.1390,IPR025827,IPR006119,IPR038109,PF07508, IPR011109,SSF53041,PTHR30461,Coil,PS51736, cd00338,PF00239
MAKPEVSELAVVYARYSSHSQGEQSIEGQLSNARDYAAAHGYTIVHEYVDRAKSGRTDNRAEFQQMLKDTAKRQFSVIILWKVDRFGRNREEIAINKMKCRKNGVRVEYVAETIPDSPEGVILESVLEGFAEYYSLQLSQNIRRGRAESAEKCQSLGGNRPLGYKTGPDKKFVIDENTAPTVKMIFTMYADGKTVTEIVDKLNEMGLRTLRGGPFTKNSLHSILKNKKYIGVYEYQGREIKDGVPRIIEDDVFNKVQEMLKINKRAPAKTWSRADYILTDKLFCGKCGALMFGESGTSKTGVKHNYYICSNKKRFRSCDKKAVRQADIEDAVLNATHELLQDDELLDYIVDRTWEYYLAQDNSQEELRNLQRQLAQTDTAISNLIRAIEAGILTEETKKRMDELTQQKADLKASIADREIARGFHLQKSHIAFYLRSLRDADWSDKETQKRLIQTFVNAVFVYDDHITLTYNFSGDKSTITLRDVQRFEDGEEFGCRASRSTKTHRYELFWFRNVFGLTRKLPQR

SEQ ID NO: 3742 - protein, 525 aa, Unknown
  Description of Unknown: Integrase B3743 sequence
  PTHR30461:SF3,cd00338,SM00857,G3DSA:1.10.10.2600,IPR036162, PF13408,PS51737,G3DSA:3.40.50.1390,IPR025827,IPR006119, IPR038109,PF07508,SSF53041,IPR011109,PTHR30461, PS51736,Coil,PF00239
MPTVKVIPATRDFHTGIEKTTTRKKRVGAYARVSTDSDDQLSSYEAQCDYYTRYIKSRPDWEFVGLYADEGISGTNTKHRDRFNAMIADALNGKIDLIITKSVSRFARNTVDSLTTVRKLKEKGVEVYFEKENIYTLDSKGELLITIMSSLAQEESRSISENVTWGKRKLFADGKVTLPYSSFVGYRKGANGLPEIEPEGAKIVRRIYTEFLNGRTARQIADGLSADGVPTPRRAKMWRCTTIISILTNEKYKGAALLQKSFTVDFLTKKMKPNEGEVPQYYIENSHPAIIDPVEFDLVQAEMQRRRKLGKIYSGNSIFASKIICGDCGEFYGEKVWHSNDRFRKTIFRCNHKYNNEKGKCQTPVISEQQIKETFVVAYNALMADKAGVIADCRALQHMLTDTTAMEQEIADLSKQLGDSTAELRQHVEGNMRSAMNQEQFWKRYNTLEEQCNCLSDRLAKLQSSVKERKQRADVIGGFMFEIKERDGIIDEFDEELWTALLESVTITRDGKWQFKFKNERVIEV

SEQ ID NO: 3743 - protein, 525 aa, Unknown
  Description of Unknown: Integrase B3744 sequence
  PTHR30461:SF3,SM00857,G3DSA:1.10.10.2600,IPR036162,PF13408, PS51737,IPR025827,G3DSA:3.40.50.1390,IPR006119,IPR038109, PF07508,SSF53041,IPR011109,PTHR30461,Coil, PS51736,cd00338,PF00239
MDTLADVVVYARYSSAGQNDQSIEGQVKTCREFAAQRGFRVVQEYADRAISGRHAETRPAFQQMIADAKKKTFQYILVWKLDRFARNRYDSAIYKKELRKYGVRVLSVTEGIDEGNESILLEAILEAMAEEYSRQLSQNVRRGMRQNAEKGLSLGGGTPYGYRLQGKRYVIVDREAEVVRFIHEAYAEGRPSREIINECKSRGYHTRKGADFTMNAIARMIANDKYAGAFLFKDELVVADLYPPIVPPELKERAKKRLALKARAPGHEKAKVEYILHGKLFCGHCGAPMVGESGKSKSGTVYNYYACAEKKKRHGCKKKNERKDFLEWYIAEQITEYVLTDSRIEEIAGAVVAEYKKSFDASGIKRLEKKIKDADAELDKLVDALIKTSADAAVKRINARIEEAEQYRAQLEDDLSSLRIASRVEIKKDDVAKWLRSMRRGDLMDDEYRKKIVEIFVNAVYLYDDRVAIFFNVKDCKQVSYIDMIDATGWAACSDLSSNALPITDLSEHGKLIILNGAIGFLLRR

SEQ ID NO: 3744 - protein, 525 aa, Unknown
  Description of Unknown: Integrase B3745 sequence
  SM00857,G3DSA:1.10.10.2600,IPR036162,PF13408,PS51737, G3DSA:3.40.50.1390,IPR025827,IPR006119,IPR038109,PF07508, IPR011109,SSF53041,PTHR30461,Coil,PS51736, cd00338,PF00239
MAKPEVSELAVVYARYSSHSQGEQSIEGQLSNARDYAAAHGYTIVHEYVDRAKSGRTDNRAEFQQMLKDTAKRQFSVIILWKVDRFGRNREEIAINKMKCRKNGVRVEYVAETIPDSPEGVILESVLEGFAEYYSLQLSQNIRRGRAESAEKCQSLGGNRPLGYKTGPDKKFVIDENTAPTVKMIFTMYADGKTVTEIVDKLNEMGLRTLRGGPFTKNSLHSILKNKKYIGVYEYQGREIKDGVPRIIEDDVFNKVQEMLKINKRAPAKTWSRADYILTDKLFCGKCGALMFGESGTSKTGVKHNYYICSNKKRFRSCDKKAVRQADIEDAVLNATHELLQDDELLDYIVDRTWEYYLAQDNSQEELRNLQRQLAQTDTAISNLIRAIEAGILTEETKKRMDELTQQKADLKASIADREIARGFHLQKSHIAFYLRSLRDADWSDKETQKRLIQTFVNAVFVYDDHITLTYNFSGDKSTITLRDMQRFEDGEEFGCRASRSTKTHRYELFWFRNVFGLTIKLPQR

SEQ ID NO: 3745 - protein, 525 aa, Unknown
  Description of Unknown: Integrase B3746 sequence
  PTHR30461:SF3,SM00857,G3DSA:1.10.10.2600,IPR036162,PF13408, PS51737,IPR025827,G3DSA:3.40.50.1390,PS51736,IPR006119, IPR038109,PF07508,SSF53041,IPR011109,PTHR30461, mobidb-lite,cd00338,PF00239
MARSAKKIEYAPAEQIGVIYARYSSHNQKEESIEQQIAECSDFAAKNGIRIVGIYADKAVSGRSDRRPNFQRMMRDAEKRQFQIVIAYKSNRIARNMLNALQYEARLDLLGIKTLYAKEEFGNTAAGRFALRTMMNVNQFYSENMGEDIKRGMVDNANECKVNGMLPLGYVKSKEGKYAIAPDEAAVVREIFDSVLKDVPVAEIARSLNQRGIRTKLGREWNKNSFHIMLKNDNYIGVYRHSGVVVEGGIPSILEKEVFAAVQEKLANKKKTAGRRSANGEYLLTGKLFCGYCGSYMIGVSGTGENGTVHNYYQCQKRHAEGRCEKKNVRRDFIEKLIARLTQDYILQDDTIEWIADSTMSFQAMARRESGVAQLERDLADNRKVAKNIMAAIEQGIITETTKARLLEVEGTIHDLERSLSIAKAASQPIERERVVFSLEQMREGNVGSKEHQKKLIDTFVKSVTLWDDRIQIDYYHTPGKHKFSYSLEELTSKAENESNASDVRTDSLELHHQAAPKKMPLRKA

SEQ ID NO: 3746 - protein, 525 aa, Unknown
  Description of Unknown: Integrase B3747 sequence
  PTHR30461:SF3,SM00857,G3DSA:1.10.10.2600,IPR036162,PF13408, IPR025827,G3DSA:3.40.50.1390,PS51737,IPR006119,IPR038109, PF07508,IPR011109,SSF53041,PTHR30461,Coil, PS51736,cd00338,PF00239
MQTAENRSKYHQLRVAAYCRVSTEQEEQQNSYQVQIAYYTDLINRKKEWTLAGIFADEGISGTQTKKRTEFNRMIRMCRNKKIDLVITKSISRFARNTVDCLEYVRQLKDLGIGVIFEKENINTMTMTSEFMIALYGSFAQAESESISKNVSWGKEKAYREGKVQFQYKYLLGYKKGADGKPEIVPEEAETVKLIFNMYLDGYTLLNIADTLMAQGRRTATGKNIWSKGEVQRILKNEKYVGDALLQKSFTVDCITHKVVKNNGERPMYLVTDHHTPIVDRDTFNRVQQELARRTSKRKISDKTKTEQGKYSGKYALSELLICGHCGTPYRRRVWSRNGKKQVVWRCISRLEHGKKYCPDSPTIKEEQLHKAIIRAINNYYSCRNDIARILKANIGSVLECQGQEEILAAGKRLREIDQARNDLVNLIASGGCDEDKLDSEFEKLYAEEQQLSERLENLKLQNKTSEGTQAKLDEIMDMIEHEKFELETFDNVLIRKLIECIKVLSKTEILVIFKGGYEVRTEIE

SEQ ID NO: 3747 - protein, 525 aa, Unknown
  Description of Unknown: Integrase B3748 sequence
  PTHR30461:SF3,IPR036162,PS51737,IPR011109,PTHR30461, PF00239,G3DSA:1.10.10.2600,IPR006119,SSF53041,cd00338, SM00857,IPR025827,IPR038109,PS51736,mobidb-lite, PF13408,G3DSA:3.40.50.1390,PF07508,Coil
MRKKSNLNAATRAVIYARYSSANQRDCSIEQQVAKCRELAARLGLTVIDVYEDRAISGKTDRRPNFQRMMKDADLRQFDVVLAWKSNRMGRNMLQAMTNEERLRDNGIRTVYAEEDFDDTAAGRFALRNMMNVNQFYSENMAEDITRGLMDNAAKCLSNGSLPLGYKPGDDRHVVLDEAEAAIVQEIFTRVSCYEPFIDIARDLNRRGIKTKKGSEWGRSSFHTICRNERYRGIYIYRDVRIEGGMPRIVSDELFYKVQEVLKVKKNPQGRRKRSGYEEYLLTGKLFCGHCGSPMTGIAGTSKTGAMHYYYTCQKRRTDHSCDKKAVRRDQIERAVGVAIQQQLLTDENIQMMADKLMEYNARTETKYRLQGLQDQLNANKTATANILKAIEMGIITDATKARLLELEKEQGQLLVKIDEAKAEMVPISRNDFVKLLYIYKEGEPTDKKYLAALFDNFLVRVDLYDDHLKITFDPTGGRQPIDMPIGAEESPESPGDSSESSDFEASSQDAEKFVLALHNCTISL

SEQ ID NO: 3748 - protein, 525 aa, Unknown
  Description of Unknown: Integrase B3749 sequence
  PTHR30461:SF3,SM00857,G3DSA:1.10.10.2600,IPR036162,PF13408, IPR025827,PS51737,G3DSA:3.40.50.1390,IPR006119,IPR038109, PF07508,SSF53041,IPR011109,PTHR30461,Coil, PS51736,cd00338,PF00239
MNVVIYARFSSHSQTEQSIEGQLKACYEYAERNSYTVIGEYIDRALTGTNDNRPEFLRMIEDSGKKTFQGILVYQLDRFARNRYDSAVYKKKLKKNGVRVLSARENISEDASGILIESVLEGMAEYYSAELSQKIRRGLDINASKCLCTGGGVALGFKVDKDRHFQVDEDTAPVVREIFEMYANGKTVTEIITMMNARNIVTSRGSAFNKNSLRKMLQNKRYIGTYTYKGTEIPNGIPRIIDDDLFMQVQEMMKKNRKAPARARAKEEYLLTTKLFCGHCKEMMTGYSGTSHTSAVHHYYICNNRKKKLCKKKNVQKDFIEKLVISECRKLLTPENIERISREVVAASQKDQDMTNVKRLSKQLTDIERKRKNLMSAIMECDSDLIRKTLYEQIPLLEKEKSDTELQLTLEKAKQVKLTVSEVRFFLNALRKGDPDSIKYQKALISVLVNAVYLYDDKITLIFNSGDNAVTLDTALLEKIEQQADSVPVEDRFVYEQLSSTIGRISEPYIAWGTVFVQTKRHSLP

SEQ ID NO: 3749 - protein, 525 aa, Unknown
  Description of Unknown: Integrase B3750 sequence
  PTHR30461:SF3,cd00338,SM00857,G3DSA:1.10.10.2600,IPR036162, PF13408,IPR025827,PS51737,G3DSA:3.40.50.1390,IPR006119, IPR038109,PF07508,IPR011109,SSF53041,PTHR30461, PS51736,Coil,PF00239
MPTVKVIPATRDFHTGIEKTTTRKKRVGAYARVSTDSDDQLSSYEAQCDYYTRYIKSRPDWEFVGLYADEGISGTNTKHRDRFNAMIADALNGKIDLIITKSVSRFARNTVDSLTTVRKLKEKGVEVYFEKENIYTLDSKGELLITIMSSLAQEESRSISENVTWGKRKLFADGKVTLPYSSFVGYRKGANGLPEIEPEGAKIVRRIYTEFLNGRTARQIADGLSADGIPTPRRAKKWRCTTIISILTNEKYKGAALLQKSFTVDFLTKKMKPNEGEVPQYYIENSHPAIIDPVEFDLVQAEMQRRRKLGKIYSGNSIFASKIICGDCGEFYGEKVWHSNDRYRKTIFRCNHKYNNEKGKCQTPVISEQQIKETFVVAYNALMADKAGVIADCRALQHMLTDTTAMEQEIADLSKLLGDSTAELRQHVEGNMRSAMNQEQFWKRYNTLEEQCNCLSDRLAKLQSSVKERKQRADVIGGFMFEIKERDGIIDEFDEELWTALLESVTITRDGKWQFKFKNERVIEV

SEQ ID NO: 3750 - protein, 525 aa, Unknown
  Description of Unknown: Integrase B3751 sequence
  PTHR30461:SF3,SM00857,G3DSA:1.10.10.2600,IPR036162,PF13408, IPR025827,G3DSA:3.40.50.1390,PS51737,IPR006119,IPR038109, PF07508,SSF53041,IPR011109,PF00239,PTHR30461, PS51736,Coil,cd00338
MRAFIYCRFSSHKQQELSIEGQRDICQEYADKHNITVVGQYADRARSGKTENRADFRRLMRDAATGVVDCVLVWRYDRFFRNRAESALYRKQLEAAGVHLISVTEYIPEGSAGIITQGMIETVAEYFSAKLSEDVSRGMNKAAQHCQIVGRAPLGYRAGPNKRWQIDPVGAELVRRIFEWYASGKAMGQLAAQLNEEGHRTTSGTLYTRSSFNSILRNEKYIGVYSYGGEVRIEGGCPRIIEDELFFTVQRRLSANRHRPGAYKAEVPYLLSGKLFCGLCGAPMTGTAGTSHTGARHYYYICNNRRAKTCKKKNVRLDLIEEAVLQSALDILTDENIAYISAEVERRCAENSDSAALLASLNAQLEEVQRRLKNIGNAIAQGIITETTKELLEEAEADRTALRQQIDRAKVQAALVVKAEAVACWLDGFRRGDRTDPDFRRQVFGALVHSVFVYDDYLKIIFNVDSAGAAVVPYEAAQAATPSEAPPGSYLDTLGAPNTANTNPAALVFFLCGTFGICVARGSHW

SEQ ID NO: 3751 - protein, 525 aa, Unknown
  Description of Unknown: Integrase B3752 sequence
  cd00338,SM00857,G3DSA:1.10.10.2600,IPR036162,PS51737, G3DSA:3.40.50.1390,IPR006119,IPR038109,PF07508,IPR011109, SSF53041,PTHR30461,PS51736,Coil,PF00239
MLDPNGIYFAYLRKSREDREAELHGYGETLKRHQRMLEDLAKYHKIKIAKFYSEVVSGETIASRPQMLAMLDDIESLSPDGVLVVEIERLARGDTRDQGLVLETFKYSGTRIITPMKIYDPTDERDEEYAEFGLFMSRREYKTINRRLRDGKIASFNEGKWTGNKAPFGYERVKLAGEKGFTLKIVPEDADVVRLIFQLFIYGSNASNNIPVGTSKICRILDNLHISPPIGETWQPCTIRQILSNPTYIGKVHMGRRSTQKKTLNGVVKISRPINKNAKIADGLHPAIIDDALFLKAQEKRKANYQKPFFEGIKNPLAGLIYCSVCGKSMYRRPAGKRCKEDMIQCTTHGCPTSASYYHYIEEKLLVSLNKWLEDYRIQVKDISPENYAQQLNLLQSQLNAAQNESETSKKQLSKAMDLLEKDIYSVEMFQQRASELNEKIALSSRSISDLSVKIDSIRTKAVQKEEVIARWERILSLYPQVDDPAVKNALMKELLTRIEYSKPHKGNRQNGGMDQFTLKLFPRL

SEQ ID NO: 3752 - protein, 525 aa, Unknown
  Description of Unknown: Integrase B3753 sequence
  PTHR30461:SF3,SM00857,G3DSA:1.10.10.2600,IPR036162,PS51737, G3DSA:3.40.50.1390,IPR006119,IPR038109,PF07508,IPR011109, SSF53041,PTHR30461,Coil,PS51736, cd00338,PF00239
MWMLPQMSVDDIIMYLRKSRTDDPALTVQEVLSKHEQMLDDWVARNIPDDGRRIPESNRYREVVSGETIESRPCVQEVLRRVESPRVKAVLVVEPQRLSRGDLEDIGRLVKLLRYSNTIVITLQYTYDLRDERDRDMFERELKRGNEFLEYQKRIMGNGRLLSVQNGNFIGQKPPYGYNKVVIKEGKRKCHTLEPDPERAPIVKMVFEMYAGGTSASQIAKTLRTMGVTTADGGKWVTSSVKQMLTNDHYIGMVHWNKRKTVKVVEDGEVVATRPRNSDFLVYPGKHQPIIEKELWDAVQAIKGNIPPIKNRAKYANPFAGLAVCQCGGKMVRQQYVRDGVERCAPRLVCPNQSECHTASCSLPEFTEAVIEALEKGIKNFELMMADAPEDDATQQERLIAQLEKRLAELDRLELAQWDKYTQEAMPKHVFDALNKKVVQEKEETLQALKTAMETVPIRVDYEKKRETFAAAVRTLQDPNARVKEKNLLLKQCIERINYNRKPKESDNRRFGNPEPLELEFQFKV

SEQ ID NO: 3753 - protein, 525 aa, Unknown
  Description of Unknown: Integrase B3754 sequence
  PTHR30461:SF3,cd00338,SM00857,G3DSA:1.10.10.2600,IPR036162, PF13408,IPR025827,PS51737,G3DSA:3.40.50.1390,IPR006119, IPR038109,PF07508,IPR011109,SSF53041,PTHR30461, PS51736,Coil,PF00239
MNESVCIYLRKSRADREAEAHGEGETLARHERILLDLAKKKEYIVGAIYREVVSGETIADRPVMQQLLHEVESGMWDGVLVVEVERLARGDTIDQGVVSRAFQYSDTKIITPTKIYDPNNEFDEEYFEFGLFMSRREYKTIKRRLNAGRISSVKEGKYCGNKPPYGYERVKLEKEKGYTLRPVPTQAEIVKMIYTWYSGDGCEQIGVAKIARKLNEMGIESALGGDWTSASIQGILTNPVYIGKIRWNGRKTVKTIQNGQVVKTRPRSRDILICEGLHPAIISDDLYNSAQEIRQKNPPRPISIKNTVRNPLAGIVYCSKCGRAMVRRPYQKSGQEDTLMCPYTSCSTVSSKLSLVEKAVLDGIKEIAEKYKLNNDINVPSNAINSGIVSKQNLIREKESELESLNTQKAKQYDLLEQGIYTTEIFLERAKTISASIQSCSDTIEKLKEEIKHDENIIKQQSDFIPRCEELLDNYWSLDTESKNKMLKSLIEKVTYSKDTKNAYGKGNEIGFQLDIFPKIQKENQ

SEQ ID NO: 3754 - protein, 525 aa, Unknown
  Description of Unknown: Integrase B3755 sequence
  PTHR30461:SF3,SM00857,G3DSA:1.10.10.2600,IPR036162,PF13408, PS51737,G3DSA:3.40.50.1390,IPR025827,IPR006119,IPR038109, PF07508,IPR011109,SSF53041,PTHR30461,Coil, PS51736,cd00338,PF00239
MDTVNKFGSYCMYLRRSRADDDAERMGAGETLARHYMMLQELAGRMLGHPIPESAVYREIVSGDTIADRPEMRRLMQDVELGRWNGVFVADIDRLARGDTMDQGLVAQTFLYSQTLIVTPLKVYDPEDPADNEFFEIRLFFARREYQMIKRRMQTGRVNAVKEGYYVSSRPIYGYERYKLPDRRGWSLRIVEDQAAVVRKIYDWYLHGENGETLGCQRIANRLNSMGVKTLQGLPWQSDRVLNVLKNPTYKGCVQWYQRREQVHMQDGQKVKKRPLSDDHIVVPGYHEAIIDEALFDRAQELIVDRRNAPIPGKRKCVNPLTGLIRCGHCGYAVRMSNAGRGLDGAYLKCTYINTCTSFGIRFRPVEQVVLNTLQSWVDYDVSRLPEEQKQQTENNDALRAAQEKQIATLNKQLSRLRDLLEQGVYTVDVYLERERDLRARIEACQNALEQLRPKEKPMEQVLAEFAPLVKNVLEAYAATDDPAEKNALLKTVIDHIVYFKIAKTLRGHSPLESLTLEIYPRLPK

SEQ ID NO: 3755 - protein, 525 aa, Unknown
  Description of Unknown: Integrase B3756 sequence
  PTHR30461:SF3,SM00857,G3DSA:1.10.10.2600,IPR036162,PF13408, IPR025827,G3DSA:3.40.50.1390,PS51737,IPR006119,IPR038109, PF07508,IPR011109,SSF53041,PTHR30461,Coil, PS51736,cd00338,PF00239
MAKRVTTIMPTLVRFTEAPIAEHRKRKVAAYARVSTDSDEQFTSYEAQIDYYTQYIKARDDWEFVQVYTDEGITGTSTKHREGFKQMVADALEGKIDLIVTKSVSRFARNTVDSLTTIRQLKDKGVECFFEKENIWTFDGKGELLITIMSSLAQEESRSISENCTWGQRKRMADGRVSVPFDHFLGYERGENGELVINEEQAKTVRLIYDLFLQGLTPHTIANRLTAMGILTPRRKAKWNQGTVRSILTNEKYKGDALMQKCYTADFLTKKQVPNNGVLPQYYVEGDHEAIIPPETFELVQQEMLRRNNRDNRYSGVDIFASRIVCGECGSYYGAKVWHSNSKYRRIIYRCNHKYHDGKTCSTPNLTEDEIKSSFVAAVNKLIANKGEVIANLEAMSQTLFGTEVLECAREKLSAEMDLLQNMIQAAIAENAHIALDQAAYQKRFDKMREKYEDAKRQHDDIKQQIADKTSARVAASRFIGTLKKMDGLITEFDPSLWGSLLDHVAVYSKEDMRYTFKDGTEIKL

SEQ ID NO: 3756 - protein, 525 aa, Unknown
  Description of Unknown: Integrase B3757 sequence
  PTHR30461:SF3,IPR036162,PS51737,IPR011109,PTHR30461, PF00239,G3DSA:1.10.10.2600,IPR006119,SSF53041,cd00338, SM00857,IPR025827,IPR038109,PS51736,PF13408, G3DSA:3.40.50.1390,PF07508,cd09005,Coil
MGRKVTVIPPTISLQTHLPTTQKVKRKVAGYARVSTDFEEQLTSYEAQVDYYTKYIQEREDWEFVKVYTDEGISATSTVHRDGFNQMVADALDGKIDLIVTKSVSRFARNTVDSLTTVRKLKEKGVEVFFEKEDIYTLDSKGELLITIMSSLAQEESRSISENVTWGQRKRFADGKVSLPYKHFLGYRKGADGLPEIVPEEAEIVRSIYRWFMEGMTPYKIACILIEKGIPTPSGKEQWHLSTVKSILTNEKYKGSALLQKKFTVDFLTKKTKVNEGEVPQYYVEESHPAIISPEEFELVQAEMARRKELGKRYHSGNIFTAKIVCGECGGFYGPKIWHSNSHYRRVIWRCNKKYTNDCYCKTPHIDEDTIKQGFLKAYNQLLTDKGSVLSLCEMLLHAFSDCSDLDAKMSVLGDEEKQITKNIREMVVINSRTVQKQPEYTLEYQSYEREYEALKAKYQKLQAEKLDRINKTTVIQDFMEQIKKRKEPIKVFSSDVWLTAIETVTICEKGELQFRFKNGTEITV

SEQ ID NO: 3757 - protein, 525 aa, Unknown
  Description of Unknown: Integrase B3758 sequence
  PTHR30461:SF3,SM00857,G3DSA:1.10.10.2600,IPR036162,PS51737, G3DSA:3.40.50.1390,IPR006119,IPR038109,PF07508,IPR011109, SSF53041,PTHR30461,Coil,PS51736,cd00338, PF00239
MWMLPPMSVDDIIMYLRKSRTDDPALTVQEVLSKHEQMLDDWVARNIPDDGRRIPEANRYREVVSGETIESRPCVQEVLRRVESPRVKAVLVVEPQRLSRGDLEDIGRLVKLLRYSNTIVITLQYTYDLRDERDRDMFERELKRGNEFLEYQKRIMGNGRLLSVQNGNFIGQKPPYGYNKVVIKEGKRKCHTLEPDPERAPIVKMVFEMYAGGTSASQIAKILRTMGVTTADGGKWVTSSVKQMLTNDHYIGMVHWNKRKTVKVVEDGEVVATRPRNSDFLVYPGKHQPIIEKELWDAVQAIKGNIPPIKNRAKYANPFAGLVVCRCGGKMVRQQYIRDGVERCAPRLVCPNQAECHTASCSLPEFTEAVIEALEKGIKNFELMMADAPEDDATQQERLIAQLEKRLAELDRLELAQWDKYTQEAMPKHVFDALNKKVVQEKEETLQALKTAMETVPIRVDYEKKRETFAAAVRTLQDPDASVKEKNLLLKQCIERINYNRKPKESDNRRFGNPEPLELEFQFKV

SEQ ID NO: 3758 - protein, 525 aa, Unknown
  Description of Unknown: Integrase B3759 sequence
  SM00857,G3DSA:1.10.10.2600,IPR036162,PF13408,IPR025827, G3DSA:3.40.50.1390,PS51737,IPR006119,IPR038109,PF07508, IPR011109,SSF53041,PTHR30461,Coil,PS51736, cd00338,PF00239
MAKPEVSELAVVYARYSSHSQGEQSIEGQLSNARDYAAAHGYTIVHEYVDRAKSGRTDNRAEFQQMLKDTAKRQFSVIILWKVDRFGRNREEIAINKMKCRKNGVRVEYVAETIPDSPEGVILESVLEGFAEYYSLQLSQNIRRGRAESAEKCQSLGGNRPLGYKTGPDKKFIIDENTAPTVKMIFTMYADGKTVTEIVDKLNEMGLRTLRGGPFTKNSLHSILKNKKYIGIYEYQGREIKNGVPRIIEDDVFNKVQEMLKINKRAPAKTWSRADYILTDKLFCGKCGALMFGESGTSKTGAKHNYYICSNKKRFRSCDKKAVRQADIEDTVLNATHELLQDDELLDYIVDRTWEYYLAQDNSQEELRNLQRQLAQTDTAISNLIRAIEAGILTEETKKRMDELTQQKADLKASIADREIARGFHLQKSHIAFYLRSLRDADWSDKEAQKRLIQTFVNAVFVYDDHITLTYNFSGDKSTVTLRDMQRFEDGEEFGCRASRSTILEKSELDSDREWVRISCFYQGH

SEQ ID NO: 3759 - protein, 525 aa, Unknown
  Description of Unknown: Integrase B3760 sequence
  cd00338,SM00857,G3DSA:1.10.10.2600,IPR036162,PS51737, G3DSA:3.40.50.1390,IPR006119,IPR038109,PF07508,IPR011109, SSF53041,PTHR30461,PS51736,Coil,PF00239
MLDPNGIYFAYLRKSREDREAELHGYGETLKRHQRMLEDLAKYHKIKIAKFYSEVVSGETIASRPQMLAMLDDIESLSPDGVLVVEIERLARGDTRDQGLVLETFKYSGTRIITPMKIYDPTDERDEEYAEFGLFMSRREYKTINRRLRDGKIASFNEGKWTGNKAPFGYERVKLAGEKGFTLKIVPEDADVVRLIFQLFIYGSNASNNIPVGTSKICRILDNLHISPPIGETWQPCTIRQILSNPTYIGKVHMGRRSTQKKTLNGVVKISRPINKNAKIADGLHPAIIDDALFLKAQEKRKANYQKPFFEGIKNPLAGLIYCSVCGKSMYRRPAGKRCKEDMIQCTTHGCPTSASYYHYIEEKLLVSLNKWLEDYRIQVKDISPESYAQQLNLLQSQLNAAQNESETSKKQLSKAMDLLEKDIYSVEMFQQRASELNEKIALSSRSISDLSVKIDSIRTKAVQKEEVIARWERILSLYPQVDDPAVKNALMKELLTRIEYSKPHKGNRQNGGMDQFTLKLFPRL

SEQ ID NO: 3760 - protein, 525 aa, Unknown
  Description of Unknown: Integrase B3761 sequence
  PTHR30461:SF3,IPR036162,PS51737,IPR011109,PTHR30461, PF00239,G3DSA:1.10.10.2600,IPR006119,SSF53041,cd00338, SM00857,IPR025827,IPR038109,PS51736, mobidb-lite,PF13408,G3DSA:3.40.50.1390,PF07508,Coil
MKKRINTNSAARAVIYARYSSANQRDCSIEQQVEKCRELAAREGVTVIEIYADRAVSGKTDRRPNFQRMMKDASLRQFDVVLAWKSNRMGRNMLQAMMNEEQLRSNGIRTIYAEEDFDDTAAGRFALRNMMNVNQFYSENMAEDISRGLMDNASKCMSNGSLPLGYKTGKDQKVVLDEAEAAIVQEIFTRVSCYEPFIDIARDLNRRGIKTKKGAEWGRSSFHTICRNERYRGIYIYRDIRVEGGMPRIVSDELFYKVQEVLKVKKNPQGRRKRSGYEEYLLTGKLYCGHCGSPMTGIAGTSKTGAMHYYYTCQKRRTDHSCDKKAVRRDQIEKAVAIAIQQQLLTDENIQMMADETMSYNARTEIKYRLQSLQQQLYSNETSTANIMKAIEMGIITDTTKARLLALEQEHGQLLAKIDTAKAEMVPINREDFVSLLDIYRTGDVNNKKYLAALFDTFLVRVDLYDDHFKITFDPTGGKMPVDIPIGAEDSPESPGDSPESSDFEASPQDAEKFVLALHNRTIRL

SEQ ID NO: 3761 - protein, 525 aa, Unknown
  Description of Unknown: Integrase B3762 sequence
  PTHR30461:SF3,SM00857,G3DSA:1.10.10.2600,IPR036162,PF13408, PS51737,G3DSA:3.40.50.1390,IPR025827,IPR006119,IPR038109, PF07508,IPR011109,SSF53041,PTHR30461,Coil, PS51736,cd00338,PF00239
MAKVTIIPSKKNPITLTPINEIIKKKVAAYARVSTDSDEQFTSFDSQCKVYEDYIKSKPDWEFVKVYADDGISGTNTKNRVQFNQMIEDALAGKIDLIITKSISRFARNTLDTISYTRKLKASGIEVYFEKENLWTFDDKAEFLLAIMSSIAQEESRSISQNVTMGKRWKMQEGKVQFAYKNFLGYKKEDGQIKIDDDQAVIVKLIYKMFLVDGKTCSYIANYLNSNNVLTPARRHNWSKQNILSILKNEKYKGDAILQKSYIKDFLEHKAVKNNGELPKYYVENSHPAIIEKDMWEMVQAELKRRELIGASYSSCNVFSSKLICGDCGAFYGKKVWHSNDAWRKEIFQCNKKFAKGKTRCKTPSFSEQVIKDKFIKAYNLMMVDKNTVVNDAKDVINKLTDTTTLDVQISKYENEMEIVSELVKKLVKDNSIHLQDQNDYEVKYQELVNRHNKAKELYEKLSEEKKYKQAKAITLKSYLSTLENADTEILEWNDALWMTVLDKAIVNRDETITFKFINGKEITL

SEQ ID NO: 3762 - protein, 525 aa, Unknown
  Description of Unknown: Integrase B3763 sequence
  PTHR30461:SF3,SM00857,G3DSA:1.10.10.2600,IPR036162,PF13408, PS51737,G3DSA:3.40.50.1390,IPR025827,IPR006119,IPR038109, PF07508,IPR011109,SSF53041,PTHR30461,Coil, PS51736,cd00338,PF00239
MDTVNKFGSYCMYLRRSRADDDAERMGAGETLARHYMMLQELAGRMLGHPIPESAVYREIVSGDTIADRPEMRRLMQDVELGRWNGVFVADIDRLARGDTMDQGLVAQTFLYSQTLIVTPLKVYDPEDPADNEFFEIRLFFARREYQMIKRRMQTGRVNAVKEGYYVSSRPIYGYERYKLPDRRGWSLRIVEDQAAVVRKIYDWYLHGENGETLGCQRIANRLNSMGVKTLQGLPWQSDRVLNVLKNPTYKGCVQWYQRREQVHMQDGQKVKKRPLSDDHIVVPGYHEAIIDEALFDRAQELIVDRRNAPIPGKRKCVNPLTGLIRCGHCGYAVRMSNAGRGLDGAYLKCTYINTCTSFGIRFRPVEQVVLNTLQSWVDYDVSRLPEEQKQQTENNDALRAAQEKQIATLNKQLSRLRDLLEQGVYTVDVYLERERDLRARIEACQNALEQLRPKEKPMEQVLAEFAPLVKNVLEAYAATDDPAEKNALLKTVIDHIVYFKTAKTLRGHSPLESLTLEIYPRLPK

SEQ ID NO: 3763 - protein, 525 aa, Unknown
  Description of Unknown: Integrase B3764 sequence
  cd03768,PTHR30461:SF3,SM00857,G3DSA:1.10.10.2600,IPR036162, PF13408,IPR025827,G3DSA:3.40.50.1390,PS51737,IPR006119, IPR038109,PF07508,SSF53041,IPR011109,PTHR30461, PS51736,Coil,PF00239
MKKVAIYSRKSKFTGKGESIENQILKCKQFIQFKFDIDTKNTEIFIDEGFSGKNENRPRYQDMIKKVKNKEIDHIIIYQLNRLGRNARDIHNTMQMCEDLGCVIYSATEGFDSSTSFGRALIGILASLAQLEREQLAERVKDNMYTLAKMGRWLGGQSPLGFDGTREYYIDESGKERSVTRLKANNEELKIVKLIYEKYLEEKSISQVSKWTLTNNFKGKNGGNIDKSAINVILKNPVYVKSDTDVFKFLENNGYEVYGEANGNGLLRYGKNNKDNSTGIIATGNHKGVIDSSNWLKIQEILQENTEKAPALGKSKACLLTGLLKCSCGSNMQMRYGPKRKDGTRPYYYVCTMKINSGGTRCNSKNLNGQLFEEKLINHFKKYSEERLIKQLESTLNASKNLEKNINIESIDRDIESAEKSVKSLLNNLKQTTDTNIVNIIFSEISELQNTIKDLKYKKDTLLEDQSEIVLSQSEIISMINTFNDFISLYDTLSIDEKQKRLKTLFKEILYDGNKIHVKFNLKKN

SEQ ID NO: 3764 - protein, 525 aa, Unknown
  Description of Unknown: Integrase B3765 sequence
  PTHR30461:SF3,IPR036162,PS51737,IPR011109,PTHR30461, PF00239,G3DSA:1.10.10.2600,IPR006119,SSF53041,cd00338, SM00857,IPR025827,IPR038109,mobidb-lite,PS51736, PF13408,G3DSA:3.40.50.1390,PF07508,Coil
MRKKSNLNAATRAVIYARYSSANQRDCSIEQQVAKCRELAARLGLTVIDVYEDRAISGKTDRRPSFQRMMKDADRGIFDIVLAWKSNRMGRDMLQAMTNEERLRDNGIRTVYAEEDFDDTAAGRFALRNMMNVNQFYSENMAEDITRGLMDNAAKCLSNGSLPLGYKPGDDRHVVLDEAEAAIVQEIFTRVSCYEPFIDIARDLNRRGIKTKKGSEWGRSSFHTICRNERYRGIYIYRDVRIEGGMPRIVSDELFYKVQEVLKVKKNPQGRRKRSGYEEYLLTGKLFCGHCGSPMTGIAGTSKTGAMHYYYTCQKRRTDHSCDKKAVRRDQIERAVGVAIQQQLLTDENIQMMADKLMEYNARTETKYRLQGLQDQLNANKTATANILKAIEMGIITDATKARLLELEKEQGQLLVKIDEAKAEMVPISRNDFVKLLYIYKEGEPTDKKYLAALFDNFLVRVDLYDDHLKITFDPTGGRQPIDMPIGAEESPESPGDSSESSNFEASSQDAEKFVLALHNCTISL

SEQ ID NO: 3765 - protein, 525 aa, Unknown
  Description of Unknown: Integrase B3766 sequence
  PTHR30461:SF3,SM00857,G3DSA:1.10.10.2600,IPR036162,PF13408, PS51737,G3DSA:3.40.50.1390,IPR025827,IPR006119,IPR038109, PF07508,IPR011109,SSF53041,PF00239,PTHR30461, PS51736,Coil,cd00338
MKKTKNSVQRAVIYARYSCSNQTEQSIEGQLADCEKFAEKYNYYIVDTYIDRAMSATTDRRPQFQQMIADSATGGFDVIIVWKLDRFARNRYDSAVNKQKLNSNGVKVVSVMEHIEDTPEGALMESVLEGFAEYFSKDLSQKVSRGMRETALKFKATGLIPYGYKKTSDNICVPDEHTAPVVKKIFEMYSGGMINKDICDWLNSHGYRTSNGNLFKNQYLRKILNRRRYTGSYTYGDLELHDENQRIISDELFDRVQIQLQAKKRTGRIAREQYVLVGKLFCGYCRNPIRGESGRNHQNRIYTYYKCSVNKTGGKCPKTTVQRDIIENNTIKFILKNFLNDEIINSIVDTIQASETAENNSAELIALRTQIEDTDRKINNLLSAIENGIFTPSTKQRLNDLENAKEKLKYELIVKQSEKNNFNATAFKRFLKNIDVDDFKTTEQRQKLINLVLYREYLWNDKVLYIFNLTPSKPNDSVDIDSYVDALLASTGSTGSTSPTDGVPQVAISELLFGYFFVMVFFPIS

SEQ ID NO: 3766 - protein, 525 aa, Unknown
  Description of Unknown: Integrase B3767 sequence
  PTHR30461:SF3,IPR036162,PS51737,IPR011109,PTHR30461, PF00239,G3DSA:1.10.10.2600,IPR006119,SSF53041,cd00338, SM00857,IPR025827,IPR038109,mobidb-lite,PS51736, PF13408,G3DSA:3.40.50.1390,PF07508,Coil
MPRKKKLQEVGGLRLVAYYRYSNGGQQTEQSIEGQRRDCEAYAKAHGYKIVHEYIDRHISGKSDSRPAFQQMISDSDSHLFDAVICWKTDRLARSRYDSIIYKTRLRRNGVKILYAAETVVDGPEGIIIEGLMESLAEYYSAELAQKLRRGQRESALKCIALGGNRSFGYDIGPDKHYCINEKQAPAVRYIFEQYAAGATAADIVRELTARGYRTSRGNPFNKNSICRIITNEMYLGVYKYADIRIEGGVPAMIDRELFNRCQTQLAFNRAHGGGKGAPRADYVLVGKLDCGLCGHAMKGASATGHTGSKHYYYTCTQHVEKKCPKTSIEKNYLEQIIVDGVAKYVLTPEKISQIVDCMMELQAKEQEPKGNPEKDALEAELAECRRKQNNILEAIEEGGSARLAARLRALEEQEAQLTFALGEINNAPAPPQFSREALTFMFEQFRREEDEVDEEYRRRILDTFVSSILLYEDRAEVKFNITDQKTGDFERVILPISANKKPPEDDDIPSNSEGSTALRLVEAT

SEQ ID NO: 3767 - protein, 525 aa, Unknown
  Description of Unknown: Integrase B3768 sequence
  cd00338,SM00857,G3DSA:1.10.10.2600,IPR036162,PF13408, IPR025827,G3DSA:3.40.50.1390,PS51737,IPR006119,IPR038109, PF07508,IPR011109,SSF53041,PTHR30461,PS51736, Coil,PF00239
MNESVCIYLRKSRADREAEAHGEGETLARHERILLDLAKKKEYIVGAIYREVVSGETIADRPVMQQLLHEVESGMWDGVLVVEVERLARGDTIDQGIVSRAFQYSDTKIITPTKIYDPNNEFDEEYFEFGLFMSRREYKTIKRRLNAGRISSVKEGKYCGNRPPYGYARTKLEKEKGFTLRPVPNQAEIVKMIYAWYAGDGCEQIGIAKIARKLNEMGIESALGGDWTPATIQGILTNPVYIGKIRWNGRKTVKTIQNGQVIKTRPRSKDTLICDGLHPAIISEDLYNSVQEIRKKNPPHPVSIANSIRNPLAGIVYCSKCGRAMVRRPYQKRGQEDTLMCPYTSCPTVSSKLSLVEKAVLDGIREIVEEYKLNNDINASSKDIDCVITSKQNLINEKENELKSLDSQKAKQYDLLEQGIYTTEVFLERAKTIATSIKSCSDTIEKLKEEIKHDENIIKQQSDFIPRCEELLDNYWSLDTESKNKMLKSLIEKVTYSKDTKNAYGKGNEIGFQLDIFPKIQKNNQ

SEQ ID NO: 3768 - protein, 525 aa, Unknown
  Description of Unknown: Integrase B3769 sequence
  PTHR30461:SF3,SM00857,G3DSA:1.10.10.2600,IPR036162,PS51737, G3DSA:3.40.50.1390,IPR006119,IPR038109,PF07508,IPR011109, SSF53041,PTHR30461,Coil,PS51736,cd00338, PF00239
MWMLPPMSVDDIIMYLRKSRTDDPALTVQEVLSKHEQMLDDWVARNIPDDGRRIPEANRYREVVSGETIESRPCVQEVLRRVESPRVKAVLVVEPQRLSRGDLEDIGRLVKLLRYSNTIVITLQYTYDLRDERDRDMFERELKRGNEFLEYQKRIMGNGRLLSVQNGNFIGQKPPYGYNKVVIKEGKRKCHTLEPDPERAPIVKMVFEMYAGGTSASQIAKTLRTMGVTTADGGKWVTSSVKQMLTNDHYIGMVHWNKRKTVKVVEDGEVVATRPRNSDFLVYPGKHQPIIEKELWDAVQAIKGNIPPIKNRAKYANPFAGLVVCQCGGKMVRQQYVRNGVERCAPRLVCPNQAECHTASCSLPEFTEAVIEALEKGIKNFELMMADAPEDDATQQERLIAQLEKRLAELDRLELAQWDKYTQEAMPKHIFDALNKKVVQEKDETLQALKTAMETVPIRVDYEKKRETFAAAVRTLQDPNASVKEKNLLLKQCIERINYNRKPKESDNRRFGNPEPLELEFQFKV

SEQ ID NO: 3769 - protein, 525 aa, Unknown
  Description of Unknown: Integrase B3770 sequence
  PTHR30461:SF3,SM00857,G3DSA:1.10.10.2600,IPR036162,PF13408, PS51737,G3DSA:3.40.50.1390,IPR025827,IPR006119,IPR038109, PF07508,IPR011109,SSF53041,PF00239,PTHR30461, PS51736,Coil,cd00338
MARSKKTECLPLERIGVIYARYSSHNQKEESIEQQVEECTSFALLNGIKIVHVYADKALSGRTDKRPQFQRLMRDAEKRSFSVVVAYKSNRIARDMLNALKYEDRLGKYGIETLYAKEEFGNTAAGRFALRTMMNVNQFYSENMAEDIKRGMLDNAENCKVNGALPLGYVSGPDKRYAIEPKEAEIVRGIYDKVLEGVSFADIANDLNACGVRTKHGSLWNKCSFHRILTNDVYIGVYRHSGVVKEGGVPPILEREVFIAMQKYLETKKNPRGRHRENGDYLLTGKLRCGYCESFMVGVSGTSKTGDKHYYYTCNSRHAGSGCKKENVRRDTIEYTVAALTQQVVFKEDIIEWIATAAVKLAKEASGQNEIDAMEAELAEDRKATKNIMAAIEQGIFTATTKSRLLELEADIASLEQSIRDAKAISEGKLLEKERVVYFLTSLREGNLHSKTYQKRLIDTFVRAVYLWDDRIGIDYYYAGKDSMVKYSLSEIEADIGENIREVLKDSLTGHQIIRTLWINGPKAQ

SEQ ID NO: 3770 - protein, 525 aa, Unknown
  Description of Unknown: Integrase B3771 sequence
  PTHR30461:SF3,SM00857,G3DSA:1.10.10.2600,IPR036162,PF13408, IPR025827,G3DSA:3.40.50.1390,PS51737,IPR006119,IPR038109, PF07508,IPR011109,SSF53041,PF00239,PTHR30461, PS51736,Coil,cd00338
MTTFDMNNAVDNAFGMDVYAIYLRKSRADVEAEKLGEGETLARHRKILTELAARKGLYIGKIYEEIVSGETIEARPEIQKLIEDCYKGKYRGILIVEVTRLSRGNQGDAQKILDCLKYSNRNNGVLVITPTKTYDVAHSQEDEEYMEFELFMSRREYKMIQKRMDRGRKQAVVEGNFMGSYRPYGYDILKTKTGRTLIPNEDEAPIVKMIYEWTVNDNLSPFKIAERLTNMGVPTYYGEKDWSKETVKTILTNQTYMGKVRWNDRMTVKTMVDGELKATRPRSNHSDHFMLYDGKHMKHALVDEETFKAASSRFHNDRTRSNLKLVNPLAGLLFCKKCGKSMGYQSYRHKKNGPMDRYNHRQSANGCKVKSAVAEDVIKAVIHALKLYIEDFEFKLDNTPDVDENSINTQLEALQKEIRKSERKLAKLFDSWEDEKITDNEFVQRKAVHNQKIENIKRQMEELEYSIPEREEYEDKIILLSEALVAITDESLDADIKNEYLKRIIDRIEFSRENNSEFILDIDLC

SEQ ID NO: 3771 - protein, 525 aa, Unknown
  Description of Unknown: Integrase B3772 sequence
  SM00857,G3DSA:1.10.10.2600,IPR036162,PF13408,PS51737, G3DSA:3.40.50.1390,IPR025827,IPR006119,IPR038109,PF07508, IPR011109,SSF53041,PTHR30461,Coil,PS51736, cd00338,PF00239
MAKPEVSELAVVYARYSSHSQGEQSIEGQLSNARDYAAAHGYTIVHEYVDRAKSGRTDNRAEFQQMLKDTAKRQFSVIILWKVDRFGRNREEIAINKMKCRKNGVRVEYVAETIPDSPEGVILESVLEGFAEYYSLQLSQNIRRGRAESAEKCQSLGGNRPLGYKTGPDKKFVIDENTAPTVKMIFTMYADGKTVTEIVDKLNEMGLRTLRGGPFTKNSLHSILKNKKYIGIYEYQGREIKDGVPRIIEDDVFNKVQEMLKINKRAPAKTWSRADYILTDKLFCGKCGALMFGESGTSKTGVKHNYYICSNKKRFRSCDKKAVRQADIEDTVLNATHELLQDDELLDYIVDRTWEYYLAQDNSQEELRNLQRQLAQTDTAISNLIRAIEAGILTEETKKRMDELTQQKADLKASIADREIARGFHLQKSHIAFYLRSLRDADWSDKEAQKRLIQTFVNAVFVYDDHITLTYNFSGDKSTITLHDMQRFEDGEEFGCRASRSTKTHRYELFWFRNVFGLTRKLPQR

SEQ ID NO: 3772 - protein, 525 aa, Unknown
  Description of Unknown: Integrase B3773 sequence
  PTHR30461:SF3,cd00338,SM00857,G3DSA:1.10.10.2600,IPR036162, PF13408,IPR025827,G3DSA:3.40.50.1390,PS51737,IPR006119, IPR038109,PF07508,IPR011109,SSF53041,PTHR30461, PS51736,Coil,PF00239
MNVVIYARFSSHSQTEQSIKGQLKVCYEYAESHNYTVVGEYIDRAQSGKFDNRAKFQRMIADSDKHTFDEKLVYQLDRFARNRYDSAIYKAKLKKNGVRVLSAKENITDDASGILIEGVLESMAEYYSVELAQKIHRGMSINAEKCLSNGSNPGLGFKVNKADRTFYVDEEEAAIVREIFERYASGETKAEIVKDLQRRKVKTSIGNEFTYNSLSRLLKNKCYIGIYLYKGVETPGGMPRILDDDLFYRVQELMNKNKSAPARTRGENEYLLTTKLFCGHCKEMMVGYGGTGKSGKQYHYYMCKKARKKKCDKKIIGKQYIEDRVVSECLKMLTDDKIRYIAKRVAEECNKSPDNISVREIKKAIKEVDAAIENLWKGIEQGQSVPMLTERLNKRQAEKEVLEEQLAIEQNKRICLSEAQILAFLDYVCEMPFDDFNKRRAIINIFVQSIYLYDDHFTLIIKASKKPLSIDNIPLDDIEKAFEGENTETEGCSSLMTPAPPNKNRNFDTKRILIAVHFLSLKNGL

SEQ ID NO: 3773 - protein, 525 aa, Unknown
  Description of Unknown: Integrase B3774 sequence
  PTHR30461:SF3,SM00857,G3DSA:1.10.10.2600,IPR036162,PF13408, IPR025827,G3DSA:3.40.50.1390,PS51737,IPR006119,IPR038109, PF07508,SSF53041,IPR011109,PTHR30461,Coil, PS51736,cd00338,PF00239
MATKKKTATQRADGVYNRAVIYARYSPGPNQRDESIEGQVRECKEIAQKHGLMVIHEYIDKRLSGTNDERPDFQRMLRDADRGLFDVVITWKNDRFARNRYDSAIYKQRLKRNGIKIIYAKEHIPEGPEGIILESMLEGMAEYYSANLSQNIRRGQRENALEGKFIGGTIPLGYKLDAEKRYILDPDSASIVREIFERYVAGESVTDICNDLNARGYLTARKKKFNRSSLHRIFTNEKYIGVYKFEDIECPGAVPRIVSDELFKAASIRAARNKKSRRTMPEARVEYMLTGKIFCGHCGEPMGGSWGTSKRGTRYNYYVCNGHKNKKSSCHKKPERKEKLEKLVINIVINNILRNQNVVNYIVDRCMVIQEREIDKSPAEGLRRELAENEKALKNIMAAIEAGIFTATTKDRLVELEERCAVLKQGIAAAEIQPPKLSREQLLFIFEKYQNRSLKDPEFIRDVIDTFVHAVYVYDDKMIITFNYSENNTLEISKKEIEEAATGAASPVFDFCGVNSTKINNNFLT

SEQ ID NO: 3774 - protein, 525 aa, Unknown
  Description of Unknown: Integrase B3775 sequence
  PTHR30461:SF3,SM00857,G3DSA:1.10.10.2600,IPR036162,PS51737, G3DSA:3.40.50.1390,IPR006119,IPR038109,PF07508,IPR011109, SSF53041,PTHR30461,Coil,PS51736,cd00338, PF00239
MWMLPPMSVDDIIMYLRKSRTDDPALTVQEVLSKHEQMLDDWVARNIPDDGRRIPEANRYREVVSGETIESRPCVQEVLRRVESPRVKAVLVVEPQRLSRGDLEDIGRLVKLLRYSNTIVITLQYTYDLRDERDRDMFERELKRGNEFLEYQKRIMGNGRLLSVQNGNFIGQKPPYGYNKVVIKEGKRKCHTLEPDPERAPIVKMVFEMYAGGTSASQIAKTLRTMGVTTADGGKWVTSSVKQMLTNDHYIGMVHWNKRKTVKVVEDGEVVATRPRNSDFLVYPGKHQPIIEKELWDAVQAIKGNIPPIKNRAKYANPFAGLVVCRCGGKMVRQQYIRDGVERCAPRLVCPNQAECHTASCSLPEFTEAVIEALEKGIKNFELMMADAPEDDATQQERLIAQLEKRLAELDRLELAQWDKYTQEAMPKHVFDALNKKVVQEKEETLQALKTAMETVPIRVDYEKKRETFAAAVRTLQDPDASVKEKNLLLKQCIERINYNRKPKESDNRRFGNPEPLELEFQFKV

SEQ ID NO: 3775 - protein, 525 aa, Unknown
  Description of Unknown: Integrase B3776 sequence
  cd00338,SM00857,G3DSA:1.10.10.2600,IPR036162,PF13408, PS51737,G3DSA:3.40.50.1390,IPR025827,IPR006119,IPR038109, PF07508,IPR011109,SSF53041,PTHR30461,PS51736, Coil,PF00239
MNESVCIYLRKSRADREAEAHGEGETLARHERILLDLAKKKEYIVGAIYREVVSGETIADRPVMQQLLHEVESGMWDGVLVVEVERLARGDTIDQGIVSRAFQYSDTKIITPTKIYDPNNEFDEEYFEFGLFMSRREYKTIKRRLNAGRISSVKEGKYCGNKPPYGYERVKLEKEKGYTLRLVPAQAEIVKMIYTWYAGDGCEQIGVAKIARKLNEMGIESALCGDWTPASIQGILTNPVYIGKIRWNGRKTVKTIQNGQVIKTRPRSKDTLICDGLHPAIISEDLYNSVQEIRKKNPPRPVSIANSIRNPLAGIVYCSKCGRAMVRRPYQKRGQEDTLMCPYTSCSTVSSKLSIVEKAVIDGIREIVEEYKLNNDINTSSKAIDCGITSKQNLIHEKENELESLNSQKAKQYDLLEQGIYTTEVFLERAKTIAASIQSCSDTIEKLKEEIKHDENTIKQQSDFIPRCEELLDNYWSLDIESKNKMLKSLIEKVTYSKDTKNAYGKGNEIGFQLDIFPKIQKENQ

SEQ ID NO: 3776 - protein, 525 aa, Unknown
  Description of Unknown: Integrase B3777 sequence
  PTHR30461:SF3,SM00857,G3DSA:1.10.10.2600,IPR036162,PF13408, PS51737,G3DSA:3.40.50.1390,IPR025827,IPR006119,IPR038109, PF07508,IPR011109,SSF53041,PTHR30461,Coil, PS51736,cd00338,PF00239
MNRTVTAIPATKKLGNLTASSGAPARRRVAAYARVSTEMEEQTSSYEAQIDYYTTYIRSRNDWQFAGMYCDEGISGTSMKRREGFQTMIDDALAGKIDLILTKSVSRFARNTVDSLTTVRKLKDAGVEVYFQKENIYTFDAKGELLITIMSSLAQEESRSISENVTWGHRKRFADGKVMVPYKSLLGYKKGADGSLVIDETQAPAVRLIYQLFLDGMAISEIKTELAARKILTPRGKEVWSTSTVRSILSNEKYKGDALLQKTFTTDFLTKKMKVNEGEVPQYYVTGNHEPIIEPRIWDQVQYELATRHGNISSAKVGLFSTRLKCSQCGAWYGRKTWASNTKYKYTVWQCNHKYTDEHPCSSATVKDEQIKDSFVQALNQLIACRPQQSQLPQVLGDMFDTSRLEEQAAACQAKIVELTEQIEALIAENQQRALDQDAYQNKYTELDTAYRKTLARKTSLEADITAKTAKHAAVTTALDDLTGEPVSEFRPSQWSALIDHAIVDEDGIRFVFRTGEQVRIALKG

SEQ ID NO: 3777 - protein, 525 aa, Unknown
  Description of Unknown: Integrase B3778 sequence
  SM00857,G3DSA:1.10.10.2600,IPR036162,PF13408,IPR025827, G3DSA:3.40.50.1390,PS51737,IPR006119,IPR038109,PF07508, IPR011109,SSF53041,PTHR30461,Coil,PS51736, cd00338,PF00239
MVKNRAAIYARFSSHNQRSESIEIQVENSRAYCEREGLQVVREYCDYAQTGRNVNRAEFQRMMNDAKLGLFDFVVIYKVTRIMRNRDEMALARIMLRKAGVEILYAGEEIASGSSGVLQLGMLEVLAEWESAIDSERIRDGIQKNAARCLANGHSLYGWDIVDGRYSVNEREAALMRKMKNMLFSGHSVADIVRALEGEKTRNGKPFNQDKVTKLLRRVQNGGTYSYAGHVVEGGMPGLWPQVEQDMIESVLNDRHRPRRKVDSSKEFPLSGKLYCTKCGMPMAGMSGTSKTGKAYHYYRCRKCRRTVRRDLIEDAVVDMTLQAVARDDVRQRIAQGMALYQSEQEETKPESYYLKKELRRIDAAFERIWQAIEDGIAPPGGKERTDELKCRKAEIEAQLRIAERDESMSFGVDELMLWLDEIATELTPLDILNKFVRFAEIDSKSNRIRVYFAFDKHGDGFSPNSADKGEHLYEERCSPNSTLVELMRKTANSTSTANRAAIHLDTCIVRVSKNWFVVVGTCQK

SEQ ID NO: 3778 - protein, 525 aa, Unknown
  Description of Unknown: Integrase B3779 sequence
  PTHR30461:SF3,SM00857,G3DSA:1.10.10.2600,IPR036162,PS51737, G3DSA:3.40.50.1390,IPR006119,IPR038109,PF07508,IPR011109, SSF53041,PF00239,PTHR30461,PS51736,Coil, cd00338
MWMLPPMSVDDIIMYLRKSRTDDPALTVLEVLSKHEQMLDDWVVRNIPDDGRRIPEANRYREVVSGETIESRPCVQEVLRRVESPRVKAVLVVEPQRLSRGDLEDIGRLVKLLRYSNTIVITLQYTYDLRDERDRDMFERELKRGNEFLEYQKRIMGNGRLLSVQNGNFIGQKPPYGYNKVVIKEGKRKCHTLEPDPERAPIVKMVFEMYAGGTSATQIAKTLRTMGVTTADGGKWVTSSVKQMLTNDHYIGMVHWNKRKTVKVVEDGEVVATRPRNSDFLVYPGKHQPIIEKELWDAVQAIKGNIPPIKNRAKYANPFAGLVVCQCGGKMVRQQYVRDGVERCAPRLVCPNQAECHTASCSLPEFTEAVIEALEKGIKNFELMMADAPEDDATQQERLIAQLEKRLAELDRLELAQWDKYTQEAMPKHVFDALNKKVVQEKEETLQALKTAMETVPIRVDYEKKRETFATAVKTLQDPNASVKEKNLLLKQCIERINYNRKPKESDNRRFGNPEPLELELQFKV

SEQ ID NO: 3779 - protein, 525 aa, Unknown
  Description of Unknown: Integrase B3780 sequence
  PTHR30461:SF3,SM00857,G3DSA:1.10.10.2600,IPR036162,PF13408, PS51737,G3DSA:3.40.50.1390,IPR025827,IPR006119,IPR038109, PF07508,IPR011109,SSF53041,PF00239,PTHR30461, Coil,cd00338
MKKRVLCLYRVSTIGQVDHDDIPMQRIACREFIARHPDWELVEEVSEKGVSGYKTKTEDRDALLRIKEKALAKQFDILLVFMFDRIGRRDNETPFVVQWFVENGVEVWSTKEGEQRFDNHVDKLLNYIRFWQASGESEKTSLRIRTKHLQMVQEGLYRGGLIPFGYKLEFLGRTNKKNQPVRDLMIDERESEIVKEIYHKTVSDGWGTNRIANWLNDQHIPTKRGTAFWRATSIRALVRNPIYTGRIRFGGDISEPFDHLRIIDDALFEQCELVIKRRVPRKSSKRSGNLRSTSPGLLTGILYCGSCGERLCFNHNTTVRTLADGTRRSYERDLYRCYRKVHSRNTCHGPSSYTAGLIEKDVLAVVHTYFESIRSIPSSQMLEAAGSRTRRIQEDALVRAEAALKKAQAEMTALEDETVRALTGESTMDIAFLNSLIPKRKANLEGAQNEVDRIRSEIADLEKADRSANHELEMILSWAETFDTSSRDTQRSVIAMLIDRIVVHANYHLDIHFRITAQQYLGKAS

SEQ ID NO: 3780 - protein, 525 aa, Unknown
  Description of Unknown: Integrase B3781 sequence
  SM00857,G3DSA:1.10.10.2600,IPR036162,PF13408,PS51737, G3DSA:3.40.50.1390,IPR025827,PS51736,IPR006119,IPR038109, PF07508,SSF53041,IPR011109,PF00239,PTHR30461, mobidb-lite,Coil,cd00338
MKSKNKPFIRKAVAYARFSSNNQREESIDAQLRAISDYCERENIQLVDIYSDEAQSAKTDNRDDFKNMTDAIFKGNYDIDAVLVHKFNRFARNKYDSALYKKRLRDIGIKVVSVTQPIDDSPEGRILESLIEAMDEYYSENLALEVKKGMLENALKGKHTGGGKLLGLSVDDEGYYYPDENAPIIYRIFKEYADGVPKTQIVERLNREGYRNQYGRKFNTRTITDLLQNEKYIGNFIYNHTQSQVIRLEGIIKNPIVDEDLWERVQKLRKDANKPKHRKRKYLMTGKLRCGVCGFTYCGSGAKKKNKNGDMSAYYKCQGKIKNKNGCTNPSLNKDYYEKLVIDTITKSVLTDNAIDEIAVSVTTQLERERKKPLIPTAKLRNQLDKVKDKQARLMELYLDGGMERKVLDEKNNALKEERKHIEEQIERNLYLEQSNILDVQDIKNMILEFREELKNNPDFDFAQVVFNTFVDSIVVYPDTLEVNLRVDFSTLGGDKRKNRGASHPINPLLINKSVKRKTHQQPTN

SEQ ID NO: 3781 - protein, 525 aa, Unknown
  Description of Unknown: Integrase B3782 sequence
  PTHR30461:SF3,SM00857,G3DSA:1.10.10.2600,IPR036162,PF13408, IPR025827,G3DSA:3.40.50.1390,PS51737,IPR006119,IPR038109, PF07508,SSF53041,IPR011109,PTHR30461,Coil, PS51736,cd00338,PF00239
MNVVIYARFSSHSQTEQSIEGQLKACYEYAERNSYTVIGEYIDRALTGTNDNRPEFLRMIEDSRKKTFQGILVYQLDRFARNRYDSAVYKKKLKKNGVRVLSARENISEDASGILIESVLEGLAEYYSAELSQKVRRGLDINASKCLCTGGGVALGFKVDKDRHFQVDEDTAPVVREIFEMYANGKTVTEIITMMNARNIVTSRGSAFNKNSLRKMLQNKRYIGTYTYKGTEIPNGIPRIIDDDLFMQVQEMMKKNRKAPARARAKEEYLLTTKLFCGHCKEMMTGYSGTSHTSAVHHYYICNNRKKKLCKKKNVQKDFIEKLVISECRKLLTPENIERISHEVVAASQRDQDMTNVRHLSKQLADIERKRKNLMSAIMECDSDLIRKTLYEQIPLLEKEKSDTELQLTLEKAKQVKLTVSEVRFFLNALRKGDPDSIKYQKALISVLVNAVYLYDDKITLIFNSGDHAVTLDAALLEKIEQQADSVPVEDRFVYEQLASTIGRISEPYIAWGTVFVQTKRHSLP

SEQ ID NO: 3782 - protein, 525 aa, Unknown
  Description of Unknown: Integrase B3783 sequence
  PTHR30461:SF3,SM00857,G3DSA:1.10.10.2600,IPR036162,PS51737, G3DSA:3.40.50.1390,IPR006119,IPR038109,PF07508,IPR011109, SSF53041,PF00239,PTHR30461,PS51736,Coil, cd00338
MWMLPQMSVDDIIMYLRKSRTDDPALTVQEVLSKHEQMLDDWVARNIPDDGRRIPEANRYREVVSGETIESRPCVQEVLRRVESPRVKAVLVVEPQRLSRGDLEDIGRLVKLLRYSNTIVITLQYTYDLRDERDRDMFERELKRGNEFLEYQKRIMGNGRLLSVQNGNFIGQKPPYGYNKVVIKEGKRKCHTLEPDPERAPIVKMVFEMYAGGTSASQIAKTLRTMGVTTADGGKWVTSSVKQMLTNDHYIGMVHWNKRKTVKVVEDGEVVATRPRNSDFLVYPGKHQPIIEKELWDAVQAIKGNIPPIKNRAKYANPFAGLVVCQCGGKMVRQQYVRDGVERCAPRLVCPNQAECHTASCSLPEFTEAVIEALEKGIKNFELMMADAPEDDASQQERLVAQLEKRLAELDRLELAQWDKYTQEAMPKHVFDALNKKVVQEKEETLQTLKTAMETVPIRVDYEKKRETFAAAVRTLQDPNASVKEKNLLLKQCIERINYNRKPKESDNRRFGNPEPLELEFQFKV

SEQ ID NO: 3783 - protein, 525 aa, Unknown
  Description of Unknown: Integrase B3784 sequence
  PTHR30461:SF3,SM00857,G3DSA:1.10.10.2600,IPR036162,PF13408, IPR025827,G3DSA:3.40.50.1390,PS51737,IPR006119,IPR038109, PF07508,cd03770,SSF53041,IPR011109,PTHR30461, PS51736,Coil,PF00239
MYLEISNPMDYHVALYIRLSKEDESEGPSESVTNQKSLLNEFVQQHRLSVYDTYIDDGWSGTSFNRPAFQRMIGDIETKKVNMVITKDLSRLGRDYIMTGHYMERYFPEKRVRYISLLDGIDTGIESTANDITPFRAIMNDMYAKDISKKIKSVKHDKQQKGQFIGGKPVYGYKMHPTEKNKIVIDEAVAPIVRRIFAMALAGMSCRRIAMVLNEEGIPTPATYCGWQRRQKGPYSGLWSSERISDMLKNETYIGNMVQGKSVKISYKSQKCIKQEQSKWIVVENTHEPLVDKETFHKVRQLLNSRKYTRSRKYDFLLKGLIFCHECGYPLAVINRKTTTGEDRLFFVCRTYQRFTKAGVCTCHCIKEQVVTDAVIEKVREICQAYLHPHRLQMIAKETIQTDKKELKQEYAIHAVRNKISSLTNNLDKMYMDRLSGLLTETDFERMYQRMKIERTALEEKLKELERLKESPISSDTLSKELVQRFLQSAYTSRELLVSLIERIELTETKQIIIKFRFPELEAIS

SEQ ID NO: 3784 - protein, 525 aa, Unknown
  Description of Unknown: Integrase B3785 sequence
  SM00857,G3DSA:1.10.10.2600,IPR036162,PF13408,IPR025827, PS51737,G3DSA:3.40.50.1390,IPR006119,IPR038109,PF07508, IPR011109,SSF53041,PTHR30461,Coil,PS51736, cd00338,PF00239
MAKPEVSELAVVYARYSSHSQGEQSIEGQLSNARDYAAAHGYTIVHEYVDRAKSGRTDNRAEFQQMLKDTAKRQFSVIILWKVDRFGRNREEIAINKMKCRKNGVRVEYVAETIPDSPEGVILESVLEGFAEYYSLQLSQNIRRGRAESAEKCQSLGGNRPLGYKTGPDKKFVIDENTAPTVKMIFTMYADGKTVTEIVDKLNEMGLRTLRGGPFTKNSLHSILKNKKYIGIYEYQGREIKDGVPRIIEDDVFNKVQEMLKINKRAPAKTWSRADYILTDKLFCGKCGALMFGESGTSKTGAKHNYYICSNKKRFRSCDKKAVRQADIEDTVLNATHELLQDDELLDYIVDRTWEYYLAQDNSQEELRNLQRQLTQTDTAISNLIRAIEAGILTEETKKRMDELTQQKADLKASIADREIARGFHLQKSHIAFYLRSLRDADWSDKEAQKRLIQSFVNAVFVYDDHITLTYNFSGDKSTITLRDMQRFEDGEEFGCRASRSTKTHRYELFWFKNVFGLTRKLPQR

SEQ ID NO: 3785 - protein, 525 aa, Unknown
  Description of Unknown: Integrase B3786 sequence
  PTHR30461:SF3,SM00857,G3DSA:1.10.10.2600,IPR036162,PF13408, PS51737,G3DSA:3.40.50.1390,IPR025827,IPR006119,IPR038109, PF07508,IPR011109,SSF53041,PTHR30461,Coil, PS51736,cd00338,PF00239
MSRTVTAIPATKKLGNVTTPSGVPARRRVAAYARVSTEMEEQTSSYEAQIDYYTTYIRSRSDWRFADMYSDEGISGTSMKRREGFQTMINDALAGKIDLILTKSVSRFARNTVDSLTTVRKLKDAGVEVYFEKENIYTFDAKGELLITIMSSLAQEESRSISENVTWGHRKRFQDGKIMVPYASLLGYKKGADGSLVIDETQAPTVRLIYQLFLDGMAISEIKTELAARKILTPRGKEVWSTSTVRSILSNEKYKGDALLQKTFTTDFLTKKMKVNEGEVPQYYVTGNHEPIIAPRIWDQVQYELATRHGNISSAKVGLFSTRLKCAQCGSWYGRKTWASNTKYKYTVWQCNHKYAGDKPCSSATVKDEDIKNAFVQALNQLIARQPRQSQLLQIFDSMFDTSRLEEQAAACQTKIVELTEQIEALIAKNQQRALDQDAYQNKYTELDTACRKTLACKASLEADIAANTAKHAAVTTALGDLAGEPVNDFRPAQWSALIDHAIVDEDGIRFVFRTGEQVRIALKG

SEQ ID NO: 3786 - protein, 525 aa, Unknown
  Description of Unknown: Integrase B3787 sequence
  PTHR30461:SF3,SM00857,G3DSA:1.10.10.2600,IPR036162,PF13408, IPR025827,G3DSA:3.40.50.1390,PS51737,IPR006119,cd03770, PF07508,IPR038109,SSF53041,IPR011109,PTHR30461, PS51736,Coil,PF00239
MYQEISNPMDYHVALYIRLSKEDESEGPSQSVTNQKSLLDEFVQKHRLQLYDTYIDDGWSGTNFDRPDFQRMIGDIEAKKVNMVITKDLSRLGRDYIMTGHYMERYFPEHRVRYISLLDGIDTGVESSANDITPFRAIMNDMYAKDISKKIKSVKRDKQRKGQFIGGKPVYGYKMHPTEKNKIIIDEEAAPIVRRIFAMALDGVSCRQIAATLNEEVVPTPATYCGWNMGRKGPYAGLWSSERISNMLQNETYIGNMVQGRQVKISYKSKKCLHQDRNNWVVVEDTHEPLIDAESFRKVRMLVNSRKRTRSRTYDFLLKGLIFCHECGHPLGVLNRPNAKGEETLYFVCRTYQRFTKNSACTTHYIKEKTVTDAVIAKVREVCEDYLTAEALLPAAEKAVKEASQENKTAAEISALQNKSANLTEHLDRMYTDRLSGLLPEEDFQRIFTRIKDERAQLEERIKELRQQQKNPISQTERAKDLVQRYLDTAYANRELLVSLIERIELTADREIIVNFRFAELQQTG

SEQ ID NO: 3787 - protein, 525 aa, Unknown
  Description of Unknown: Integrase B3788 sequence
  SM00857,G3DSA:1.10.10.2600,IPR036162,PS51737,G3DSA:3.40.50.1390, IPR006119,IPR038109,PF07508,SSF53041,IPR011109, PTHR30461,Coil,PS51736,cd00338,PF00239
MQENISINQIIMYLRKSRSDDPCMTVEEVLARHERQLQDYAVASFGSPVPEHHIFREVVSGETIADRPVMRQLMHLLESGSVRGVLVIEPQRLSRGDLEDCGRIINAFRYTNTLVLTPPKTYDLSDEYDRKFFEMELTRGNDYLEYTKKILNRGRLASVKQGNYIGSVAPYGYRKVKIGSGKDTAHTLEIVPEQADAVRMMFQLYLAGNGFTRIAAELDALGIKPLKSDHWSPAAISEMLSNPVYIGKIRWNHFKTVKTMQNGQITKTRPANSDYILVQGKHPAIIDQKTFDAVAARRGTAPKVKRGHELRNPFAGLVYCGTAGCGRSMTFKQFTNYRSKVPRRSESMICSNQRICHTKSVQYSAFVERVKEILSKTVDDFEIKLQNDDGNIVRIHENIIRNLEQDLLKLKDKDLRQKDAYEDGIYTKEEYASRNAKLQEQICEVQLSIQRAKDTMPPEVDYQERVSRFSDCLSKFEDTDISASEMNLLLKSCIEKIIYHNSSESKPGIGRFVSNPFELDIYLRL

SEQ ID NO: 3788 - protein, 525 aa, Unknown
  Description of Unknown: Integrase B3789 sequence
  PTHR30461:SF3,SM00857,G3DSA:1.10.10.2600,IPR036162,PF13408, IPR025827,G3DSA:3.40.50.1390,PS51737,IPR006119,IPR038109, PF07508,SSF53041,IPR011109,PTHR30461, Coil,PS51736,cd00338,PF00239
MAVARDNLARKQIFIPANMPEEEIVLRVAAYCRVSTDSDDQINSFTAQNSHYMEMITAHDQWELVDIYADEGITGTSAKKRKDFQRLLADCRNGRIDKVLVKSISRFARNTTECLEAVRELKSLGISIFFEEHNIDTRMVSSEMLTAVIASCAQVESESISKNTRWGIQRKMQSGTYVASSVPFGFRRENGNLRIEEPEANYVRYAVSSYLSGKSASDIAKEFVDKSTGDAVLASRKWSFQAVVEMLKNEKYCGDALYQKTYMTDALPRQCLRNRGERDQYYAANTHPAIIDRQSYEAVQMLLRRRNENHMQHTIKTSPLGGRFICARCGGGFRRKESGGRPAFACMTHTQDRNACDMIPIPENEVYRAFLRLYSNLRDHPEVLDFQIKKLTEIRSRQMLWSPAVVELNREISDILSQSHALSLLNKQGMVDSDIFISKSNQLAEQLRKAKQQKEILLKKKENDVIEQTKSLQGVFQDGPEYLENFDEELFCELIDKIIVESGTKIRFRLNNGMELPEHIERMVR

SEQ ID NO: 3789 - protein, 525 aa, Unknown
  Description of Unknown: Integrase B3790 sequence
  PTHR30461:SF3,cd00338,SM00857,G3DSA:1.10.10.2600,IPR036162, PF13408,IPR025827,G3DSA:3.40.50.1390,PS51737,IPR006119, IPR038109,PF07508,SSF53041,IPR011109,PTHR30461, PS51736,Coil,PF00239
MGKKQKITGGDAVIYARYSSHNQRDVSIEQQIEACRKYAASLSLKVTLTYEDRAISGRTDNRPAFQRMMRDAENGKFQYVLAWKSNRMGRNMMQAMVNEARLVDCGVKVFYAEEDFDDNAAGRFALRSMMNVNQFYIENMAEDVKRGLYDNAKKGLVNGSLPLGYKRGADGKPEIDEPKAAIVREIYTRVAAGELFASIAADLNARGIKTARGREWNKGSFHVLCHNDRYRGIYIYGDIRIPGGMPRIISDELFYDAQEAYGMKKDNRYGRARHGAENYLLTGKLYCGHCGSYMVGISGTSKTGEMHYYYACQKHRLEHTCEKKAIRRDVIENAVARAIMMYCLDDETIDFIVDSTIAYFKQKDHELHIEAMENELAAVQQAISNLMKAIEAGIITPTTRTRLLDLEEQQTKLSAKINTAKAELVEIDRDDLIAGLQLFRAGDVKNKKFLAKLFNTFLIAVYLYDDNRLKIVFSFTGNHNSVEIPLELNNDCPDNEIVSDETEVRMSHLECGRRGSNPHSVGTGA

SEQ ID NO: 3790 - protein, 525 aa, Unknown
  Description of Unknown: Integrase B3791 sequence
  PTHR30461:SF3,cd00338,SM00857,G3DSA:1.10.10.2600,IPR036162, PF13408,PS51737,G3DSA:3.40.50.1390,IPR025827,IPR006119, IPR038109,PF07508,SSF53041,IPR011109,PTHR30461, PS51736,Coil,PF00239
MYDDIKTCVLYVRYSSNNQTEQSIEGQLRVCKDFCAHHNIKIVEVYADRATSASKDIEKRVSFLKMIKDSEKGNFDAVVVYKLDRFARSRYDSATYKYRLRKNGVQLISATENISDDPEGIILESVLEGMAEFYSAELSQKINRGLRESAYKHNSIGGQIPLGYKTEGKKLVIDEETAPIVRQAFEMYAEGHSVAEICRTFNARGYKTSKGTRFGKSSFSKIFRNEKYIGVYQFHEYRAENAIPALIDKKTFDLVQARLKAVGKAPGQFKAKRVYLLSGKLYCGHCGSKMNGNCNTSGYVYYECYGKKNLHKDCNKRNLKKEFIEDIVVKDALSLLTEERIQEIASIAVQTNTHEVETSTDIPTIRSRLHETRLSLDNITKAIETGAAPETLVKRMVELEKEKKTLEGELKRQEKGIVYLDKEQVIFWLEQFKNGDIEDEDFRRQLIDLFVNSVTVWDEPDDYFKITIAYNLTSLQEKTYRLPKGGTLSDFASNTPALKSNPIIEGTLMFHTTFQQYSPYTRYRG

SEQ ID NO: 3791 - protein, 525 aa, Unknown
  Description of Unknown: Integrase B3792 sequence
  PTHR30461:SF3,IPR036162,PS51737,IPR011109,PTHR30461, PF00239,G3DSA:1.10.10.2600,IPR006119,SSF53041,cd00338, SM00857,IPR025827,IPR038109,mobidb-lite,PS51736, PF13408,G3DSA:3.40.50.1390,PF07508,Coil
MRKKSNLNAATRAVIYARYSSANQRDCSIEQQVAKCRELAARLGLTVIDVYEDRAISGKTDRRPNFQRMMKDADLRQFDVVLAWKSNRMGRNMLQAMTNEERLRDNGIRTVYAEEDFDDTAAGRFALRNMMNVNQFYSENMAEDITRGLMDNAAKCLSNGSLPLGYKPGDDRHVVLDEAEAAIVQEIFTRVSCYEPFIDIARDLNRRGIKTKKGSEWGRSSFHTICRNERYRGIYIYRDVRIEGGMPRIVSDELFYKVQEVLKVKKNPQGRRKRSGYEEYLLTGKLFCGHCGSPMTGIAGTSKTGAMHYYYTCQKRRTDHSCDKKAVRRDQIERAVGVAIQQQLLTDENIQMMADKLMEYNARTETKYRLQGLQDQLNANKTATANILKAIEMGIITDATKARLLELEKEQGQLLVKIDEAKAEMVPISRNDFVKLLYIYKEGEPTDKKYLAALFDNFLVRVDLYDDHLKITFDPTGGRQPIDMPIGAEESPESPGDSSESSDFEASSQDAEKFVLALHNCTKSL

SEQ ID NO: 3792 - protein, 525 aa, Unknown
  Description of Unknown: Integrase B3793 sequence
  PTHR30461:SF3,SM00857,G3DSA:1.10.10.2600,IPR036162,PF13408, IPR025827,G3DSA:3.40.50.1390,PS51737,IPR006119,IPR038109, PF07508,IPR011109,SSF53041,PTHR30461,Coil, PS51736,cd00338,PF00239
MNAVIYARYSSHNQTEQSIEGQLRDCYAYAKRCDLNVVGEYIDRAISGTTDERPDFQRMIADAPKKQFQRILVWKLDRFARSRYDSAIYKHQLKQYGVRVLSVMENVGEGDESILLEALLEASAEYYSLDLKKKIQRGQRETIAKGRFCGGSVPYGYQSVDGKLVIDEKTAPHVRYVFEQYASGVPMKKIIDELTRRGVKTARGLPLTCNTFSRALVNSAYIGQYRYKGEVVPGLCERMIDDDTFEKVQKFVTVHKHAPAANRSENVEYLLQGKAFCGHCGAPMRGECGRGKNQRTYYYYNCANRKRYNSCPKSLEKKDFLERFAVEQTVRYVLTPERIKQVAQIIVAQYEKEFSGNKISELEKRIRQLENDLNKLVDSLIEAPKVAHKRIYEKMEALEVQKAECETDLTKLRIAHDIRFTEQEVAAWLKQFCSGDPSAPEFQHKIIDTFINSIYVYDDHIIIFYNIKGEKSQVALPDIPEEIDSALSPESSTLTAVAPPYLRNPNLIPVGDGFGFLLFISSIVV

SEQ ID NO: 3793 - protein, 525 aa, Unknown
  Description of Unknown: Integrase B3794 sequence
  PTHR30461:SF3,cd00338,SM00857,G3DSA:1.10.10.2600,IPR036162, PF13408,IPR025827,G3DSA:3.40.50.1390,PS51737,IPR006119, IPR038109,PF07508,IPR011109,SSF53041,PTHR30461, PS51736,Coil,PF00239
MTKKVTTIPALLNKQSTNQVGIVKKRRVAAYARVSTDQEEQLTSYEAQVDYYTNYIKSRDDWEFVDVYTDEGISGTSTKHREGFNKMVKSALDGNIDLIITKSVSRFARNTVDSLTTIRKLKDIGCECYFEKENIWTFDGKGELLLTIMSSLAQEESRSISENVKWGHRKRFADGKVSVPFNNFLGYKKGEDGNLVIDEEQAMIVKRIYREFLSGSSSVAIAKGLTNDGIETPGHKQKWYATTVRSILTNEKYKGDALLQKHYTVDFLTKKQKINNGEVQQYYVENNHPAIIEPDVFEMVRLEIDRRLMLKGKYSGTDILTAKIRCGECGGSYGAKVWHSNDKYRRVMYQCNSKYSGKEKCKTPAIRSEDIESRFVNVVNILIESKDEIISNLEKVLDKICNKKELLEEKEKLENSLTEQVEKIQDLIDINSRVAQNQEKYKKEYDALIKNYDETKCKFEQLEIKLSQQAAKHQMIKDYINTLKKQEKLLTKFDGLVWGSLLESATIKDKDVIVFRFKDGTEING

SEQ ID NO: 3794 - protein, 525 aa, Unknown
  Description of Unknown: Integrase B3795 sequence
  SM00857,G3DSA:1.10.10.2600,IPR036162,PS51737,G3DSA:3.40.50.1390, IPR006119,IPR038109,PF07508,SSF53041,IPR011109, PTHR30461,PS51736,cd00338,PF00239
MTKVLKCAIYTRKSSEEGLEQDFNSLDAQREACEAYIKSQKHEGWELVDKQYNDGGFSGGTMNRPAFQELLEDVEKGEIDVVVVYKVDRLTRSLMDFAKIVDVFDKHETSFVSITQQFNTTTSMGRLTLNILLSFAQFEREVTGERIRDKFAASKKKGMWINGKPPMGYIKVDGKLEIEPSEAKTVKLIFSKYLEIGTVPDLIKYLQGNKIYTRSGKNFYKGHLYKILSNKTYIGKIVHKNSVYGGLHEPIIDFEIFEKTQRLLAQNALIRKNSTNAASGSLLKGKLFDDKDNYMSPTHSNKRGKRYRYYVSQAQIQNRLQDIGSVSKISAGEIENFVTEKVKEFVFNKKLLQKLFANYSVSQQKIIFEQIESKQINADFIRHMLIKAKISSQSVLITVSKTLTKEAVEYMIFGTHLPVEQKYDKNSLVELDYKIRISSTTKNGSKLIIGDVKQKTVNKILLDAIVKSFYYHKLMFENKLTSEQKANTHIYRLMKLRFLPKGIIKAILTGSHEPDWTIDKLYTFL

SEQ ID NO: 3795 - protein, 525 aa, Unknown
  Description of Unknown: Integrase B3796 sequence
  PTHR30461:SF3,SM00857,G3DSA:1.10.10.2600,IPR036162, PF13408,PS51737,G3DSA:3.40.50.1390,mobidb-lite, IPR025827,IPR006119,IPR038109,PF07508, SSF53041,IPR011109,PTHR30461,PS51736,cd00338,PF00239
MARSAKKIEYAPAEQIGVIYARYSSHNQKEESIEQQIAECTEFAEKNGIRIIGIYADKAVSGRSDRRPNFQRMMRDAEKRHFQIVVAYKSNRIARNMLNALQYEAKLDLFGIKTLYAKEEFGNTAAGRFALRTMMNVNQFYSENMGEDIKRGMVDNANECKVNGMLPLGYVKSKEGKYAIAPDEAAVVREIFDSVLKDVPVAEIARSLNQRGIHTKLGREWNKNSFHIMLKNDNYIGVYRHSGVVVEDGIPPILEKEVFAAVQEKLANKKKTAGRRSANGEYLLTGKLFCGYCGSYMIGVSGTGENGTVHNYYQCQKRHAEGRCEKKNVRRDFIEKLIARLTQDYILQDDTIEWIADSTMSFQAMARRESGVAQLERDLADNRKVAKNIMAAIEQGIITETTKARLLEVEGTIHDLERSLSIAKAASQPIERERVVFSLEQMREGNVGSKDHQKKLIDTFVKSVTLWDDRIQIDYYHTPGKHKFSYSLEELTSKAENESNASDVRTDSLELHHQAAPKKMPLRKA

SEQ ID NO: 3796 - protein, 525 aa, Unknown
  Description of Unknown: Integrase B3797 sequence
  PTHR30461:SF3,SM00857,G3DSA:1.10.10.2600,IPR036162,PS51737, G3DSA:3.40.50.1390,IPR006119,IPR038109,PF07508,IPR011109, SSF53041,PTHR30461,Coil,PS51736,cd00338, PF00239
MWMLPQMSVDDIIMYLRKSRTDDPALTVQEVLSKHEQMLDDWVVRNIPDDGRKIPEANRYREVVSGETIESRPCVQEVLRRVESPRVKAVLVVEPQRLSRGDLEDIGRLVKLLRYSNTIVITLQYTYDLRDERDRDMFERELKRGNEFLEYQKRIMGNGRLLSVQNGNFIGQKPPYGYNKVVIKEGKRKCHTLEPDPERAPIVKMVFEMYAGGTSASQIAKILRTMGVTTADGGKWVMSSVKQMLTNDHYIGMVHWNKRKTVKVVEDGEVVATRPRNSDFLVYPGKHQPIIEKELWDAVQAIKGNIPPIKNRAKYANPFAGLVVCQCGGKMVRQQYVRDGVERCAPRLVCPNQAECHTASCSLPEFTEAVIEALEKGIKNFELMMADAPEDDATQQERLIAQLEKRLAELDRLELAQWDKYTQEAMPKHVFDALNKKVVQEKEETLQALKTAMETVPIRVDYEKKRETFAVVVRTLQDPNASVKEKNLLLKQCIERINYNRKPKESDNRRFGNPEPLELEFQFKV

SEQ ID NO: 3797 - protein, 525 aa, Unknown
  Description of Unknown: Integrase B3798 sequence
  PTHR30461:SF3,SM00857,G3DSA:1.10.10.2600,IPR036162,PF13408, PS51737,IPR025827,G3DSA:3.40.50.1390,IPR006119,IPR038109, PF07508,IPR011109,SSF53041,PF00239,PTHR30461, PS51736,Coil,cd00338
MGYDINLANVVIYARYSSAGQNDQSIDGQLAKCHEYAQQRGFRVVGEYCDRALSGRYADTRPEFQRMIADSAKHAFEYVLVWKLDRFSRDRYDSAIYKKKLRSNGVRVLSVTEGIDESGESLLLEAILEAMAEEYSRQLAQNVKRGMRQNAEKALSLGGLAPLGYTVVNKQYVINEDEARIVRYIHEQYAAGAKQKDIVAGCEQLGYRNQRGGLLTLDAVKRILANDRYIGTYTYLDEVVIEDAFPAIVSKELKAKVKARLAANAKAPGHAKAKIEYLLHGKLFCGECGAPMVGSCAHGGHGSKYYYYSCASRKKQHSCEKRNERKDELEQCIVDHVRTRLLTDEWINKAADAVVAEYDKSYNASGIKPLEKQIREIDKEIDKLVDKLIDTQAAAAIAKINERIEAADARKRALEEELSTLRIASRAKMEKEDVVSWLMQFRIGDPADIAYRKKIIELFINSIYVYDDKINLFFNIGNSAQITYPQMLALDIPAGSDLGASGLPDTLLSEPIIMIDGVIGLVLRR

SEQ ID NO: 3798 - protein, 525 aa, Unknown
  Description of Unknown: Integrase B3799 sequence
  PTHR30461:SF3,cd00338,SM00857,G3DSA:1.10.10.2600,IPR036162, PF13408,PS51737,G3DSA:3.40.50.1390,IPR025827,IPR006119, IPR038109,PF07508,IPR011109,SSF53041,PTHR30461, PS51736,Coil,PF00239
MKKENEIRAVVYARYSSHSQTEQSIEGQISAAQVYAKAKGYTIVKEYVDRAKTGKNDNREAFQQMLSDTAKHEFSVIIVWKVDRFGRNREEITFNKYRCKKNDVRVEYIAEAVPDSPEGVILESVLEGMAEYYSLQLAQNIRRGIRASAEKCQAIGGHCSLGYAIDPKTKKYVIDPDTAPTVQLIFEKYAEGYTGMDIVRLLNEKGLRTVRGKPFTKNSLWTILKNERYAGVYLFKDEVRVEGGIPALVSRETFDKVQEMLEINHRSPVNTWNRATYLLTDKLFCGHCGSKMVGECGTSRTGATYNYYICAGKKRERNCSKKAVRQDWIEKVVLQQIRRVLFDQEFLEFIAHKAYTYYLEEKKKLDQSAAIKAQLSSVESSIDNLIRAMEAGIFSASTKSRLDDLENQKAALTRTLAEIKLSEESFDLTEDRILFFLESMRGLDMDDTDSRKRLVKTFVNAVYLYDDKITLAFNFTDSCEKPEIIELADIADGVVEKFVHRASCSTRNKKHYTEMCGAFLLTPNE

SEQ ID NO: 3799 - protein, 525 aa, Unknown
  Description of Unknown: Integrase B3800 sequence
  PTHR30461:SF3,SM00857,G3DSA:1.10.10.2600,IPR036162,PF13408, PS51737,G3DSA:3.40.50.1390,IPR025827,IPR006119,IPR038109, PF07508,IPR011109,SSF53041,PF00239,PTHR30461, PS51736,Coil,cd00338
MIAAIYSRKSKFTGKGESIENQIQLCMDYAKNLGINEFLVYEDEGFSGKSTDRPKFKEMLKDSKNKKFDYLICYRLDRISRNVSDFSTLIEDLNKLNISFVSIKEQFDTSTPMGRAMMYISSVFAQLERETIAERIRDNMYELAKTGRWLGGMPPYGFNSTQINYYDDGMNQKKMYKLQIDKDTMEIVKIIFDKYLELRSLSKLYKYMYENGIKGTRGGNLDPSALSLILKNPAYVKANKNVIDYLKSIDMEVIGDVDDTHGILTYAKNTDNPIAAVAKHEGVIDADKWIEVQNLLNANKSKAPRAGTGSKALLSGLLKCSKCGSNMRITYKNSKKGTIYYYICGTKKSLGVSACDCRNIRSDKAESKVIEELKNKSVESIISNYKNTQLENTKDSKDIKAQINSIKNQIKEKETYIDNLVMQLAKVTDSAASTFIIRKLEDLNNELSELKSKLNSLDTLSLENKKLDIDINMLIDNIDKFNKEIDTSDINKKRLLLSTIVDSMYWDSDEETIKVNLIGINSNRN

SEQ ID NO: 3800 - protein, 525 aa, Unknown
  Description of Unknown: Integrase B3801 sequence
  cd00338,SM00857,G3DSA:1.10.10.2600,IPR036162,PF13408, PS51737,G3DSA:3.40.50.1390,IPR025827,IPR006119,IPR038109, PF07508,IPR011109,SSF53041,PTHR30461,PS51736, Coil,PF00239
MENAKRKKDDLAGSRAVIYARYSSHSQREASIEQQVDACKAHAQQLGVRVVDVYEDRAISGKTDRRPSFQRLMKDAEKGRFDVVLAWKSNRIGRNMMQALVNESRLQDCGVRVCYAEEDFDDSAAGRFALRSMMNVNQFYSENMAEDITRGLYDNASKCMANGRQPLGYKRGEDGRVSLDEPAAAIVREIFTRVAAYEPFADIARDLNERGIRTATGSAWNKGSFCTLCHNERYLGIYIYGKVRIPGGIPRIVSDKLFYKVQEVCSMKKNPQNGKHRPGAEDYLLTGKLRCGKCGAPMSGISGTSRNGELHYYYTCQNHRAGGPCSKKAVRRDVIEPAVAQAIKMYCLTDDMIDWIADHAVAYWEAEDRALHIDALQAELDAVKKSVSNLLKAIEAGIITETTRDRMLALEEQQATLERQIREARAQIVHLDRDVLVDTLHLFRNGDVYDKEFTRELFRTFLKAVYLYDDDRLKIVFGFTDVTPEEVEIALESADFGEEECSFLDRESPPKKHCTSLEVRCFSFC

SEQ ID NO: 3801 - protein, 525 aa, Unknown
  Description of Unknown: Integrase B3802 sequence
  PTHR30461:SF3,cd00338,SM00857,G3DSA:1.10.10.2600,IPR036162, PF13408,PS51737,IPR025827,G3DSA:3.40.50.1390,IPR006119, IPR038109,PF07508,IPR011109,SSF53041,PTHR30461, PS51736,Coil,PF00239
MSSVDKIAVIYARYSSHGQTEQSIEGQIAAAQKYAEQHGYTIIHIYADRAMTGRNDDREQFQKMLSDTAMHQFGVILLWKIDRFGRNREEIAFNRYRCKKNGVRVERVAEDVPDGPEGVILDSVLEGMAEYYSLQLAQNVRRGQRESAKKSMSIGGNKMLGYVVNPETKRYESDPKTASYVTEIFKRYANGETISEIVAWLNAQGIRTTRGSEFTVNSLHRLLKNEKYTGVYIFHDIRNEGGMPALTDRATFDKVQEMLKVNRRAPVRVWSKTEYLLTDKLFCGHCGAIMVGESGHGRNGTKHSYYTCLNRKKKKSCDKKPVRQDVIEPLVLRAIGKLLENPATLENIADQVWAAYERSDTSGDTIKALDKQIADVDRALSNVMKAIEMGIINEMTKARMDELTDQKQALSVARAEAGLAGGFKLTRDMILFFLHDMAATNMTDCDCQKRLIKTFVNAIYLYDDHFDIAFNYTSNGKMVVKMQEINDTTSGEVFGRCAQSPAKSTAVVIQMYRKTAVLFVCGSIR

SEQ ID NO: 3802 - protein, 525 aa, Unknown
  Description of Unknown: Integrase B3803 sequence
  PTHR30461:SF3,SM00857,G3DSA:1.10.10.2600,IPR036162,PF13408, IPR025827,PS51737,G3DSA:3.40.50.1390,IPR006119,IPR038109, PF07508,IPR011109,SSF53041,PTHR30461,Coil, PS51736,cd00338,PF00239
MPEALNAVIYARYSSDRQTEQSIEGQLRECYAFAKANDIAVIDTYIDRAISGKTDNRPAFQKMIEDSAKRQFQAVIVYRLDRFTRNRYDSAIYKARLKKNGVKVLSAMENLNGSPESIIMESLLEGMAEYYSVELSQKITRGMRENALKGKALGGQRVLGYKVNSDCYFEIDETTAPVVVDIFKLYSSGKTVKEICDILNARGVKTARGGAFNKNSLHTILTNKKYIGIYKTKYGEIVGGIPAIIDKELFEMVALRMEQNKKAPARAKAEINYLLSTKLFCGKCRSAMVGESGTSKTGKKYYYYACVKKKREKACDKSNVKKDWIEDLVIQRTVTDILKDDVIEKIADRLVELQKAEAAESGTMLYLQNSLAEIQVSIKNIMTAIEKGIITESTKTRLTELEDEKRNVEIEIAKESIARRIISREQIIYWISSFKDGNITSEKYRQQLIDTFVHAVFVYDDKIVITYNYSGENNTATISDLDLSSPPVLLESKPSWARVSFCPFLLDLAFFCSFLFSFTRILYPY

SEQ ID NO: 3803 - protein, 525 aa, Unknown
  Description of Unknown: Integrase B3804 sequence
  PTHR30461:SF3,cd00338,SM00857,G3DSA:1.10.10.2600,IPR036162, PF13408,IPR025827,G3DSA:3.40.50.1390,PS51737,IPR006119, IPR038109,PF07508,IPR011109,SSF53041,PTHR30461, PS51736,Coil,PF00239
MSSVDKTAVIYARYSSHGQTEQSIDGQIAAAQKYAEGKGYTIIHIYADRAMTGRNDDREQFQKMLSDTATHQFGVILLWKIDRFGRNREEIAFNRYRCKKNGVRVERVAEDVPDGPEGVILDSVLEGMAEYYSLQLAQNVRRGQRESAKKSQTVGGCNIIGYKVNPDTKRYEVDPKTAPFVTEVFKRYANGETISEIVAWLNVQGVRATRGGEFTVNSLHRLLKNEKYTGVYIFHDIRNEGGMPALTDRATFDKVQEMLKVNRRAPARVWSKTEYLLTDKLFCGHCGAMMVGESGHGRNGTKHSYYTCWNRKKKKSCSKKPVRQDVIEPMVLRVISKMLSDEATLEYIADQVWAVYERSDTSGDTIKALDKQIADVDRALSNVMKAIEMGIINEMTKARMDELTDQKQALSVARAEAGLAGGFKLTRDMILFFLHDMAATNMTDHDCQKRLIKTFVNAIYLYDDHFDIAFNYTSNGKMVVKMQEINDTTSGEVFGRCAQSPAKSAAVVIQMYRKTAVLFVCGSIR

SEQ ID NO: 3804 - protein, 525 aa, Unknown
  Description of Unknown: Integrase B3805 sequence
  SM00857,G3DSA:1.10.10.2600,IPR036162,PF13408,PS51737, IPR025827,G3DSA:3.40.50.1390,IPR006119,IPR038109,PF07508, IPR011109,SSF53041,PTHR30461,Coil,PS51736, cd00338,PF00239
MAKNRAAIYARFSSHNQRSESIEIQVENSREYCEREGLQVVREYCDYAQTGRNVNRAEFQRMMNDAKLGLFDYVVIYKVTRIMRNRDEMALARIMLRKAGVEILYAGEEIASGSSGVLQLGMLEVLAEWESAIDSERIRDGIQKNAARCLANGHALYGWDIVDGRYSVNEREASLMRKMKNMLFSGRSVADIVRALEGEKTRNGKPFNQDKVTKLLRRVQNGGTYSYAGHVVYGGMPGLWPQVEQDMIESILNDRHRPRRKVDSAKEFPLSGKLYCSKCGMPMAGMSGTSKTGRAYHYYRCRKCRRTVRRDLIEDAVVDMTLQAVAREDVRKRIAQGMALYQSEQEETKPESYYLKKELRRIDAAFERIWQAIEDGIAPPGGKERTDELKRRKSEIEAQLRIAERGESLTFGVDELMLWLDEIATELTPLDILNKFVRFAEIDSKNNRVRVYFAFDKHGDGFTPNDVDKGEHLYEERCSPNSTLVELMRKTANSTSTANRAAIQLDTCIVRVSKNWFVVVGTCQK

SEQ ID NO: 3805 - protein, 525 aa, Unknown
  Description of Unknown: Integrase B3806 sequence
  PTHR30461:SF3,SM00857,G3DSA:1.10.10.2600,IPR036162,PF13408, IPR025827,PS51737,G3DSA:3.40.50.1390,IPR006119,IPR038109, PF07508,IPR011109,SSF53041,PTHR30461,Coil, PS51736,cd00338,PF00239
MVQERLRAVFYARVSTEEEKQLNALEKQIQENRDVISKNGWILVGEYIDEGKSGTTTKRRSDYKRLLADMTEDKFDIVVCKDQERLQRNTLDWYLFVDNLVKNSLKLFMYLDNKFFTPSEDALITGIKAIIAEEYSRNLSKKLNNANRRRVERALAGEEIAAMGNGKSLAFKIINGKWVKDEKEAELGKKIFELYLQWNSLRKVRDWVNENGYRNSVGKPFTTESIGRILKNEKAKGIIVMGHHHHDFDKKKIVRMPEEQWVRIPAPELAYVSEEMFDEVQRRLKAKTGKKRGVNAYSNPLSSKLYCGKCGGKLWKHNSNGYVNWHCSSKMAKGDIKCTGVSTTSVKVRKIYSEISKNLIVNKSAVKSSMLEWLHKLKASLQIEDKSEAAQKAIEQLERKKNKLTEAYLDEIISKEDYKAKYSALEDQIREQQKLLIPVEENEDIKDIEAVIENIDKEIDTYIASSQFEDSKVDYLIEHTKKITVIDKEHYVIDLDLLAGVILIGKDFLLYVHNTMSFSNGRIYI

SEQ ID NO: 3806 - protein, 525 aa, Unknown
  Description of Unknown: Integrase B3807 sequence
  SM00857,G3DSA:1.10.10.2600,IPR036162,PF13408,IPR025827, PS51737,G3DSA:3.40.50.1390,IPR006119,IPR038109,PF07508, IPR011109,SSF53041,PTHR30461,Coil,PS51736, cd00338,PF00239
MAKNRAAIYARFSSHNQRSESIEIQVENSREYCEREGLQVVREYCDYAQTGRNVNRAEFQRMMNDAKLGLFDYVVIYKVTRIMRNRDEMALARIMLRKAGVEILYAGEEIASGSSGVLQLGMLEVLAEWESAIDSERIRDGIQKNAARCLANGHALYGWDIVDGRYSVNEREASLMRKMKNMLFSGRSVADIVRALEGEKTRNGKPFNQDKVTKLLRRVQNGGTYSYAGHVVDGGMPGLWPQVEQDMIESILNDRHRPRRKVDSAKEFPLSGKLYCSKCGMPMAGMSGTSKTGRAYHYYRCRKCRRTVRRDLIEDAVVDMTLQAVAREDVRKRIAQGMALYQSEQEETKPESYYLKKELRRIDAAFERIWQAIEDGIAPPGGKERTDELKRRKSEIEAQLRIAERGESMSFGVDELMLWLDEIATELTPLDILNKFVRFAEIDGKSNRIRVYFAFDKHGDGFSPNSADKGEHLYEERCSPNSTLVELMRKTANSTSTANRAAIQLDTCIVRVSKNWFVVVGTCQK

SEQ ID NO: 3807 - protein, 525 aa, Unknown
  Description of Unknown: Integrase B3808 sequence
  cd00338,SM00857,G3DSA:1.10.10.2600,PS51736,PF13408, IPR025827,PS51737,IPR036162,G3DSA:3.40.50.1390,IPR006119, IPR038109,PF07508,IPR011109,SSF53041,PTHR30461, mobidb-lite,Coil,PF00239
MKSKNKPYVRKAVAYARFSSNNQREESIDAQLRAIKDYCENNDIKLVAIYTDEAQSATTDNRDDFRTMIDDILKGKHDIDGVLVHKFNRFARNKYDSALYKKRLRDIGIKVVSVTQPIDDSPEGRILESLIEAMDEYYSENLALEVKKGMLENALKGKHTGGGKLLGLSVDDEGYYYPDENAPIIYRIFKEYADGVPKTQIVERLNREGYRNQYGRKFNTRTITDLLQNEKYIGNFIYNHTQSQVIRLEGIIKNPIVDEDLWERVQKLRKDANKPKHRKRKYLMTGKLRCGVCGFTYCGSGAKKRNKNGDMSAYYKCQGKIKNKNGCTNPSLNKDYYEKLVIDTITKSVLTDNAIDEIAVSVTTQLEKERKKPVIPTAKLRNQLDKVKDKQARLMELYLDGGMERKVLDEKNNALKEERKHIEEQIERNLYLEQSNILDVQDIKNMILEFREELKNNPDFDFAQVVFNTFVDSIVVYPDTLEVNLRVDFSTLGGDKRKNRGASHPITPLSINKSVKRKTHQQPTN

SEQ ID NO: 3808 - protein, 525 aa, Unknown
  Description of Unknown: Integrase B3809 sequence
  PTHR30461:SF3,SM00857,G3DSA:1.10.10.2600,IPR036162,PS51736, PS51737,PF13408,IPR025827,G3DSA:3.40.50.1390,IPR006119, IPR038109,PF07508,SSF53041,IPR011109,PTHR30461, mobidb-lite,cd00338,PF00239
MARSAKKIEYAPAEQIGVIYARYSSHNQKEESIEQQIAECTEFAEKNGIRIIGIYADKAVSGRSDRRPNFQRMMRDAEKRHFQIVVAYKSNRIARNMLNALQYEAKLDSFGIKTLYAKEEFGNTAAGRFALRTMMNVNQFYSENMGEDIKRGMVDNATECKVNGMLPLGYVKGEDGKYAIAADEAAVVREIYDSVLKDIPLAEIARSLNQRGIRTKLGRDWNKNSFHILLKNDNYIGVYRHSGVVVEDGIPPILDKEVFEAVQEKLTNKKKTAGRRSANGEYLLTGKLFCGYCGSYMIGVSGTGENGTVHNYYQCQKRHAEGRCEKKNVRRDFIEKLIARLTQDYILQDDTIEWIADSTMSFQAMARRESGVAQLERDLADNRKVAKNIMAAIEQGIITETTKARLLEVEGTIHDLERSLSIAKAASQPIERERVVFSLEQMREGNVGSKEHQKKLIDTFVKSVTLWDDRIQIDYYHTPGKHKFSYSLEELTSKAENESNASDVRTDSLELHHQVAPKKMPLRKA

SEQ ID NO: 3809 - protein, 525 aa, Unknown
  Description of Unknown: Integrase B3810 sequence
  SM00857,G3DSA:1.10.10.2600,IPR036162,PF13408,PS51737, G3DSA:3.40.50.1390,IPR025827,IPR006119,IPR038109,PF07508, IPR011109,SSF53041,PTHR30461,Coil,PS51736, cd00338,PF00239
MAKPEVSELAVVYARYSSHSQGEQSIEGQLSNARDYAAAHGYTIVHEYVDRAKSGRTDNRAEFQQMLKDAAKRQFSVIILWKVDRFGRNREEIAINKMKCRKNGVRVEYVAETIPDSPEGVILESVLEGFAEYYSLQLSQNIRRGRAESAEKCQSLGGNRPLGYKTGPDKKFVIDENTAPTVKMIFTMYADGKTVTEIVDKLNEMGLRTLRGGPFTKNSLHSILKNKKYIGVYEYQGREIKDGVPRIIEDDVFNKVQEMLKINKRAPAKTWSRADYILTDKLFCGKCGALMFGESGTSKTGVKHNYYICSNKKRFRSCDKKAVRQADIEDAVLNATHELLQDDELLDYIVDRTWEYYLAQDNSQEELRNLQRQLAQTDTAISNLIRAIEAGILTEETKKRMDELTQQKADLKASIADREIARGFHLQKSHIAFYLRSLRDADWSDKETQKRLIQTFVNAVFVYDDHITLTYNFSGDKSTITLRDMQRFEDGEEFGCRASRSTKTHRYELFWFRNVFGLTRKLPQR

SEQ ID NO: 3810 - protein, 525 aa, Unknown
  Description of Unknown: Integrase B3811 sequence
  cd03768,PTHR30461:SF3,SM00857,G3DSA:1.10.10.2600,IPR036162, PF13408,IPR025827,G3DSA:3.40.50.1390,PS51737,IPR006119, IPR038109,PF07508,IPR011109,SSF53041,PTHR30461, PS51736,Coil,PF00239
MKKVAIYSRKSKFTGKGESIENQILKCKQFIQFKFDIDTKNTEIFIDEGFSGKNENRPRYQDMIKKVKNKEIDHIIIYQLNRLGRNARDIHNTMQMCEDLGCVIYSATEGFDSSTSFGRALIGILASLAQLEREQLAERVKDNMYTLAKMGRWLGGQSPLGFDGTREYYIDESGKERSVTRLKANNEELKIVKLIYEKYLEEKSISQVSKWTLTNNFKGKNGGNIDKSAINVILKNPVYVKSNTDVFKFLENNGYEVYGEANGNGLLRYGKNNKDNSTGIIATGNHKGIIDSSNWLKIQEILQENTEKAPALGKSKACLLTGLLKCSCGSNMQMRYGPKRKDGTRPYYYVCTMKINSGGTRCNSKNLNGQLFEEKLINHFKKYSEERLIKQLESTLNASKNLEKNINIESIDKDIESAEKSVKSLLNNLKQTTDTNIVNIIFSEISELQNTIKDLKYKKDNLLEDQSEIVLSQSEIISMINTFNDFISLYDTLSIDEKQKRLKTLFKEILYDGNKIHVKFNLKKN

SEQ ID NO: 3811 - protein, 525 aa, Unknown
  Description of Unknown: Integrase B3812 sequence
  PTHR30461:SF3,cd00338,SM00857,G3DSA:1.10.10.2600,IPR036162, PF13408,PS51737,G3DSA:3.40.50.1390,IPR025827,IPR006119, IPR038109,PF07508,IPR011109,SSF53041,PTHR30461, PS51736,Coil,PF00239
MGRKVTVIPPTISLQTHLPTTQKVKRKVAGYARVSTDFEEQLTSYEAQVDYYTKYIQEREDWEFVKVYTDEGISATSTVHRDGFNQMVADALDGKIDLIVTKSVSRFARNTVDSLTTVRKLKEKGVEVFFEKEDIYTLDSKGELLITIMSSLAQEESRSISENVTWGQRKRFADGKVSLPYKHFLGYRKGADGLPEIVPEEAEIVRGIYRWFMEGMTPYKIACILIEKGIPTPSGKEQWHLSTVKSILTNEKYKGSALLQKKFTVDFLTKKTKVNEGEVPQYYVEESHPAIIPPEEFELVQAEMARRKELGKRYHSGSIFTAKIVCGECGGFYGPKVWHSNSRYRRVIWRCNKKYTNDCYCKTPHIDEDTIKQGFLKAYNQLLTDKGSVLSLCEMLLRAFSDCSDLDTKMSVLDDEEKQITKNIREMVVINSRTVQKQPEYTLEYQSYEREYEALKAKYQKLQAEKLDRINKTTVIQDFMEQIKKRKEPIKVFSSDVWLTAIETVTIGKKGELQFRFKNGTEITV

SEQ ID NO: 3812 - protein, 525 aa, Unknown
  Description of Unknown: Integrase B3813 sequence
  PTHR30461:SF3,SM00857,G3DSA:1.10.10.2600,IPR036162,PF13408, IPR025827,G3DSA:3.40.50.1390,PS51737,IPR006119,IPR038109, PF07508,SSF53041,IPR011109,PTHR30461,cd00338, PF00239
MPTSKNTARKCAAGGSSDNSCGVEPLRAVIYARYSSSGQREESIEGQLRDCYEFAKKHGIIVIGEYIDKAMTGRVDRRPDFQRMMKDSEKGRFNCVLLWKMDRFARNRYDSAMYKYKLKKNGIRIFYAKETIPDGPEGIILESVMEGYAEYYSENLAQNVKRGNYDSALELKTLGKTCLGLKTGPDGRYMIDQAEAAIVRRIFEEYAEGERAKDIYERLNSEGYRTSRGGKFNKNSLRRILSNKKYIGVYEYEDIYVENGIPAIITDRDLFERVQKMLKINHDAPARGKAQNFLLTTKLFCGFCGSPMIGDGGTSHTGKAYAYYSCTKRKRGRSCKKESVPKDWIEDLVVGELVKIVHNDELIEQIADRVMEYQKREKDQSGLHALEIRQKENEKAISNMLAAIEAGIITPSTKTRLMELEADRADIEKGIAHELLAEPEFERDQIIYFLERFRSGDINDEAYRIMLVDTFLNSVYLYDDDHLVLVMNYSGENCKVDLKLVEGAVSGDGCKGSAFAPSSALKAPR

SEQ ID NO: 3813 - protein, 525 aa, Unknown
  Description of Unknown: Integrase B3814 sequence
  PTHR30461:SF3,SM00857,G3DSA:1.10.10.2600,IPR036162,G3DSA:3.40. 50.1390,IPR006119,IPR038109,SSF53041,PTHR30461,Coil, PS51736,cd00338,PF00239
MSKKKSKEKVVEFSKLTNKVAAVWTRVSTERQADTNGSLESQRRICTEYAESHAIRIKKYYGGTNESAKVEGKLYREMIAEVARDKEINIILVYSFDRFSRAGYEAMMTKAYLKAKGIYVVSATQATDPDSAAGGFMEDVIFLFNQFENNLRKDKCITGMVECLRNGNWYSKPPLGYDKLKVGREHVLTVNEKGKILRNAFVWKATEGIGDIEIVQRLKGLGLVIDRKHLNKILHNPFYCGFIQHSLLGDEVIKGNQEILIDEATFNKVNSISNAGYEHKEITEPFPLKRHIICSDCGGYLTGYTVKARGRDYYKCNKKGCKSNHSTEKLHQKYINLLNGYNIPDEFIPILTDVLRKVFEEYNQSKGETKKVLLKRKTECENRINAVKVRFGLGEINSEIYTATMSELNSRLAEIRRDLEDAGKNLSNMMNYINQTIEISCKLGSLWRDSDFSNRQKIQNLVYPGGIYFDKKNDDYRTENENEVFRIFRRFTAVCKGGKEKATSNFHCLSPSVGMRRAIDTFCFH

SEQ ID NO: 3814 - protein, 525 aa, Unknown
  Description of Unknown: Integrase B3815 sequence
  PTHR30461:SF3,SM00857,IPR036162,PF13408, IPR025827,G3DSA:3.40.50.1390,IPR006119,PF07508, IPR011109,SSF53041,PTHR30461,Coil, PS51736,cd00338,PF00239
MKRIGIYGRKSVFSDKSESIEHQFTLGKEYAYANYDNPEIIYYKDEGESGSYLERPDFQILLNDVINDNLDIVICYKLDRISRDVADFGAVYKLFMAHNTEIIPLRDNIVINENMSPIEKAMMYINTVFSQVERENTIIRVTDNMIELAKDGYWTGGRAPLGFSSKEIIVGGKKHHILSHNPTEIEFYTMVADTFLNGFTLSGLETYFRKNNVKTLRNAYLSSTQIWTILKSPFAAPADEATYDYFSSLGCKMVHDRSKYDGSHGLLVYGRTSGGRKRKHVTNPPDKWLVSIGLHTPIITSDKWLSIQKCFGNNTFCKTRKYKVGILNDILRCSCGSYMKVKHKYDKQYNVHYYHYRCLQRERRGSEYCASQMISVETLDNEVIEILKGIKLDKTLIDNYTTPASFFPLFRKPETINREIENEGKKIQNLTMSLAEASGSSAAKYIIKDIESHDKRIDELKEELKKSRLAMQNVKELQINKEDKYNAVCKIVDCIETATYDEINALLKETLTECVYDGEVLHIKL

SEQ ID NO: 3815 - protein, 525 aa, Unknown
  Description of Unknown: Integrase B3816 sequence
  PTHR30461:SF3,SM00857,G3DSA:1.10.10.2600,IPR036162,PF13408, IPR025827,PS51737,G3DSA:3.40.50.1390,IPR006119,IPR038109, PF07508,IPR011109,SSF53041,PTHR30461,Coil, PS51736,cd00338,PF00239
MNAVIYARFSSHSQREQSIEGQLRDCYEYAKRYDINIVGEYIDRAISGMTDDRPDFQRMIADAPKKQFERIIVWKLDRFARNRYDSALYKHKLKQYGIRVISAMENVGEGDESILLEALLEASAEYYSLDLKKKILRGQRETIAKGRWCGGPIPYGYKAVDGKLVADEKTAPIIRYVFEQYAQGVPMKEIIDELKRRGVRSSRGGELTYTTFSRALTNPVYIGNFMYKGELVPGVADALIDEDTYNKVQIIVKANAHAPAANKAKVEYLLQGKAFCGHCGSHMVGESGKSRNGDVYYYYSCAARKKAHKCRKKNEKKDFIEWYVVEQTLNYVLTPTRMRDIAKAVVAEYDKEFSGSKVQEYEKAIKQYERELDKLVDALVDAPKVAHKRIYEKMETLETQKASMENELVKLRIASEIRFTEEEVRAWLCRFCTGDLFDPEFRRNIIDTFINCIYLYDDRIIIFYNIKGGKQVSFVDLAESLDSESESSGSDLNANAPPPLDSNFDTKLESSFLFILADSAPKKAC

SEQ ID NO: 3816 - protein, 525 aa, Unknown
  Description of Unknown: Integrase B3817 sequence
  PTHR30461:SF3,IPR036162,PS51737,IPR011109,PTHR30461, PF00239,G3DSA:1.10.10.2600,IPR006119,SSF53041,cd00338, SM00857,IPR025827,IPR038109,mobidb-lite,PS51736, PF13408,G3DSA:3.40.50.1390,PF07508,Coil
MRKKSNLNAATRAVIYARYSSANQRDCSIEQQVAKCRELAARLGLTVIDVYEDRAISGKTDRRPNFQRMMKDADLRQFDVVLAWKSNRMGRNMLQAMTNEERLRDNAIRTIYAEEDFDDTAAGRFALRNMMNVNQFYSENMAEDITRGLMDNASKCLSNGSLPLGYKPGDDRHVVLDETEASIVQEIFTRVSCYEPFIDIARDLNRRGIKTKKGAEWGRSSFHTICRNERYRGIYIYRDVRVEGGMPRIISDELFYKVQEVLKVKKNPQGRRKRSGYEEYLLTGKLYCGHCGSPMTGIAGTSKTGAMHYYYTCQKRRTDHSCDKKAVRRDQIERAVGVAIQQQLLTDENIQMMADKLMEYNARTETKHRLQGLQDQLNANKTATANILKAIEMGIITDATKARLLELEKEQAQLLVKIDTAKAEMVPISRNDFVKLLYIYKEGEPTDKKYLAALFDNFLVRVDLYDDHLKITFDPTGGRQPIDMPIGAEDSPESPGDSSESSDFEASSQDAEKFVLALHNCTKSL

SEQ ID NO: 3817 - protein, 525 aa, Unknown
  Description of Unknown: Integrase B3818 sequence
  PTHR30461:SF3,SM00857,G3DSA:1.10.10.2600,IPR036162,PF13408, PS51737,G3DSA:3.40.50.1390,IPR025827,IPR006119,IPR038109, PF07508,IPR011109,SSF53041,PTHR30461,Coil, PS51736,cd00338,PF00239
MDTLADVVVYARYSSAGQNDQSIEGQVKTCREFAAQRGFRVVQEYADRAISGRHAETRPAFQQMIADAKKKTFQYILVWKLDRFARNRYDSAIYKKELRKYGVRVLSVTEGIDEGNESILLEAILEAMAEEYSRQLSQNVRRGMRQNAEKGLSLGGGTPYGYRLQGKRYVIVDREAEVVRFIHEAYAEGKTSREIINECKSRGYHTRNGADFTMNAIARMIANDKYAGAFLFKDELVVGDLYPPIVSPELKERAKKRLALKARAPGHEKAKVEYILHGKLFCGHCGAPMVGESGKSKSGTVYNYYACAEKKKRHGCKKKNERKDFLEWYIAEQITEYVLTDSRIEEIAGAVVAEYKKSFDASGIKRLEKKIKDADAELDKLVDALIKTSADAAVKRINARIEEVEQYRAQLEDDLSSLRIASRVEIKKDDVAKWLRSMRRGDLMDDEYRKKIVEIFVNAVYLYDDRVAIFFNVKDCKQVSYIDMIDATGWAACSDLSSNALPITDLSEHGKLIILNGAIGFLLRR

SEQ ID NO: 3818 - protein, 525 aa, Unknown
  Description of Unknown: Integrase B3819 sequence
  PTHR30461:SF3,cd00338,SM00857,G3DSA:1.10.10.2600,IPR036162, PF13408,IPR025827,G3DSA:3.40.50.1390,PS51737,IPR006119, IPR038109,PF07508,SSF53041,IPR011109,PTHR30461, PS51736,Coil,PF00239
MSSVDKTAVIYARYSSHGQTEQSIDGQIAAAQKYAEGKGYTIIHIYADRAMTGRNDDREQFQKMLSDTATHQFGVILLWKIDRFGRNREEIAFNRYRCKKNGVRVERVAEDVPDGPEGVILDSVLEGMAEYYSLQLAQNVRRGQRESAKKSQTVGGCNIIGYKVNPDTKRYEVDPKTAPFVTEVFKRYANGETISEIVAWLNVQGVRATRGGEFTVNSLHRLLKNEKYTGVYIFHDIRNEGGMPALTDRATFDKVQEMLKVNRRAPARVWSKTEYLLTDKLFCGHCGAMMVGESGHGRNGTKHSYYTCWNRKKKKSCSKKPVRQDVIEPMVLRVISKMLSDEATLEYIADQVWAVYERSDTSGDTIKALDKQIADVDRALSNVMKAIEMGIINEMTKARMDELTDQKQALSVARAEAGLAGGFKLTRDMILFFLHDMAATNMTDHDCQKRLIKTFVNAIYLYDDHFDIAFNYTSNGKMVVKMQEINDTTSGEVFGRCAQSPAKSTAVVIQMYRKTAVLFVCGSIR

SEQ ID NO: 3819 - protein, 525 aa, Unknown
  Description of Unknown: Integrase B3820 sequence
  cd03768,PTHR30461:SF3,SM00857,IPR036162,PF13408, IPR025827,G3DSA:3.40.50.1390,IPR006119,PF07508,SSF53041, IPR011109,PTHR30461,PS51736,Coil,PF00239
MVRIASYLRKSVYSDKSDSIQAQYTLISDYCNSHYTDFELYRYEDEGFTGANTNRPAFQKLTSDISERKIDILICYKIDRVSRDVKDFSNFFSFLQENKVEFVSIKEQIDTSTPLGRAMMYICSVFAQMERETIAQRVKDSLSELSKSGKWAGGRAPLGYRRERVVEMNGKNHTVLVPDPDGIQLLNLISNKFLEQNMTIVKLDRYCRKNNIKTATGSYFSSSQLWNVLKNPTYCTADSTAYDYFESLGCTMAVDRDRFDGSHAIMPYNRTRGGKTKKHVVNQVNEWIISVGLHEPLFTSEKYISIQSKFGNNVIDKTRKHKVGILHGIVKCSCGWNMRAKHKVLKSTGKTYDNYFCSQRENRGKDACSMPYVRVETLDSAVIDLLKQIKLDKKMIDNYCFDDTSISIHRRNRADVQRDIGRIENKILNLTNTLSNTSGSTAAKYIVSEIEKLDRELSGYKYELMEIGADEKKHAHFQHTKEDKYKMICDIVDNLDRLEYDEIRTLLKELFKECVWDGAVLHVKL

SEQ ID NO: 3820 - protein, 525 aa, Unknown
  Description of Unknown: Integrase B3821 sequence
  PTHR30461:SF3,SM00857,G3DSA:1.10.10.2600,IPR036162,PF13408, IPR025827,G3DSA:3.40.50.1390,PS51737,IPR006119,IPR038109, PF07508,IPR011109,SSF53041,PTHR30461, PS51736,cd00338,PF00239
MQTAENRSKYHQLRVAAYCRVSTEQEEQQNSYQVQIAYYTDLINRKKEWTLAGIFADEGISGTQTKKRTEFNRMIRMCRNKKIDLVITKSISRFARNTVDCLEYVRQLKDLGIGVIFEKENINTLTMTSEFMIALYGSFAQAESESISKNVSWGKEKAFREGKVQFQYKYLLGYKKGADGKPEIVPDEAETVRLIFKMYLDGYTLLNIADTLMTQGRRTATGKNIWSKGEVQRILKNEKYVGDALLQKSFTVDCITHKVVKNNGERPMYLVTDHHTPIVDRDTFNRVQQELARRTSKRKISDKTKTEQGKYSGKYALSELLICGHCGTPYRRRIWSRNGKKQVVWRCISRLEHGKKYCPDSPTIKEEQLHKAIIRAINNYYSCRNDIVRILKANIGTVLECQGQEDILAAEKRLREIDQARNDLVGLIASGGCDEDKLDSEFAKLYSEEQSLSERLEMLKSQNKTSQETQAKLDKIMDMIEHEKFELETFDNVLIRKLIECIKVLSKTEILVIFKGGYEVRAEIE

SEQ ID NO: 3821 - protein, 525 aa, Unknown
  Description of Unknown: Integrase B3822 sequence
  SM00857,G3DSA:1.10.10.2600,IPR036162,PF13408,IPR025827, G3DSA:3.40.50.1390,PS51737,IPR006119,IPR038109,PF07508, IPR011109,SSF53041,PTHR30461,Coil,PS51736, cd00338,PF00239
MAKPEVSELAVVYARYSSHSQGEQSIEGQLSNARDYAAAHGYTIVHEYVDRAKSGRTDNRAEFQQMLKDTAKRQFSVIILWKVDRFGRNREEIAINKMKCRKNGVRVEYVAETIPDSPEGVILESVLEGFAEYYSLQLSQNIRRGRAESAEKCQSLGGNRPLGYKTGPDKKFVIDENTAPTVKMIFTMYADGKTVTEIVDKLNEMGLRTLRGGPFTKNSLHSILKNKKYIGVYEYQGREIKDGVPRIIEDDVFNKVQEMLKINKRAPAKTWSRADYILTDKLFCGKCGALMFGESGTSKTGVKHNYYICSNKKRFRSCDKKAVRQADIEDTVLNATHELLQDDELLDYIVDRTWEYYLAQDNSQEELRNLQRQLAQTDTAISNLIRAIEAGILTEETKKRMDELTQQKADLKASIADREIARGFHLQKSHIAFYLRSLRDADWSDKEAQKRLIQTFVNAVFVYDDHITLTYNFSGDKSTITLRDMQRFEDGEEFGCRASRSTKTHRYELFWFRNVFGLTRKLPQR

SEQ ID NO: 3822 - protein, 525 aa, Unknown
  Description of Unknown: Integrase B3823 sequence
  PTHR30461:SF3,SM00857,G3DSA:1.10.10.2600,IPR036162,PS51737, G3DSA:3.40.50.1390,IPR006119,IPR038109,PF07508,IPR011109, SSF53041,PTHR30461,Coil,PS51736,cd00338, PF00239
MWMLPQMSVDDIIMYLRKSRTDDPALTVQEVLSKHEQMLDDWVARNIPDDGRRIPEANRYREVVSGETIESRPCVQEVLRRVESPRVKAVLVVEPQRLSRGDLEDIGRLVKLLRYSNTIVITLQYTYDLRDERDRDMFERELKRGNEFLEYQKRIMGNGRLLSVQNGNFIGQKPPYGYNKVVIKEGKRKCHTLEPDPERAPIVKMVFEMYAGGTSASQIAKTLRTMGVTTADGGKWVTSSVKQMLTNDHYIGMVHWNKRKTVKVVEDGEVVATRPRNSDFLVYPGKHQPIIEKELWDAVQAIKGNIPPIKNRAKYANPFAGLAVCQCGGKMVRQQYVRDGVERCAPRLVCPNQAECHTASCSLPEFTEAVIEALEKGIKNFELMMADAPEDDATQQERLIAQLEKRLAELDRLELAQWDKYTQEAMPKHVFDALNKKVVQEKEETLQALKTAMETVPIRVDYEKKRETFAAAVRTLQDPNASVKEKNLLLKQCIERINYNRKPKESDNRRFGNPEPLELEFQFKV

SEQ ID NO: 3823 - protein, 525 aa, Unknown
  Description of Unknown: Integrase B3824 sequence
  PTHR30461:SF3,SM00857,G3DSA:1.10.10.2600,IPR036162,PF13408, IPR025827,G3DSA:3.40.50.1390,PS51737,IPR006119,IPR038109, PF07508,IPR011109,SSF53041,PTHR30461,Coil, PS51736,cd00338,PF00239
MAKVTVIPSTKVSTFSNAFNPVVKRKVAAYARVSTDSDEQFTSFEAQCNYYENYINSKPDWELVKVYADEGISGTNTKNRTQFKQMIEDALGGKIDLIITKSISRFARNTLDTINYTRKLKAKGVEVYFEKENLWTFDDKAEFLLAIMSSIAQEESRSISQNVTMGKRWQMKEGKVSFAYKTFLGYKKENGKIAIDEEQAVIVRLIYREFLVCGKTASAIANMLNSMQVLTPGGKTKWTKNTVTSILTNEKYKGDAVLQKTFIKDFLEHKAVKNQGELPQYFVENSHPAIIDKDMWEMVQAEIKRRKEIGTSYSSVNAFSSKLVCGDCGGFYGKKIWHSTKPWRKEIYRCNKKYSDAHDKCQTPFITEVEVKSKFIKAYNQVMVNKEQVINDANEVIKALTDISQIDNAISETESELEVITELVRKLVRENASHSQNQDDYAKKYNELEARYEKTKNKLDELNDEKQIRKGKLLELNSYLATFKEAGEILTDWDDNLWMTVLDKAIVNRDGTITFKFIVGIDITL

SEQ ID NO: 3824 - protein, 525 aa, Unknown
  Description of Unknown: Integrase B3825 sequence
  PTHR30461:SF3,SM00857,G3DSA:1.10.10.2600,IPR036162,PF13408, PS51737,G3DSA:3.40.50.1390,IPR025827,PS51736,IPR006119, IPR038109,PF07508,IPR011109,SSF53041,PTHR30461, mobidb-lite,cd00338,PF00239
MARSAKKIEYAPAEQIGVIYARYSSHNQKEESIEQQIAECTEFAEKNGIRIIGIYADKAVSGRSDRRPNFQRMMRDAEKRHFQIVVAYKSNRIARNMLNALQYEARLDLFGIKTLYAKEEFGNTAAGRFALRTMMNVNQFYSENMGEDIKRGMVDNANECKVNGMLPLGYVKSNEGKYAVAPDEAAVVREIFDSFLKDVPVAEIARSLNQRGIRTKLGREWNKNSFHIMLKNDNYIGVYRHSGVVVEDGIPPILEREVFAAVQEKLANKKKTAGRRSANGEYLLTGKLFCGYCGSYMIGVSGTGENGTVHHYYQCQKRHAESRCEKKNVRRDFIEKLIARLTQEYILQDDTIEWIADSTMSFQAMARRESGIAQLEHDLADKRKIAKNIMSAIEQGIITETTKARLLEVEAETRDLERSLSVAKAAAQPVERERVVFSLEQMREGNVGSKDHQKKLIDTFVKSVTLWDDRIQIDYYHTPGKHKFSYSLEELTSKAENESNASDVRTDSLELHHQAAPKKMPLRKA

SEQ ID NO: 3825 - protein, 524 aa, Unknown
  Description of Unknown: Integrase B3826 sequence
  SM00857,G3DSA:1.10.10.2600,IPR036162,PF13408,PS51737, G3DSA:3.40.50.1390,IPR025827,IPR006119,IPR038109,PF07508, IPR011109,SSF53041,PF00239,PTHR30461,PS51736, Coil,cd00338
MNESVCIYLRKSRADREAEAHGEGETLARHERILLDLAKKKEYIVGAIYREVVSGETIADRPVMQQLLHEVESGMWDGVLVVEVERLARGDTIDQGVVSRAFQYSDTKIITPTKIYDPNNEFDEEYFEFGLFMSRREYKTIKRRLNAGRISSIKEGKYCGNKPPYGYERVKLEKEKGYTLRPVPAQAEIVKMIYTWYAGDGCEQIGVAKIARKLNEMGIESALGGDWTPASIQGILTNPVYIGKIRWNGRKTVKTIQNGQVIKTRPRSKDTLICDGLHPAIISEDLFNSVQEIRKKNPPRPVSIANSIRNPLAGIVYCSKCGRAMVRRPYQKRRQEDTLMCPYTSCPTVSSKLSLVEKAVIDGIKEIVEEYKLNNDINASSKDIDCVITSKQNLIHEKENELESLNAQKAKQYDLLEQGIYTTEVFLERAKTISASIQSCSDTIEKLKEEIKHDENIIKQQSDFIPRCEELLDNYWSLDTESKNKMLKSLIEKVAYSKDTKNAYGKGNEIGFQLDIFPKIQKNN

SEQ ID NO: 3826 - protein, 524 aa, Unknown
  Description of Unknown: Integrase B3827 sequence
  SM00857,G3DSA:1.10.10.2600,IPR036162,PS51737,G3DSA:3.40.50.1390, IPR006119,IPR038109,PF07508,SSF53041,IPR011109, PTHR30461,Coil,PS51736,cd00338,PF00239
MNESVCIYLRKSRADREAEAHGEGETLARHERILLDLAKKKEYIVGAIYREVVSGETIADRPVMQQLLHEVESGMWDGVLVVEVERLARGDTIDQGVVSRAFQYSDTKIITPTKIYDPNNEFDEEYFEFGLFMSRREYKTIKRRLNAGRISSVKEGKYCGNKPPYGYERVKLEKEKGYTLRPVPTQAEIVKMIYTWYSGDGCEQIGVAKIARKLNEMGIESALGGDWTPASIQGILTNPVYIGKIRWNGRKTVKTIQNGQVIKTRPRSKDTLICNGLHPAVISEDLYNSVQEIRKKNPPRPVSIANSIRNPLAGIVYCSKCGRAMVRRPYQKRRQEDTLMCPYTSCPTVSSKLSLVEKSVIDGIREIVEEYKLNNNINASSNDIDCVITSKQNLIHEKENELESLNAQKAKQYDLLEQGIYTTEVFLERAKTISASIQSCSDTIEKLKEEIKHDKNIIKQQSDFIPRCEELLDNYWSLDTESKNKMLKSLIEKVAYSKDTKNAYGKGDEISFRLDIFPRIQKKS

SEQ ID NO: 3827 - protein, 524 aa, Unknown
  Description of Unknown: Integrase B3828 sequence
  cd00338,SM00857,G3DSA:1.10.10.2600,IPR036162, PF13408,PS51737,G3DSA:3.40.50.1390,IPR025827, IPR006119,IPR038109,PF07508,SSF53041, IPR011109,PTHR30461,PS51736,Coil,PF00239
MNESVCIYLRKSRADREAEAHGEGETLARHQRILLDFAKKKEYIVGAIYREVVSGETIADRPVMQQLLHEVESGMWDGVLVVEVERLARGDTIDQGVVSRAFQYSDTKIITPTKIYDPNNEFDEEYFEFGLFMSRREYKTIKRRLNNGRISSVKEGKYCGNKPPYGYERVKLEKEKGYTLRPVPAQAEIVNMIYTWYAGDGCEQIGVAKIVRKLNDMGIKSALGGDWTPASIQGILTNPVYIGKIRWNGRKTVKTIQNGQVVKTRPRSRNVLICEGLHPSIISDDLYNSVQEIRQKNPPRPISIKNTVRNPLAGIVYCSKCGRAMVRRPHQKRGQEDTLMCPYTSCPTVSSKLSLVEKAVLDGIKEIAEKYKLNNDINTPSNTINSGIISKQNLIREKESELESLNVQKVKQYDLLERGIYTTEVFLERSKTIARSIQSCSDIITKLREEIEHDENIKAQQSNFIPRCEELLNNYWDLNIESRNRMLKNLVEKVVYSKNIKNTYGKGNEINFELDIFPKIQKND

SEQ ID NO: 3828 - protein, 524 aa, Unknown
  Description of Unknown: Integrase B3829 sequence
  cd00338,SM00857,G3DSA:1.10.10.2600,IPR036162,PF13408, PS51737,G3DSA:3.40.50.1390,IPR025827,IPR006119,IPR038109, PF07508,IPR011109,SSF53041,PTHR30461,PS51736, Coil,PF00239
MNESVCIYLRKSRADREAEAHGEGETLARHERILLDLAKKKEYIVGAIYREVVSGETIADRPVMQQLLHEVESGMWDGVLVVEVERLARGDTIDQGVVSRAFQYSDTKIITPTKIYDPNNEFDEEYFEFGLFMSRREYKTIKRRLNAGRISSVKEGKYCGNKPPYGYERVKLEKEKGYTLRPIPAQSEIVKMIYTWYSGDGCEQIGVAKIARKLNEMGIESALGGDWTPASIQGILTNPVYIGKIRWNGRKTVKTIQNGQVIKTRPRSKDTLICDGLHPAIISEDLFNSVQEIRKKNPPRPVSIANSIRNPLAGIVYCSKCGRAMVRRPYQKRGQEDTLMCPYTSCPTVSSKLPLVEKAVIDGIREIVEEYKLNNDINISSKDIDCGITSKQNLIHEKENELKNLNSQKAKQYDLLEQGIYTTEVFLERAKTISASIQSCSDTIEKLKEEIKHDENIIKQRSDFIPRCEELLDNYWSLDTESKNKMLKSLIEKVVYSKDTKNAYGKGNEIGFQLDIFPKIQKNN

SEQ ID NO: 3829 - protein, 524 aa, Unknown
  Description of Unknown: Integrase B3830 sequence
  SM00857,G3DSA:1.10.10.2600,IPR036162,PS51737,G3DSA:3.40.50.1390, IPR006119,IPR038109,PF07508,SSF53041,IPR011109, PTHR30461,Coil,PS51736,cd00338,PF00239
MNESVCIYLRKSRADREAEAHGEGETLARHERILLDLAKKKEYIVGAIYREVVSGETIADRPVMQQLLHEVESGLWDGVLVVEIERLARGDTIDQGVVSRAFQYSDTKIITPTKIYDPNNEFDEEYFEFGLFMSRREYKTIKRRLNAGRISSVKEGKYCGNKPPYGYERVKLEKEKGYTLRPVPAQAEIVKMIYTWYAGDGCEQIGVAKIARKLNEMGIESALGGDWTPASIQGILTNPVYIGKIRWNGRKTVKTIQNGQVIKTRPRSKDTLICDGLHPAIISEDLFNSVQEIRKKNPPRPVSIANSIRNPLAGIVYCSKCGRAMVRRPYQKRGQEDTLMCPYTSCHTVSSKLSMVEKSVIDGIREIVEEYKLNNDINTSSKAIDLTIISKQNLIHEKENELESLNTQKAKQYDLLEQGIYTTEVFLERAKTISASIQSCSDTIEKLKEEIKHDENIIKQQSDFIPRCEELLDNYWSLDAESKNKMLKSLIEKVTYSKDTKNAYGKGDEISFQLDIFPKIQKNN

SEQ ID NO: 3830 - protein, 524 aa, Unknown
  Description of Unknown: Integrase B3831 sequence
  SM00857,G3DSA:1.10.10.2600,IPR036162,PF13408, IPR025827,G3DSA:3.40.50.1390,PS51737,IPR006119, IPR038109,PF07508,SSF53041,IPR011109, PTHR30461,Coil,PS51736,cd00338,PF00239
MNESVCIYLRKSRADREAEAHGEGETLARHERILLDLAKKKEYIVGAIYREVVSGETIADRPVMQQLLHEVESGLWDGVLVVEIERLARGDTIDQGVVSRAFQYSDTKIITPTKIYDPNNEFDEEYFEFGLFMSRREYKTIKRRLNAGRISSVKEGKYCGNKPPYGYERVKLEKEKGYTLRPVPTQAEIVKMIYTWYAGDGCEQIGVAKIARKLNEMGIESALCGDWTPASIQGILTNPVYIGKIRWNGRKTVKTIQNGQVIKTRPRSKDTLICEGLHPAIISEDLFNSVQEIRKKNPPRPVSIANSIRNPLAGIVYCSKCGRAMVRRPYQKRRQEDTLMCPYTSCPTVSSKLSLVEKAVIDGIKEIVEEYKLNNNINASSKDIDCVITSKQNLIHEKENELKSLNSQKAKQYDLLEQGIYTTEVFLERAKTIAASIQSCYDTIEKLKEEIKHDQNIIKQQSDFIPRCEELLDNYWSLDTESKNKMLKSLIEKVTYSKDTKNAYGKGNEIGFQLDIFPKIQKNN

SEQ ID NO: 3831 - protein, 524 aa, Unknown
  Description of Unknown: Integrase B3832 sequence
  SM00857,G3DSA:1.10.10.2600,IPR036162,PS51737,G3DSA:3.40.50.1390, IPR006119,IPR038109,PF07508,IPR011109,SSF53041, PTHR30461,Coil,PS51736,cd00338,PF00239
MNESVCIYLRKSRADREAEAHGEGETLARHERILLDLAKKKEYIVGAIYREVVSGETIADRPVMQQLLHEVESGMWDGVLVVEVERLARGDTIDQGVVSRAFQYSDTKIITPTKIYDPNNEFDEEYFEFGLFMSRREYKTIKRRLNAGRISSVKEGKYCGNKPPYGYERVKLEKEKGYTLQPVPTQAEIVKMIYTWYAGDGCEQIGVAKIARKLNEMGIESALGGDWTPASIQGILTNPVYIGKIRWNGRKTVKTIQNGQVIKARPRSKDTLICDGLHPAIILEDLYNSVQEIRKKNPPRPISIKNSIRNPLAGIVYCSKCGRAIVRRPYQKRGQEDTLMCPYTSCPTVSSKLSLVEKAVIDGIREIVEEYKLNNDINISSKAIDCGITSKQNLIHEKENELESLNSQKAKQYDLLEQGIYTTEVFLERAKTIAASIQSCSDTIEKLKEEIKHDANIIKQQSDFIPRCEELLDNYWSLDTESKNRMLKSLIEKVVYSKDTKNAYGKGDEISFRLDIFPRIQKKS

SEQ ID NO: 3832 - protein, 524 aa, Unknown
  Description of Unknown: Integrase B3833 sequence
  PTHR30461:SF3,SM00857,G3DSA:1.10.10.2600,IPR036162,PF13408, IPR025827,G3DSA:3.40.50.1390,PS51737,IPR006119,IPR038109, PF07508,SSF53041,IPR011109,PTHR30461, Coil,PS51736,cd00338,PF00239
MGKKQKTNGGDAVIYARYSSHNQRDVSIEQQVEACRKHAAELGLTVTATYEDRAISGKTDKRPSFQRMMRDAEQHKFAYVLAWKSNRIGRNMMQALVNESRLVDCGVKVFYAEEDFDDNAAGRFALRSMMNVNQFYIENMAEDVKRGLYDNAKKGLVNGSLPLGYKRGADGKPEIDEPKAAIVREIYTRVAAGELFASIAADLNARGIKTARGREWNKGSFHVLCHNDRYRGIYMYGDIRIPGGMPRIISDELFYDAQEAYGMKKDNRYGRARHGAENYLLTGKLYCGHCGGYMVGISGTSKTGEMHYYYACQKHRLEHTCEKKAIRRDVIENAVARAIMMYCLDDETIDFIVDSTIAYFKQKDHELHIEAMENELAAVQQAISNLMKAIEAGIITPTTRTRLLDLEEQQAKLSAKINTAKAERVEIDRDDLIAGLQLFRTGDIKNKKFLAKLFNTFLIAVYLYDDNRLKIVFSFTGNHNSVEIPLELDNDCPDSEIVSDETEVRMSHLECWKSWSNIPILQSG

SEQ ID NO: 3833 - protein, 524 aa, Unknown
  Description of Unknown: Integrase B3834 sequence
  PTHR30461:SF3,cd00338,SM00857,G3DSA:1.10.10.2600,IPR036162, PF13408,PS51737,G3DSA:3.40.50.1390,IPR025827,IPR006119, IPR038109,PF07508,IPR011109,SSF53041,PTHR30461, PS51736,Coil,PF00239
MAKVTIIPSKINPITHQHLDVKVKRRVAAYARVSTDDEMQLTSYEAQVDYYTKLIKANDEWEFVKVYADEGITGTSLKNRKEFNAMIKDALDDKIDLIITKSVSRFARNTVDALTTIRKLKEKRKEIYFEKENIYTLDSKGEVLVTIMSSLAQDESRNISENVTWGQRKRFSDGKYNLARKNFLGYKKDQDGNIIIDEKEAVVVRKIYRYFLDGMTPGGIAQSLMDEGVPTPGGKTKWIYSTIISILQNEKYKGDALLQKRFTVNFLEHKMKKNEGEVNQYYVKKGHPAIIEPVIWDRVQLEIKRRENSKRIYSAKDAFSSKLVCADCGSYFGKKIWHSNDPYRKVIWRCNHKYDGDKKCDTPTLEEDTIKNAFLLAYTNLCVDKDIIIETTKELVDSLCDFEELDQKIIKESEDLDIIADKVHKMVMENANTAQDQEEYQKRYDYLSGKYNEGKVKLNALQEERARRATQKEILELKINELEDAYVLEEWNESIFKMSVDEILVSKYELTFKFYIGEEIKIKL

SEQ ID NO: 3834 - protein, 524 aa, Unknown
  Description of Unknown: Integrase B3835 sequence
  SM00857,G3DSA:1.10.10.2600,IPR036162,PF13408,PS51737, G3DSA:3.40.50.1390,IPR025827,IPR006119,IPR038109,PF07508, IPR011109,SSF53041,PTHR30461,Coil,PS51736, cd00338,PF00239
MNESVCIYLRKSRADREAEAHGEGETLARHQRILLDLAKKKEYIVGAIYREVVSGETIADRPVMQQLLHEVESGMWDGVLVVEVERLARGDTIDQGVVSRAFQYSDTKIITPTKIYDPNNEFDEEYFEFGLFMSRREYKTIKRRLNAGRISSVKEGKYCGNKPPYGYERVKLEKEKGYTLRPVPDQAEIVKMIYTWYAGDGCEQIGVAKIARKLNEMGIESALGGDWTPASIQGILTNPVYIGKIRWNGRKTVKTIQDGQVIKTRPRSKDTLICDGLHPAIISEDLFNSVQEIRKKNPPRPVSIANSIRNPLAGIVYCSKCGRAMVRRPYQKHGQKDTLMCPYTSCPTVSSKLSLVEKSVIDGIREIVEEYKLNNDINISSKAIDSTIISKQNLINEKENELKSLNSQKAKQYDLLEQGIYTTEVFLERAKTIATSIKSCSDTIEKLKEEIKHDQNIIKQQSDFIPRCEELLDNYWSLDTESKNKMLKSLIEKVTYSKDTKNAYGKGNEIGFQLDIFPKIQKNN

SEQ ID NO: 3835 - protein, 524 aa, Unknown
  Description of Unknown: Integrase B3836 sequence
  SM00857,G3DSA:1.10.10.2600,IPR036162,PS51737,G3DSA:3.40.50.1390, IPR006119,IPR038109,PF07508,IPR011109,SSF53041, PTHR30461,Coil,PS51736,cd00338,PF00239
MNESVCIYLRKSRADREAEAHGEGETLARHERILLDLAKKKEYIVGAIYREVVSGETIADRPVMQQLLHEVESGMWDGVLVVEVERLARGDTIDQGVVSRAFQYSDTKIITPTKIYDPNNEFDEEYFEFGLFMSRREYKTIKRRLNAGRISSIKEGKYCGNKPPYGYERVKLEKEKGYTLRPVPAQAEIVKMIYTWYAGDGCEQIGVAKIARKLNEMGIESALGGDWTPASIQGILTNPVYIGKIRWNGRKTVKTIQNGQVIKTRPRSKDTLICDGLHPAIISEDLFNSVQEIRKKNPPRPVSIANSIRNPLAGIVYCSKCGRAMVRRPYQKRRQEDTLMCPYTSCPTVSSKLSLVEKSVIDGIREIVEEYKLNNDINASSKDIDCVITSKQNLIHEKENELESLNSQKAKQYDLLEQGIYTTEIFLERAKTISASIQSCSDTIEKLKEEIKHDENIIKQRSDFIPRCEELLDNYWSLDTESKNKMLKSLIEKVVYSKDTKNAYGKGNEIGFQLDIFPKIQKNN

SEQ ID NO: 3836 - protein, 524 aa, Unknown
  Description of Unknown: Integrase B3837 sequence
  PTHR30461:SF3,IPR036162,PS51737,IPR011109,PTHR30461, PF00239,G3DSA:1.10.10.2600,IPR006119,SSF53041,cd00338, SM00857,IPR025827,IPR038109,mobidb-lite, PS51736,PF13408,G3DSA:3.40.50.1390,PF07508,Coil
MKFKYPAMGTTKNAVIYARYSSHSQREESIEGQLRICHEYAKAEGLAIVGEYIDRAISGTTDARPDFQRMIDDAKKKQFSYVIVYRLDRFARNRYDSVLYKHELKQCGVKVVSATEGIGTGDESILLEALIEASAEYYSMELSRKIKRGRQDSAMKGNFLGGAVPLGYKVVDSKFIIDDETAPIVRYIFERYAAGIGKKQIIDELTAKGYMRRTGKPFTYRAFDSVLRNRKYTGEFTQTGITVEGGCPAIVDTEMFEKVQARLEINRRAPAKAKAKTEYLLSGKMFCGYCGEPMIGISGTGRHEKTFYYYSCVGRRGKSGCKKQHEKKDFIEWYVCEQTVQYMQDPERLSHVAKRIIEINDAEFDGGKVKELERAVENCDNDIRKLVDALTTIPDAGRAALYDKIERIGAAKADMEIDLAKVRVLSEVRYKQEDVEAWIRSMCRGDLMDFEFRRQLIDVFINSVYLFDDRVVIVYNIKNGKQVSAIDVLNAVEELDGVELFPDSAEDSSAGGSGSFLVTDAPPR

SEQ ID NO: 3837 - protein, 524 aa, Unknown
  Description of Unknown: Integrase B3838 sequence
  SM00857,G3DSA:1.10.10.2600,IPR036162,PF13408,IPR025827, G3DSA:3.40.50.1390,PS51737,IPR006119,IPR038109,PF07508, SSF53041,IPR011109,PTHR30461,Coil,PS51736, cd00338,PF00239
MNESVCIYLRKSRADREAEAHGEGETLARHERILLDLAKKKEYIVGAIYREVVSGETIADRPVMQQLLHEVESGLWDGVLVVEIERLARGDTIDQGVVSRAFQYSDTKIITPTKIYDPNNEFDEEYFEFGLFMSRREYKTIKRRLNAGRISSVKEGKYCGNKPPYGYERVKLEKEKGYTLRPVPTQAEIVKMIYTWYAGDGCEQIGVAKIARKLNEMGIESALCGDWTPASIQGILTNPVYIGKIRWNGRKTVKTIQNGQVIKTRPRSKDTLICEGLHPAIISEDLFNSVQEIRKKNPPRPVSIANSIRNPLAGIVYCSKCGRAMVRRPYQKRRQEDTLMCPYTSCPTVSSKLSLVEKAVIDGIKEIVEEYKLNNDINASSKDIDCVITSKQNLIHEKENELESLNAQKAKQYDLLEQGIYTTEVFLERAKTISASIQSCSDTIEKLKEEIKHDQNIIKQQSDFIPRCEELLDNYWSLDTESKNKMLKSLIEKVAYSKDTKNAYGKGNEIGFQLDIFPKIQKNN

SEQ ID NO: 3838 - protein, 524 aa, Unknown
  Description of Unknown: Integrase B3839 sequence
  cd03768,PTHR30461:SF3,SM00857,IPR036162,PF13408, PS51737,G3DSA:3.40.50.1390,IPR025827,IPR006119,PF07508, IPR011109,SSF53041,PTHR30461,PS51736,Coil, PF00239
MRFFNYGRKSVYSDKSDSIDNQFRMSREYCEQKFPGKIESWQEFSDEDFTGANTSRPDLQRMLSYIEEGFCDVLVVYQLDRLSRNVRDFSNIYAMLEEHNVMFISIKENIDTTTPIGRAMMYVTVVFAQMERETTATRVADNMRGLAKKGYWMGGQAPLGYSIKHIVIGDKKHSALELDPDGVRYVTQIFDDFLSSHGSLNAMVTRFRHQGIRTLTGKFFSKAHLHNILTMPYCVEATPEVYDYYAAKGCIMDSASPREKWDGSTGVLIYGRFSDKSQKHLVQPPENWTICLGLQKPFIPAEKWLAVQERFKQNTFCKDAKWPVPLLRGILRCNKCGSLMPVSRRKKVDGTCSSWYYCRKRKDEGSEACDMNQIKCDLIDEKVLEIFRKIALDPDSIHQFVKTESPSEIPNLSFISSRISSVESKIGKLAASLALAENSTASKYIIEEIERLDAELAALKREASHAEMKIHQAAAKERNSQATAIEIAKFINNLDGFSAKEKNEIARSVIRDCRWDGEKLFLTL

SEQ ID NO: 3839 - protein, 524 aa, Unknown
  Description of Unknown: Integrase B3840 sequence
  SM00857,G3DSA:1.10.10.2600,IPR036162,PF13408,IPR025827, PS51737,G3DSA:3.40.50.1390,IPR006119,IPR038109,PF07508, IPR011109,SSF53041,PF00239,PTHR30461,PS51736, Coil,cd00338
MNESVCIYLRKSRADREAEAHGEGETLARHERILLDLAKKKEYIVGAIYREVVSGETIADRPVMQQLLHEVESGMWDGVLVVEVERLARGDTIDQGIVSRAFQYSDTKIITPTKIYDPNNEFDEEYFEFGLFMSRREYKTIKRRLNAGRISSVKEGKYCGNKPPYGYERVKLEKEKGYTLRPVPTQAEIVKMIYTWYAGDGCEQIGVAKIARKLNEMGMESALGGDWTPASIQGILTNPVYIGKIRWNGRKTVKTIQDGQVIKTRPRSKDTLICDGLHPAIISEDLYNSVQEIRKKNPPRPNSIKNSIRNPLSGIVYCSKCGRAMVRRPYQKRGQEDTLMCPYTSCPTVSSKLSLVEKAVLDGIREIVEEYKLNNDINTSSKAIDCGITSKQNLIHEKENELESLNAQKAKQYDLLEQGIYTTEVFLERAKTIAASIQSCSATIEKLKEEIKHEQNIIKQQSDFIPRCEELLDNYWSLDTESKNKMLKSLIEKIAYSKDNKNAYGKGNEINFQLDIFPKIQKNN

SEQ ID NO: 3840 - protein, 524 aa, Unknown
  Description of Unknown: Integrase B3841 sequence
  SM00857,G3DSA:1.10.10.2600,IPR036162,PS51737,G3DSA:3.40.50.1390, IPR006119,IPR038109,PF07508,SSF53041,IPR011109, PTHR30461,PS51736,cd00338,PF00239
MLKYNSETNLDSDIDSDIDKYAIYLRKSRADLEAEKIGDGETLARHKKILTDLAARKGLYVSKIYEEIISGETIEARPEIQKLIQDCYDGKYRGILVVEVTRLSRGNQGDAQTIMDCLKYSNYNKGLLVVTPTKTYDIVHSQEDEEYMEFELFMSRREYKMIKKRLERGRMQAIVEGNYMASHRPYGYNIVKTKTGRTLIPNKDEAPIVKLIFDLAADNVPLLTIARHLKDMGVPTYNGDYYWSRVSVKRILENPVYIGKVRWNNRTTIKTMVDGKIETRLTTLNKNHYMEYDGKHKKYALTDEETFAKVNSRLTETRTKYDYKLVNPLAGLLRCKKCGRVMNLRTYDSRKYNVSPRYNHDGSPYCKLSSVMYTDVIDTLIRALELYIEDFKIEINNDFQHDDTNIQMQIQTLKREETKLKQKITKLFDSWENGILNDNEFIERKVINNESLENIQRQIRDLEKSIPEKIDYKEKIILLSNAVESLRDDTVSAKIKNDYLKEIISTIEYSRERPGEFILDIELL

SEQ ID NO: 3841 - protein, 524 aa, Unknown
  Description of Unknown: Integrase B3842 sequence
  SM00857,G3DSA:1.10.10.2600,IPR036162,PS51737, G3DSA:3.40.50.1390,IPR006119,IPR038109,PF07508, SSF53041,IPR011109,PTHR30461,PS51736, cd00338,PF00239
MLKYNSETNLDSDIDSDIDKYAIYLRKSRADLEAEKIGDGETLARHKKILTDLAARKGLYVSKIYEEIISGETIEARPEIQKLIQDCYDGKYRGILVVEVTRLSRGNQGDAQTIMDCLKYSNYNKGLLVVTPTKTYDIVHSQEDEEYMEFELFMSRREYKMIKKRLERGRMQAIVEGNYMASHRPYGYNIVKTKTGRTLIPNKDEAPIVKLIFDLAADNVPLLTIARRLKDMGVPTYNGDYYWSRVSVKRILENPVYIGKVRWNNRTTIKTMVDGKIETRLTTLNKNHYMEYDGKHKKYALTDEETFAKVNSRLTETRTKYDYKLVNPLAGLLRCKKCGRVMNLRTYDSRKYNVSPRYNHDGSPYCKLSSVMYTDVIDTLIRALELYIEDFKIEINNDFQHDDTNIQMQIQTLKREETKLKQKITKLFDSWENGILNDNEFIERKVINNESLENIQRQIRDLEKSIPEKIDYKEKIILLSNAVESLRDDTVSAKIKNDYLKEIISTIEYSRERPGEFILDIELL

SEQ ID NO: 3842 - protein, 524 aa, Unknown
  Description of Unknown: Integrase B3843 sequence
  SM00857,G3DSA:1.10.10.2600,IPR036162,PF13408,IPR025827, G3DSA:3.40.50.1390,PS51737,IPR006119,IPR038109,PF07508, SSF53041,IPR011109,PTHR30461,Coil,PS51736, cd00338,PF00239
MNESVCIYLRKSRADREAEAHGESETLARHEHILLDLAKRQGYSIGAIYREVVSGETISARPVMQKLLHEVESGLWDGVLVVEVERLARGDTIDQGVVSRAFQYSDTKIITPTKIYDPNNEFDEEYFEFGLFMSRREYKTIKRRLNNGRISSVKEGKYCGNKPPYGYERVKLEKEKGYTLRPVPAQAEIVKMIYTWYAGDGCEQIGVAKIVRKLNDMKIESALGGDWTPASIQGILTNPVYIGKIRWNGRKTVKTIQNGQVIKTRPRSRDVLICEGLHPAIISDDLYNSVQEIRQKNPPRPISIKNTVRNPLAGIVYCSKCGRAMVRRPYQKRGQEDTLMCPYTSCPTVSSKLSLVEKAVIDGIEEIAEEYKLNNDINVPSSTINSGIVSKQNLIREKESELESLNAQKAKQYDLLEQGIYTTEIFIERSKTIAAAIQTCADAIKKIKEEVEHDKDIMSQQSAFIPRCEEMLNNYWGLDAESKNKMLKSLIEKVVYSKDKRNAYGHGNEANFELDIFPKIQENN

SEQ ID NO: 3843 - protein, 524 aa, Unknown
  Description of Unknown: Integrase B3844 sequence
  PTHR30461:SF3,cd00338,SM00857,G3DSA:1.10.10.2600,IPR036162, PF13408,IPR025827,PS51737,G3DSA:3.40.50.1390,IPR006119, IPR038109,PF07508,IPR011109,SSF53041,PTHR30461, PS51736,Coil,PF00239
MDGLNLANVVIYARYSSAGQNDQSIDGQLAKCREYAQQRGYRVVGEYCDRALSGRYAETRPEFQRMISDSAKHAFDFVLVWKLDRFSRDRYDSAIYKKKLRANGVRVLSVTEGVGDSSESVLLEAILEAMAEEYSRQLAQNVRRGMRQNAEKALSLGGLAPLGYRVVDKRYEVDEEAAQIVRFVHEQYAAGATQKQIVADCAQRGYRNQRGNPLTIDSVKRILSNERYVGTYRYLDDIVIEDAFPAIVSKELKQQVRARLTANAKAPGHAKAKIEYLLHGKLFCGLCGAPMIGECGRGRHGATYYYYTCAARKKAHTCKKRNERKDELEQYIVEYIGTHVLTDEWISAAADRVVAEYARSYDASGIKPLERQIREADKDIDKLVDTLISATADAARRRINERIEAAEAKKKALEEDLASLRIASRVQIRKEDIVAWLCQFRGGDSVDLEYRKKVIELFVNAIYIYDDKIKMFFNVTDSAQITYPEMLALEAPPGSDFGASGVPDVSLSEHFVFINGVIGMVVHR

SEQ ID NO: 3844 - protein, 524 aa, Unknown
  Description of Unknown: Integrase B3845 sequence
  PTHR30461:SF3,cd00338,SM00857,G3DSA:1.10.10.2600,IPR036162, PF13408,PS51737,G3DSA:3.40.50.1390,IPR025827,IPR006119, IPR038109,PF07508,SSF53041,IPR011109,PTHR30461, PS51736,Coil,PF00239
MLLLENLIMYLRKSRSDDISMSVEDVLAKHEGIIQEYCEREFGARLPENRIFREVVSGETIADRPVMKEIMKLLETGTVKGVLVVEPQRLSRGDLEDCGRIINTFRYTGTLVITPQKTYDLTNEYDRKFFEMELTRGNDYLEYTKRILSRGREASVKQGNFIGSIAPYGYKKIVVGSGKDKYHSLEINPEEADAVRLMYALFINEGYGFAKIAHRLDELGFKPRSSENWQPAAIKDMLENPVYIGKIRWNWRKTQKRMANGEVVKVRPKTKDPSEWILVDGKHPAIISEELYNAALERRGKNPCVRKSLELTNPYAGLLFCGTCGRAMSQKRFINRRTHTQSVCDSMLCNNQANCHTKSVKYSAFEQRVIELLEDAVADFEIKLKDNNTNVIELHRGIIQKHMHELERLHEKDMRQKDAYEDGIYTKEEYIKRNALIQEQIAKTTSALEEAKTSAPKAIDYAEKIKRFNDCINALKDPDVSAPEKNTLLKNCVKRIDYYNEGESKPGVGRYVENVFELNMLLNM

SEQ ID NO: 3845 - protein, 524 aa, Unknown
  Description of Unknown: Integrase B3846 sequence
  PTHR30461:SF3,SM00857,G3DSA:1.10.10.2600,IPR036162,PF13408, IPR025827,G3DSA:3.40.50.1390,PS51737,IPR006119,IPR038109, PF07508,SSF53041,IPR011109,PTHR30461,PS51736, cd00338,PF00239
MLLPENLIMYLRKSRSDDAAMSVEDVLAKHEEILQEYCEHEFGVRLPEAKIFREVVSGETIADRPVMKEIMKLLETGTVKGVLVVEPQRLSRGDLEDCGKIINTFRYTGTLVITPQKTYDLTNEYDRKFFEMELTRGNDYLEYTKRILNRGREASVKHGNFIGSIAPYGYKKVVVGSGKDKYHSLEIEPEEADAIRLMYALFVNEGYGFAKIAHRLDELGFKPRSSKNWQPAAIKDMLENPVYIGKIRWNWRKTQKRMTNGEIVKIRPKTKDPSEWILVDGKHPAIISEELYNIALERRGKNPCVRKSLELTNPYAGLLFCGTCGRAMSQKRFVNRRAHTQSVCDSMLCNNQANCHTKSIKYSAFEKRVIELLEDAVTGFELKLKDNNTNIIQLHEGIIRKHMHELERLHEKDMRQKDAYEDGIYTKEEYIKRNALVQEQIAKTTSALEQAKLSAPKPVDYAKKIKQFNDCINALKNSEMSAPEKNILLRNCVKRIDYYNDGESKPGVGRYVENVFELNMLLNI

SEQ ID NO: 3846 - protein, 524 aa, Unknown
  Description of Unknown: Integrase B3847 sequence
  cd00338,SM00857,G3DSA:1.10.10.2600,IPR036162,PF13408, PS51737,IPR025827,G3DSA:3.40.50.1390,IPR006119,IPR038109, PF07508,IPR011109,SSF53041,PTHR30461,PS51736, Coil,PF00239
MNESVCIYLRKSRADREAEAHGEGETLARHQRILLDLAKKKEYIVGAIYREVVSGETIADRPVMQQLLHEVESGMWDGVLVVEVERLARGDTIDQGVVSRAFQYSDTKIITPTKIYDPNNEFDEEYFEFGLFMSRREYKTIKRRLNAGRISSVKEGKYCGNKPPYGYERIKLAREKGYTLRPVPAQAEIVKMIYTWYAGDGCEQIGVAKIVRKLNDMGIKSALGGDWTPASIQGILTNPVYIGKIRWNGRKTVKTIQNGQVVKTRPRSRNVLICEGLHPSIISDDLYNSVQEIRQKNPPRPISIKNTVRNPLAGIVYCSKCGRAMVRRPHQKRGQEDTLMCPYTSCPTVSSKLSLVEKAVLDGIKEITEKYKLNNDINVPYNTINSGIVSKQNLIREKESELESLNVQKAKQYDLLERGIYTTEVFLERSKTIARSIQSCSDIITKLREEIEHDENIKAQQSNFIPRCEELLNNYWDLNIESRNRMLKNLVEKVVYSKNIKNTYGKGNEINFELDIFPKIQKND

SEQ ID NO: 3847 - protein, 524 aa, Unknown
  Description of Unknown: Integrase B3848 sequence
  PTHR30461:SF3,SM00857,G3DSA:1.10.10.2600,IPR036162,PF13408, IPR025827,G3DSA:3.40.50.1390,PS51737,IPR006119,IPR038109, PF07508,SSF53041,IPR011109,PF00239,PTHR30461, PS51736,Coil,cd00338
MDGLNLANVVIYARYSSAGQNDQSIDGQLAKCREFAQHRGFRVVHEYCDRALSGRYAETRPEFQRMIADSEKRAFEYVLVWKLDRFSRDRYDSAIYKRKLRANGVRVLSATEGIDESSESVLLEAILEAMADEYSRQLAQNVKRGMRQNAEKCLSLGGIAPLGYRVVNKQYEINEDEAQIVRCIHEQYASGMSQKQISAECSRLGYRNQRGKPIDLHAIKRILANERYIGTYIYNGEVIAEDAFPAIITKELKKQVRERLAANAKSPGHAKAKIEYLLHGKLFCGECGAPMVGECGRSRSGTVHYYYSCAARKKQHTCKKRNERKDELEQYIVDYIGKSVLTDEWIKSASARVVAEYARSYDASGIKPLERQIRETDKELEQLVDALIKTTADVAIRKINERIEATEAKKHTLEEELASLRIASRVQLREEDVAAWISQFRDGDSADMEYRKKVIDLFVNAIYIYDDRIKMFFNVTDSEQITYPEMLALDEPSGSDFGASAVPDVSLSEHLIFINGVIGMVVHR

SEQ ID NO: 3848 - protein, 524 aa, Unknown
  Description of Unknown: Integrase B3849 sequence
  PTHR30461:SF3,SM00857,G3DSA:1.10.10.2600,IPR036162,PF13408, IPR025827,G3DSA:3.40.50.1390,PS51737,IPR006119,IPR038109, PF07508,IPR011109,SSF53041,PTHR30461,Coil, PS51736,cd00338,PF00239
MNKLRAAAYCRVSTDRAEQSGSLASQRSFFDDYIRNSDSMTLVGVFYDEGTSGTTTLNRYGFNKMISLAVSGGIDIILTKEVSRFARNTVDTLNITRMLRAKGVGIIFINDNIDTRDSDGELRLSIMATIAQEESRKISERVKWGQQRKMEQGVVFGRSCLGYDVKDGKITVNADSAEIVKRIFTEYTVLLKGAESIADRLNAEQIRTVNGGRWSGAFIRKVLRNVKYVGDLEQKKTCTPDFLTHKKRLNSSEHIYIRNHHEPIISRELWEQTQAEISRRKPTDTSRHSDRYVFSGKVYCGVCGSVMVSRVKALKNGKIYHALRCSGRIGGKSCNNETLNVTALKACVKRIFTDMPIDKTAVINAVIKGLSRTDKPDIPALRKKIETLNAKKRRAVDLMLDGLITQQELIEQKSYYDSIIEKLSQEISSDKSVFETDKIRKNAERFLDFTSDPIWLLVIRADYIHGTLTVYLKGIEKGFTTCFTATGRGDSYRVITANTVRSQGIIPGTMQVQKNRCRHDVNDK

SEQ ID NO: 3849 - protein, 524 aa, Unknown
  Description of Unknown: Integrase B3850 sequence
  cd00338,SM00857,G3DSA:1.10.10.2600,IPR036162,PF13408, PS51737,G3DSA:3.40.50.1390,IPR025827,IPR006119,IPR038109, PF07508,IPR011109,SSF53041,PTHR30461,PS51736, Coil,PF00239
MNESVCIYLRKSRADREAEAHGEGETLARHERILLDLAKKKEYIVGAIYREVVSGETIADRPVMQQLLHEVESGMWDGVLVVEVERLARGDTIDQGIVSRAFQYSDTKIITPTKIYDPNNEFDEEYFEFGLFMSRREYKTIKRRLNAGRISSVKEGKYCGNKPPYGYERVKLEKEKGYTLRPVPTQAEIVKMIYTWYAGDGCEQIGVAKIARKLNEMGIESALGGDWTPASIQGILTNPVYIGKIRWNGRKTVKTIQTGQVIKTRPRSKDTLICNGLHPAVISEDLYNSVQEIRKKNPPRPVSIANSIRNPLAGIVYCSKCGRAMVRRPYQKRGQEDTLMCPYTSCPTVSSKLSLVEKAVLDGIREIVEKYKLNNDINISSKDIDCGITSKQNLIHEKENELKNLNSQKAKQYDLLEQGIYTTEVFLERAKTISASIQSCSDTIEKLKEEIKHDENIIKQRSDFIPRCEELLDNYWSLDTESKNKMLKSLIEKVVYSKDTKNAYGKGNEIGFQLDIFPKIQKNN

SEQ ID NO: 3850 - protein, 524 aa, Unknown
  Description of Unknown: Integrase B3851 sequence
  SM00857,G3DSA:1.10.10.2600,IPR036162,PF13408,PS51737, G3DSA:3.40.50.1390,IPR025827,IPR006119,IPR038109,PF07508, IPR011109,SSF53041,PTHR30461,Coil,PS51736, cd00338,PF00239
MNESVCIYLRKSRADREAEAHGEGETLARHERILLDLAKKKEYIVGAIYREVVSGETIADRPVMQQLLHEVESGMWDGVLVVEVERLARGDTIDQGVVSRAFQYSDTKIITPTKIYDPNNEFDEEYFEFGLFMSRREYKTIKRRLNNGRISSVKEGKYCGNKPPYGYERVKLEKEKGYTLRPVPAQAEVVKMIYAWYAGDGCEQIGVAKIVRKLNEMGIESALGGDWTPASIQGILTNPVYIGKIRWNGRKTVKTIHNGQVVKTRPRSRDVLICGGLHPAIISDDLYNSVQEIRQKNPPRPISIKNTVRNPLAGIVYCSKCGRAMVRRPYQKRGQEDTLMCPYTSCSTVSSKLSIVEKAVIDGIRDIAEEYKLNNDVNTSSKAIDLTIISKQNLIREKESELENLNTQKAKQYDLLEQGIYTTEVFLERSKTIATSIQSCSDIITKLKEEIEHDENIMAQQSDFVPRCEELLNNYWNLDVESRNRMLKSLVEKVVYSKNIKNAYGKSNEINFELDIFPKIQKND

SEQ ID NO: 3851 - protein, 524 aa, Unknown
  Description of Unknown: Integrase B3852 sequence
  cd03768,PTHR30461:SF3,SM00857,G3DSA:1.10.10.2600,IPR036162, PF13408,IPR025827,G3DSA:3.40.50.1390,PS51737,IPR006119, IPR038109,PF07508,IPR011109,SSF53041,PTHR30461, PS51736,PF00239
MLMIADYSRKSVYSDKSDSTQAQYNLALDYCKGHYNDYEVIRYEDEGYTGANTDRPAFSCMVNDIKDGKINIVICYKIDRVSRDVKDFSNFFSFLQDHNVEFVSIKEQIDTSTPLGRAMMYICSVFAQMERETIAERVKDGMTDLSKTGKWAGGRAPLGYKRERVEISGKSHTVLIPDAQGCKLLNLISDTFLDTGYSLTQLERYCRENNITTSRGAYFSSSQIWTILKNPIYCTADQAAYDYFEGLGCQMGVDRDKFDGKRAIMSYGRTAGGKRKKHVVNPPEKWVISVGLHAPLWTSEKYIAIQDRFGNNQIDKARKHKIGILKGVVKCKCGYTMRVQHKVDNANGKIYDNYFCSLRNRRGKSFCDMHFTPVSTLDDAVIEILKQIKLDKSMIDNFIVDDSKINVAYRSRSDVQRDIDRIDGKILNLTNALGNASGSTASKYIVQEIERLDRELSGLKYELLEISTNEKKRNRANYDRELKYKMVCDIVDNLEYADYDEINGLLKDLFKECVYDGQTLHIKI

SEQ ID NO: 3852 - protein, 524 aa, Unknown
  Description of Unknown: Integrase B3853 sequence
  SM00857,G3DSA:1.10.10.2600,IPR036162,PF13408,IPR025827, G3DSA:3.40.50.1390,PS51737,IPR006119,IPR038109,PF07508, IPR011109,SSF53041,PTHR30461,Coil,PS51736, cd00338,PF00239
MQALAQNVTVIPARRRVGSQRTAAQVQKIRVAAYCRVSTDSEKQETSYEAQVSHYTEYIKSKPEWQMVEVYADDGISGTNTAKRDEFNRMIADCEAGKIDLILTKSISRFSRNTLDCLKYTRKLKALNIAVFFEKENINTMDSKGEVLLTIMASLAQQESESLSANVRMGIQYRNQQGKVQVNHNWFLGYTKDADGNLVIDPEQAEIVRRIYREYLEGASFLQIKRSLKADGIPNEAGHLKWHESNIHQILTNEKYIGDALLQKTYTVSILEKKRAANNGEMPKYYVEGSHEAIIDRDVFMKVKAEIARRANLNPEGKRRVYSSKYALSGMVFCGHCGDIYRRVKWNNRGCKSTVWRCVSRVIKKDVDFDRPARTVKEEVLQGAIVTAVNDAYARKNIVTALLKQNIESTVFGDLEERMAMVDKELSDLQTQMIAVSGDEVAIEALGDQIDGLRAERQNILTEAAERSDLQERMNDIISFLDEMPTMLTEYSDTITRRLVEKITIFDEKIVVEMKSGLHIEVKE

SEQ ID NO: 3853 - protein, 524 aa, Unknown
  Description of Unknown: Integrase B3854 sequence
  cd03768,PTHR30461:SF3,SM00857,IPR036162,PF13408, IPR025827,G3DSA:3.40.50.1390,IPR006119,PF07508,SSF53041, IPR011109,PTHR30461,PS51736,PF00239
MTIIACYSRKSIYSDKSDSTQAQYNLAVEYCKSHYNDYQVIQYEDEGYTGANTNRPAFSRMVEDIKDKKINIVICYKIDRVSRDVKDFSNFFSFLQEHNVEFVSIKEQIDTSTPLGRAMMYICSVFAQMERETIAERVKDGMTDLSKSGKWAGGRAPLGYKRERINVSGKSHTILVPDTKGIDLLNHIADTFLNNNLSLTQLEKYCRDNNITTINGSYFSSSQLWNLLKNPTYCTADQTAYDYFEKLGCKMGVDCDKFDGTHAVMSYGRTAGGNRKKHISNPPAEWIISVGLHTPLWTSEKYIAIQKKFGNNKIDKTRKHKIGILKGIVRCKCGYLMRVQHKVDRTYNTIYDNYFCSLRNHRGKSFCDMRFTSVSKIDNAVIDILKQIKLDKSMIDNFIVDDRNLNVVYRSRSDVQHDINSINTKILNLTNALSNTPASTASKYIVKEIEKYDKELAGLNYELLEISSNEKKQSRSKYNKESKYKLVCDIVDNLDSADYDELNGLLKDLFKECVYDGETLHIKL

SEQ ID NO: 3854 - protein, 524 aa, Unknown
  Description of Unknown: Integrase B3855 sequence
  PTHR30461:SF3,cd00338,SM00857,G3DSA:1.10.10.2600, IPR036162,PF13408,PS51737,IPR025827, G3DSA:3.40.50.1390,IPR006119,IPR038109,PF07508, IPR011109,SSF53041,PTHR30461,PS51736,Coil,PF00239
MDHGLNLVNVVIYARYSSVGQNDQSIDGQLAKCREYAQQRGFRVVGEYCDRALSGRYAETRPEFQRLVSDSSKHAFEYVLVWKLDRFSRDRYDSAIYKKKLRANGVRVLSVTEGIDESSESVLLEAILEAMAEEYSRQLAQNVKRGMRQNAEKALSLGGMPPLGYDVVSKRYTINESEAQIVRFIHERYAAGAAQKLIVDECLQRGYCAKRGNELTIGAINRILRNPKYAGTYVCDDLVLEDAIPAIVSKPLKQQVRDRLAASAKAPGHAKAKVEYLLHGKLFCGECGAPMIGECGRGKNGTTHYYYTCAARKKSRSCKKRNERKFELEKYIVEYISMYVLTDEWISAAAERVVAEYARSYDAAGIKPLERQIREADKELDALIDTLIKTTSAAAIAKINERIEAAEAKKRTLEADLATLRIASRVEIRKEDIVAWLDQFRVGSSSDPEYCKKIIELFVNAVYVYDDRIKMFFNVRDSAQITYPEMLALDGLECSDFDLSGVPNDSLSEQILFINGIIGMLVRR

SEQ ID NO: 3855 - protein, 524 aa, Unknown
  Description of Unknown: Integrase B3856 sequence
  cd00338,SM00857,G3DSA:1.10.10.2600,IPR036162,PF13408, PS51737,G3DSA:3.40.50.1390,IPR025827,IPR006119,IPR038109, PF07508,IPR011109,SSF53041,PTHR30461,PS51736, Coil,PF00239
MNESVCIYLRKSRADREAEAHGEGETLARHERILLDLAKKKEYTVGAIYREVVSGETIADRPVMQQLLHEVESGMWDGVLVVEVERLARGDTIDQGIVSRAFQYSDTKIITPTKIYDPNNEFDEEYFEFGLFMSRREYKTIKRRLNAGRISSIKEGKYCGNKPPYGYERVKLEKEKGYTLRPIPAQSEIVKMIYTWYAGDGCEQIGVAKIVRKLNEMGIESALGGDWTPASIQGILTNPVYIGKIRWNGRKTVKTIQNGQVIKTRPRSKDTLICEGLHPAIISEDLFNSVQEIRKKNPPRPVSIANSIRNPLAGIVYCSKCGRAMVRRPYQKRGQEDTLMCPYTSCPTVSSKLPLVEKAVIDGIREIVEEYKLNNDINISSKDIDCGITSKQNLIHEKENELKNLNSQKAKQYDLLEQGIYTTEVFLERAKTISASIQSCSDTIEKLKEEIKHGENIIKQRSDFIPRCEELLDNYWSLDTESKNKMLKSLIEKVVYSKDTKNAYGKGNEIGFQLDIFPKIQKNN

SEQ ID NO: 3856 - protein, 524 aa, Unknown
  Description of Unknown: Integrase B3857 sequence
  SM00857,G3DSA:1.10.10.2600,IPR036162,PF13408,PS51737, IPR025827,G3DSA:3.40.50.1390,IPR006119,IPR038109,PF07508, IPR011109,SSF53041,PTHR30461,Coil,PS51736, cd00338,PF00239
MNESVCIYLRKSRADREAEAHGEGETLARHERILLDLAKKKEYIVGAIYHEVVSGETIADRPVMQQLLHEVESGMWDGVLVVEVERLARGDTIDQGVVSRAFQYSDTKIITPTKIYDPNNEFDEEYFEFGLFMSRREYKTIKRRLNNGRISSVKEGKYCGNKPPYGYERVKLEKEKGYTLRPVPAQAEVVKMIYAWYAGDGCEQIGVAKIVRKLNEMGIESALGGDWTPASIQGILTNPVYIGKIRWNGRKTVKTIHNGQVVKTRPRSRDVLICGGLHPAIISDDLYNSVQEIRQKNPPRPISIKNTVRNPLAGIVYCSKCGRAMVRRPYQKRGQEDTLMCPYTSCSTVSSKLSIVEKAVIDGIRDIAEEYKLNNDVNTSSKAIDLTIISKQNLIREKESELENLNTQKAKQYDLLEQGIYTTEVFLERSKTIATSIQSCSDIITKLREEIEHDENIMAQQSDFVPRCEELLNNYWNLDVESRNRMLKSLVEKVVYSKNIKNAYGKSNEINFELDIFPKIQKND

SEQ ID NO: 3857 - protein, 524 aa, Unknown
  Description of Unknown: Integrase B3858 sequence
  cd00338,SM00857,G3DSA:1.10.10.2600,IPR036162,PF13408, PS51737,G3DSA:3.40.50.1390,IPR025827,IPR006119,IPR038109, PF07508,SSF53041,IPR011109,PTHR30461,PS51736, Coil,PF00239
MKKTKNSVQRAVIYARYSCSNQTEQSIEGQLADCEKFAEKYNYYIVDTYIDRAMSATTDRRPQFQQMIADSATGGFDVIIVWKLDRFARNRYDSAVNKQKLNSNGVKVVSVMEHIEDTPEGALMESVLEGFAEYFSKDLSQKVSRGMRETALKFKATGLIPYGYKKTSDNICVPDEHTAPVVKKIFEMYSGGMINKDICDWLNSHGYRTSNGNLFKNQYLRKILNRRRYTGSYTYGDLELHDENQRIISDELFDRVQIQLQAKKRTGRIAREQYILAGKLFCGYCRNPIRGESGRNHQNRIYTYYKCSVNKTGGKCPKTTVQRDIIENNTIKFILNNFLNDEIINSVVDTIQASETAENNSAELITLRTQIEDTDRKINNLLTAIENGVFTPSTKQRLNDLENVKEKLKYELIVKQSEKNNFNAAAFKRFLKNIDVDDFKTTEQRQKLINLVLYREYLWNDKVLYIFNLTPSKPNDSVDIDSYVDALLASTGSTSPTDGVPLVAVFEPIKMYLIGRLLFCMKQM

SEQ ID NO: 3858 - protein, 524 aa, Unknown
  Description of Unknown: Integrase B3859 sequence
  PTHR30461:SF3,SM00857,G3DSA:1.10.10.2600,IPR036162,PF13408, IPR025827,G3DSA:3.40.50.1390,PS51737,IPR006119,IPR038109, PF07508,IPR011109,SSF53041,PTHR30461,PS51736, cd00338,PF00239
MNKLRAAAYCRVSTDRAEQSGSLASQRSFFDDYIRNSDSMTLVGVFYDEGTSGTTTLNRYGFNKMISLAVSGGIDIILTKEVSRFARNTVDTLNITRMLRAKGVGIIFINDNIDTRDSDGELRLSIMATIAQEESRKISERVKWGQQRKMEQGVVFGRSCLGYDVKDGKITVNADSAEIVKRIFTEYTVLLKGAESIADGLNAEQIRTVNGGRWSGAFIRKVLRNVKYVGDLEQKKTCTPDFLTHKKRLNRSEHIYIRNHHEPIISRELWEQTQAEISRRKPTDTSRHSDRYVFSGKVYCGVCGSVMVSRVKTLKNGKIYHALRCSGRIGGKSCNNETLNVTALKACVKRIFTDIPIDKTAVINAVIKGLSRTDKPDIPALRRKIETLNAKKRRAVDLMLDGLITQQELIEQKSYYDSIIEKLSQEISSDRSVFETDKIRKNAERFLDFTSDPLWLLVRRADYIHSTLTVYLKGVEKGFTTCFTATGRGDSYRVITGNTVRSQGIIPGTMQVQKNWFRHDVNDK

SEQ ID NO: 3859 - protein, 524 aa, Unknown
  Description of Unknown: Integrase B3860 sequence
  cd00338,SM00857,G3DSA:1.10.10.2600,IPR036162,PF13408, IPR025827,PS51737,G3DSA:3.40.50.1390,IPR006119,IPR038109, PF07508,IPR011109,SSF53041,PTHR30461,PS51736, Coil,PF00239
MNESVCIYLRKSRADREAEAHGEGETLARHERILLDLAKKKEYIVGAIYREVVSGETIADRPVMQQLLHEVESGMWDGVLVVEVERLARGDTIDQGVVSRAFQYSDTKIITPTKIYDPNNEFDEEYFEFGLFMSRREYKTIKRRLNAGRISSVKEGKYCGNKPPYGYERVKLEKEKGYTLRPVPAQAEIVKMIYTWYAGDGCEQIGVAKIARKLNEMGIESALGGDWTPATIQGILTNPVYIGKIRWNGRKTVKTIQNGQVVKARPRSKDTLICNGLHPAIISEDLFNSVQEIRKKNPPRPVSIANSIRNPLAGIVYCSKCGRAMVRRPYQKRGQEDTLMCPYTSCSTVSSKLPLVEKAVIDGIKEIVEEYKLNNDINTSSKAIDCVITSKQNLIHEKENELESLNSQKAKQYDLLEQGIYTTEVFLERAKTISASIQSCSDTIEKLKEEIKHEQNIIKQQSDFIPRCEELLDNYWSLDTESKNKMLKSLIEKIAYSKDNKNAYGKGNKIGFQLDIFPKIQKNN

SEQ ID NO: 3860 - protein, 524 aa, Unknown
  Description of Unknown: Integrase B3861 sequence
  SM00857,G3DSA:1.10.10.2600,IPR036162,PF13408,PS51737, G3DSA:3.40.50.1390,IPR025827,IPR006119,IPR038109,PF07508, IPR011109,SSF53041,PF00239,PTHR30461,PS51736, Coil,cd00338
MNESVCIYLRKSRADREAEAHGEGETLARHERILLDLAKKKEYIVGAIYREVVSGETIADRPVMQQLLHEVESGMWDGVLVVEVERLARGDTIDQGIVSRAFQYSDTKIITPTKIYDPNNEFDEEYFEFGLFMSRREYKTIKRRLNAGRISSVKEGKYCGNKPPYGYERVKLEKEKGYTLRPVQTQAEIVKMIYTWYAGDGCEQIGVAKIARKLNEMGIETALGGDWTPASIQGILTNPVYIGKIRWNGRKTVKTIQNGQVIKTRPRSKDTLICEGLHPAIISEVLYDSVQEIRKKNPPRPISIKNSIRNPLSGIVYCSKCGRAMVRRPYQKCGQEDTLMCPYTSCPTVSSKLSLVEKAVLDGIREIVEKYKLNNDINTSSQAIDLTIISKQNLIHEKENELESLNAQKAKQYDLLEQGIYTTEVFLERAKTISASIQSCSDTIEKLKEEIKHDENIIKQRSDFIPRCEELLDNYWSLDTESKNKMLKSLIEKVTYSKDTKNAYGKGNEIGFQLDIFPKIQKNN

SEQ ID NO: 3861 - protein, 524 aa, Unknown
  Description of Unknown: Integrase B3862 sequence
  PTHR30461:SF3,SM00857,G3DSA:1.10.10.2600,IPR036162,PS51737, G3DSA:3.40.50.1390,IPR006119,IPR038109,PF07508,IPR011109, SSF53041,PTHR30461,Coil,PS51736,cd00338, PF00239
MITFDNIIIYLRKSRSDDPNLSVNEVLLRHEADLQEYCMREFGKTMPEERIYREVVSGETINDRPVMIQIMRLLETGIIDAVLVVEPQRLSRGDMQDCGRIINTLRYTNTLVITPPKTYNLNDEYDRKFFEMELTRGNDYLEYNKKILNRGRIRSVREGNFIASVPPYGYKKIKVGEGKNSYHTLKIVPDEAEAVKIMFHLYINKHYGFTNIANYLDAHGYIPRKSAHWSPAAISDMIDNPVYMGKIRWNYLKTRKKIVNGEIVKTRPINRNTEDVILVDGRHEAIIDEDTFNQALIRRGNSPRLKKGTELQNPFAGILFCGSCNRAMSFKQFTDRRSSTGHISESMLCNNQRICHTKSVSYSDFINNVKASLKTSIHDFEVLLNNNNDDKELERKQYIKSLELELKRIKEKDSRQKDAYEDGIYTKAEYAKRNAKLQEQLAFTEKKLEEARQIKSYTDIYKEQIAKYTRCLDIISDNNITAATKNELLKPLISKIVYYNSQQSKAGLGRYIKNEFTLDIFLNV

SEQ ID NO: 3862 - protein, 524 aa, Unknown
  Description of Unknown: Integrase B3863 sequence
  PTHR30461:SF3,cd00338,SM00857,G3DSA:1.10.10.2600,IPR036162, PF13408,PS51737,G3DSA:3.40.50.1390,IPR025827,IPR006119, IPR038109,PF07508,IPR011109,SSF53041,PTHR30461, PS51736,Coil,PF00239
MCAKKKPAMLEPDMQDAVIYTRYSSHNQRDCSIEQQVADCEIFARQNNLRVVKVYADRHLSGTTDNRPQFQQMLKDASHGHWAYVICWKIDRFARNRYDSATYKFRLKKAGVRVLYAKESIPDGPEGILLESVLEGSAEYYSAALAQNIRRGMKYNAEQCKVNSGSIPFGYCKGPDGRFAIHEANAEVVREIFRKAAAGMPFVDIANDLNSRGLKTSRGGRWNKGSFRLLMNEAYIGVYHFSDTRIEGGMPALIDQGTFWAANERLKANSSVRGRHQDGGDYLLTGKLKCAHCGSYMIGFSGTGKSGELHYYYGCQKRRRERACKKANVPREWIERVVVKAALDYVLRPDVMEWIADAVMEYQEREAASAQLAALTAELEENQKATDNVMKAIEAGIITSTTKQRLLDLEAKAQDLKRAIELEKLSHVRLERDQVLFWLDRFRGGSLQSQEFRRKVIDAFVSVVYLSDDHLRIAFNYSGGSNAEADFDLVMDAEAAAGELSKKFAQGHVASTIRNADEPSKENE

SEQ ID NO: 3863 - protein, 524 aa, Unknown
  Description of Unknown: Integrase B3864 sequence
  SM00857,G3DSA:1.10.10.2600,IPR036162,PF13408,IPR025827, G3DSA:3.40.50.1390,PS51737,IPR006119,IPR038109,PF07508, SSF53041,IPR011109,PF00239,PTHR30461,PS51736, Coil,cd00338
MPDCLYLRKSRVDMEAEARGEKDVLARHEAELLRTARRLGRTVGAIYREVVSGDTIAARPVMQQLLREVEAGQWEAVLVMEVERLARGDTIDQGVVARAFQYSETKIITPIKTYDPTNEFDEEYFEFGLYMSRREYKTIKRRMQRGREASIREGKFVGNKNPYGYVRVKLQGVKGWTLAPDPPRSEVVQDIFRWYTEGYTGPDGATQLLGVTSIANRLNELGIHTAHGTFWNASVVNAMLRNPVYAGWVRWNYRATVRTVKDGQVSLSRPRNKANQTLVRGLHPALVSQQTFDAAQKRLSINPSRVGPKNAARKNPLAGLIFCSVCGSSMVRRPYSNGAEPCVMCPRPHCPTVSSQMYVLEDTLMDALAQWLEELEPETPPDPAEDPEVQSLQALIDDTSRQLQKLDAQIDRAYELVETGVYTSEVFSARSMELARRRLDVQDQKRNAELELQSRKQALFFWRQLAPQVRHVIDSYRASSDPDEQNALLRTVLARVEYKKTTRARWGDGSDLSLTLFPLVPDSD

SEQ ID NO: 3864 - protein, 524 aa, Unknown
  Description of Unknown: Integrase B3865 sequence
  cd00338,SM00857,G3DSA:1.10.10.2600,IPR036162,PF13408, PS51737,G3DSA:3.40.50.1390,IPR025827,IPR006119,IPR038109, PF07508,IPR011109,SSF53041,PTHR30461,PS51736, Coil,PF00239
MNESVCIYLRKSRADREAEAHGEGETLARHERILLDLAKKKEYIVGAIYREVVSGETIADRPVMQQLLREVESGMWDGVLVVEVERLARGDTIDQGVVSRAFQYSDTKIITPTKTYDPNNEFDEEYFEFGLFMSRREYKTIKRRLNAGRISSVKEGKYCGNKPPYGYERVKLEKEKGYTLRPVPDQSNIVKMIYTWYAGDGCEQIGVAKIARKLNDMGIKSALGSDWTPASIQGILTNPVYIGKIRWNGRKVVKTVHNGQVVKTRPRSKDTFICDGLHQAIISEDLFNSVQEIRKKNPPRPVGIANSIRNPLSGIVYCSKCGRAMVRRPYQKSGQEDTIMCPYTSCPTVSSKLPIVEKAVLDGIEEIVEKYKLNNDINVSSESISFGISSKQNLINEKEKELESLNAQKAKQYDLLEQGIYTTEVFLERAKTISASIQSCSDTIEKLKEEIKHEQNIIKQQSDFIPRCEELLDNYWSLDTESKNKMLKSLIEKVTYSKDTKNAYGKGNEIGFQLDIFPKIQKNN

SEQ ID NO: 3865 - protein, 524 aa, Unknown
  Description of Unknown: Integrase B3866 sequence
  PTHR30461:SF3,SM00857,G3DSA:1.10.10.2600,IPR036162,PF13408, IPR025827,PS51737,G3DSA:3.40.50.1390,IPR006119,IPR038109, PF07508,SSF53041,IPR011109,PF00239,PTHR30461, PS51736,Coil,cd00338
MDNLNLANVVIYARYSSAGQNDQSIDGQLAKCREYAQQRGYRVVGEYCDRALSGRYAETRPEFQRLIADSAKRAFDFVLVWKLDRFSRDRYDSAIYKKKLRANGVRVLSVTEGVGDSSESVLLEAILEAMAEEYSRQLAQNVRRGMRQNAEKGLSLGGLAPLGYRVVNKQYEINADEARIVRFIHEQYADGAGQKQIVADCARLGYRNQRGNPLTLASVKRILTNERYAGRYDYLGEIVIEDAFPAIVSKELKKRVRDRLKANSKAPGHAKAKVEYLLHGKLFCGECGAPMIGECGRGRHGATYYYYTCAARKKQHTCKKRNERKDELEACIVDYIGSCVLTDSWIDGAAERVVAEYQKSYDASGIKPLEKQIRDADKEIDQLVDALISATAEAARRRINERIETAEARKQALEADLASLRIASRVQIKKEDIVVWLNQFRTGDRSDLEYRKKVIDLFVNSIYLYDDTFKLFLNVTDSTQITYSDSLALAPPSVSDFGASGVPDMHLSEHIIFVNGVIGMIVQR

SEQ ID NO: 3866 - protein, 524 aa, Unknown
  Description of Unknown: Integrase B3867 sequence
  cd00338,SM00857,G3DSA:1.10.10.2600,IPR036162,PF13408, PS51737,G3DSA:3.40.50.1390,IPR025827,IPR006119,IPR038109, PF07508,IPR011109,SSF53041,PTHR30461,PS51736, Coil,PF00239
MNESVCIYLRKSRADREAEAHGEGETLARHERILLDLAKKKEYIVGAIYREVVSGETIADRPVMQQLLREVESGMWDGVLVVEVERLARGDTIDQGVVSRAFQYSDTKIITPTKIYDPNNEFDEEYFEFGLFMSRREYKTIKRRLNAGRISSVKEGKYCGNKPPYGYERVKLEKEKGYTLRPVPTQAEIVKMIYTWYAGDGCEQIGVAKIVRKLNEMGIESALGDDWTPASIQGILTNPVYIGKIRWNGRKTVKTIQNGQVIKTRPRSKDTLICDGLHPAIISEDLYNSVQEIRKKNPPRPISIKNSIRNPLSGIVYCSKCGRAMVRRPYQKRGQEDTLMCPYTSCTTVSSKLSLVEKAVIDGIREIVEEYKLNNDINTSSKAIDCGITSKQNLIHEKENELESLNAQKAKQYDLLEQGIYTTEVFLERAKTIAASIQSCSDTIEKLKEEIKHDENIIKQRSDFIPRCEELLDNYWSLDTESKNKMLKSLIEKVTYSKDTKNAYGKGNEIGFQLDIFPKIQKNN

SEQ ID NO: 3867 - protein, 524 aa, Unknown
  Description of Unknown: Integrase B3868 sequence
  cd00338,SM00857,G3DSA:1.10.10.2600,IPR036162,PF13408, PS51737,IPR025827,G3DSA:3.40.50.1390,IPR006119,IPR038109, PF07508,SSF53041,IPR011109,PTHR30461,PS51736, Coil,PF00239
MNESVCIYLRKSRADREAEAHGEGETLARHERILLDIAKKKEYIVGAIYREVVSGETIADRPVMQQLLHEVESGMWDGVLVVEVERLARGDTIDQGIVSRAFQYSDTKIITPTKIYDPNNEFDEEYFEFGLFMSRREYKTIKRRLNAGRISSVKEGKYCGNKPPYGYERVKLEKEKGYTLRPVQTQAEIVKMIYTWYAGDGCEQIGVAKIARKLNEMGIETALGGDWTPASIQGILTNPVYIGKIRWNGRKTVKTIQNGQVIKTRPRSKDTLICEGLHPAIISEVLYDSVQEIRKKNPPRPISIKNSIRNPLSGIVYCSKCGRAMVRRPYQKCGQEDTLMCPYTSCPTVSSKLSLVEKAVIDGIREIVEEYKLNNDINISSKAIDCGITSKQNLIHEKENELESLNAQKAKQYDLLEQGIYTTEVFLERAKTIAASIQSCSDTIEKLKEEIKHEQNIIKQQSDFIPRCEELLDNYWSLDTESKNKMLKSLIEKVTYSKDTKNAYGKGNEIGFQLDIFPKIQKNN

SEQ ID NO: 3868 - protein, 524 aa, Unknown
  Description of Unknown: Integrase B3869 sequence
  cd00338,SM00857,G3DSA:1.10.10.2600,IPR036162,PF13408, IPR025827,G3DSA:3.40.50.1390,PS51737,IPR006119,IPR038109, PF07508,IPR011109,SSF53041,PTHR30461,PS51736, Coil,PF00239
MNESVCIYLRKSRADREAEAHGEGETLARHERILLDLAKKKEYIVGAIYREVVSGETIADRPVMQQLLHEVESGMWDGVLVVEVERLARGDTIDQGVVSRAFQYSDTKIITPTKIYDPNNEFDEEYFEFGLFMSRREYKTIKRRLNAGRISSVKEGKYCGNKPPYGYERVKLEKEKGYTLRPVPTQAEIVKMIYTWYSGDGCEQIGVAKIARKLNEMGIESALGGDWTPASIQGILTNPVYIGKIRWNGRKTVKTIQTGQVIKTRPRSKDTLICNGLHPAVISEDLYNSVQEIRKKNPPRPVSIANSIRNPLAGIVYCSKCGRAMVRRPYQKRGQEDTLMCPYTSCPTVSSKLSLVEKAVLDGIREIVEKYKLNNDINTSSQAIDLTIISKQNLIHEKENELESLNAQKAKQYDLLEQGIYTTEVFLERAKTISASIQSCSDTIEKLKEEIKHDENIIKQQSDFIPRCEELLDNYWSLDTESKNKMLKSLIEKVAYSKDTKNAYGKGNEIGFQLDIFPKIQKNN

SEQ ID NO: 3869 - protein, 524 aa, Unknown
  Description of Unknown: Integrase B3870 sequence
  PTHR30461:SF3,SM00857,G3DSA:1.10.10.2600,IPR036162,PF13408, PS51737,G3DSA:3.40.50.1390,IPR025827,IPR006119,IPR038109, PF07508,SSF53041,IPR011109,PF00239,PTHR30461, PS51736,Coil,cd00338
MDHDLNLANVVIYARYSSAGQNDQSIDGQLAKCREYAQQRGFRVVGEYCDRALSGRYAETRPEFQRLVSDSSKHAFEYVLVWKLDRFSRDRYDSAIYKKKLRANGVRVLSVTEGIDESSESVLLEAILEAMAEEYSRQLAQNVKRGMRQNAEKALSLGGMPPLGYDVVSKRYTINESEAQIVRFIHERYAAGAAQKLIVDECRQRGYCAKRGNELTIGAVNRILRNPKYAGTYVCDDLVLEDAIPAIVSKPLKQQVRDRLAASAKAPGHAKAKVEYLLHGKLFCGECGAPMIGECGRGKNGTTHYYYTCAARKKSRSCKKRNERKFELEKYIVEYISMYVLTDEWINAAAERVVAEYARSYDASGIKPLERQIREADKELDALVDTLIKTASATAIAKINDRIEAVEAKKRTLEADLATLRIASRVEIRKEDIVAWLDQFRVGSSSDPEYCKKIIELFVNAVYVYDDRIKMFFNVRDSAQITYPEMLALDGLECSDFDLSGVPDDALSEQILFINGIIGMLVRR

SEQ ID NO: 3870 - protein, 524 aa, Unknown
  Description of Unknown: Integrase B3871 sequence
  SM00857,G3DSA:1.10.10.2600,IPR036162,PF13408,PS51737, G3DSA:3.40.50.1390,IPR025827,IPR006119,IPR038109,PF07508, SSF53041,IPR011109,PF00239,PTHR30461,PS51736, Coil,cd00338
MNESVCIYLRKSRADREAEAHGEGETLARHEHILLDLAKRQGYSIGAIYREVVSGETISARPVMQKLLHEVESGMWDGVLVVEVERLARGDTIDQGVVSRAFQYSDTKIITPTKIYDPNNEFDEEYFEFGLFMSRREYKTIKRRLNNGRISSVKEGKYCGNKPPYGYERVKLEKEKGYTLRPVPAQAEIVKMIYTWYAGNGCEQIGAAKIVRKLNEMGIETALGGDWTPASIQGILTNPVYIGKIRWNGRKTVKTIQNGQVVKTRPRSKDTIICDGLHPAIISDDLYNSVQEIRQKNPPRPISIKNTVRNPLAGIVYCSKCGRAMVRRPYQKRGQEDTLMCPYTSCPTVSSKLSLVEKAVLDGIKEIAEKYKLNNDINASSNTINSGIVSKQSLIREKESELESLNVQKAKQYDLLEQGIYTTEVFLERSKTIAISIQSCSDIITKLREEIEHDENIMAQQSDFIPRCEELLNSYWNLDVESRNRMLKSLVEKVVYSKNIKNTYGKGNEINFELDIFPKIQKND

SEQ ID NO: 3871 - protein, 524 aa, Unknown
  Description of Unknown: Integrase B3872 sequence
  PTHR30461:SF3,SM00857,IPR036162,PF13408,IPR025827, G3DSA:3.40.50.1390,PS51737,IPR006119,PF07508,IPR011109, SSF53041,PTHR30461,Coil,PS51736,cd00338, PF00239
MNICCYGRKSIYSDHSDSIDNQFRMCRDYVEMKFSGQVDSFLEYQDEAFTGANTKRPDLQRLLADISAGNCDVLIVYQLDRLSRDVRDFANIYAILEEHHVKFISIKENIDTSTPIGRATMYVTVVFAQMERETIAARVADNMIGLAKKGYWTGGNPPEGYVRTRIEVNGKKHCSIVPDPEGVKYVNWIFDTFLQNDYSLQGMETAFKKQGIRTRRGAFFSTAQLHKILTMPYCVAATPEVYDFYAAKGCIMDPESPRESWDGTRGVMIYGRSTEKNKKHELQPPEKWLVCLGAHEPFMPAEKWLAVQARFARNKFDKTMKYDVPLLKGVLRCSCGSIMCVSRKKKVDGSVSSWYYCLKRMRQGKEVCDSRQIKCELLDQKVLELLQSIRRDPGVIHKFAENNVEMLNGPDPKVLASKISTCQTRIDRLVSSLSLAADSSAQKYILAELERLDLEIQALRREHNLALATERKRSMQQQNTLSKVSEINRLIADLDSFSASEKNAIVKDVIKKCVWDGESLSIML

SEQ ID NO: 3872 - protein, 524 aa, Unknown
  Description of Unknown: Integrase B3873 sequence
  SM00857,G3DSA:1.10.10.2600,IPR036162,PS51737,G3DSA:3.40.50.1390, IPR006119,IPR038109,PF07508,SSF53041,IPR011109, PTHR30461,Coil,PS51736,cd00338,PF00239
MNESVCIYLRKSRADREAEAHGEGETLARHERILLDLAKKKEYIVGAIYREVVSGETIADRPVMQQLLREVESGMWDGVLVVEVERLARGDTIDQGVVSRAFQYSDTKIITPTKIYDPNNEFDEEYFEFGLFMSRREYKTIKRRLNAGRISSVKEGKYCGNKPPYGYERVKLEKEKGYTLRPVPTQAEIVKMIYTWYAGDGCEQIGVAKIARKLNEMGIESALCGDWTPASIQGILTNPVYIGKIRWNGRKTVKTIQNGQVIKTRPRSKDTLICDGLHPAIISEDLYNSVQEIRKKNPPHPVSIANSIRNPLAGIVYCSKCGRAMVRRPYQKRGQEDTLMCPYTSCPTVSSKLSLVEKSVIDGIREIVEEYKLNNDINVSSKDIDCVITSKQNLIHEKENELESLNAQKAKQYDLLEQGIYTTEVFLERAKTISASIQSCSDTIEKLKEEIKHEQNIIKQQSDFIPRCEELLDNYWSLDTESKNKMLKSLIEKIAYSKDNKNAYGKGNEIGFQLDIFPKIQKNN

SEQ ID NO: 3873 - protein, 524 aa, Unknown
  Description of Unknown: Integrase B3874 sequence
  PTHR30461:SF3,cd00338,SM00857,G3DSA:1.10.10.2600,IPR036162, PS51737,G3DSA:3.40.50.1390,IPR006119,IPR038109,PF07508, SSF53041,IPR011109,PTHR30461,PS51736, Coil,PF00239
MRNDPILSLNQVIIYLRKSRADDPNMSVEDVLASHERQLQEYATKTFGSVIPESQIYREVVSGETISDRPVVQQVLRLIESEDIRAVLVIEPQRLSRGDLENCGRIINLFRYSQTYVLTPMVSYDLCDEYDRKFFEMELTRGNDYLEYTKRILLRGRLAAVKQGDYIGNVAPYGYRKAVIADGKKRHHTLEIVPEEADAVKIMFAMYADGTGFPTIAHHLDDLGIIPRNGDHWKVATLKDMLENPVYIGKIRWNWKKTRKVVEDGEIRKIRRRDENCLLFDGLHPAIIDKDLYDRANAIRKSRPHVRKNSQLSNPFAGLLFCECGTAMSMKRYVNHGRSGDRVLYSMICNDQTYCHTKSVSYSDFLDRVISVLRDAIKDFEVKLSDDCTGATIALEAHIRALESNLNQLRKKDERQKDAYENGVYSLSDYIARNSKIQDQIRKTTAALDTAKSTPFPSVDYSGKIVKFQACIDSLLDDSVSAVEKNRLLKECIERIDYHNDMPSLPGVGRYVDNIFDLKISLRL

SEQ ID NO: 3874 - protein, 524 aa, Unknown
  Description of Unknown: Integrase B3875 sequence
  SM00857,G3DSA:1.10.10.2600,IPR036162,PF13408,IPR025827, G3DSA:3.40.50.1390,PS51737,IPR006119,IPR038109,PF07508, SSF53041,IPR011109,PTHR30461,Coil,PS51736, cd00338,PF00239
MNESVCIYLRKSRADREAEAHGEGETLARHERILLELAKKKEYIVGAIYREVVSGETIADRPVMQQLLHEVESGMWDGVLVVEVERLARGDTIDQGVVSRAFQYSDTKIITPTKIYDPNNEFDEEYFEFGLFMSRREYKTIKRRLNNGRISSVKEGKYCGNKPPYGYERVKLEKEKGYTLRPVPAQAEIVKMIYTWYAGDGCEQIGVAKIVRKLNDMGIKSALGGDWTPASIQGILTNPVYIGKIRWNGRKTVKTIQNSQVVKTRPRSRDVLICEGLHPAIISDDLYNSAQEVRQKNPPRPISIKNTVRNPLAGIVYCSNCGRAMVRRPYQKRGQEDTLMCPYTSCPTVSSKLSLVEKAVLDGIKEITEQYKLNNDINVPSNTINSGIVSKQNLIREKESELENLNAQKAKQYDLLEQGIYTTEVFLERSKTIAISIQSCSDIITKLREEIEHDENIMAQQSDFVPRCEELLNNYWNLNMESRNRMLKNLVEKVVYSKNIKNTYGKGNEINFDLDIFPKIQKND

SEQ ID NO: 3875 - protein, 524 aa, Unknown
  Description of Unknown: Integrase B3876 sequence
  cd00338,SM00857,G3DSA:1.10.10.2600,IPR036162,PS51737, G3DSA:3.40.50.1390,IPR006119,IPR038109,PF07508,SSF53041, IPR011109,PTHR30461,PS51736,Coil,PF00239
MNESVCIYLRKSRADREAEAHGEGETLARHERILLELAKKKEYIVGAIYREVVSGETIADRPVMQQLLHEVESGMWDGVLVVEVERLARGDTIDQGVVSRAFQYSDTKIITPTKIYDPNNEFDEEYFEFGLFMSRREYKTIKRRLNNGRISSVKEGKYCGNKPPYGYERVKLEKEKGYTLRPVPAQAEIVKMIYTWYAGDGCEQIGVAKIVRKLNDMGIKSALGGDWTPASIQGILTNPVYIGKIRWNGRKTVKTIQNGQVVKTRPRSRNVLICEGLHPSIISDDLYNSVQEIRQKNPPRPISIKNTVRNPLARIVYCSKCGRAMVRRPHQKRGQEDTLMCPYTSCPTVSSKLSLVEKAVLDGIKGITEKYKLNNDINVPYNTINSGIVSKQNLIREKESELESLNVQKAKQYDLLERGIYTTEVFLERSKTIARSIQSCSDIITKLREEIEHDENIKAQQSNFIPRCEELLNNYWDLNIESRNRMLKNLVEKVVYSKNIKNTYGKGNEINFELDIFPKIQKND

SEQ ID NO: 3876 - protein, 524 aa, Unknown
  Description of Unknown: Integrase B3877 sequence
  cd00338,SM00857,G3DSA:1.10.10.2600,IPR036162, PF13408,IPR025827,PS51737,G3DSA:3.40.50.1390, IPR006119,IPR038109,PF07508,IPR011109, SSF53041,PTHR30461,PS51736,Coil,PF00239
MNESVCIYLRKSRADREAEAHGEGETLARHERILLDLAKKKEYIVGAIYREVVSGETIADRPVMQQLLHEVESGMWDGVLVVEVERLARGDTIDQGIVSRAFKFSNTKIITPLKTYDPNNEYDEEYFEFGLFMSRREYKTIKRRLNAGRISSVKEGKYCGNKPPYGYERVKLEKEKGYTLRPVPTQAEIVKMIYTWYSGDGCEQIGVAKIARKLNEMGIESALGGDWTPASIQGILTNPVYIGKIRWNGRKTVKTIQTGQVIKTRPRSKDTLICNGLHPAVISEDLYNSVQEIRKKNPPRPVSIANSIRNPLAGIVYCSKCGRAMVRRPYQKRGQEDTLMCPYTSCPTVSSKLSLVEKAVLDGIREIVEKYKLNNDINTSSQAIDLTIISKQNLIHEKENELESLNAQKAKQYDLLEQGIYTTEVFLERAKTISASIQSCSDTIEKLKEEIKHDENIIKQQSDFIPRCEELLDNYWSLDTESKNKMLKSLIEKVAYSKDTKNAYGKGNEIGFQLDIFPKIQKNN

SEQ ID NO: 3877 - protein, 524 aa, Unknown
  Description of Unknown: Integrase B3878 sequence
  PTHR30461:SF3,SM00857,G3DSA:1.10.10.2600,IPR036162,PF13408, PS51737,G3DSA:3.40.50.1390,IPR025827,IPR006119,IPR038109, PF07508,IPR011109,SSF53041,PTHR30461,PS51736, cd00338,PF00239
MNKLRAAAYCRVSTDRAEQSGSLASQRSFFDDYIRNSDSMTLVGVFYDEGTSGTTTLNRYGFNKMISLAVSGGIDIILTKEVSRFARNTVDTLNITRMLRAKGVGIIFINDNIDTRDSDGELRLSIMATIAQEESRKISERVKWGQQRKMEQGVVFGRSCLGYDVKDGKITINADSAEIVKRIFTEYTVLLKGAESIADGLNAEQIRTVNGGRWSGAFIRKVLRNVKYVGDLEQKKTCTPDFLTHKKRLNRSEHIYIRNHHEPIISRELWEQTQAEISRRKPTDTSRHSDRYVFSGKVYCGVCGSVMVSRVKTLKNGKIYHALRCSGRIGGKSCNNETLNVTALKTCVKRIFTDMPIDKTAVINAVIKGLSRTDKPDIPALRRKIETLNAKKRRAVDLMLDGLITQQELIEQKSYYDSIIEKLSQEISSDRSVFETDKIRKNAERFLDFTSDPLWLLVIRADYIHGTLTVYLKGIENGFTTCFTATGRGDSYRVITGNTVRSQGIIPGTMQVQKNRCRHDVNDK

SEQ ID NO: 3878 - protein, 524 aa, Unknown
  Description of Unknown: Integrase B3879 sequence
  PTHR30461:SF3,SM00857,G3DSA:1.10.10.2600,IPR036162,PS51737, G3DSA:3.40.50.1390,IPR006119,IPR038109,PF07508,IPR011109, SSF53041,PTHR30461,Coil,PS51736,cd00338, PF00239
MNTDQIIEKVTSQYTQDKYAMYLRKSRADIEMEALGEGETLAKHKTMLFTLAARHDILPSQITIYQEIVSGESIQDRPEVQRLLEDVYAEKYKGVLVVEVERLARGNTKDQGEVAEAFQMSDTKIITPVKVYDPDNEFDQEYFEFGLFMSRREFKTIRRRLEAGKLQAVLEGNYLLPQRVFGYNIVRKSKDNRYLVINDEERPLVQMMFDWFTEENRSCDWIAKQFTSMGIPTMQGSREWHKETISCMLKNKLYIGIITWGKSKTVKVRDPKTGKVQKKRVQASPEEVKYINGKHKPIISEAQFRKAQGRFKKNPINHGKELVSPLAGLIHCADCGKALDWINYKDSRGIRYSHKASTYCKKKSLRVEIVFDALVEVLEAHIEDFEFKMNHDGNGAARARHLEKISRMDAELEKLEKKRKKLFDDYEDEVYTKEEFIERKQVYAQSIADLKAQLAQAKADVPEVIDYSERIITLQKIIETFKDPALDAQAKNDFLKEFIEDIRYDVIDYGRSKGGKPVLEIIFK

SEQ ID NO: 3879 - protein, 524 aa, Unknown
  Description of Unknown: Integrase B3880 sequence
  PTHR30461:SF3,cd00338,SM00857,G3DSA:1.10.10.2600,IPR036162, PF13408,IPR025827,PS51737,G3DSA:3.40.50.1390,IPR006119, IPR038109,PF07508,SSF53041,IPR011109,PTHR30461, PS51736,Coil,PF00239
MRAFIYCRFSSHKQQELSIEGQRDICQEYADKHNITVVGQYADRARSGKTENRADFRRLMRDAATGVVDCVLVWRYDRFFRNRAESALYRKQLEAAGVHLISVTEYIPEGSAGIITQGMIETVAEYFSAKLSEDVSRGMNKAAQHCQIVGRAPLGYRAGPDKRWQIDPVGAELVRRIFEWYASGKPMGQLAAQLNEEGHRTTNGTLYTRSSFNSILRNEKYIGVYSYGGEVRIEGGCPRIVEDELFFTVQRRLSANRHRPGAYKAEVPYLLSGKLFCGLCGAPMTGTAGTSHTGARHYYYICNNRRAKTCKKKNVRLDLIEEAVLQSALDILTDENIAYISTEVERRCAENSDSAALLASLNAQLEEVQRRLKNIGNAIAQGIITETTKELLEEAEADRTALRQQIDRAKVQAALVVKAEAVACWLDGFRRGDRTDPDFRRQVFGALVHSIFVYDDYLKIIFNVDSAGAAVVPYEAAQAATPSEAPPGSYLDTLGAPKRYLARSCGVFFYCYFPGHCGTERLKK

SEQ ID NO: 3880 - protein, 524 aa, Unknown
  Description of Unknown: Integrase B3881 sequence
  PTHR30461:SF3,SM00857,G3DSA:1.10.10.2600,IPR036162,PF13408, PS51737,IPR025827,G3DSA:3.40.50.1390,IPR006119,IPR038109, PF07508,IPR011109,SSF53041,PTHR30461,Coil, PS51736,cd00338,PF00239
MYEDIKTACLYVRFSSHNQTEQSIEGQTRVCQEFCQRHNIKIVEIYADRATSASKNTEKRVSFLKMIKDSEKGLFDAVVVYKLDRFARSRYDSATYKYRLKKNGVQLISATENITNSPEGIILESVLEGMAEFYSAELSQKINRGMRESAYKHNSIGGALPLGYKTVDKKLVIDEKTAPIVREAFTMYAEGHSVAEICRIFNARGYKTSKGTEFGKNSFSKIFRNERYIGTYTYHDYRAEDAIPAIIDRDLWDRVQLRLKKVKNSPGRNKAKRVYLLSGKLFCGHCGESMNGNCNGNKYAFYECYGKKSKYNGCQKRNLRKEYIERLVAQDALSLLTDENIEHLATVACERNDYEIETGSPIPVIRDRIHQTEVSINNLTKAIETGATPDALVKRMVELEREKKDLSTQLKKEEELIVPLEKEQVIFWLEKFKDGDIEDEEFCRLLIDLFVNSVTVWDEDNDMLKVTIAYNLTSLPTKTYRLTKDGTLSDFTGNAPGMSANPTIHGNLVIHTFVCSQIKRYQRF

SEQ ID NO: 3881 - protein, 524 aa, Unknown
  Description of Unknown: Integrase B3882 sequence
  SM00857,G3DSA:1.10.10.2600,IPR036162,PF13408,PS51737, G3DSA:3.40.50.1390,IPR025827,IPR006119,IPR038109,PF07508, IPR011109,SSF53041,PTHR30461,Coil,PS51736, cd00338,PF00239
MNESVCIYLRKSRADREAEAHGEGETLARHERILLDLAKKKEYIVGAIYREVVSGETIADRPVMQQLLHEVESGMWDGVLVVEVERLARGDTIDQGVVSRAFQYSDTKIITPTKIYDPNNEFDEEYFEFGLFMSRREYKTIKRRLNNGRISSVKEGKYCGNKPPYGYERVKLEKEKGYTLRPVPAQAEVVKMIYAWYAGDGCEQIGVAKIVRKLNEMGIESALGGDWTPASIQGILTNPVYIGKIRWNGRKTVKTIHNGQVVKTRPRSRDVLICGGLHPAIISDDLYNSVQEIRQKNPPRPISIKNTVRNPLAGIVYCSKCGRAMVRRPYQKRGQEDTLMCPYTSCSTVSSKLSIVEKAVIDGIRDIAEEYKLNNDVNTSSKAIDLTIISKQNLIREKESELENLNTQKAKQYDLLEQGIYTTEVFLERSKTIATSIQSCSDIITKLREEIEHDENIMAQQSDFVPRCEELLNNYWNLDVESRNRMLKSLVEKVVYSKNIKNAYGKSNEINFELDIFPKIQKND

SEQ ID NO: 3882 - protein, 524 aa, Unknown
  Description of Unknown: Integrase B3883 sequence
  cd03768,PTHR30461:SF3,SM00857,IPR036162,PF13408, IPR025827,PS51737,G3DSA:3.40.50.1390,IPR006119,PF07508, IPR011109,SSF53041,PTHR30461,PS51736,Coil, PF00239
MIFCCYGRKSVYSDRSDSVDNQFRMCRDYVNVKYSGQVDDFRAYSDEDFTGANTNRPDLQRLLEDIRSGAADVLIVYQLDRLSRDVRDFANIYATLEEHRVKFVSIKENIDTSTPIGRAMMYVTVVFAQMERETIAARVTDNMIGLAKKGYWVGGNPPVGYVRDQIIVDGKKHCAITPDPEGARYVTWIFDSFIQFGGSIQKMETQFKHKGIRTQRGGFFSASQLHKILTMPYCVEATPEVYDFYQAKGCIMDPGSPREKWDGSVGVMVYGRTTEKNKKHELQPPDQWRVCLGVHKPFMPADKWLAVQARFAQNQRFKSARWPSPLLKGVIRCKCGALMSIGRKQKVDGSVSSAYYCPKRTRQGADACDMRQIKCEILDVKVINILRAVEQDNTAILRYVQKDQDTAARPDPKKISGQIKSCEAKIEKLAASLALASGSAATKYIIAEMERLDLEIQALNREYTIAASEERKRSAAQVSTQERAKIISEKMRNFDGFTAAERNAIAREVIKKCVWDGETLYVEL

SEQ ID NO: 3883 - protein, 524 aa, Unknown
  Description of Unknown: Integrase B3884 sequence
  cd00338,SM00857,G3DSA:1.10.10.2600,IPR036162,PF13408, IPR025827,G3DSA:3.40.50.1390,PS51737,IPR006119,IPR038109, PF07508,IPR011109,SSF53041,PTHR30461,PS51736, Coil,PF00239
MNESVCIYLRKSRADREAEAHGEGETLARHERILLDLAKKKEYIVGAIYREVVSGETIADRPVMQQLLHEVESGMWDGVLVVEVERLARGDTIDQGVVSRAFQYSDTKIITPTKIYDPNNEFDEEYFEFGLFMSRREYKTIKRRLNAGRISSVKEGKYCGNKPPYGYERVKLEKEKGYTLRPVPTQAEIVKMIYTWYSGDGCEQIGVAKIARKLNEMGIESALGGDWTPASIQGILTNPVYIGKIRWNGRKTVKTIQNGQVIKTRPRSKDTLICNGLHPAVISEDLYNSVQEIRKKNPPRPVSIANSIRNPLAGIVYCSKCGRAMVRRPYQKRRQEDTLMCPYTSCPTASSKLSLVEKSVIDGIREIVEEYKLNNDINASSKDIDCVITSKQNLIHEKENELESLNSQKAKQYDLLEQGIYTTEIFLERAKTISASIQSCSDTIEKLKEEIKHDENIIKQRSDFIPRCEELLDNYWGLDTESKNKMLKSLIEKVTYSKDTKNAYGKGNEIGFQLDIFPKIQKNN

SEQ ID NO: 3884 - protein, 524 aa, Unknown
  Description of Unknown: Integrase B3885 sequence
  cd00338,SM00857,G3DSA:1.10.10.2600,IPR036162,PF13408, PS51737,G3DSA:3.40.50.1390,IPR025827,IPR006119,IPR038109, PF07508,IPR011109,SSF53041,PTHR30461,PS51736, Coil,PF00239
MSLENVCIYLRKSRADQEAELRGEGETLARHERILLDLAKSRNYSVGAIYREIVSGETISARPVMQQLLREVEAGSWDGVLVVEVERLARGDTIDQGVVSRAFQFSDTKIITPTKTYDPDNEFDEEYFEFGLFMSRREYKTIKRRLNAGRIASVKEGKYCGSKPPYGYERVKLHGEKGFTLQPVPEQAEVIKMIYSLYSGASGDRIGVSKIVRKLNDMGIKSPSGKDWVPISVQDVLANPVYAGMIRWNGRKTVRAIQDGVVTQSRPRSKEDDILLFPGRHPAIVSKEMYDSVQQIRKKNPPRPISIKNTIKNPLAGIVYCSKCGRAMVRRPYQKRGQDDTLMCSYTSCPTVSSKLSLVERAVLNGIQDLVDEYRLNDAVPGPDINNAVKSKKKLIAEKEHELEKLNVQKMKQYDLLEQGIYTTEVFLERSNSIASSINSCQDSIECLKEEIRHDKELIDQQSSFIPRCENLLEIYWSLDTAAKNKMLKELIERVNYTKDVKNAFRMGNEATFVLDIFPRIQSN

SEQ ID NO: 3885 - protein, 524 aa, Unknown
  Description of Unknown: Integrase B3886 sequence
  SM00857,G3DSA:1.10.10.2600,IPR036162,PF13408,PS51737, G3DSA:3.40.50.1390,IPR025827,IPR006119,IPR038109,PF07508, IPR011109,SSF53041,PTHR30461,Coil,PS51736, cd00338,PF00239
MNESVCIYLRKSRADREAEARGEGETLARHEHILLDLAKRQGYSIGAIYREVVSGETISARPIMQQLLHEVESGMWDGVLVVEVERLARGDTIDQGVVSRAFQYSDTKIITPTKIYDPNNEFDEEYFEFGLFMSRREYKTIKRRLNAGRISSVKEGKYCGNKPPYGYERIKLAREKGYTLRPIPVQAEIVKMIYTWYAGDGCEQIGVAKIVRKLNDMGIESALGGDWTPASIQGILTNPVYIGKIRWNGRKTVKTIQNGQVVKTRPRSKNVLICEGLHPAIIPDDLYNSVQEIRQKNPYRPISIKNTVRNPLAGIVYCSKCGRAMVRRPYQKSGQEDTLMCPYTSCSTVSSKLSLVEKAVIDGIREIAEKYKLNNDINVPSSTINSGIVSKQNLIREKENELENLNSQKAKQYDLLEQGIYTTEVFLERSKTISASIQSCSDAITNLREEIEHDENIKAQQSDFIPRCEELLDNYWSLDTESKNKMLKSLIEKVVYSKNTKNAYGKGNEISFQLDIFPKIQKNN

SEQ ID NO: 3886 - protein, 524 aa, Unknown
  Description of Unknown: Integrase B3887 sequence
  PTHR30461:SF3,cd00338,SM00857,G3DSA:1.10.10.2600,IPR036162, PF13408,PS51737,G3DSA:3.40.50.1390,IPR025827,IPR006119, IPR038109,PF07508,IPR011109,SSF53041,PTHR30461, PS51736,Coil,PF00239
MCAKKKPAMLEPDMQDAVIYTRYSSHNQRDCSIEQQVADCEIFARQNNLRVVKVYADRHLSGTTDNRPQFQQMLKDASHGHWAYVICWKIDRFARNRYDSATYKFRLKKAGVRVLYAKESIPDGPEGILLESVLEGSAEYYSAALAQNIRRGMKYNAEQCKVNSGSIPFGYCKGPDGRFAIHEANAEVVREIFRKAAAGMPFVDIANDLNSRGLKTSRGGRWNKGSFRLLMNEAYIGVYHFSDTRIEGGMPALIDQGTFWAANERLKANSSVRGRHQDGGDYLLTGKLKCAHCGSYMIGFSGTGKNGELHYYYGCQKRRRERACKKANVPREWIERVVVKAALDYVLRPDVMEWIADAVMEYQEREAASAQLAALTAELEENQKATDNVMNAIEAGIITSTTKQRLLDLEAKAQDLKRAIELEKLSHVHLERDQVLFWLDRFRGGSLQSQEFRRKVIDAFVSVVYLSDDHLRIAFNYSGGSNAEAGFDLVMDAEAAAGELSKKFAQGHVASTIRNADEPSKENE

SEQ ID NO: 3887 - protein, 524 aa, Unknown
  Description of Unknown: Integrase B3888 sequence
  PTHR30461:SF3,SM00857,G3DSA:1.10.10.2600,IPR036162,PS51737, G3DSA:3.40.50.1390,IPR006119,IPR038109,PF07508,IPR011109, SSF53041,PF00239,PTHR30461,PS51736,Coil, cd00338
MNTDQIIEKVTSQYTQDKYAMYLRKSRADIEMEALGEGETLAKHKTMLFNLAARHDILPSQITIYQEIVSGESIQDRPEVQRLLDDVYANKYKGVLVVEVERLARGNTKDQGEVAEAFQMSDTKIITPVKVYDPDNEFDQEYFEFGLFMSRREYKTIRRRLEAGKLQAVLEGNYLLPQRVFGYNIVRKSKDNRYLVVNEEEQPLVQMMFDWFTEENRSCDWIAKQFTSMGIPTMQGSREWHKETISCMLKNKLYIGIITWGKSKTVKVRDPKTGKVQKKRVQASPEEVKYINGKHKPIISEAQFRKAQGRFKKNPINHGKELVSPLAGLIHCADCGKALDWINYKDSRGIRYSHKASTYCKKKSLRVEIVFDALVEALEAHIEDFEFKMNHDGNGAARARHLEKISRMDAELEKLEKKRKKLFDDYEDEVYTKEEFIERKQVYAQSIADLKAQLAQAKADVPEVIDYSERIITLQKIIETFKDPSLDAQAKNDFLKEFIEDIRYDVIDYGRSKGGKPVLEIIFK

SEQ ID NO: 3888 - protein, 524 aa, Unknown
  Description of Unknown: Integrase B3889 sequence
  SM00857,G3DSA:1.10.10.2600,IPR036162,PF13408,IPR025827, G3DSA:3.40.50.1390,PS51737,IPR006119,IPR038109,PF07508, IPR011109,SSF53041,PTHR30461,Coil,PS51736, cd00338,PF00239
MNESVCIYLRKSRADREAEAHGEGETLARHQRILLDLAKKKEYIVGAIYREVVSGETIADRPVMQQLLHEVESGMWDGVLVVEVERLARGDTIDQGVVSRAFQYSDTKIITPTKIYDPNNEFDEEYFEFGLFMSRREYKTIKRRLNAGRISSVKEGKYCGNKPPYGYERVKLEKEKGYTLRPVPTQAEIVKMIYAWYAGDGCEQIGVAKIVRKLNDMRIKSALGGDWTPASIQGILTNPVYIGKIRWNGRKTVKTIQNGQVIKTRPRSKDTLICEGLHPAIISEDLFNSVQEIRKKNPPRPVSIANSIRNPLAGIVYCSKCGRAMVRRPYQKRRQEDTLMCPYTSCPTVSSKLSLVEKAVIDGIKEIVEEYKLNNDINASSKDIDCVITSKQNLIHEKENELESLNAQKAKQYDLLEQGIYTTEVFLERAKTISASIQSCSDTIEKLKEEIKHDQNIIKQQSDFIPRCEELLDNYWSLDTESKNKMLKSLIEKVAYSKDTKNAYGKGNEIGFQLDIFPKIQKNN

SEQ ID NO: 3889 - protein, 524 aa, Unknown
  Description of Unknown: Integrase B3890 sequence
  SM00857,G3DSA:1.10.10.2600,IPR036162,PF13408,IPR025827, G3DSA:3.40.50.1390,PS51737,IPR006119,IPR038109,PF07508, SSF53041,IPR011109,PF00239,PTHR30461,PS51736, Coil,cd00338
MNESVCIYLRKSRADREAEAHGEGETLARHQRILLDLAKKKEYIVGAIYREVVSGETIADRPVMQQLLHEVESGMWDGVLVVEVERLARGDTIDQGVVSRAFQYSDTKIITPTKIYDPNNEFDEEYFEFGLFMSRREYKTIKRRLNAGRISSVKEGKYCGNKPPYGYERVKLEKEKGYTLRPVPTQAEIVKMIYTWYAGDGCEQIGVAKIARKLNEMGMESALGGDWTPASIQGILTNPVYIGKIRWNGRKTVKTIQTGQVIKTRPRSKDTLICDGLHPAIISEDLYNSVQEIREKNPPRPISIKNSIRNPLSGIVYCSKCGRAMVRRPYQKRGQEDTLMCPYTSCPTVSSKLSLVEKAVLDGIREIVEKYKLNNDINTSSQAIDLTIISKQNLIHEKENELESLNAQKAKQYDLLEQGIYTTEVFLERAKTISASIQSCSDTIEKLKEEIKHDENIIKQQSDFIPRCEELLDNYWSLDTESKNKMLKSLIEKVAYSKDTKNAYGKGNEIGFQLDIFPKIQKNN

SEQ ID NO: 3890 - protein, 524 aa, Unknown
  Description of Unknown: Integrase B3891 sequence
  cd00338,SM00857,G3DSA:1.10.10.2600,IPR036162,PF13408, IPR025827,G3DSA:3.40.50.1390,PS51737,IPR006119,IPR038109, PF07508,IPR011109,SSF53041,PTHR30461,PS51736, Coil,PF00239
MNESVCIYLRKSRADREAEAHGEGETLARHERILLDLAKKKEYIVGAIYREVVSGETIADRPVMQQLLREVESGMWDGVLVVEVERLARGDTIDQGVVSRAFQYSDTKIITPTKIYDPNNEFDEEYFEFGLFMSRREYKTIKRRLNAGRISSVKEGKYCGNKPPYGYERVKLEKEKGYTLRPVPTQAEIVKMIYTWYAGDGCEQIGVAKIARKLNEMGIESALGGDWTPASIQGILTNPVYIGKIRWNGRKTVKTIQNGQVIKTRPRSKDTLICEGLHPAIISEDLFNSVQEIRKKNPPRPVSIANSIRNPLAGIVYCSKCGRAMVRRPYQKRGQKDTLMCPYTSCSTVSSKLSLVEKAVIDGIKEIVEEYKLNNDIDASSKAIDSGITSKQNLIREKESELESLNAQKAKQYDLLEQGIYTTEIFIERAKTIAASIQSCSDTIEKLKEEIKHEQNIIKQQSDFIPRCEELLDNYWSLDTESKNKMLKSLIEKVTYSKDTKNAYGKGNEIGFQLDIFPKIQKNN

SEQ ID NO: 3891 - protein, 524 aa, Unknown
  Description of Unknown: Integrase B3892 sequence
  cd00338,SM00857,G3DSA:1.10.10.2600,IPR036162,PF13408, IPR025827,G3DSA:3.40.50.1390,PS51737,IPR006119,IPR038109, PF07508,IPR011109,SSF53041,PTHR30461,PS51736, Coil,PF00239
MNESVCIYLRKSRADREAEAHGEGETLARHERILLDLAKKKEYIVGAIYREVVSGETIADRPVMQQLLREVESGMWDGVLVVEVERLARGDTIDQGVVSRAFQYSDTKIITPTKIYDPNNEFDEEYFEFGLFMSRREYKTIKRRLNAGRISSVKEGKYCGNKPPYGYERVKLEKEKGYTLRPVPTQAEIVKMIYTWYAGDGCEQIGVAKIARKLNEMGIESALCGDWTPASIQGILTNPVYIGKIRWNGRKTVKTIQNGQVIKTRPRSKDTLICDGLHPAIISEDLYNSVQEIRKKNPPRPISIKNSIRNPLSGIVYCSKCGRAMVRRPYQKRGQEDTLMCPYTSCPTVSSKLSLVEKSVIDGIREIVEEYKLNNDINASSKDIDCVITSKQNLIHEKENELENLNAQKAKQYDLLEQGIYTTEVFLERAKTISASIQSCSDTIEKLKEEIKHDENIIKQQSDFIPRCEELLDNYWSLNTESKNKMLKSLIEKVTYSKDTKNAYGKGNEIGFQLDIFPKIQKNN

SEQ ID NO: 3892 - protein, 524 aa, Unknown
  Description of Unknown: Integrase B3893 sequence
  SM00857,G3DSA:1.10.10.2600,IPR036162,PS51737,G3DSA:3.40.50.1390, IPR006119,IPR038109,PF07508,IPR011109,SSF53041, PTHR30461,Coil,PS51736,cd00338,PF00239
MNESVCIYLRKSRADREAEAHGEGETLARHERILLDLAKKKEYIVGAIYREVVSGETIADRPVMQQLLHEVESGMWDGVLVVEVERLARGDTIDQGVVSRAFQYSDTKIITPTKIYDPNNEFDEEYFEFGLFMSRREYKTIKRRLNAGRISSIKEGKYCGNKPPYGYERVKLEKEKGYTLRPVPAQAEIVKMIYTWYAGDGCEQIGVAKIARKLNEMGIESALGGDWTPASIQGILTNPVYIGKIRWNGRKTVKTIQNGQVIKTRPRSKDTLICNGLHPAVISEDLYNSVQEIRKKNPPRPVSIANSIRNPLAGIVYCSKCGRAMVRRPYQKRRQEDTLMCPYTSCPTVSSKLSLVEKSVINGIREIVEEYKLNNDINASSKDIDCVITSKQNLIHEKENELESLNSQKAKQYDLLEQGIYTTEIFLERAKTISASIQSCSDTIEKLKEEIKHDENIIKQRSDFIPRCEELLDNYWSLDTESKNKMLKSLIEKVVYSKDTKNAYGKGKEIGFQLDIFPKIQKNN

SEQ ID NO: 3893 - protein, 524 aa, Unknown
  Description of Unknown: Integrase B3894 sequence
  SM00857,G3DSA:1.10.10.2600,IPR036162,PF13408, IPR025827,PS51737,G3DSA:3.40.50.1390,IPR006119, IPR038109,PF07508,IPR011109,SSF53041, PTHR30461,Coil,PS51736,cd00338,PF00239
MNESVCIYLRKSRADREAETHGEGETLARHQRILLDLAKKKEYIVGAIYREVVSGETIADRPVMQQLLHEVESGMWDGVLVVEVERLARGDTIDQGVVSRAFQYSDTKIITPTKIYDPNNEFDEEYFEFGLFMSRREYKTIKRRLNAGRISSVKEGKYCGNKPPYGYERIKLAREKGYTLRPVPAQAEIVKMIYTWYAGDGCEQIGVAKIVRKLNEMGIESAQGGDWTPASIQGILTNPVYIGKIRWNGRKTVKTIQNGQVVKTRPRSKDVLICEGLHPAIISDDLYNSAQKIRQKNPYRPISIKNTVRNPLAGIVYCSKCGRAMVRRPYQKHGQEDTLMCPYTSCSTVSSKLSLVEKAVIDGIKEIAEEYKLNNNINVSSKAIDSTIISKQNLINEKENELKSLNSQKAKQYDLLEQGIYTTEVFLERAKTISASIQSCSDTIEKLKEEIKHDQNIIKQQSDFVPRCEELLDNYWSLDTESKNKMLKSLIEKVVYSKNTKNAYGKGNEIGFQLDIFPKIQKND

SEQ ID NO: 3894 - protein, 524 aa, Unknown
  Description of Unknown: Integrase B3895 sequence
  PTHR30461:SF3,cd00338,SM00857,G3DSA:1.10.10.2600,IPR036162, PF13408,PS51737,G3DSA:3.40.50.1390,IPR025827,IPR006119, IPR038109,PF07508,IPR011109,SSF53041,PTHR30461, PS51736,Coil,PF00239
MILLENLIMYLRKSRSDDISMSVEDVLAKHEHILQEYCEREFGARLPENRIFREVVSGETIADRPVMKEIMKLLETGTIKGVLVVEPQRLSRGDLEDCGKIINTFRYTETLIITPTKTYDLSNEYDRKFFEMELTRGNDYLEYTKRILNRGREASVRQGNFIGSIAPYGYKKIVVGSGKDKYHTLEIDNEEADAIRLMYSLFVNEGYGFARIAHRLDELGFKPRNSENWQPAAIKDMVENPVYIGKIRWNWRKTQKRMENGEIVKIRPKTKDSSEWILVDGKHPAIISEELYNEALKRRGKNPCVRKSLELTNPYAGLLFCGTCGRAMSQKRFVNRRTHTQSVCDSMLCNNQANCHTKSVKYSAFEQRVIELLENAVADFEIKLKDNNTNVIQLHEGIVQKHLRELERLHEKDMRQKDAYEDGVYTKEEYIKRNALVQEQIAKATSALEQAKASTPKVIDYADKIRRFTDCINALKNPDISASEKNVLLKSCIKRIDYYNDGESKPGVGRYVENVFELNMLLNI

SEQ ID NO: 3895 - protein, 524 aa, Unknown
  Description of Unknown: Integrase B3896 sequence
  SM00857,G3DSA:1.10.10.2600,IPR036162,PF13408,PS51737, G3DSA:3.40.50.1390,IPR025827,IPR006119,IPR038109,PF07508, IPR011109,SSF53041,PF00239,PTHR30461,PS51736, Coil,cd00338
MNESVCIYLRKSRADREAEAHGEGETLARHERILLELAKKKEYIVGAIYREVVSGETIADRPVMQQLLHEVESGMWDGVLVVEVERLARGDTIDQGVVSRAFQYSDTKIITPTKIYDPNNEFDEEYFEFGLFMSRREYKTIKRRLNNGRISSVKEGKYCGNKPPYGYERVKLEKEKGYTLRPVPAQAEIVNMIYTWYAGDGCEQIGVAKIVRKLNDMGIKSALGGDWTPASIQGILTNPVYIGKIRWNGRKTVKTIQNGQVVKTRPRSRNVLICEGLHPAIISDDLYNSVQEIRQKNPPRPISIKNTVRNPLAGIVYCSKCGRAMVRRPYQKRGQEDTLMCPYTSCPTVSSKLSLVEKAVLDGIKEIAEKYKLNNDINTPSNTINSGIISKQNLIREKESELESLNVQKVKQYDLLERGIYTTEVFLERSKTIARSIQSCSDIITKLREEIEHDENIKAQQSNFIPRCEELLNNYWDLNIESRNRMLKNLVEKVVYSKNIKNTYGKGNEINFELDIFPKIQKND

SEQ ID NO: 3896 - protein, 524 aa, Unknown
  Description of Unknown: Integrase B3897 sequence
  SM00857,G3DSA:1.10.10.2600,IPR036162,PS51737,G3DSA:3.40.50.1390, IPR006119,IPR038109,PF07508,SSF53041,IPR011109, PF00239,PTHR30461,PS51736,Coil,cd00338
MTVFEMNDAINDAFTGKMDKYAIYLRKSRADIEAEKLGEGETLTRHKMILTELAARKGFYIEKIYQEIVSGETIEAREEIQKLINDCYAGKYRGILVIDITRLSRGNQGDAQTILDCLKFANNNNGVLVITPTKTYDVAHNHDDEEYMEFELFMSRREYKMIRKRMERGKLQAVVEGNYISSSRPYGYNILKTKTGRTLIPNDEEAPVVKQIFEWTIKNNSTPGKIARRLTAMGVPTYTGMPEWSDETIRSILQNPVYTGKVRWNNRMAVKRLVDGELVKSRPRWNHNEHYIEVDGKHKQYALIDDETFKKAGQRFHSDKTRAGLKLVNPLAGILCCAKCGRPMMYMPYVNNPTPPRLAHRHSQTCKVKSAIASDVIEAVVHGLKLYIEDFEMKIDEMPEVDENAIADQIDALQKEIKKIKKKLSKLFDAWENDDITDNEFVQRKAVNNARIDAIKNEIEELENTIPEKEEHEDTIMKLSDALDALLDEELEASVKNTYLKEIVSKIEFSRENNKEFILDIILK

SEQ ID NO: 3897 - protein, 524 aa, Unknown
  Description of Unknown: Integrase B3898 sequence
  PTHR30461:SF3,SM00857,G3DSA:1.10.10.2600,IPR036162,PS51737, G3DSA:3.40.50.1390,IPR006119,IPR038109,PF07508,IPR011109, SSF53041,PTHR30461,Coil,PS51736, cd00338,PF00239
MNTDQIIEKVTSQYTQDKYAMYLRKSRADIEMEALGEGETLAKHKTMLFNLAARHDILPSQITIYQEIVSGESIQDRPEVQRLLDDVYANKYKGVLVVEVERLARGNTKDQGEVAEAFQMSDTKIITPVKVYDPDNEFDQEYFEFGLFMSRREYKTIRRRLEAGKLQAVLEGNYLLPQRVFGYNIVRKSKDNRYLVINEEEQPLVQMMFDWFTEENRSCDWIAKQFTSMGIPTMQGSREWHKETISCMLKNKLYIGIITWGKSKTVKVRDPKTGKVQKKRVQASPEEVKYINGKHKPIISEAQFRKAQGRFKKNPINHGKGLVSPLAGLIHCADCGKALDWINYKDSRGIRYSHKASTYCKKKSLRVEIVFDALVEALEAHIEDFEFKMNHDGNGAERARHLEKISRMDAELEKLEKKRKKLFDDYEDEVYTKEEFIERKQVYAQSIADLKAQLAQAKADVPEVIDYSERIITLQKIIETFKDPALDAQAKNDFLKEFIEDIRYDVIDYGRSKGGKPVLEIIFK

SEQ ID NO: 3898 - protein, 524 aa, Unknown
  Description of Unknown: Integrase B3899 sequence
  SM00857,G3DSA:1.10.10.2600,IPR036162,PF13408,IPR025827, G3DSA:3.40.50.1390,PS51737,IPR006119,IPR038109,PF07508, SSF53041,IPR011109,PTHR30461,Coil,PS51736, cd00338,PF00239
MNESVCIYLRKSRADREAEAHGEGETLARHERILLDLAKKKEYIVGAIYREVVSGETIADRPVMQQLLREVESGMWDGVLVVEVERLARGDTIDQGVVSRAFQYSDTKIITPTKIYDPNNEFDEEYFEFGLFMSRREYKTIKRRLNAGRISSVKEGKYCGNKPPYGYERVKLEKEKGYTLRPVPTQAEIVKMIYTWYAGDGCEQIGVAKIARKLNEMGIESALCGDWTPASIQGILTNPVYIGKIRWNGRKTVKTIQNGQVIKTRPRSKDTLICEGLHPAIISEDLFNSVQEIRKKNPPRPVSIANSIRNPLAGIVYCSKCGRAMVRRPYQKRRQEDTLMCPYTSCPTVSSKLSLVEKAVIDGIKEIVEEYKLNNNINASSKDIDCVITSKQNLIHEKENELKSLNSQKAKQYDLLEQGIYTTEVFLERAKTIAASIQSCYDTIEKLKEEIKHDQNIIKQQSDFIPRCEELLDNYWSLDTESKNKMLKSLIEKVTYSKDTKNAYGKGNEIGFQLDIFPKIQKNN

SEQ ID NO: 3899 - protein, 524 aa, Unknown
  Description of Unknown: Integrase B3900 sequence
  cd00338,SM00857,G3DSA:1.10.10.2600,IPR036162,PF13408, IPR025827,G3DSA:3.40.50.1390,PS51737,IPR006119,IPR038109, PF07508,IPR011109,SSF53041,PTHR30461,PS51736, Coil,PF00239
MNESVCIYLRKSRADREAEAHGEGETLARHERILLDLAKKKEYIVGAIYREVVSGETIADRPVMQQLLHEVESGMWDGVLVVEVERLARGDTIDQGVVSRAFQYSDTKIITPTKIYDPNNEFDEEYFEFGLFMSRREYKTIKRRLNAGRISSVKEGKYCGNKPPYGYERVKLEKEKGYTLRPVPAQAEIVKMIYTWYAGDGCEQIGVAKIARKLNEMGIESALGGDWTPASIQGILTNPVYIGKIRWNGRKTVKTIQNGQVIKTRPRSKDTLICEGLHPAIISEDLFNSVQEIRKKNPPRPVSIANSIRNPLAGIVYCSKCGRAMVRRPYQKRGQEDTLMCPYTSCPTVSSKMSLVEKSVIDGIREIVEEYKLNNDINTSSKAIDCGITSKQNLIHEKENELESLNAQKAKQYDLLEQGIYTTEVFLERAKTIAASIQSCSATIEKLKEEIKHDENIIKQRSDFIPRCEELLDNYWSLDTESKNKMLKSLIEKVVYSKDTKNAYGKGNEIGFQLDIFPKIQKNN

SEQ ID NO: 3900 - protein, 524 aa, Unknown
  Description of Unknown: Integrase B3901 sequence
  PTHR30461:SF3,cd00338,SM00857,G3DSA:1.10.10.2600,IPR036162, PF13408,PS51737,G3DSA:3.40.50.1390,IPR025827,IPR006119, IPR038109,PF07508,IPR011109,SSF53041,PTHR30461, PS51736,Coil,PF00239
MSRTSRKVKAPDSTEAVTRLVAYYRYSGGSRQTEQSIEGQRRDCEAFARAHGLTIQHEYIDRHISGKTDDRPAFQQMISDSDRRLFDAIICWKTDRLSRSREDSIVYKSRLRRNGVLILYAAESNLAGSEGMIIESIMESLAEYYSAELAEKSRRGMRESALKGKVLNAVRPLGLMTDENKKLVPDPSTAPIVQYIFEQYAAGASSTSIVQRLNEQGLRTSKGNPFNKSSINRIIQNEAYRGVYVSKKFDVRIEGAIPAIIDDDLWERTQKMFERNRQSRTPHSSRADYVLSGKLYCGECGCLMRGICGHSATGQVYHYYSCPGRSLGRTCTRKNIPQDVLENLVVRTVADKLLRPETIEQLADALFELQQAEASRPNAEQQAIEADLADVRRKLSNVLDAIENGTASAALTSRLSGLEQREKDLSFQLSSLESKKPLSFTRDQFVFLLQQFQVTPSERTKAYCRRLVDTFVRKIELTSTELILYFNISEETENKQKSASIEPSKKSSTETRLVRVARIELTAS

SEQ ID NO: 3901 - protein, 524 aa, Unknown
  Description of Unknown: Integrase B3902 sequence
  SM00857,G3DSA:1.10.10.2600,IPR036162,PF13408,PS51737, IPR025827,G3DSA:3.40.50.1390,IPR006119,IPR038109,PF07508, IPR011109,SSF53041,PF00239,PTHR30461,PS51736, Coil,cd00338
MNESVCIYLRKSRADREAEAHGEGETLARHERILLDLAKKKEYIVGAIYREVVSGETIADRPVMQQLLHEVESGMWDGVLVVEVERLARGDTIDQGIVSRAFQYSDTKIITPTKIYDPNNEFDEEYFEFGLFMSRREYKTIKRRLNAGRISSVKEGKYCGNKPPYGYERVKLEKEKGYTLRPVPTQAEIVKMIYTWYAGDGCEQIGVAKIARKLNEMGIESALGGDWTPASIQGILTNPVYIGKIRWNGRKTVKTIQTGQVIKTRPRSKDTLICNGLHPAVISEDLYNSVQEIRKKNPPRPVSIANSIRNPLAGIVYCSKCGRAMVRRPYQKRGQEDTLMCPYTSCPTVSSKLSLVEKAVLDGIREIVEKYKLNNDINTSSQAIDLTIISKQNLIHEKENELESLNAQKAKQYDLLEQGIYTTEVFLERAKTISASIQSCSDTIEKLKEEIKHDENIIKQQSDFIPRCEELLDNYWSLDTESKNKMLKSLIEKVAYSKDTKNAYGKGNEIGFQLDIFPKIQKNN

SEQ ID NO: 3902 - protein, 524 aa, Unknown
  Description of Unknown: Integrase B3903 sequence
  SM00857,G3DSA:1.10.10.2600,IPR036162,PS51737,G3DSA:3.40.50.1390, IPR006119,IPR038109,PF07508,SSF53041,IPR011109, PTHR30461,Coil,PS51736,cd00338,PF00239
MNESVCIYLRKSRADREAEAHGEGETLARHERILLDLAKKKEYTVGAIYREVVSGETIADRPVMQQLLHEVESGMWDGVLVVEVERLARGDTIDQGIVSRAFQYSDTKIITPTKIYDPNNEFDEEYFEFGLFMSRREYKTIKRRLNAGRISSIKEGKYCGNKPPYGYERVKLEKEKGYTLRPIPAQSEIVKMIYTWYAGDGCEQIGVAKIVRKLNEMGIESALGGDWTPASIQGILTNPVYIGKIRWNGRKTVKTIQNGQVIKTRPRSKDTLICNGLHPAVISEDLYNSVQEIRKKNPPRPVSIANSIRNPLAGIVYCSKCGRAMVRRPYQKRRQEDTLMCPYTSCPTVSSKLSLVEKSVIDGIREIVEEYKLNNDINASSKDIDCVITSKQNLIHEKENELESLNSQKAKQYDLLEQGIYTTEIFLERAKTISASIQSCSDTIEKLKEEIKHDKNIIKQRSDFIPRCEELLDNYWSLDTESKNKMLKSLIEKVVYSKDTKNAYGKGNEIGFQLDIFPKIQKNN

SEQ ID NO: 3903 - protein, 524 aa, Unknown
  Description of Unknown: Integrase B3904 sequence
  PTHR30461:SF3,SM00857,G3DSA:1.10.10.2600,IPR036162,PF13408, IPR025827,PS51737,G3DSA:3.40.50.1390,IPR006119,IPR038109, PF07508,SSF53041,IPR011109,PF00239, PTHR30461,PS51736,Coil,cd00338
MDNLNLANVVIYARYSSAGQNDQSIDGQLAKCREYAQQRGYRVVGEYCDRALSGRYAETRPEFQRMISDSAKHAFDFVLVWKLDRFSRDRYDSAIYKKKLRANGVRVLSVTEGVGDSSESVLLEAILEAMAEEYSRQLAQNVRRGMRQNAEKGLSLGGLPPLGYRVVNKQYEINEDEARIVRFIHEQYADGAGQKQIVADCARLGYRNQRGNPLTLAAVKRILANERYVGRYDYLGEIVIEDAFPAIVSKELKKRVRDRLKANAKAPGHAKAKVEYLLHGKLFCGECGAPMIGECGRGRHGATYYYYTCAARKKQHTCKKRNERKDELEASIVDYIGSCVLTDSWIDGAAERVVAEYQKSYDASGIKPLEKQIRDADKEIDQLVDALISATAEAARRRINERIETAEARKQALEADLASLRIASRVQIRKEDIVLWLNQFRNGDRSDLEYRKKVIDLFVNAIYLYDDSFKLFLNVADSSQVTYADALALAPPSVSDFGASGVPEKHLSEHIIFVNGVIGMIVQR

SEQ ID NO: 3904 - protein, 524 aa, Unknown
  Description of Unknown: Integrase B3905 sequence
  PTHR30461:SF3,SM00857,G3DSA:1.10.10.2600,IPR036162,PF13408, IPR025827,G3DSA:3.40.50.1390,PS51737,IPR006119,IPR038109, PF07508,SSF53041,IPR011109,PF00239,PTHR30461, PS51736,Coil,cd00338
MENAVIYARYSSDKQTEQSIEGQLRICTAYAEQNDLNIVHHYIDRAMSGTNDRRPEFQQMISDSARKQFKYIIVYKFDRFARNMYDSAIYEHKLEQSGVKVLSATEQVGDGNESLIVKAVLRAMAEMYSRQLSDNVKRGMKESALKANSTGGTIPFGYRLDGKKLVLDERTAPFAKHIFMEYAAGKAKMDIVRELDREGCRKSNGKVLTMQNITYILSNIKYTGVFKFKDIEIENGCPALVSKETFDRCKERSERERRKYGKSAQEVDYLLVGKLYCGYCKKPMIGDSGTSRNGDKHHYYTCYTRKSRRRTGETCRKKSERKDFLEWYVVQQVKEYILDNRRIEIIADAVVKKFKELFESSGEDVILKRLRSIDHEVDDAVDALLKTKNPAAIDKINARLEKLQAERESAEIELAKFRITKNVIPDREDLIEWLKSFQGDALDPEYQKKMIDTFINAIYLYDDKVVICFNLKGGKQVSGIEELEHSDELDECSSSLLNGSPLYKLSEHAELYVISGLLACVVKR

SEQ ID NO: 3905 - protein, 524 aa, Unknown
  Description of Unknown: Integrase B3906 sequence
  SM00857,G3DSA:1.10.10.2600,IPR036162,PF13408,PS51737, G3DSA:3.40.50.1390,IPR025827,IPR006119,IPR038109,PF07508, IPR011109,SSF53041,PTHR30461,Coil,PS51736, cd00338,PF00239
MNESVCIYLRKSRADREAEAHGEGETLARHERILLDLAKKKEYIVGAIYREVVSGETIADRPVMQQLLHEVESGMWDGVLVVEVERLARGDTIDQGVVSRAFQYSDTKIITPTKIYDPNNEFDEEYFEFGLFMSRREYKTIKRRLNNGRISSVKEGKYCGNKPPYGYERVKLEKEKGYTLRPVPAQAEVVKMIYAWYAGDGCEQIGVAKIVRKLNEMGIESALGGDWTPASIQGILTNPVYIGKIRWNGRKTVKTIHNGQVVKTRPRSRDVLICGGLHPAIISDDLYNSVQEIRQKNPPRPISIKNTVRNPLAGIVYCSKCGRAMVRRPYQKRGQEDTLMCPYTSCSTVSSKLSIVEKAVIDGIRDIAEEYKLNNDVNTSSKAIDLTIISKQNLIREKESELENLNTQRTKQYDLLEQGIYTTEVFLERSKTIATSIQSCSDIITKLREEIEHDENIMAQQSDFVPRCEELLNNYWNLDVESRNRMLKSLVEKVVYSKNIKNAYGKSNEINFELDIFPKIQKND

SEQ ID NO: 3906 - protein, 524 aa, Unknown
  Description of Unknown: Integrase B3907 sequence
  PTHR30461:SF3,SM00857,G3DSA:1.10.10.2600,IPR036162,PF13408, IPR025827,G3DSA:3.40.50.1390,PS51737,IPR006119,IPR038109, PF07508,IPR011109,SSF53041,PTHR30461,PS51736, cd00338,PF00239
MNKLRAAAYCRVSTDRAEQSGSLASQRSFFDDYIRNSDSMTLVGVFYDEGTSGTTTLNRYGFNKMISLAVSGGIDIILTKEVSRFARNTVDTLNITRMLRAKGVGIIFINDNIDTRDSDGELRLSIMATIAQEESRKISERVKWGQQRKMEQGVVFGRSCLGYDVKDGKITINADSAEIVKRIFTEYTVLLKGAESIADGLNAEQIRTVNGGRWSGAFIRKVLRNVKYVGDLEQKKTCTPDFLTHKKRLNRSEHIYIRNHHEPIISRELWEQTQAEISRRKPTDTSRHSDRYVFSGKVYCGVCGSVMVSRVKTLKNGKIYHALRCSGRIGGKSCNNETLNVTALKACVKRIFTDMPIDKTAVINAVIKGLSRTDKPDIPALRRKIETLNAKKRRAVDLMLDGLITQQELIEQKSYYDSIIEKLSQEISSDRSVFETDKIRKNAERFLDFTSDPLWLLVIRADYIHGTLTVYLKGIENGFTTCFTATGRGDSYRVITGNTVRSQGIIPGTMQVQKNWFRHDVNDK

SEQ ID NO: 3907 - protein, 524 aa, Unknown
  Description of Unknown: Integrase B3908 sequence
  SM00857,G3DSA:1.10.10.2600,IPR036162,PF13408,IPR025827, PS51737,G3DSA:3.40.50.1390,IPR006119,IPR038109,PF07508, IPR011109,SSF53041,PF00239,PTHR30461,PS51736, Coil,cd00338
MNESVCIYLRKSRADREAEAHGEGETLARHERILLDLAKKKEYIVGAIYREVVSGETIADRPVMQQLLHEVESGMWDGVLVVEVERLARGDTIDQGIVSRAFQYSDTKIITPTKIYDPNNEFDEEYFEFGLFMSRREYKTIKRRLNAGRISSVKEGKYCGNKPPYGYERVKLEKEKGYTLRPVPTQAEVVKMIYTWYAGDGCEQIGVAKIARKLNEMGIESALGGDWTPASIQGILTNPVYIGKIRWNGRKTVKTIQNGQVIKTRPRSKDTLICEGLHPAIISEDLFNSVQEIRKKNPPRPISIKNSIRNPLSGIVYCSKCGRAMVRRPYQKRGQEDTLMCPYTSCPTVSSKLSLVEKSVIDGIREIVEKYKLNNDINMSSKVIDCGITSKQNLIHEKENELESLNAQKAKQYDLLEQGIYTTEIFLERAKTISASIQSCSDTIEKLKEEIKHDENIIKQQSDFIPRCEELLDNYWSLDTESKNKILKSLIEKVTYSKDTKNAYGKGDEISFQLDIFPKIQKNN

SEQ ID NO: 3908 - protein, 524 aa, Unknown
  Description of Unknown: Integrase B3909 sequence
  cd00338,SM00857,G3DSA:1.10.10.2600,IPR036162,PF13408, IPR025827,G3DSA:3.40.50.1390,PS51737,IPR006119,IPR038109, PF07508,SSF53041,IPR011109,PTHR30461,PS51736, Coil,PF00239
MNESVCIYLRKSRADREAEAHGEGETLARHEHILLDLAKRQSYSIGAIYREVVSGETISARPVMQRLLHEVESGMWDGVLVVEVERLARGDTIDQGVVSRAFQYSDTKIITPTKIYDPNNEFDEEYFEFGLFMSRREYKTIKRRLNNGRISSVKEGKYCGNKPPYGYERVKLEKEKGYTLRPIPAQVEVVKMIYTWYAGDGCEQIGVAKIVRKLNEMGIESALGGDWTPASIQGILTNPVYIGKIRWNGRKTVKTIQNGQVVKTRPRSRDVLICEGLHPAIISDDLYNSVQEIRQKNPPRPISIKNTVRNPLAGIVYCSKCGRAMVRRPYQKHGQEDTLMCPYTSCSTVSSKLSLVEKAVFDGIKEIAEQYKLNNDINVPYNTINSGIVSKQNLIRKKESELESLNVQKAKQYDLLEQGIYTTEVFLERSKAIATSIQSCSDTITKLREEIEHDENIMVQQSDFVPRCEELLNNYWNLNMESRNRMLKNLVEKVVYSKNIKNTYGKGNEINFELDIFPKIQKND

SEQ ID NO: 3909 - protein, 524 aa, Unknown
  Description of Unknown: Integrase B3910 sequence
  SM00857,G3DSA:1.10.10.2600,IPR036162,PS51737,G3DSA:3.40.50.1390, IPR006119,IPR038109,PF07508,SSF53041,IPR011109, PTHR30461,Coil,PS51736,cd00338,PF00239
MNESVCIYLRKSRADREAEAHGEGETLARHERILLDIAKKKEYIVGAIYREVVSGETIADRPVMQQLLHEVESGMWDGVLVVEVERLARGDTIDQGIVSRAFQYSDTKIITPTKIYDPNNEFDEEYFEFGLFMSRREYKTIKRRLNAGRISSVKEGKYCGNKPPYGYERVKLEKEKGYTLQPVPAQAEIVKMIYTWYAGDGCEQIGVAKIARKLNEMGIESALGGDWTPASIQGILTNPVYIGKIRWNGRKTVKTIQNGQVIKTRPRSKDTLICEGLHPAIISEDLFNSVREIRKKNPPRPISIKNSIRNPLSGIVYCSKCGRAMVRRPYQKSSQEDTLMCPYTSCPTVSSKLSLVEKSVIDGIREIVEEYKLNNDINISSKAIDCGITSKQNLIHEKENELESLNAQKAKQYDLLEQGIYTTEVFLERAKTIAASIQSCSDTIEKLKEEIKHEQNIIKQQSDFIPRCEELLDNYWSLDTESKNKMLKSLIEKVTYSKDTKNAYGKGNEIGFQLDIFPKIQKNN

SEQ ID NO: 3910 - protein, 524 aa, Unknown
  Description of Unknown: Integrase B3911 sequence
  SM00857,G3DSA:1.10.10.2600,IPR036162,PS51737, G3DSA:3.40.50.1390,IPR006119,IPR038109,PF07508, IPR011109,SSF53041,PTHR30461,Coil, PS51736,cd00338,PF00239
MNESVCIYLRKSRADREAEAHGEGETLARHERILLDLAKKKEYIVGAIYREVVSGETIADRPVMQQLLHEVESGMWDGVLVVEVERLARGDTIDQGIVSRAFQYSDTKIITPTKIYDPNNEFDEEYFEFGLFMSRREYKTIKRRLNAGRISSIKEGKYCGNKPPYGYERVKLEKEKGYTLRPIPAQSEIVKMIYTWYAGDGCEQIGVAKIVRKLNEMGIESALGGDWTPASIQGILTNPVYIGKIRWNGRKTVKTIQNGQVVKTRPRSKDIILCDGLHPAIISDDLFNSVQEIRKKNPPRPISIKNSIRNPLAGIVYCSKCGRAMVRRPYQKRRQEDTLMCPYTSCPTVSSKLSLVEKSVINGIREIVEEYKLNNDINASSKDIDCVITSKQNLIHEKENELESLNSQKAKQYDLLEQGIYTTEIFLERAKTISASIQSCSDTIEKLKEEIKHDENIIKQRSDFIPRCEELLDNYWSLDTESKNKMLKSLIEKVVYSKDTKNAYGKGKEIGFQLDIFPKIQKNN

SEQ ID NO: 3911 - protein, 524 aa, Unknown
  Description of Unknown: Integrase B3912 sequence
  SM00857,G3DSA:1.10.10.2600,IPR036162,PF13408,PS51737, G3DSA:3.40.50.1390,IPR025827,IPR006119,IPR038109,PF07508, IPR011109,SSF53041,PF00239,PTHR30461,PS51736, Coil,cd00338
MSLENVCIYLRKSRADQEAEARGEGETLARHERILLDLARSCNYNVGAIYREIVSGETISARPVMQQLLREVEAGSWDGVLVVEVERLARGDTIDQGVVSRAFQFSDTKIITPTKTYDPDNEFDEEYFEFGLFMSRREYKTIKRRLNAGRIASVKEGKYCGSKPPYGYERVKLHGEKGFTLQPVPEQAEVIKMIYSLYSGASGDRIGVSKIVRKLNDMGIKSPSGKDWVPISVQDVLANPVYAGMIRWNGRKTVRAIQDGVVTQSRPRSKEDDILLFPGRHPAIVSKEMYDSVQQIRKKNPPRPISIKNTIKNPLAGIVYCSKCGRAMVRRPYQKRGQDDTLMCSYTSCPTVSSKLSLVERAVLNGIQDLVDEYRLNDAVPGPDINNAVKSKKKLIAEKEHELEKLNVQKMKQYDLLEQGIYTTEVFLERSNSIAFSINSCQDSIECLKEEIRHDKELIDQQSSFIPRCENLLEIYWSLDTAAKNKMLKELIERVNYTKDTKNAFRKGNEATFVLDIFPRIQSN

SEQ ID NO: 3912 - protein, 524 aa, Unknown
  Description of Unknown: Integrase B3913 sequence
  PTHR30461:SF3,SM00857,G3DSA:1.10.10.2600,IPR036162,PF13408, IPR025827,G3DSA:3.40.50.1390,PS51737,IPR006119,IPR038109, PF07508,IPR011109,SSF53041,PTHR30461,Coil, PS51736,cd00338,PF00239
MNVVIYARFSSHNQTEQSIEGQIKVCREYANRNGLEIVGIYKDEAKSGTRDDRTDFQRMIKDSEKKHFQGVLVYQLDRFARNKYDSAIYKRKLKLNGVRVLSARENISTDASGILMESVLEGMAEYFSVELGQKVQRGMEINASKFYYNGGTVPLGLKLKSIPVPLGVNGKTIYKKQFDIDEETAPIVKKIFEMYIADNTMADIIRYLNERNIKTSFGKEFNKNSIRTIILNKKYIGVYSYKGQETPNVIPRIIDDDTFYKAQEKLLKNKEAPARTKAKTNYLLTTKLYCGTCKSMMVGISGTSHTGKLHCYYSCKGTWQHKCDRKNVQKDYIEDLVVQQARNMLTTKAINRIAKIVAKIAQKEKDNTRLKQLENALKENDKQKANLFDSLKICYDNEVRKSIFEEISRMDKEKIELQKLITLEKSTYIEVTEPQIKFFLKNLKSGKINDQKYRQMLINVLIYRIYLYDDNLTIVYNTQDRTFITRVPTIEQIENSFFENKSVFSEINNLNIGSNLGKDVLPYF

SEQ ID NO: 3913 - protein, 524 aa, Unknown
  Description of Unknown: Integrase B3914 sequence
  SM00857,G3DSA:1.10.10.2600,IPR036162,PS51737,G3DSA:3.40.50.1390, IPR006119,IPR038109,PF07508,IPR011109,SSF53041, PTHR30461,Coil,PS51736,cd00338,PF00239
MNESVCIYLRKSRADREAEAHGEGETLARHERILLDLAKKKEYIVGAIYREVVSGETIADRPVMQQLLREVESGMWDGVLVVEVERLARGDTIDQGVVSRAFQYSDTKIITPTKTYDPNNEFDEEYFEFGLFMSRREYKTIKRRLNAGRISSVKEGKYCGNKPPYGYERVKLEKEKGYTLRPVPDQSNIVKMIYTWYAGDGCEQIGVAKIARKLNDMGIKSALGSDWTPASIQGILTNPVYIGKIRWNGRKVVKTVQNGQVVKTRPRSKDTLICEGLHPAIISEDLFNSVQEIRKKNPPRPVSIANSIRNPLAGIVYCSKCGRAMVRRPYQKRGQEDTLMCPYTSCPTVSSKLSLVEKSVIDGIREIVEEYKLNNDINASSKDIDCVITSKQNLIHEKENELESLNSQKAKQYDLLEQGIYTTEVFLERAKTISASIQSCSDTIEKLKEEIKHDENIIKQQSDFIPRCEELLDNYWSLDTESKNKMLKSLIEKVAYSKDTKNAYGKGNEIGFQLDIFPKIQKNN

SEQ ID NO: 3914 - protein, 524 aa, Unknown
  Description of Unknown: Integrase B3915 sequence
  cd03768,PTHR30461:SF3,SM00857,IPR036162, PF13408,IPR025827,G3DSA:3.40.50.1390,IPR006119, PF07508,SSF53041,IPR011109,PTHR30461, PS51736,PF00239
MVRIASYLRKSVYSDKSDSIQAQYTLISDYCKSHYTDFELYRYEDEGFTGANTNRPAFQRLTNDISERRIDVLVCYKIDRVSRDVKDFSNFFSFLQENKVEFVSIKEQIDTSTPLGRAMMYICSVFAQMERETIAQRVKDSMIELSKSGKWAGGRAPLGYRRDRVEINGKNHTVLVPDPDGIQLLNLISDKFLENNMSLVKLDGYCRKNNIKTATGSYFSSSQLWNVLKNPTYCTADSAAYDYFESLGCTMAVDRDRFDGSHAIMPYNRTRGGKTKKHAINPINEWIISVGLHEPLFTSEKYISIQRKFGQNVIDKTRKHKVGILHGIVKCSCGWNMRAKHKVDKVTGKIYDDYFCNQRQNRGRESCSMPAVHIDTLDSAIIDFLKQIKLDKKMIDNYCFDEAAVTVHRRKRADVQRDIGRIESKILNLTNTLSNTSGSSAAKYIVSEIEKLDRELSGYKYELMEIGADEKKHAHFQHTKEAKYKMVCDIVDNLDRLEYDEIRTLLKELFKECVWDGEVLHVKL

SEQ ID NO: 3915 - protein, 524 aa, Unknown
  Description of Unknown: Integrase B3916 sequence
  PTHR30461:SF3,IPR036162,PS51737,IPR011109,PTHR30461, PF00239,G3DSA:1.10.10.2600,IPR006119,SSF53041,cd00338, SM00857,IPR025827,IPR038109,mobidb-lite,PS51736, PF13408,G3DSA:3.40.50.1390,PF07508,Coil
MRKKSNLNAATRAVIYARYSSANQRDCSIEQQVAKCRELAARLGLTVIDVYEDRAISGKTDRRPNFQRMMKDADLRQFDVVLAWKSNRMGRNMLQAMTNEERLRDNGIRTVYAEEDFDDTAAGRFALRNMMNVNQFYSENMAEDITRGLMDNASKCLSNGSLPLGYKPGDDRHVVLDETEASIVQEIFTRVSCCEPFIDIARDLNRRGIKTKKGAEWGRSSFHTICRNERYRGIYIYRDVRVEGGMPRIISDELFYKVQEVLKVKKNPQGRRKRSGYEEYLLTGKLYCGHCGSPMTGIAGTSKTGAMHYYYTCQKRRTDHSCDKKAVRRDQIERAVGVAIQQQLLTDENIQMMADKLMEYNARTETKHRLQGLQDQLNANKTATANILKAIEMGIITDATKARLLELEKEQAQLLVKIDTAKAEMVPISRNDFVKLLYIYKEGEPTDKKYLAALFDNFLVRVDLYDDHLKITFDPTGGRQPIDMPIGAEDSPESPGDSSESSDFEASSQDAEKFVLALHNCTKE

SEQ ID NO: 3916 - protein, 524 aa, Unknown
  Description of Unknown: Integrase B3917 sequence
  PTHR30461:SF3,cd00338,SM00857,IPR036162,PF13408, IPR025827,G3DSA:3.40.50.1390,IPR006119,PF07508,IPR011109, SSF53041,PTHR30461,PS51736,Coil,PF00239
MKIGIYGRKSVFSDKSESIENQFKMGAEYAYANYDNPEIIYYKDEGESGSYLERPDFQNLLNDVIANNIDVLICYKLDRISRDVADFGAVYKLFMAHGIEIIPLRDNIIVNENMTPIEKAMMYMNAIFSQVERENTVIRVTDNMVELAKNGYWPGGRPPIGFSLQQVVVEGKKHTILSKQPEGMEFYNMLADTFLNGHTLSSLETYFRKIDVKTLNGSYLSSIQIYNILKSPFYAPADTNTYDYFASLGCKMIHSREEYNGEYGLIVYGRTSGGRKRKHVLNPPEKWIVSIGKHTPVISSDKWLAIQNRFGQNTINKTRKYNVGILNGILRCSCGALMKTKHKYDKQYDVHYFHYTCQNRQRRGPDYCTMPMISVDTIDSKVIEILKSIQLDRTLIDKYVVAPGAPLTYRSPESLTKEISIEEKKINNLTASLADAAGSTAAKYIIAEMENHDSRLNELKKELREVRLERQKERSRIIDKEEKYQAVCRIVNCLETASYEEINTLLQETLKECMYDGEVLHIKL

SEQ ID NO: 3917 - protein, 524 aa, Unknown
  Description of Unknown: Integrase B3918 sequence
  PTHR30461:SF3,SM00857,G3DSA:1.10.10.2600,IPR036162,PF13408, IPR025827,G3DSA:3.40.50.1390,PS51737,IPR006119,IPR038109, PF07508,IPR011109,SSF53041,PF00239, PTHR30461,PS51736,Coil,cd00338
MDHGLNLANVVIYARYSSAGQNDQSIDGQLAKCREYAQQRGFRVVGEYCDRALSGRYAETRPEFQRLVSDSSKHAFEYVLVWKLDRFSRDRYDSAIYKKKLRANGVRVLSVTEGIDESSESVLLEAILEAMAEEYSRQLAQNVKRGMRQNAEKALSLGGMPPLGYDVVSKRYTINESEAQIVRFIHERYAAGAAQKLIVDECRQRGYFAKRGNELTIGAVNRILRNPKYAGTYVCDDLVLEDAIPAIVSKPLKQQVRDRLAASAKSPGHAKAKVEYLLHGKLFCGECGAPMIGECGRGKNGTTHYYYTCAARKKSRSCKKRNERKFELEKYIVEYISMYVLTDEWINAAAERVVAEYARSYAASGIKPLERQIREADKELDALVDTLIKTASATAIAKINERIEAVDAKKRTLEADLATLRIASRVEIRKDDIVAWLDQFRVGSSSDPEYCKKIIELFVNAVYVYDDRIKMFFNVRDSAQITYPEMLALDGLECSDFDLSGVPNEALSEQILFINGIIGMLVRR

SEQ ID NO: 3918 - protein, 524 aa, Unknown
  Description of Unknown: Integrase B3919 sequence
  SM00857,G3DSA:1.10.10.2600,IPR036162,PS51737,G3DSA:3.40.50.1390, IPR006119,IPR038109,PF07508,IPR011109,SSF53041, PTHR30461,Coil,PS51736,cd00338,PF00239
MNESVCIYLRKSRADREAEAHGEGETLARHERILLDLAKKKEYIVGAIYREVVSGETIADRPVMQQLLHEVESGMWDGVLVVEVERLARGDTIDQGVVSRAFQYSDTKIITPTKIYDPNNEFDEEYFEFGLFMSRREYKTIKRRLNAGRISSIKEGKYCGNKPPYGYERVKLEKEKGYTLRPVPTQAEIVKMIYTWYSGDGCEQIGVAKIARKLNEMGIESALGGDWTPASIQGILTNPVYIGKIRWNGRKTVKTIQNGQVIKTRPRSKDTLICNGLHPAVISEDLYNSVQEIRKKNPPRPVSIANSIRNPLAGIVYCSKCGRAMVRRPYQKRRQEDTLMCPYTSCPTVSSKLSLVEKSVIDGIREIVEEYKLNNDINASSKDIDCGITSKQNLIHEKENELKNLNSQKAKQYDLLEQGIYTTEVFLERAKTISASIQSCSDTIEKLKEEIKHDENIIKQRSDFIPRCEELLDNYWSLDTESKNKMLKSLIEKVVYSKDTKNAYGKGNEIGFQLDIFPKIQKNN

SEQ ID NO: 3919 - protein, 524 aa, Unknown
  Description of Unknown: Integrase B3920 sequence
  SM00857,G3DSA:1.10.10.2600,IPR036162,PF13408, IPR025827,G3DSA:3.40.50.1390,PS51737,IPR006119, IPR038109,PF07508,SSF53041,IPR011109, PF00239,PTHR30461,PS51736,Coil,cd00338
MNESVCIYLRKSRADREAEAHGEGETLARHQRILLDLAKKKEYIVGAIYREVVSGETIADRPVMQQLLREVESGMWDGVLVVEVERLARGDTIDQGVVSRAFQYSDTKIITPTKIYDPNNEFDEEYFEFGLFMSRREYKTIKRRLNNGRISSVKEGKYCGNKPPYGYERVKLEKEKGYTLRPIPAQAEVVKMIYTWYAGDGCEQIGVAKIVRKLNDMGIESALGGDWTPASIQGILTNPVYIGKIRWNGRKTVKTIQNGQVVKTRPRSKNVLICEGLHPAIISDDLYNSVQEIRQKNPYRPISIKNTVRNPLAGIVYCNKCGRAMVRRPYQKRGQEDTLMCPYTSCSTVSSKLSLVEKAVIDGIREIAEKYKLNNDINVPSNTIDSGITSKQNLIREKESELESLNAQKAKQYDLLEQGIYTTEVFLDRAKTISASIQSCSDTIANLREEIEHDENIKAQQSDFIPRCEELLNNYWSLDTESKNKMLKSLIEKVIYTKDSKNTYGHGNEINFELDIFPKIQKNN

SEQ ID NO: 3920 - protein, 524 aa, Unknown
  Description of Unknown: Integrase B3921 sequence
  SM00857,G3DSA:1.10.10.2600,IPR036162,PS51737,G3DSA:3.40.50.1390, IPR006119,IPR038109,PF07508,SSF53041,IPR011109, PTHR30461,Coil,PS51736,cd00338,PF00239
MNESVCIYLRKSRADREAEAHGEGETLARHQRILLDLAKKKEYIVGAIYREVVSGETIADRPVMQQLLHEVESGMWDGVLVVEVERLARGDTIDQGVVSRAFQYSDTKIITPTKIYDPNNEFDEEYFEFGLFMSRREYKTIKRRLNAGRISSIKEGKYCGNKPPYGYERVKLEKEKGYTLRPVPAQAEIVKMIYTWYAGDGCEQIGVAKIARKLNEMGIESALGGDWTPASIQGILTNPVYIGKIRWNGRKTVKTIQNGQVIKTRPRSKDTLICDGLHPAIISEDLFNSVQEIRKKNPPRPVSIANSIRNPLAGIVYCSKCGRAMVRRPYQKRRQEDTLMCPYTSCPTVSSKLSLVEKSVIDGIREIVEEYKLNNDINASSKDIDCVITSKQNLIHEKENELESLNSQKAKQYDLLEQGIYTTEIFLERAKTISASIQSCSDTIEKLKEEIKHDENIIKQRSDFIPRCEELLDNYWSLDTESKNKMLKSLIEKVVYSKDTKNAYGKGNEIGFQLDIFPKIQKNN

SEQ ID NO: 3921 - protein, 524 aa, Unknown
  Description of Unknown: Integrase B3922 sequence
  cd00338,SM00857,G3DSA:1.10.10.2600,IPR036162, PF13408,IPR025827,G3DSA:3.40.50.1390,PS51737, IPR006119,IPR038109,PF07508,SSF53041, IPR011109,PTHR30461,PS51736,Coil,PF00239
MSLENVCIYLRKSRADREAEARGEGETLARHERILLDLARSRNYNVGAIYREIVSGETISARPVMQQLLREVEAGSWDGVLVVEVERLARGDTIDQGVVSRAFQFSDTKIITPAKTYDPDNEFDEEYFEFGLFMSRREYKTIKRRLNAGRIASVKEGKYCGSRPPYGYERVKLRGEKGFTLQPVPEQAEVIKMIYSLYSGASGDRIGVSKIVRKLNDMGIKSPSGKDWVPISVQDVLANPVYAGMIRWNGRKTVRAIQDGMVTQSRPRSKEDDILLFPGRHPAIVSKEMYDSVQQIRKKNPPRPISIKNTIKNPLAGIVYCSKCGRAMVRRPYQKRGQDDTLMCSYTSCPTVSSKLSLVERAVLNGIQDLVDEYRLNDAVPGPDINNAVKSKKKLIAEKEHELEKLNVQKMKQYDLLEQGIYTTEVFLERSNSIASSINSCQDSIECLKEEIRHDKELIDQQSSFIPRCENLLEIYWSLDIATKNKMLKELIERVNYTKDVKNAFRMGNEATFVLDIFPRIQSN

SEQ ID NO: 3922 - protein, 524 aa, Unknown
  Description of Unknown: Integrase B3923 sequence
  cd00338,SM00857,G3DSA:1.10.10.2600,IPR036162,PF13408, IPR025827,PS51737,G3DSA:3.40.50.1390,IPR006119,IPR038109, PF07508,IPR011109,SSF53041,PTHR30461,PS51736, Coil,PF00239
MNESVCIYLRKSRADREAEAHGEGETLARHERILLDLAKKKEYIVGAIYREVVSGETIADRPVMQQLLHEVESGMWDGVLVVEVERLARGDTIDQGVVSRAFQYSDTKIITPTKIYDPNNEFDEEYFEFGLFMSRREYKTIKRRLNAGRISSVKEGKYCGNKPPYGYERVKLEKEKGYTLRPVPAQAEIVKMIYTWYAGDGCEQIGVAKIARKLNEMGIESALGGDWTPATIQGILTNPVYIGKIRWNGRKTVKTIQNGQVVKARPRSKDTLICNGLHPAIISEDLFNSVQEIRKKNPPRPVSIANSIRNPLAGIVYCSKCGRAMVRRPYQKRGQEDTLMCPYTSCSTVSSKLPLVEKAVIDGIKEIVEEYKLNNDINTSSKAIDCVITSKQNLIHEKENELESLNSQKAKQYDLLEQGIYTTEVFLERAKTISASIQSCSDTIEKLKEEIKHEQNIIKQQSDFIPRCEELLDNYWSLDTESKNKMLKSLIEKVTYSKDTKNAYGKGNEIGFQLDIFPKIQKNN

SEQ ID NO: 3923 - protein, 524 aa, Unknown
  Description of Unknown: Integrase B3924 sequence
  cd00338,SM00857,G3DSA:1.10.10.2600,IPR036162,PF13408, IPR025827,PS51737,G3DSA:3.40.50.1390,IPR006119,IPR038109, PF07508,IPR011109,SSF53041,PTHR30461,PS51736, Coil,PF00239
MNESVCIYLRKSRADREAEAHGEGETLARHERILLDLAKKKEYIVGAIYREVVSGETIADRPVMQQLLHEVESGMWDGVLVVEVERLARGDTIDQGVVSRAFQYSDTKIITPTKIYDPNNEFDEEYFEFGLFMSRREYKTIKRRLNAGRISSVKEGKYCGNKPSYGYERVKIEKEKGYTLRPVPAQAEIVKMIYTWYAGDGCEQIGVAKIARKLNEMGIESALGGDWTPASIQGILTNPVYIGKIRWNGRKTVKTIQNGQVIKTRPRSKDTLICEGLHPAIISEDLFNSVQEIRKKNPPRPVSIANSIRNPLAGIVYCSKCGRSMVRRPYQKRGQEDTLMCPYTSCPTVSSKLSLVEKAVIDGISEIVEEYKLNNDINTSSKAIDCGITSKQNLIHEKENELESLNAQKAKQYDLLEQGIYTTEVFLERAKTIAASIQSCSATIEKLKEEIKHEQNIIKQQSDFIPRCEELLDNYWSLDTESKNKMLKSLIEKIAYSKDNKNAYGKGNEINFQLDIFPKIQKNN

SEQ ID NO: 3924 - protein, 524 aa, Unknown
  Description of Unknown: Integrase B3925 sequence
  PTHR30461:SF3,cd00338,SM00857,G3DSA:1.10.10.2600,IPR036162, PF13408,PS51737,G3DSA:3.40.50.1390,IPR025827,IPR006119, IPR038109,PF07508,IPR011109,SSF53041,PTHR30461, PS51736,Coil,PF00239
MFEDVKTACLYVRFSSHNQTEQSIEGQTRVCQEFCQRHNIKIIEIYADRATSASKNTEKRVSFLKMIKDSEKGLFDAVVVYKLDRFARSRYDSATYKYRLKKNGVQLISATENITDSPEGIILESVLEGMAEFYSAELSQKINRGMRESAYKHNSIGGALPLGYKTVDKKLVIDEKTAPIVREAFTMYAEGHSVAEICRIFNARGYKTSKGTEFGKNSFSKIFRNERYIGTYTYHDYRAEDAIPAIIDRDLWDRVQLRLKKVKNSPGRNKAKRVYLLSGKLFCGHCGESMNGNCNGNKYAFYECYGKKSKYNGCQKRNLRKEYIERLVAQDALSLLTDENIEHLATVACERNDYEIETGSPIPVIRDRIHQTEVSINNLTKAIETGATPDALVKRMVELEREKKDLSTQLKKEEELIVPLEKEQVIFWLEKFKDGDIEDEEFCRLLIDLFVNSVTVWDEDNDMLKVTIAYNLTSLPTKTYRLTKDGTLSDFTGNAPGMSANPTIHGNLVIHTFVCPQIKRYQRF

SEQ ID NO: 3925 - protein, 524 aa, Unknown
  Description of Unknown: Integrase B3926 sequence
  SM00857,G3DSA:1.10.10.2600,IPR036162,PS51737,G3DSA:3.40.50.1390, IPR006119,IPR038109,PF07508,SSF53041,IPR011109, PTHR30461,Coil,PS51736,cd00338,PF00239
MNESVCIYLRKSRADREAEAHGEGETLARHERILLDLAKKKEYIVGAIYREVVSGETIADRPVMQQLLREVESGMWDGVLVVEVERLARGDTIDQGVVSRAFQYSDTKIITPTKIYDPNNEFDEEYFEFGLFMSRREYKTIKRRLNAGRISSVKEGKYCGNKPPYGYERVKLEKEKGYTLRPVPTQAEIVKMIYTWYAGDGCEQIGVAKIARKLNEMGIESALGGDWTPASIQGILTNPVYIGKIRWNGRKTVKTIQNGQVIKTRPRSKDTLICEGLHPAIISEDLFNSVQEIRKKNPPRPVSIANSIRNPLAGIVYCSKCGRSMVRRPYQKRGQEDTLMCPYTSCHTVSSKLSLVEKSVIDGIREIVEEYKLNNDINASSKDIDCVITSKQNLIHEKENELKSLNSQKAKQYDLLEQGIYTTEVFLERAKTISTSIQSCSDTIEKLKEEIKHDQNIIKQQSDFIPRCEELLDNYWSLDTESKNRMLKSLIEKVTYSKDAKNAYGKGNEIGFQLDIFPKIQKNN

SEQ ID NO: 3926 - protein, 524 aa, Unknown
  Description of Unknown: Integrase B3927 sequence
  SM00857,G3DSA:1.10.10.2600,IPR036162,PF13408, IPR025827,G3DSA:3.40.50.1390,PS51737,IPR006119, IPR038109,PF07508,IPR011109,SSF53041, PF00239,PTHR30461,PS51736,Coil,cd00338
MSLENVCIYLRKSRADREAEARGEGETLARHERILLDLARSRNYNVGAIYREIVSGETISARPVMQQLLREVEAGSWDGVLVVEVERLARGDTIDQGVVSRAFQFSDTKIITPTKTYDPDNEFDEEYFEFGLFMSRREYKTIKRRLNAGRISSVKEGKYCGSKPPYGYERVKLHGEKGFTLQPVPEQAEVIKMIYSLYSGASGDRIGVSKIVRKLNDMGIKSPSGKDWVPISVQDVLANPVYAGMIRWNGRKTVRAIQDGMVTQSRPRSKEDDILLFPGRHPAIVSKEMYDSVQQIRKKNPPRPISIKNTIKNPLAGIVYCSKCGRAMVRRPYQKRGQDDTLMCSYTSCPTVSSKLSLVERAVLNGIQDLVDEYRLNAAVPGPDINNAVKSKEKLIAEKEHELEKLNVQKMKQYDLLEQGIYTTEVFLERSNSIASSINSCQDSIECLKEEIRHDKELIDQQSSFIPRCENLLEIYWSLDTATKNKMLKELIERVNYTKDTKNAFRKGNEATFVLDIFPRIQSN

SEQ ID NO: 3927 - protein, 524 aa, Unknown
  Description of Unknown: Integrase B3928 sequence
  PTHR30461:SF3,SM00857,G3DSA:1.10.10.2600,IPR036162,PS51737, G3DSA:3.40.50.1390,IPR006119,IPR038109,PF07508,IPR011109, SSF53041,PTHR30461,Coil,PS51736,cd00338, PF00239
MYNNINNNMEMYIKYLRKSRKDLEAEEHGEGDTLAKHDLILTNLYRSMGIKDEQVITLKEIVSGDSIASRPVIQEVLQLVEQGSVTGVLVVEVERLARGNTLDQGIVSNAFQYSNTKIITPLKIYDPHNEFDQEYFEFGLFMSRREYKTINRRLQNGRTTSATQGKFPASRAPYGYKRKKIEHDKGWTLEIVPEQAETVKCIFNLYAYQNMKPSEICKYLDNLNVKPLKSNTWSSSSIRDILSNPVYVGKIRWKDRKVVKILKDGKIINTQPVNKGNDVVLVDALHQPIIDIKTFELVQKKKKENNTAPIPGIYNIQNPLCGLIRCSKCGRLMFRVSCETLACTNPKCHNVSSKINIVEKKLIESLNIWLEEHEKEIDNASLKNLSNSEIIKIKKNQLEKANLELMKCKDTLERIYGFLEQGIYNIDIFTQRKNKILAKEQEQLKKIEILDNEIKKIEQNEKSKIELIPKVKNVLDIYSKCNNIKEKNELLKTVIKKVDYLKTEKCYGKKNNPENFELMIYTKF

SEQ ID NO: 3928 - protein, 524 aa, Unknown
  Description of Unknown: Integrase B3929 sequence
  PTHR30461:SF3,SM00857,G3DSA:1.10.10.2600,IPR036162,PF13408, IPR025827,G3DSA:3.40.50.1390,PS51737,IPR006119,IPR038109, PF07508,IPR011109,SSF53041,PTHR30461,PS51736, cd00338,PF00239
MNKLRAAAYCRVSTDRAEQSGSLASQRSFFDDYIRNSDSMTLVGVFYDEGTSGTTTLNRYGFNKMISLAVSGGIDIILTKEVSRFARNTVDTLNITRMLRAKGVGIIFINDNIDTRDSDGELRLSIMATIAQEESRKISERVKWGQQRKMEQGVVFGRSCLGYDVKDGKITVNADSAEIVKRIFTEYTVLLKGAESIADGLNAEQIRTVNGGRWSGAFIRKVLRNVKYVGDLEQKKTCTPDFLTHKKRLNRSEHIYIRNHHEPIISRELWEQTQAEISRRKPTDTSRHSDRYVFSGKVYCGVCGSVMVSRVKTLKNGKIYHALRCSGRIGGKSCNNETLNVTALKACVKRIFTDMPIDKTAVINAVIKGLSRTDKPDIPALRRKIETLNAKKRRAVDLMLDGLITQQELIEQKSYYDSIIEKLSQEISSDRSVLETDKIRKNAERFLDFTSDPLWLLVIRADYIHGTLTVYLKGIENGFTTCFTATGRGDSYRVITGNTVRSQGIIPGTMQVQKNRCRHDVNDK

SEQ ID NO: 3929 - protein, 524 aa, Unknown
  Description of Unknown: Integrase B3930 sequence
  cd00338,SM00857,G3DSA:1.10.10.2600,IPR036162,PF13408, IPR025827,G3DSA:3.40.50.1390,PS51737,IPR006119,IPR038109, PF07508,IPR011109,SSF53041,PTHR30461,PS51736, Coil,PF00239
MNESVCIYLRKSRADREAEAHGEGETLARHQRILLDLAKKKEYIIGAIYREVVSGETIADRPVMQQLLHEVESGVWDGVLVVEVERLARGDTIDQGVVSRAFQYSDTKIITPTKIYDPNNEFDEEYFEFGLFMSRREYKTIKRRLNAGRISSAKEGKYCGSKPPYGYERVKLEKEKGYTLRPIPAQAEIVKMIYAWYAGDGCERIGISKIVRRLNDMGIESALGNDWIPATVRGVLTNPVYTGKIHWNSRKTVKTIQDGQIVKTRPRSKDIILCDGLHPAIISDDLFNSVQEIRKKNPPRPVGISKLIRNPLSGIVYCSKCGRAMVRRPYQKRGQEDSLLCPYTSCPTVSSKLSLVEKAVLDGIKEIVEEYKLNNDINASSKAIDSGITSKQNLIHEKENELKNLNSQKAKQYDLLEQGIYTTEVFLERAKTIAASIQSCSDTIEKLKEEIKHDENIIKQQSDFIPRCEELLDNYWSLDTESKNEMLKSLIEKVTYSKDTKNAYGKGDEISFQLDIFPRIQKNS

SEQ ID NO: 3930 - protein, 524 aa, Unknown
  Description of Unknown: Integrase B3931 sequence
  PTHR30461:SF3,SM00857,IPR036162,PF13408,PS51737, G3DSA:3.40.50.1390,IPR025827,IPR006119,PF07508,IPR011109, SSF53041,PTHR30461,Coil,PS51736,cd00338, PF00239
MNICCYGRKSIYSDHSDSIDNQFRMCRDYVEMKFSGQVDSFLEYQDEAFTGANTKRPDLQRLLTDISAGNCDVLIVYQLDRLSRDVRDFANIYAILEEHRVKFISIKENIDTSTPIGRAMMYVTVVFAQMERETIAARVADNMIGLAKKGYWTGGNPPEGYVRTRIEANGKKHCSIVPDPEGVKYVTWIFDTFLQNDYSLQSMETAFKNQGIRTRRGAFFSTAQLHKILTMPYCVQATPEVYDYYVARGCQMDPESPRESWDGTCGVMIYGRTTQKNKKHQMQPPEKWLVCLGAHEPFMPAEKWLAVQARFARNKFDKTMKYDVPLLKGVLRCSCGSIMCVSRKKKVDGSVSSWYYCLKRMRQGKEVCDSRQIKCELLDQKVLELLQSIKRDPQVIHKFAENNVDMLNGPDPKVLASKISTCQTRIDRLVSSLSLAADSSAQKYILAELERLDLEIQALRREHNLALAAERKRSMQQQNTLSKVSEINRLIADLDSFSASEKNAIVKDVIKKCVWDGESLSIML

SEQ ID NO: 3931 - protein, 524 aa, Unknown
  Description of Unknown: Integrase B3932 sequence
  SM00857,G3DSA:1.10.10.2600,IPR036162,PF13408,PS51737, G3DSA:3.40.50.1390,IPR025827,IPR006119,IPR038109,PF07508, SSF53041,IPR011109,PF00239,PTHR30461,PS51736, Coil,cd00338
MSLENVCIYLRKSRADREAEAKGEGETLARHERILLDLARSRNYNVGAIYREIVSGETISARPVMQQLLREVEAGSWDGVLVVEVERLARGDTIDQGVVSRAFQFSDTKIITPTKTYDPDNEFDEEYFEFGLFMSRREYKTIKRRLNAGRISSVKEGKYCGSRPPYGYERVKLRGEKGFTLQPVPEQAEVIKMIYSLYSGSSGDRIGVSKIVRKLNDMGIKSPSGKDWVPISVQDVLANPVYAGMIRWNGRKTVRAIQDGVVTQSRPRSKEDDILLFPGRHPAIVSKEMYDSVQQIRKKNPPRPISIKNTIKNPLAGIVYCSKCGRAMVRRPYQKRGQDDTLMCSYTSCPTVSSKLSLVERAVLNGIQDLVDEYRLNDAVPGPDINNAVKSKKKLIAEKEHELEKLNVQKMKQYDLLEQGIYTTEVFLERSNSIASSINSCQDSIECLKEEIRHDKELIDQQSSFIPRCENLLEIYWSLDTAAKNKMLKELIERVNYTKDTKNAFRKGNEATFVLDIFPRIQSN

SEQ ID NO: 3932 - protein, 524 aa, Unknown
  Description of Unknown: Integrase B3933 sequence
  cd00338,SM00857,G3DSA:1.10.10.2600,IPR036162,PF13408, PS51737,G3DSA:3.40.50.1390,IPR025827,IPR006119,IPR038109, PF07508,IPR011109,SSF53041,PTHR30461,PS51736, Coil,PF00239
MNESVCIYLRKSRADREAEAHGEGETLARHEHILLDLAKRQGYSIGAIYREVVSGETISARPVMQKLLHEVESGMWDGVLVVEVERLARGDTIDQGVVSRAFQYSDTKIITPTKIYDPNNEFDEEYFEFGLFMSRREYKTIKRRLNNGRISSVKEGKYCGNKPPYGYERVKLEKEKGYTLRPVPAQAEIVKMIYTWYAGDGCEQIGVAKIVRKLNDMGIESALGGDWTPASIQGILTNPVYIGKIRWNGRKTVKTIQNGQVVKTRPRSKNVLICEGLHPAIIPDDLYNSVQEIRRKNPPRPISIKNTVRNPLAGIVYCSKCGRAMVRRPYQKRGQEDTLMCPYTSCPTVSSKLSLVEKAVIDGIKEIAEKYKLNNDINVPYNTINSGIVSKQKLIREKESELESLNTQKVKQYDLLEQGIYTTEVFLERSKTISASIQSCFDIITKLREEIEHDENIMTQQSDFIPRCEELLNNYWNLNMESRNRMLKSLVEKVVYSKNIKNTYGKGNEINFELDIFPKIQKNN

SEQ ID NO: 3933 - protein, 524 aa, Unknown
  Description of Unknown: Integrase B3934 sequence
  cd00338,SM00857,G3DSA:1.10.10.2600,IPR036162,PF13408, PS51737,G3DSA:3.40.50.1390,IPR025827,IPR006119,IPR038109, PF07508,IPR011109,SSF53041,PTHR30461,PS51736, Coil,PF00239
MNAVIYARYSSDKQTEQSIEGQLREGYAYAERMGITVVGEYIDRAVSGTSDQRPDFQRMISDSIKRQFEAVIVWKLDRFARNRYDSAIYKSKLKKNGVRVFSVTEGIGDGDESIILEAVLEAMAEVYSKQLGQNAARGMRETAMKGLCTGGQIPLGYAVGEDHKLHIDSKTAPAVQLIYTLYADGQSKTQIANELNSRGFRTKTGKPYNCNSFYRILTNPMYYGNYTYKGEVLRECPAIISKALYDKCQERNDVVKRSRGMKISEVEWLLRGKLYCGHCGTQMTGDSGTSRTNEKYYYYTCHKHKRYKDCDKKSEKKEQLERAVCQKTVEYVLREDRIEYIAERVVEQYEKEFDASTIKEKEMSLSKLNIELDKCAESLMNTTIRSVVDRINARAEELEAAKSELEHELAQLRITSKARITVDEIMTFLRGFCSGDVDDIQFRRKIIDTFINAVYVFDDKYVIYYNVRDCKQVTYSDMLASIHAPSDMSVHGSDCLLYGEPEKARKHYVYGLLLFQKNISNEVL

SEQ ID NO: 3934 - protein, 524 aa, Unknown
  Description of Unknown: Integrase B3935 sequence
  SM00857,G3DSA:1.10.10.2600,IPR036162,PS51737,G3DSA:3.40.50.1390, IPR006119,IPR038109,PF07508,SSF53041,IPR011109, PTHR30461,Coil,PS51736,cd00338,PF00239
MNESVCIYLRKSRADREAEAHGEGETLSRHERILLDLAKKKEYIVGAIYREVVSGETIADRPVMQQLLHEVESGMWDGVLVVEVERLARGDTIDQGVVSRAFQYSDTKIITPTKIYDPNNEFDEEYFEFGLFMSRREYKTIKRRLNAGRISSVKEGKYCGNKPPYGYERVKLEKEKGYTLRPVPTQAEIVKMIYTWYSGDGCEQIGVAKIARKLNEMGIESALGGDWTPASIQGILTNPVYIGKIRWNGRKTVKTIQNGQVIKTRPRSKDTLICNGLHPAVISEDLYNSVQEIRKKNPPRPVSIANSIRNPLAGIVYCSKCGRAMVRRPYQKRRQEDTLMCPYTSCPTVSSKLSLVEKSVINGIREIVEEYKLNNDINASSKDIDCVITSKQNLIHEKENELESLNSQKAKQYDLLEQGIYTTEIFLERAKTISASIQSCSDTIEKLKEEIKHDENIIKQRSDFIPRCEELLDNYWSLDTESKNKMLKSLIEKVVYSKDTKNAYGKGKEIGFQLDIFPKIQKNN

SEQ ID NO: 3935 - protein, 524 aa, Unknown
  Description of Unknown: Integrase B3936 sequence
  PTHR30461:SF3,SM00857,G3DSA:1.10.10.2600,IPR036162,PF13408, PS51737,G3DSA:3.40.50.1390,IPR025827,IPR006119,IPR038109, PF07508,IPR011109,SSF53041,PTHR30461, Coil,PS51736,cd00338,PF00239
MDHGLNLANVVIYARYSSAGQNDQSIDGQLAKCREYAQQRGFRVVGEYCDRALSGRYAETRPEFQRLVSDSSKHAFEYVLVWKLDRFSRDRYDSAIYKKKLRANGVRVLSVTEGIDESSESVLLEAILEAMAEEYSRQLAQNVKRGMRQNAEKALSLGGMPPLGYDVVSKRYTINESEAQIVRFIHERYAAGAAQKLIVDECRQRGYCAKRGNELTIGAINRILRNPKYAGTYVCDDLVLEDSIPAIVSKPLKQQVRDRLAASAKAPGHAKAKVEYLLHGKLFCGECGAPMIGECGRGKNGTTHYYYTCAARKKSRSCKKRNERKFELEKYIVEYISMYVLTDEWINAAAERVVAEYARSYAASGIKPLERQIREADKELDALVDTLIKTASATAIAKINERIEAAEAKKRTLEADLATLRIASRVEIRKEDIVAWLDQFRVGSSSDPEYCKKIIELFVNAVYVYDDRIKMFFNVRDSAQITYPEMLALDGLECSDFDLSGVPDDALSEQILFINGIIGMLVRR

SEQ ID NO: 3936 - protein, 524 aa, Unknown
  Description of Unknown: Integrase B3937 sequence
  cd00338,SM00857,G3DSA:1.10.10.2600,IPR036162,PS51737, G3DSA:3.40.50.1390,IPR006119,IPR038109,PF07508,IPR011109, SSF53041,PTHR30461,PS51736,Coil,PF00239
MNESVCIYLRKSRADREAEAHGEGETLARHERILLDLAKKKEYIVGAIYREVVSGETIADRPVMQQLLHEVESGMWDGVLVVEVERLARGDTIDQGVVSRAFQYSDTKIITPTKIYDPNNEFDEEYFEFGLFMSRREYKTIKRRLNVGRISSVKEGKYCGNKPPYGYERVKLEKEKGYTLRPVPTQAEIVKMIYTWYAGDGCEQIGIAKIARKLNEMGIESALGGDWTPASIQGILTNPVYIGKIRWNGRKTVKTIQNGQVIKARPRSKDTLICDGLHPAIISEDLYNSVQEIRKKNPPRPVSIANSIRNPLAGIVYCSKCGRAMVRRPYQKRGQEDTLMCPYTSCPTVSSKLSLVEKSVINGIKEIVEEYKLNNDINISSKAIDCGITSKQNLIHEKENELESLNAQKAKQYDLLEQGIYTTEVFLERAKTISASIQSCSDTIEKLKEEIKHDENIIKQQSDFIPRCEELLDNYWSLDTESKNRMLKSLIEKVTYSKDAKNAYGKGNEIGFQLDIFPKIQKNN

SEQ ID NO: 3937 - protein, 524 aa, Unknown
  Description of Unknown: Integrase B3938 sequence
  SM00857,G3DSA:1.10.10.2600,IPR036162,PF13408, IPR025827,PS51737,G3DSA:3.40.50.1390,IPR006119, IPR038109,PF07508,IPR011109,SSF53041, PTHR30461,Coil,PS51736,cd00338,PF00239
MNESVCIYLRKSRADREAEAHGEGETLARHEHILLDLAKRQGYSIGAIYREVVSGETISARPVMQKLLHEVESGMWDGVLVVEVERLARGDTIDQGVVSRAFQYSDTKIITPTKIYDPNNEFDEEYFEFGLFMSRREYKTIKRRLNNGRISSVKEGKYCGNKPPYGYERVKLEKEKGYTLRPVPVQAEIVKMIYTWYAGDGCEQIGVAKIVRKLNDMGIKSALGGDWTPASIQGILTNPVYIGKIRWNGRKTVKTIQNGQVVKTRPRSRDVLICEGLHPAIISEDLYNSAQEIRQKNPPRPISIKNTVRNPLAGIVYCSKCGRAMVRRPHQKRGQEDTLMCPYTSCSTVSSKLSLVEKAVIDGIKEITEKYKLNNDINVSSNTINSGIVSKQNLIREKESELESLNAQKVKQYDLLEQGIYTTEVFLERSKTIAISIQSCSDTITKLREEIEHDENIKAKQSDFIPRCEELLNNYWSLDVESRNRMLKNLVEKVVYSKNIKNTYGKGNEINFELDIFPKIQKND

SEQ ID NO: 3938 - protein, 524 aa, Unknown
  Description of Unknown: Integrase B3939 sequence
  SM00857,G3DSA:1.10.10.2600,IPR036162,PS51737,G3DSA:3.40.50.1390, IPR006119,IPR038109,PF07508,SSF53041,IPR011109, PTHR30461,Coil,PS51736,cd00338,PF00239
MNESVCIYLRKSRADREAEAHGEGETLARHERILLDLAKKKEYIVGAIYREVVSGETIADRPVMQQLLHEVESGMWDGVLVVEVERLARGDTIDQGVVSRAFQYSDTKIITPTKIYDPNNEFDEEYFEFGLFMSRREYKTIKRRLNAGRISSVKEGKYCGNKPPYGYERVKLEKEKGYTLRPIPAQSEIVKMIYTWYSGDGCEQIGVAKIARKLNEMGIESALGGDWTPASIQGILTNPVYIGKIRWNGRKTVKTIQNGQVIKTRPRSKDTLICNGLHPAVISEDLYNSVQEIRKKNPPRPVSIANSIRNPLAGIVYCSKCGRAMVRRPYQKRRQEDTLMCPYTSCPTVSSKLSLVEKSVIDGIREIVEEYKLNNDINASSKDIDCVITSKQNLIHEKENELESLNSQKAKQYDLLEQGIYTTEIFLERAKTISASIQSCSDTIEKLKEEIKHDENIIKQRSDFIPRCEELLDNYWSLDTESKNKMLKSLIEKVVYSKDTKNAYGKGNEIGFQLDIFPKIQKNN

SEQ ID NO: 3939 - protein, 524 aa, Unknown
  Description of Unknown: Integrase B3940 sequence
  PTHR30461:SF3,cd00338,SM00857,G3DSA:1.10.10.2600,IPR036162, PF13408,PS51737,G3DSA:3.40.50.1390,IPR025827,IPR006119, IPR038109,PF07508,IPR011109,SSF53041, PTHR30461,PS51736,Coil,PF00239
MCAKKKPAMLEPDMQDAVIYTRYSSHNQRDCSIEQQVADCEIFARQNNLRVVKVYADRHLSGTTDNRPQFQQMLKDAAHGHWAYVICWKIDRFARNRYDSATYKFRLKKAGVRVLYAKESIPDGPEGILLESVLEGSAEYYSAALAQNIRRGMKFNAEQCKVNSGSIPFGYCKGPDGRFAIHEANAEVVREIFRKAAAGMPFVDIANDLNSRGLKTSRGGRWNKGSFRLLMNEAYIGVYHFSDTRIEGGMPALIDQGTFWAANERLKANSSVRGRHQDGGDYLLTGKLKCAHCGSYMIGFSGTGKSGELHYYYGCQKRRRERACKKANVPREWIERVVVKAALDYVLRPDVMEWIADAVMEYQEREAASAQLAALIAELEENQKATDNVMKAIEAGIITSTTKQRLLDLEAKAQDLKRAIELEKLSHVRLERDQVLFWLDRFRGGSLQSQEFRRKVIDAFVSVVYLSDDHLRIAFNYSGGSNAEADFDLVMDAEAAACELSKKFAQGHVTSTIRSADEPSKENE

SEQ ID NO: 3940 - protein, 524 aa, Unknown
  Description of Unknown: Integrase B3941 sequence
  cd00338,SM00857,G3DSA:1.10.10.2600,IPR036162,PF13408, PS51737,G3DSA:3.40.50.1390,IPR025827,IPR006119,IPR038109, PF07508,IPR011109,SSF53041,PTHR30461,PS51736, Coil,PF00239
MNESVCIYLRKSRADREAEAHGEGETLARHERILLDLAKKKEYIVGAIYREVVSGETIADRPVMQQLLHEVESGMWDGVLVVEVERLARGDTIDQGVVSRAFQYSDTKIITPTKIYDPNNEFDEEYFEFGLFMSRREYKTIKRRLNAGRISSVKEGKYCGNKPPYGYERVKLEKEKGYTLRPVPAQAEIVKMIYTWYAGDGCEQIGVAKIARKLNEMGIESALGGDWTPASIQGILTNPVYIGKIRWNGRKTVKTIQNGQVIKTRPRSKDTLICDGLHPAIISEDLFNSVQEIRKKNPPRPVSIANSIRNPLAGIVYCSKCGRAMVRRPYQKRGQEDTLMCPYTSCPTVSSKLPLVEKAVIDGIREIVEEYKLNNDINISSKDIDCGITSKQNLIHEKENELKNLNSQKAKQYDLLEQGIYTTEVFLERAKTISASIQSCSDTIEKLKEEIKHDENIIKQRSDFIPRCEELLDNYWSLDTESKNKMLKSLIEKVVYSKDTKNAYGKGNEIGFQLDIFPKIQKNN

SEQ ID NO: 3941 - protein, 524 aa, Unknown
  Description of Unknown: Integrase B3942 sequence
  SM00857,G3DSA:1.10.10.2600,IPR036162,PF13408,PS51737, IPR025827,G3DSA:3.40.50.1390,IPR006119,IPR038109,PF07508, IPR011109,SSF53041,PF00239,PTHR30461,PS51736, Coil,cd00338
MSLENVCIYLRKSRADREAEARGEGETLARHERILLDLARSRNYNVGAIYREIVSGETISARPVMQQLLREVEAGSWDGVLVVEVERLARGDTIDQGVVSRAFQFSDTKIITPTKTYDPDNEFDEEYFEFGLFMSRREYKTIKRRLNAGRISSVKEGKYCGSRPPYGYERVKLRGEKGFTLQPVPEQAEVIKMIYSLYSGASGDRIGVSKIVRKLNDMGIKSPSGKDWVPISVQDVLANPVYAGMIRWNGRKTVKAIQDGVVTQSRPRSKEDDILLFPGRHPAIVSKEMYDSVQQIRKKNPPRPISIKNTIKNPLAGIVYCSKCGRAMVRRPYQKRGQDDTLMCSYTSCPTVSSKLSLVERAVLNGIQDLVDEYRLNDAVPGPDINNAVKSKEKLIAEKEHELEKLNVQKMKQYDLLEQGIYTTEVFLERSNSIASSINSCQDSIECLKEEIRHDKELIDQQSSFIPRCENLLEIYWSLDTAAKNKMLKELIERVNYTKDVKNAFRMGNEATFVLDIFPRIQSN

SEQ ID NO: 3942 - protein, 524 aa, Unknown
  Description of Unknown: Integrase B3943 sequence
  cd00338,SM00857,G3DSA:1.10.10.2600,IPR036162,PF13408, PS51737,G3DSA:3.40.50.1390,IPR025827,IPR006119,IPR038109, PF07508,SSF53041,IPR011109,PTHR30461,PS51736, Coil,PF00239
MNESVCIYLRKSRADREAEAHGEGETLARHERILLDLAKKKEYTVGAIYREVVSGETIADRPVMQQLLHEVESGMWDGVLVVEVERLARGDTIDQGIVSRAFQYSDTKIITPTKIYDPNNEFDEEYFEFGLFMSRREYKTIKRRLNAGRISSIKEGKYCGNKPPYGYERVKLEKEKGYTLRPIPAQSEIVKMIYTWYAGDGCEQIGVAKIVRKLNEMGIESALGGDWTPASIQGILTNPVYIGKIRWNGRKTVKTIQTGQVIKTRPRSKDTLICNGLHPAVISEDLYNSVQEIRKKNPPRPVSIANSIRNPLAGIVYCSKCGRAMVRRPYQKRGQEDTLMCPYTSCPTVSSKLSLVEKAVLDGIREIVEKYKLNNDINTSSQAIDLTIISKQNLIHEKENELESLNAQKAKQYDLLEQGIYTTEVFLERAKTISASIQSCSDTIEKLKEEIKHDENIIKQQSDFIPRCEELLDNYWSLDTESKNKMLKSLIEKVAYSKDTKNAYGKGNEIGFQLDIFPKIQKNN

SEQ ID NO: 3943 - protein, 524 aa, Unknown
  Description of Unknown: Integrase B3944 sequence
  SM00857,G3DSA:1.10.10.2600,IPR036162,PS51737,G3DSA:3.40.50.1390, IPR006119,IPR038109,PF07508,IPR011109,SSF53041, PTHR30461,Coil,PS51736,cd00338,PF00239
MNESVCIYLRKSRADREAEAHGEGETLARHERILLDLAKKKEYIVGAIYREVVSGETIADRPVMQQLLHEVESGMWDGVLVVEVERLARGDTIDQGIVSRAFQYSDTKIITPTKIYDPNNEFDEEYFEFGLFMSRREYKTIKRRLNAGRISSVKEGKYCGNKPPYGYERVKLEKEKGYTLRPVPTQSEIVKMIYTWYAGDGCEQIGVAKIARKLNEMGIESALGDDWTPASIQGILTNPVYIGKIRWNGRKTVKTIQNGQVIKTRPRSKDTLICDGLHSAIISDDLFNSVQEIRKKNPPRPVSIANSIRNPLAGIVYCSKCGRAMVRRPYQKRGQEDTLMCPYTSCHTVSSKLPLVEKSVIDGIREIVEEYKLNNDINTSSKAIDCGITSKQNLIHEKENELESLNAQKAKQYDLLEQGIYTTEIFLERAKTISASIQSCSDTIEKLKEEIKHEQNIIKQQSDFIPRCEELLDNYWSLDTESKNKMLKSLIEKVTYSKDTKNAYGKGDEISFRLDIFPRIQKKS

SEQ ID NO: 3944 - protein, 524 aa, Unknown
  Description of Unknown: Integrase B3945 sequence
  cd00338,SM00857,G3DSA:1.10.10.2600,IPR036162, PF13408,PS51737,IPR025827,G3DSA:3.40.50.1390, IPR006119,IPR038109,PF07508,IPR011109, SSF53041,PTHR30461,PS51736,Coil,PF00239
MNESVCIYLRKSRADREAEAHGEGETLARHQRILLDLAKKKEYIVGAIYREVVSGETIADRPVMQQLLHEVESGMWDGVLVVEVERLARGDTIDQGVVSRAFQYSDTKIITPTKIYDPNNEFDEEYFEFGLFMSRREYKTIKRRLNAGRISSVKEGKYCGNKPPYGYERIKLAREKGYTLRPVPAQAEIVKMIYTWYAGDGCEQIGVAKIVRKLNDMGIKSALGGDWTPASIQGILTNPVYIGKIRWNGRKTVKTIQNGQVVKTRPRSRNVLICEGLHPSIISDDLYNSVQEIRQKNPPRPISIKNTVRNPLAGIVYCSKCGRAMVRRPHQKHGQEDTLMCPYTSCPTVSSKLSLVEKAVLDGIKEITEKYKLNNDINVPYNTINSGIVSKQNLIREKESELESLNVQKAKQYDLLERGIYTTEVFLERSKTIARSIQSCSDIITKLREEIEHDENIKAQQSNFIPRCEELLNNYWDLNIESRNRMLKNLVEKVVYSKNIKNTYGKGNEINFELDIFPKIQKND

SEQ ID NO: 3945 - protein, 524 aa, Unknown
  Description of Unknown: Integrase B3946 sequence
  PTHR30461:SF3,SM00857,G3DSA:1.10.10.2600,IPR036162,PF13408, IPR025827,G3DSA:3.40.50.1390,PS51737,IPR006119,IPR038109, PF07508,IPR011109,SSF53041,PTHR30461,PS51736, cd00338,PF00239
MNKLRAAAYCRVSTDRAEQSGSLASQRSFFDDYIRNSDSMTLVGVFYDEGTSGTTTLNRYGFNKMISLAVSGGIDIILTKEVSRFARNTVDTLNITRMLRAKGVGIIFINDNIDTRDSDGELRLSIMATIAQEESRKISERVKWGQQRKMEQGVVFGRSCLGYDVKDGKITVNADSAEIVKRIFTEYTVLLKGAESIADGLNAEQIRTVNGGRWSGAFIRKVLRNVKYVGDLEQKKTCTPDFLTHKKRLNRSEHIYIRNHHEPIISRELWEQTQAEISRRKPTDTSRHSDRYVFSGKVYCGVCGSVMVSRVKTLKNGKIYHALRCSGRIGGKSCNNETLNVTALKACVKRIFTDMPIDKTAVINAVIKGLSRTDKPDIPALRRKIETLNAKKRRAVDLMLDGLITQQELIEQKSYYDSIIEKLSQEISSDRSVFETDKIRKNAERFLDFTSDPLWLLVIRADYIHGTLTVYLKGIEKGFTTCFTATGRGDSYRVITGNTVRSQGIIPGTMQVQKNWFRHDVNDK

SEQ ID NO: 3946 - protein, 524 aa, Unknown
  Description of Unknown: Integrase B3947 sequence
  SM00857,G3DSA:1.10.10.2600,IPR036162,PF13408,PS51737, G3DSA:3.40.50.1390,IPR025827,IPR006119,IPR038109,PF07508, IPR011109,SSF53041,PF00239,PTHR30461,PS51736, Coil,cd00338
MNESVCIYLRKSRADREAEAHGEGETLARHQRILLDLAKKKEYIVGAIYREVVSGETIADRPVMQQLLHEVESGMWDGVLVVEVERLARGDTIDQGVVSRAFQYSDTKIITPTKIYDPNNEFDEEYFEFGLFMSRREYKTIKRRLNAGRISSVKEGKYCGNKPPYGYERVKLEKEKGYTLRPVPDQAEIVKMIYTWYAGDGCEQIGVAKIARKLNEMGIESALGGDWTPASIQGILTNPVYIGKIRWNGRKTVKTIQDGQVIKTRPRSKDTLICDGLHPAIISEDLYNSVQEIRKKNPPRPISIKNSIRNPLSGIVYCSKCGRVMVRRPYQKRGQEDTLMCPYTSCPTVSSKLSLVEKAVLDGIREIVEEYKLNNDINTSSKAIDCGITSKQNLIHEKENELESLNAQKAKQYDLLEQGIYTTEVFLERAKTIAASIQSCSATIEKLKEEIKHEQNIIKQQSDFIPRCEELLDNYWSLDTESKNKMLKSLIEKIAYSKDNKNAYGKGNEINFQLDIFPKIQKNN

SEQ ID NO: 3947 - protein, 524 aa, Unknown
  Description of Unknown: Integrase B3948 sequence
  cd00338,SM00857,G3DSA:1.10.10.2600,IPR036162,PF13408, PS51737,G3DSA:3.40.50.1390,IPR025827,IPR006119,IPR038109, PF07508,IPR011109,SSF53041,PTHR30461,PS51736, Coil,PF00239
MSLENVCIYLRKSRADREAEARGEGETLARHERILLDLARSRNYNVGAIYREIVSGETISARPVMQQLLREVEAGSWDGVLVVEVERLARGDTIDQGVVSRAFQFSDTKIITPAKTYDPDNEFDEEYFEFGLFMSRREYKTIKRRLNAGRIASVKEGKYCGSRPPYGYERVKLRGEKGFTLQPVPEQAEVIKMIYSLYSGSSGDRIGVSKIVRKLNDMGIKSPSGKDWVPISVQDVLANPVYAGMIRWNGRKTVRAIQDGVVTQSRPRSKEDDILLFPGRHPAIVSKEMYDSVQQIRKKNPPRPISIKNTIKNPLAGIVYCSNCGRAMVRRPYQKRGQDDTLMCSYTSCPTVSSKLSLVERAVLNGIQDLVDEYRLNDTVPGPDINNAVKSKEKLIAEKEHELEKLNVQKMKQYDLLEQGIYTTEVFLERSNSIASSINSCQDSIECLKEEIRHDKELIDQQSSFIPRCENLLEIYWSLDTAAKNKMLKELIERVNYTKDVKNAFRMGNEATFVLDIFPRIQSN

SEQ ID NO: 3948 - protein, 524 aa, Unknown
  Description of Unknown: Integrase B3949 sequence
  PTHR30461:SF3,cd00338,SM00857,G3DSA:1.10.10.2600,IPR036162, PF13408,PS51737,IPR025827,G3DSA:3.40.50.1390,IPR006119, IPR038109,PF07508,IPR011109,SSF53041,PTHR30461, PS51736,Coil,PF00239
MRAFIYCRFSSHKQQELSIEGQRDICQEYADKHNITVVGQYADRARSGKTENRADFRRLMRDAATGVVDCVLVWRYDRFFRNRAESALYRKQLEAAGVHLISVTEYIPEGSAGIITQGMIETVAEYFSAKLSEDVSRGMNKAAQHCQIVGRAPLGYRAGPNKRWQIDPVGAELVRRIFEWYASGKAMGQLAAQLNEEDHRTTNGTLYTRSSFNSILRNEKYIGVYSYGGEVRIEGGCPRIIEDELFFTVQRRLSANRHRPGAYKAEVPYLLSGKLFCGLCGAPMTGTAGTSHTGARHYYYICNNRRAKTCKKKNVRLDLIEEAVLQSALDILTDENIAYISAEVERRCAENSDSAALLASLNAQLEEVQRRLKNIGNAIAQGIITETTKELLEEAEADRTALRQQIDRAKVQAALVVKAEAVACWLDGFRRGDRTDPDFRRQVFGALVHSVFVYDDYLKIIFNVDSAGAAVVPYEAAQAATPSEAPPGSYLDTLGAPKKALRKRKAFFIMIAALCECFHFAADF

SEQ ID NO: 3949 - protein, 524 aa, Unknown
  Description of Unknown: Integrase B3950 sequence
  PTHR30461:SF3,SM00857,G3DSA:1.10.10.2600,IPR036162,PF13408, PS51737,G3DSA:3.40.50.1390,IPR025827,IPR006119,IPR038109, PF07508,IPR011109,SSF53041,PTHR30461,Coil, PS51736,cd00338,PF00239
MNKLRAAAYCRVSTDRAEQSGSLASQRSFFDDYIRNSDSMTLVGVFYDEGTSGTTTLNRYGFNKMISLAVSGGIDIILTKEVSRFARNTVDTLNITRMLRAKGVGIIFINDNIDTRDSDGELRLSIMATIAQEESRKISERVKWGQQRKMEQGVVFGRSCLGYDVKDGKITVNADSAEIVKRIFTEYTVLLKGAESIADRLNAEQIRTVNGGRWSGAFIRKVLRNVKYVGDLEQKKTCTPDFLTHKKRLNSSEHIYIRNHHEPIISRELWEQTQAEISRRKPTDTSRHSDRYVFSGKVYCGVCGSVMVSRVKTLKNGKIYHALRCSGRIGGKSCNNETLNVTALKACVKRIFTDMPIDKTAVINAVIKGLSRTDKPDIPALRRKIETLNAKKRRAVDLMLDGLITQQELIEQKSYYDSIIEKLSQEISSDRSVFETDTIRKNAERFLDFTSDPIWLLVIRADYIHGTLTVYLKGVEKGFTTCFTATGRGDSYRVITANTVRSQGIIPGMMQVQKNWFRHDVNDK

SEQ ID NO: 3950 - protein, 524 aa, Unknown
  Description of Unknown: Integrase B3951 sequence
  SM00857,G3DSA:1.10.10.2600,IPR036162,PS51737,G3DSA:3.40.50.1390, IPR006119,IPR038109,PF07508,IPR011109,SSF53041, PTHR30461,PS51736,cd00338,PF00239
MLKYNSETNLDSDIDSDIDKYAIYLRKSRADLEAEKIGDGETLARHKKILTDLAARKGLYVSKIYEEIISGETIEARPEIQKLIQDCYDGKYRGILVVEVTRLSRGNQGDAQTIMDCLKYSNYNKGLLIVTPTKTYDIVHSQEDEEYMEFELFMSRREYKMIKKRLERGRMQAIVEGNYMASHRPYGYNIVKTKTGRTLIPNKDEAPIVKLIFDLAADNVPLLTIARHLKDMGVPTYNGDYYWSRVSVKRILENPVYIGKVRWNNRTTIKTMVDGKIETRLTTLNKNHYMEYDGKHKKYALTDEETFAKVNSRLTETRTKYDYKLVNPLAGLLRCKKCGRVMNLRTYDSRKYNVSPRYNHDGSPYCKLSSVMYTDVIDTLIRALELYIEDFKIEINNDFQHDDTNIQMQIQTLKREETKLKQKITKLFDSWENGILNDNEFIERKVINNESLENIQRQIRDLEKSIPEKIDYKEKIILLSNAVESLRDDTVSAKIKNDYLKEIISTIEYSRERPGEFILDIELL

SEQ ID NO: 3951 - protein, 524 aa, Unknown
  Description of Unknown: Integrase B3952 sequence
  cd00338,SM00857,G3DSA:1.10.10.2600,IPR036162, PF13408,PS51737,G3DSA:3.40.50.1390,IPR025827, IPR006119,IPR038109,PF07508,IPR011109, SSF53041,PTHR30461,PS51736,Coil,PF00239
MNESVCIYLRKSRADREAEAHGEGETLARHERILLDLAKKKEYIVGAIYREVVSGETIADRPVMQQLLHEVESGMWDGVLVVEVERLARGDTIDQGIVSRAFQYSDTKIITPTKIYDPNNEFDEEYFEFGLFMSRREYKTIKRRLNAGRISSVKEGKYCGNKPPYGYERVKLEKEKGYTLRPVPTQAEIVKMIYTWYAGDGCEQIGVAKIARKLNEMGIESALGGDWTPASIQGILTNPVYIGKIRWNGRKTVKTIQTGQVIKTRPRSKDTLICNGLHPAVISEDLYNSVQEIRKKNPPRPVSIANSIRNPLAGIVYCSKCGRAMVRRPYQKRGQEDTLMCPYTSCPTVSSKLSLVEKAVLDGIREIVEKYKLNNDINTSSQAIDLTIISKQNLIHEKENELESLNAQKAKQYDLLEQGIYTTEVFLERAKTISASIQSCSDTIEKLKEEIKHYENIIKQQSDFIPRCEELLDNYWSLDTESKNKMLKSLIEKVAYSKDTKNAYGKGNEIGFQLDIFPKIQKNN

SEQ ID NO: 3952 - protein, 524 aa, Unknown
  Description of Unknown: Integrase B3953 sequence
  cd00338,SM00857,G3DSA:1.10.10.2600,IPR036162,PF13408, PS51737,G3DSA:3.40.50.1390,IPR025827,IPR006119,IPR038109, PF07508,SSF53041,IPR011109,PTHR30461,PS51736, Coil,PF00239
MNESVCIYLRKSRADREAEAHGDGETLARHERILLDLAKKKAYTVGAIYREVVSGETISARPVMQQLLHEVESGMWDGVLVVEVERLARGDTIDQGVVSRAFQYSDTKIITPTKIYDPNNEFDEEYFEFGLFMSRREYKTIKRRLNAGRISSVKEGKYCGNKPPYGYERVKLEKEKGYTLRPVPDQANIVKMIYTWYAGDGCEQIGVAKIARKLNDMGIKSALGSDWTPASIQGILTNPVYIGKIRWNGRKVVKTVQNGQVVKTRPRSKDVLVCDGLHPAIISENLFNSVQEIRQKNPPRPISIKNTVRNPLAGIVYCSKCGRAMVRRPYQKSGQEDSLLCPYTSCSTVSSKLSLVEKAVIDGIEEIVEKYKLNNDINVSSESISSGISSKQNLINEKEKELESLNAQKAKQYDLLEQGIYTTEVFLERAKTIATSIQACSSTIEKLKEEIKHDENLMEQQSDFIPRCEELLDNYWSLDTESKNKMLKSLIEKVVYSKDTKNAYGKGNEVSFQLDIFPKIQKEN

SEQ ID NO: 3953 - protein, 524 aa, Unknown
  Description of Unknown: Integrase B3954 sequence
  SM00857,G3DSA:1.10.10.2600,IPR036162,PS51737,G3DSA:3.40.50.1390, IPR006119,IPR038109,PF07508,IPR011109,SSF53041, PTHR30461,Coil,PS51736,cd00338,PF00239
MNESVCIYLRKSRADREAEAHGEGETLARHERILLDLAKKKEYIVGAIYREVVSGETIADRPVMQQLLHEVESGMWDGVLVVEVERLARGDTIDQGVVSRAFQYSDTKIITPTKIYDPNNEFDEEYFEFGLFMSRREYKTIKRRLNAGRISSVKEGKYCGNKPPYGYERVKLEKEKGYTLRPVPTQAEIVKMIYTWYAGDGCEQIGIAKIARKLNEMGIESALCGDWTPASIQGILTNPVYIGKIRWNGRKTVKTIQNGHVVKTRPRSKDVLVCEGLHPAIISEVLYDSVQEIRKKNPPRPVSIANSIRNPLAGIVYCSKCGRAMVRRPYQKRGQEDTLMCPYTSCPTVSSKLSLVEKSVLDGIREIAEEYKLNNDINTSSKAIDCGITSKQNLIHEKENELESLNAQKAKQYDLLEQGIYTTEVFLERAKTIAASIQSCSDTIEKLKEEIKHDENIIKQQSDFIPRCEELLDNYWSLDTESKNKMLKSLIEKVVYSKDNKNAYGKGNEIGFQLDIFPKIQKNN

SEQ ID NO: 3954 - protein, 524 aa, Unknown
  Description of Unknown: Integrase B3955 sequence
  PTHR30461:SF3,SM00857,G3DSA:1.10.10.2600,IPR036162,PF13408, IPR025827,PS51737,G3DSA:3.40.50.1390,IPR006119,IPR038109, PF07508,IPR011109,SSF53041,PTHR30461, PS51736,cd00338,PF00239
MNKLRAAAYCRVSTDRAEQSGSLASQRSFFDDYIRNSDSMTLVGVFYDEGTSGTTTLNRYGFNKMISLAVSGGIDIILTKEVSRFARNTVDTLNITRMLRSKGVGIIFINDNIDTRDSDGELRLSIMATIAQEESRKISERVKWGQQRKMEQGVVFGRSCLGYDVKDGKITINADSAEIVKRIFTEYTVLLKGAESIADGLNAEQIRTVNGGRWSGAFIRKVLRNVKYVGDLEQKKTCTPDFLTHKKRLNRSEHIYIRNHHEPIISRELWEQTQAEISRRKPTDTSRHSDRYVFSGKVYCGVCGSVMVSRVKTLKNGKIYHALRCSGRIGGKSCNNETLNVIALKACVKRIFTDIPIDKTAVINAVIKGLSRTDKPDIPALRRKIETLNAKKRRTVDLMLDGLITQQELIEQKSYYDSIIEKLSQEISSDRSVFETDKIRKNAERFLDFTSDPIWLLVIRADYIHGTLTVYLKGIEKGFTTCFTATGRGDSYRVITGNTVRSQGIIPVTMQVQKNWFRHDVNDK

SEQ ID NO: 3955 - protein, 524 aa, Unknown
  Description of Unknown: Integrase B3956 sequence
  cd00338,SM00857,G3DSA:1.10.10.2600,IPR036162,PF13408, IPR025827,G3DSA:3.40.50.1390,PS51737,IPR006119,IPR038109, PF07508,SSF53041,IPR011109,PTHR30461,PS51736, Coil,PF00239
MNESVCIYLRKSRADREAEAHGEGETLARHERILLELAKKKEYIVGAIYREVVSGETIADRPVMQQLLREVESGMWDGVLVVEVERLARGDTIDQGVVSRAFQYSDTKIITPTKIYDPNNEFDEEYFEFGLFMSRREYKTIKRRLNAGRISSVKEGKYCGNKPPYGYERVKLTREKGYTLRPVPAQAEIVKMIYTWYAGDGCEQIGVAKIARKLNEMGIESALGGDWTPASIQGILTNPVYIGKIRWNGRKTVKTIQTGQVIKTRPRSKDTLICNGLHPAVISEDLYNSVQEIRKKNPPRPVSIANSIRNPLAGIVYCSKCGRAMVRRPYQKRGQEDTLMCPYTSCPTVSSKLSLVEKAVLDGIREIVEKYKLNNDINTSSQAIDLTIISKQNLIHEKENELESLNAQKAKQYDLLEQGIYTTEVFLERAKTISASIQSCSDTIEKLKEEIKHDENIIKQQSDFIPRCEELLDNYWSLDTESKNKMLKSLIEKVAYSKDTKNAYGKGNEIGFQLDIFPKIQKNN

SEQ ID NO: 3956 - protein, 524 aa, Unknown
  Description of Unknown: Integrase B3957 sequence
  SM00857,G3DSA:1.10.10.2600,IPR036162,PS51737,G3DSA:3.40.50.1390, IPR006119,IPR038109,PF07508,IPR011109,SSF53041, PTHR30461,Coil,PS51736,cd00338,PF00239
MNESVCIYLRKSRADREAEAHGEGETLARHERILLDLAKKKEYIVGAIYREVVSGETIADRPVMQQLLHEVESGMWDGVLVVEVERLARGDTIDQGVVSRAFQYSDTKIITPTKIYDPNNEFDEEYFEFGLFMSRREYKTIKRRLNAGRISSVKEGKYCGNRPPYGYERVKLEKEKGFTLRPVPDQAEIVKMIYAWYAGDGCEQIGVAKIVRKLNEMGIESALGDDWTPATIQGILTNPVYIGKIRWNGRKTVKTIQNGQVIKTRPRSKDTLICNGLHPAIIPEDLYDSVQEIRKKNPPRPVSIASSIRNPLAGIVYCSKCGRAMVRRPYQKRGQEDSLLCPYTSCPTVSSKLSLVEKSVLDGIREIVEEYKLNNDINTSSKAIDCGITSKQNLIHEKENELESLNSQKAKQYDLLEQGIYTTEVFLERAKTIAASIQSCSDTIEKLKEEIKHDENIIKQQSDFIPRCEELLDNYWSLDTESKNKMLKSLIEKVTYSKYTKNAYGKGNEIGFQLDIFPKIQKNN

SEQ ID NO: 3957 - protein, 524 aa, Unknown
  Description of Unknown: Integrase B3958 sequence
  SM00857,G3DSA:1.10.10.2600,IPR036162,PF13408, IPR025827,PS51737,G3DSA:3.40.50.1390,IPR006119, IPR038109,PF07508,IPR011109,SSF53041, PTHR30461,Coil,PS51736,cd00338,PF00239
MNESVCIYLRKSRADREAEAHGEGETLARHEHILLDLAKRQGYSIGAIYREVVSGETISARPVMQRLLHEVESGMWDGVLVVEVERLARGDTIDQGVVSRAFQYSDTKIITPAKIYDPNNEFDEEYFEFGLFMSRREYKTIKRRLNNGRISSVKEGKYCGNKPPYGYERVKLEKEKGYTLRPVPAQAEVVKMIYTWYAGDGCEQIGVAKIVRKLNGMRIESALGSDWTPASIQGILTNPVYIGKIRWNGRKTVKTIQNGQVVKTRPRSRDVLICEGLHPAIISDDLYNSVQEIRQKNPPRPISIKSTVRNPLAGIVYCSKCGRAMVRRPYQKRGQEDTLLCPYTSCSTVSSKLSLVEKAVIDGIEEIAEEYKLNNDIDISSKDIDFGITSKQNLIHEKESELERLNNQKAKQYDLLEQGIYTTEVFLERSKAIAESVQACSDTIEKLREEISHDKTIIEQQSAFVPRCEELLNNYWSLDTESKNKMLKSLIEKVIYTKDTKNTYGHSNEINFELDIFPKIQKNN

SEQ ID NO: 3958 - protein, 524 aa, Unknown
  Description of Unknown: Integrase B3959 sequence
  SM00857,G3DSA:1.10.10.2600,IPR036162,PF13408,PS51737, G3DSA:3.40.50.1390,IPR025827,IPR006119,IPR038109,PF07508, IPR011109,SSF53041,PF00239,PTHR30461,PS51736, Coil,cd00338
MNESVCIYLRKSRADREAEAHGEGETLARHERILLDLAKKKEYIVGAIYREVVSGETIADRPVMQQLLHEVESGMWDGVLVVEVERLARGDTIDQGVVSRAFQYSDTKIITPTKIYDPNNEFDEEYFEFGLFMSRREYKTIKRRLNAGRISSIKEGKYCGNKPPYGYERVKLEKEKGYTLRPVPAQAEIVKMIYTWYAGDGCEQIGVAKIARKLNEMGIESALGGDWTPASIQGILTNPVYIGKIRWNGRKTVKTIQNGQVIKTRPRSKDTLICDGLHPAIISEDLFNSVQEIRKKNPPRPVSIANSIRNPLAGIVYCSKCGRAMVRRPYQKRGQEDTLMCPYTSCPTVSSKLPLVEKAVIDGIREIVEEYKLNNDINISSKDIDCGITSKQNLIHEKENELKNLNSQKAKQYDLLEQGIYTTEVFLERAKTISASIQSCSDTIEKLKEEIKHDENIIKQRSDFIPRCEELLDNYWSLDTESKNKMLKSLIEKVVYSKDTKNAYGKGNEIGFQLDIFPKIQKNN

SEQ ID NO: 3959 - protein, 524 aa, Unknown
  Description of Unknown: Integrase B3960 sequence
  cd00338,SM00857,G3DSA:1.10.10.2600,IPR036162,PF13408, IPR025827,PS51737,G3DSA:3.40.50.1390,IPR006119,IPR038109, PF07508,SSF53041,IPR011109,PTHR30461,PS51736, Coil,PF00239
MNAVIYARYSSDKQTEQSIEGQLREGYAYAERAGMTIVGAYIDRAISGTSDQRPDFQRMIADSAKRQFEAVIVWKLDRFARNRYDSAIYKSKLKKNGVRVFSVTEGIGDGDESIILEAVLEAMAEMYSKQLGQNAARGMRETARKGLCTGGQIPLGYVVGEDHKLHIDSKTAPAVQLIYTLFADGKTKTQIAKELNARGFRTKNGKLYTSNSFFRILTNPMYYGDYTYKGDIPRECPAIISRALYDKCQERNEATKRSRGMKTSEVEWLLRGKLFCGHCGTQMTGDSGTGRANEKHYYYPCHKRKRYKDCDKKSEKKEQLERAVCQKTVEYVLREDRIGYIAERVVEQYEKEFDASIIKEKEMSLVKLDAELDKCAESLMHTTVRSVVDRINARAEELEAAKSELEHELAQLRITSKARITVDEIITFLRGFCSGDVEDIQFRRKIVDTFINAVYVFDDKYVVYYNVRDCKQVTYSDMLASIHAPSDMSAHGSDCLLYGEPLSNQSEHILIVSSCVFGLVMTKE

SEQ ID NO: 3960 - protein, 524 aa, Unknown
  Description of Unknown: Integrase B3961 sequence
  PTHR30461:SF3,SM00857,G3DSA:1.10.10.2600,IPR036162,PF13408, PS51737,G3DSA:3.40.50.1390,IPR025827,IPR006119,IPR038109, PF07508,IPR011109,SSF53041,PTHR30461,PS51736, cd00338,PF00239
MNKLRAAAYCRVSTDRAEQSGSLASQRSFFDDYIRNSDSMTLVGVFYDEGTSGTTTLNRYGFNKMISLAVSGGIDIILTKEVSRFARNTVDTLNITRMLRSKGVGIIFINDNIDTRDSDGELRLSIMATIAQEESRKISERVKWGQQRKMEQGVVFGRSCLGYDVKDGKITVNADSAKIVKRIFTEYTVLLKGAESIADGLNAEQIRTVNGGRWSGAFIRKVLRNVKYVGDLEQKKTCTPDFLTHKKRLNRSEHIYIRNHHEPIISRELWEQTQAEISRRKPTDTSRHSDRYVFSGKVYCGVCGSVMVSRVKTLKNGKIYHALRCSGRIGGKSCNNETLNVTALKACVKRIFTDIPIDKTAVINAVIKGLSRTDKPDIPALRRKIETLNAKKRRAVDLMLDGLITQQELIEQKSYYDSIIEKLSQEISSDRSVFETDKIRTNAERFLDFTSDPIWLLVIRAYYIHGTLTVYLKGIEKGFTTCFTATGRGDSYRVITGNTVRSQGIIPGTMQVQKNWFRHDVNDK

SEQ ID NO: 3961 - protein, 524 aa, Unknown
  Description of Unknown: Integrase B3962 sequence
  SM00857,G3DSA:1.10.10.2600,IPR036162,PS51737,G3DSA:3.40.50.1390, IPR006119,IPR038109,PF07508,SSF53041,IPR011109, PTHR30461,Coil,PS51736,cd00338,PF00239
MNESVCIYLRKSRADREDEAHGEGETLARHEHILLDLAKRQGYSIGAIYREVVSGETISARPVMQRLLHEVESGLWDGVLVVELERLARGDTIDQGVVSRAFQYSDTKIITPTKIYDPNNEFDEEYFEFGLFMSRREYKTIKRRLNAGRISSVKEGKYCGNKPPYGYERVKLEKEKGYTLRPVPTQAEIVKMIYTWYAGDGCEQIGVAKIARKLNEMGIESALGGDWTPASIQGILTNPVYIGKIRWNGRKTVKTIQNGQVIKTRPRSKDTLICNGLHPAIISEDLFNSVQEIRKKNPPRPISIKNSIRNPLAGIVYCSKCGRAMVRRPYQKRGQEDTLMCPYTSCPTVSSKLSLVEKSVIDGIREIVEEYKLNNDINTSSEAIDCGITSKQNLIHEKENELESLNAQKAKQYDLLEQGIYTTEVFLERAKTISASIQSCSDTIEKLKEEIKHDENIIKQRSDFIPRCEELLDNYLSLDTESKNKMLKSLIEKVTYSKDTKNAYGKGNEIGFQLDIFPKIQKNN

SEQ ID NO: 3962 - protein, 524 aa, Unknown
  Description of Unknown: Integrase B3963 sequence
  PTHR30461:SF3,SM00857,G3DSA:1.10.10.2600,IPR036162,PF13408, IPR025827,G3DSA:3.40.50.1390,PS51737,IPR006119,IPR038109, PF07508,IPR011109,SSF53041,PTHR30461, PS51736,cd00338,PF00239
MNKLRAAAYCRVSTDRAEQSGSLASQRSFFDDYIRNSDSMTLVGVFYDEGTSGTTTLNRYGFNKMISLAVSGGIDIILTKEVSRFARNTVDTLNITRMLRAKGVGIIFINDNIDTRDSDGELRLSIMATIAQEESRKISERVKWGQQRKMEQGVVFGRSCLGYDVKDGKITINADSAEIVKRIFTEYTVLLKGAESIADELNAEQIRTVNGGRWSGAFIRKVLRNVKYVGDLEQKKTCTPDFLTHKKRLNSSEHIYIRNHHEPIISRELWEQTQAEISRRKPTDTSRHSDRYVFSGKVYCGVCGSVMVSRVKTLKNGKIYHALRCSGRIGGKSCNNETLNVTALKACVKRIFTDIPIDKTAVINAVIKGLSRTDKPDIPALRRKIETLNAKKRRAVDLMLDGLITQQELIEQKSYYDSIIEKLSQEISSDRSVFETDKIRKNAERFLDFTSDPIWLLVIRADYIHGTLTVYLKGIEKGFTTCFTATGRGDSYRVITGNTVRSQGIIPGTMQVQKNRCRHDVNDK

SEQ ID NO: 3963 - protein, 524 aa, Unknown
  Description of Unknown: Integrase B3964 sequence
  PTHR30461:SF3,cd00338,SM00857,G3DSA:1.10.10.2600,IPR036162, PF13408,PS51737,G3DSA:3.40.50.1390,IPR025827,IPR006119, IPR038109,PF07508,SSF53041,IPR011109,PTHR30461, PS51736,Coil,PF00239
MLLLENLIMYLRKSRSDDISMSVEDVLAKHEGIIQEYCEREFGTRLPENRIFREVVSGETIADRPVMKEIMKLLETGTVKGVLVVEPQRLSRGDLEDCGRIINTFRYTGTLVITPQKTYDLTNEYDRKFFEMELTRGNDYLEYTKRILSRGREASVKQGNFIGSIAPYGYKKIVVGSGKDKYHSLEINPEEADAVRLMYALFINEGYGFAKIAHRLDELGFKPRSSENWQPAAIKDMLENPVYIGKIRWNWRKTQKRMANGEVVKVRPKTKDPSEWILVDGKHPAIISEELYNAALERRGKNPCVRKSLELTNPYAGLLFCGTCGRAMSQKRFINRRTHTQSVCDSMLCNNQANCHTKSVKYSAFEQRVIELLEDAIADFEIKLKDNNTNVIELHRGIIQKHMRELERLHEKDMRQKDAYEDGIYTKEEYIKRNALLQEQIAKTTSALEEAKTSAPKAIDYAEKIKRFNDCINALKDPDVSAPEKNTLLKNCVKRIDYYNEGESKPGVGRYVENVFELNMLLNM

SEQ ID NO: 3964 - protein, 524 aa, Unknown
  Description of Unknown: Integrase B3965 sequence
  cd00338,SM00857,G3DSA:1.10.10.2600,IPR036162,PF13408, PS51737,G3DSA:3.40.50.1390,IPR025827,IPR006119,IPR038109, PF07508,IPR011109,SSF53041,PTHR30461,PS51736, Coil,PF00239
MNESVCIYLRKSRADREAEAHGEGETLARHERILLDLAKKQDYSIGAIYREVVSGETIADRPVMQQLLHEIESGVWDGVLVVEVERLARGDTIDQGVVSRAFQYSDTKIITPTKIYDPNNEFDEEYFEFGLFMSRREYKTIKRRLNNGRISSVKEGKYCGNKPPYGYERVKLEKEKGYTLRPVPAQAEVVKMIYTWYAGDGCEQIGTSKIVRKLNDMGIKSMSGNNWTPASIQGILTNPVYIGKIRWNGRKTVKTIQDGQVVKTRPRSKDVLVCDGLHPAIISDDLYNSAQEIRKKNPPRPISIKSTVRNPLAGIVYCSKCGRAMVRRPYQKCGQEDTLMCPYTSCSTVSSRLSLVEKAVIDGIREIAEKYKLNNDINVLSSAINSGIVSKQNLIREKESELESLNVQKAKQYDLLEQGIYTTEVFLERSKTISASIQSCSDSIEKLKQEIKHDENLIEQQSDFIPRCEELLNNYWSLDTESKNKMLKSLIEKVIYSKDSKSAYGHGDEVNFELDIFPKIQENN

SEQ ID NO: 3965 - protein, 524 aa, Unknown
  Description of Unknown: Integrase B3966 sequence
  SM00857,G3DSA:1.10.10.2600,IPR036162,PF13408,IPR025827, G3DSA:3.40.50.1390,PS51737,IPR006119,IPR038109,PF07508, IPR011109,SSF53041,PF00239,PTHR30461,PS51736, Coil,cd00338
MSLENVCIYLRKSRADREAEARGEGETLARHERILLDLARSRNYNVGAIYREIVSGETISARPVMQQLLREVEAGSWDGVLVVEVERLARGDTIDQGVVSRAFQFSDTKIITPTKTYDPDNEFDEEYFEFGLFMSRREYKTIKRRLNAGRISSVKEGKYCGSRPPYGYERVKLRGEKGFTLQPVPEQAEVIKMIYSLYSGASGDRIGVSKIVRKLNDMGIKSPSGKSWVPISVQDVLANPVYAGMIRWNGRKTVRAIQDGVVTQSRPRSKEDDILLFPGRHPAIVSKEMYDSVQQIRKKNPPRPISIKNTIKNPLAGIVYCSKCGRAMVRRPYQKRGQDDTLMCSYTSCPTVSSKLSLVERAVLNGIQDLVDEYRLNDAVPGPDINNAVKSKEKLIAEKEHELEKLNVQKMKQYDLLEQGIYTTEVFLERSNSIASSINSCQDSIECLKEEIRHDKELIDQQSSFIPRCENLLEIYWSLDTAAKNKMLKELIERVNYTKDVKNAFRMGNEATFVLDIFPRIQSN

SEQ ID NO: 3966 - protein, 524 aa, Unknown
  Description of Unknown: Integrase B3967 sequence
  cd00338,SM00857,G3DSA:1.10.10.2600,IPR036162,PF13408, PS51737,G3DSA:3.40.50.1390,IPR025827,IPR006119,IPR038109, PF07508,SSF53041,IPR011109,PTHR30461,PS51736, Coil,PF00239
MNESVCIYLRKSRADREAEAHGEGETLARHERILLDLAKKKEYIVGAIYREVVSGETIADRPVMQQLLHEVESGMWDGVLVVEVERLARGDTIDQGVVSRAFQYSDTKIITPTKIYDPNNEFDEEYFEFGLFMSRREYKTIKRRLNAGRISSVKEGKYCGNKPPYGYERVKLEKEKGYTLRPVPTQAEIVKMIYTWYSGDGCEQIGVAKIARKLNEMGIESALGGDWTPASIQGILTNPVYIGKIRWNGRKTVKTIQTGQVIKTRPRSKDTLICDGLHPAIISEDLFNSVQEIRKKNPPRPVSIANSIRNPLAGIVYCSKCGRAMVRRPYQKRGQEDTLMCPYTSCPTVSSKLPLVEKAVIDGIREIVEEYKLNNDINISSKDIDCGITSKQNLIHEKENELKNLNSQKAKQYDLLEQGIYTTEVFLERAKTISASIQSCSDTIEKLKEEIKHDENIIKQRSDFIPRCEELLDNYWSLDTESKNKMLKSLIEKVVYSKDTKNAYGKGNEIGFQLDIFPKIQKNN

SEQ ID NO: 3967 - protein, 524 aa, Unknown
  Description of Unknown: Integrase B3968 sequence
  cd00338,SM00857,G3DSA:1.10.10.2600,IPR036162,PF13408, IPR025827,G3DSA:3.40.50.1390,PS51737,IPR006119,IPR038109, PF07508,SSF53041,IPR011109,PTHR30461,PS51736, Coil,PF00239
MSLENVCIYLRKSRADREAEARGEGETLARHERILLDLARSRNYNVGAIYREIVSGETISARPVMQQLLREVEAGSWDGVLVVEVERLARGDTIDQGVVSRAFQFSDTKIITPAKTYDPDNEFDEEYFEFGLFMSRREYKTIKRRLNAGRIASVKEGKYCGSKPPYGYERVKLHGEKGFTLQPVPEQAEVIKMIYSLYSGASGDRIGVSKIVRKLNDMGIKSPSGKSWVPISVQDVLANPVYAGMIRWNGRKTVRAIQDGVVTQSRPRSKEDDILLFPGRHPAIVSKEMYDSVQQIRKKNPPRPISIKNTIKNPLAGIVYCSKCGRAMVRRPYQKRGQDDTLMCSYTSCPTVSSKLSLVERAVLNGIQDLVDEYRLNDAVPGPDINNAVKSKKKLIAEKEHELEKLNVQKMKQYDLLEQGIYTTEVFFERSNSIASSINSCQDSIECLKEEIRHDKELIDQRSSFIPRCENLLEIYWSLDTAAKNKMLKELIERVNYTKDVKNAFRMGNEATFVLDIFPRIQSN

SEQ ID NO: 3968 - protein, 524 aa, Unknown
  Description of Unknown: Integrase B3969 sequence
  SM00857,G3DSA:1.10.10.2600,IPR036162,PF13408,IPR025827, PS51737,G3DSA:3.40.50.1390,IPR006119,IPR038109,PF07508, IPR011109,SSF53041,PF00239,PTHR30461,PS51736, Coil,cd00338
MNESVCIYLRKSRADREAEAHGEGETLARHERILLDLAKKKEYTVGAIYREVVSGETIADRPVMQQLLHEVESGMWDGVLVVEVERLARGDTIDQGIVSRAFQYSDTKIITPTKIYDPNNEFDEEYFEFGLFMSRREYKTIKRRLNAGRISSVKEGKYCGNKPPYGYERVKLEKEKGYTLRPVPTQAEIVKMIYTWYAGDGCEQIGVAKIVRKLNEMGMESALGGDWTPASIQGILTNPVYIGKIRWNGRKTVKTIQTGQVIKTRPRSKDTLICDGLHPAIISEDLYNSVQEIREKNPPRPISIKNSIRNPLSGIVYCSKCGRAMVRRPYQKRGQEDTLMCPYTSCPTVSSKLSLVEKAVLDGIREIVEKYKLNNDINTSSQAIDLTIISKQNLIHEKENELESLNAQKAKQYDLLEQGIYTTEVFLERAKTISASIQSCSDTIEKLKEEIKHDENIIKQQSDFIPRCEELLDNYWSLDTESKNKMLKSLIEKVAYSKDTKNAYGKGNEIGFQLDIFPKIQKNN

SEQ ID NO: 3969 - protein, 524 aa, Unknown
  Description of Unknown: Integrase B3970 sequence
  PTHR30461:SF3,SM00857,G3DSA:1.10.10.2600,IPR036162,PF13408, IPR025827,G3DSA:3.40.50.1390,PS51737,IPR006119,IPR038109, PF07508,SSF53041,IPR011109,PF00239,PTHR30461, PS51736,Coil,cd00338
MDGLNLANVVIYARYSSAGQNDQSIDGQLAKCREYAQQRGYRVVGEYCDRALSGRYAETRPEFQRMISDSAKHAFDFVLVWKLDRFSRDRYDSAIYKKKLRANGVRVLSVTEGVGDSSESVLLEAILEAMAEEYSRQLAQNVRRGMRQNAEKALSLGGLAPLGYRVVDKRYEVDEEAAQIVRFVHEQYAAGATQKQIVADCAQRGYRNQRGNPLTIDSVKRILSNERYVGTYRYLDDIVIEDAFPAIVSKELKQQVRARLTANAKAPGHAKAKIEYLLHGKLFCGLCGAPMIGECGRGRHGATYYYYTCAARKKQHTCKKRNERKDALEKYIVEYIGSHVLTDDWIDAAAERVVAEYARSYDAAGIKPLERQIREVDKELDQLTDALIKTSSAAVIARINDRVEAVEVKRRALEDELASLRIASRVQLQKADVAAWLSQFRSVDSADLEYRKKVIELFVNAIYIYDDRIKMFFNVTDSAQITYPEMLALEAPPGSDFGASGVPDVFLSEHFVFINGVIGMVVHR

SEQ ID NO: 3970 - protein, 524 aa, Unknown
  Description of Unknown: Integrase B3971 sequence
  PTHR30461:SF3,cd00338,SM00857,G3DSA:1.10.10.2600,IPR036162, PF13408,PS51737,IPR025827,G3DSA:3.40.50.1390,IPR006119, IPR038109,PF07508,IPR011109,SSF53041,PTHR30461, PS51736,Coil,PF00239
MDHGLNLANVVIYARYSSVGQNDQSIDGQLAKCREYAQQRGFRVVGEYCDRALSGRYAETRPEFQRLVSDSSKHAFEYVLVWKLDRFSRDRYDSAIYKKKLRANGVRVLSVTEGIDESSESVLLEAILEAMAEEYSRQLAQNVKRGMRQNAEKALSLGGMPPLGYDVVSKRYTINESEAQIVRFIHERYAAGAAQKLIVDECRQRGYCAKRGNELTIGAINRILRNPKYAGTYVCDDLVLEDSIPAIVSKPLKQQVRDRLAASAKAPGHAKAKVEYLLHGKLFCGECGAPMIGECGRGKNGTTHYYYTCAARKKSRSCKKRNERKFELEKYIVEYISMYVLTDEWINAAAERVVAEYARSYAASGIKPLERQIREADKELDALVDTLIKTASATAIAKINDRIEAVEAKKRTLEADLATLRIASRVEIRKEDIVAWLDQFRVGSSSDPEYCKKIIELFVNAVYVYDDRIKMFFNVRDSAQITYPEMLALDGLECSDFDLSGVPDDALSEQILFINGIIGMLVRR

SEQ ID NO: 3971 - protein, 524 aa, Unknown
  Description of Unknown: Integrase B3972 sequence
  cd00338,SM00857,G3DSA:1.10.10.2600,IPR036162,PF13408, IPR025827,G3DSA:3.40.50.1390,PS51737,IPR006119,IPR038109, PF07508,IPR011109,SSF53041,PTHR30461,PS51736, Coil,PF00239
MNESVCIYLRKSRADREAEAHGEGETLARHERILLDLAKKKEYIVGAIYREVVSGETIADRPVMQQLLHEVESGMWDGVLVVEVERLARGDTIDQGVVSRAFQYSDTKIITPTKIYDPNNEFDEEYFEFGLFMSRREYKTIKRRLNAGRISSVKEGKYCGNKPPYGYERVKLEKEKGYTLRPVPTQAEIVKMIYTWYAGDGCEQIGVAKIARKLNEMGIESALCGDWTPASIQGILTNPVYIGKIRWNGRKTVKTIQNGQVIKTRPRSKDTLICDGLHPAIISEDLYNSVQEIRKKNPPRPVSIANSIRNPLAGIVYCSKCGRAMVRRPYQKRGQEDTLMCPYTSCHTVSSKLSLVEKAVLDGIRKIVEKYKLNNNINTSSQAIDLTIISKQNLIHEKENELESLNAQKAKQYDLLEQGIYTTEVFLERSKTIAASIQSCSDTIEKLKEEIKHDENIIKQRSDFIPRCEELLDNYWSLDTESKNKMLKSLIEKVTYSKDTKNAYGKGNEIGFQLDIFPKIQKNN

SEQ ID NO: 3972 - protein, 524 aa, Unknown
  Description of Unknown: Integrase B3973 sequence
  SM00857,G3DSA:1.10.10.2600,IPR036162,PS51737,G3DSA:3.40.50.1390, IPR006119,IPR038109,PF07508,SSF53041,IPR011109, PTHR30461,Coil,PS51736,cd00338,PF00239
MNESVCIYLRKSRADREAEAHGEGETLARHERILLDLAKKKEYIVGAIYREVVSGETIADRPVMQQLLHEVESGMWDGVLVVEVERLARGDTIDQGVVSRAFQYSDTKIITPTKIYDPNNEFDEEYFEFGLFMSRREYKTIKRRLNAGRISSVKEGKYCGNKPPYGYERVKLEKEKGYTLRPVPAQAEIVKMIYTWYAGDGCEQIGVAKITRKLNEMGIESALGGDWTPASIQGILTNPVYIGKIRWNGRKTVKTIQNGQVIKTRPRSKDTLICNGLHPAIISEDLYNSVQEIRQKNPPRPISMKNSIRNPLAGIVHCSKCGRAMVRRPYQKRGQEDTLMCPYTSCPTVSSKLSLVEKAVLDGIREIVEEYKLNNDINTSSKAIDCGIASKQNLIHEKENELESLNAQKAKQYDLLEQGIYTTEVFLERAKTISASIQSCSDIIEKLKEEIKHGENIIKQQSDFIPRCKKLLNNYWSLDTESKNKMLKSLIEKVAYSKDTKNAYGKGNEIGFQLDIFPKIQKNN

SEQ ID NO: 3973 - protein, 524 aa, Unknown
  Description of Unknown: Integrase B3974 sequence
  PTHR30461:SF3,cd00338,SM00857,G3DSA:1.10.10.2600,IPR036162, PF13408,PS51737,IPR025827,G3DSA:3.40.50.1390,IPR006119, IPR038109,PF07508,IPR011109,SSF53041, PTHR30461,Coil,PF00239
MKRVLCLYRVSTIGQVDHDDIPMQRIACREFINQHPDWVLVEEISEKGVSGYKTKTEDRDALTRIKEKALAKKFDILLVFMFDRIGRRDNETPFVVQWFVENGIEVWSTKEGEQRFDNHVDKLLNYIRFWQASGESEKTSMRIRTRHLQMIQEGLYRGGLIPFGYKLEFMGRTNKKGQPVRDLVIDEAESKIVKEIYHKSVSDGWGANRIANWLNERGIPTKRQKTFWRATSIRALVRNPIYTGRIRFGGDLSEPFDHLRIIDDDLFGLCDQTIEGRCPRHPDKRVGHLRSTSNGLLTGILYCGSCGERMCFNHNTTVRILADGTKRSYERDVYRCYRKIHSRRTCQGRSTYSAERIEKDILAVVHTYFENIRSKPTLQMLAAAGNRKRSIQQDAIAQAEAALKKAQIELAALEDAAVKAITGETNMDLELINSLFPKRRMNLDKAMQEVERLRAELADSEKLESAANHELNMILSWADTFDAASRETQRSIIAMLIDKVVVNTNYHLDIHFRITAQQYLGKAS

SEQ ID NO: 3974 - protein, 524 aa, Unknown
  Description of Unknown: Integrase B3975 sequence
  SM00857,G3DSA:1.10.10.2600,IPR036162,PS51737,G3DSA:3.40.50.1390, IPR006119,IPR038109,PF07508,SSF53041,IPR011109, PTHR30461,Coil,PS51736,cd00338,PF00239
MNESVCIYLRKSRADREAEAHGEGETLARHERILLDLAKKKEYIVGAIYREVVSGETIADRPVMQQLLHEVESGMWDGVLVVEVERLARGDTIDQGVVSRAFQYSDTKIITPTKIYDPNNEFDEEYFEFGLFMSRREYKTIKRRLNAGRISSVKEGKYCGNKPPYGYERVKLEKEKGYTLRPVPTQAEIVKMIYTWYAGDGCEQIGVAKIARKLNEMGIESALCGDWTPASIQGILTNPVYIGKIRWNGRKTVKTIQNGQVIKTRPRSKDTLICEGLHPAIISEDLFNSVQEIRKKNPPRPVSIANSIRNPLAGIVYCSKCGRAMVRRPYQKRGQEDTLMCPYTSCPTVSSKLSLVEKSVIDGIREIVEEYKLNNDINASSKDIDCVITSKQNLINEKENELKSLNSQKAKQYDLLEQGIYTTEVFLERAKTIATSIKSCSDTIEKLKEEIKHDENIIKQQSDFIPRCEDLLDNYWSLDTESKNKMLKSLIEKVTYSKDTKNAYGKGNEIGFQLDIFPKIQKNN

SEQ ID NO: 3975 - protein, 524 aa, Unknown
  Description of Unknown: Integrase B3976 sequence
  SM00857,G3DSA:1.10.10.2600,IPR036162,PS51737, G3DSA:3.40.50.1390,IPR006119,IPR038109,PF07508, SSF53041,IPR011109,PTHR30461,Coil, PS51736,cd00338,PF00239
MNESVCIYLRKSRADREAEAHGEGETLARHERILLDLAKKKEYIVGAIYREVVSGETIADRPVMQQLLHEVESGMWDGVLVVEVERLARGDTIDQGVVSRAFQYSDTKIITPTKIYDPNNEFDEEYFEFGLFMSRREYKTIKRRLNAGRISSVKEGKYCGNKPPYGYERVKLEKEKGYTLRPVQTQAEIVKMIYAWYAGDGCEQIGVAKIARKLNEMGIESALGGDWTPASIQGILTNPVYIGKIRWNGRKTVKTIQNGQVIKARPRSKDTLICDGLHPAIILEDLYNSVQEIRKKNPPRPISIKNSIRNPLAGIVYCSKCGRAMVRRPYQKRGQEDTLMCPYTSCPTVSSKLSLVEKSVIDGIREIVEEYKLNNDINTSSKAIDCGITSKQNLIHEKENELESLNSQKAKQYDLLEQGIYTTEVFLERAKTIAASIQSCSDTIEKLKEEIKHDKNIIKQQSDFIPRCEELLDNYWSLDTESKNRMLKSLIEKVVYSKDTKNAYGKGDEISFRLDIFPRIQKKS

SEQ ID NO: 3976 - protein, 524 aa, Unknown
  Description of Unknown: Integrase B3977 sequence
  SM00857,G3DSA:1.10.10.2600,IPR036162,PF13408,IPR025827, PS51737,G3DSA:3.40.50.1390,IPR006119,IPR038109,PF07508, SSF53041,IPR011109,PF00239,PTHR30461,PS51736, Coil,cd00338
MNAVIYARYSSDKQTEQSIEGQLREGYAYAERAGMTIVGAYIDRAISGTSDQRPDFQRMIADSAKRQFEAVIVWKLDRFARNRYDSAIYKSKLKKNGVRVFSVTEGIGDGDESIILEAVLEAMAEMYSKQLGQNAARGMRETARKGLCTGGQIPLGYVVGEDHKLHIDSKTAPAVQLIYTLFADGKTKTQIAKELNARGFRTKNGKLYTSNSFFRILTNPMYYGDYTYKGDIPRECPAIISRALYDKCQERNEATKRSRGMKTSEVEWLLRGKLFCGHCGTQMTGDSGTGRANEKHYYYTCHKRKRYKDCDKKSEKKEQLERAVCQKTVEYVLREDRIGYIAERVVEQYEKEFDASIIKEKEMSLIKLDAELDKCAESLMHTTVRSVVDRINARAEELEAAKFELEHELAQLRITSKARITVDEIITFLRGFCSGDVEDIQFRRKIVDTFINAVYVFDDKYVVYYNVRDCKQVTYSDMLASIHAPSDMSAHGSDCLLYGEPLSNQSEHILIVSSCVFGLVMTKE

SEQ ID NO: 3977 - protein, 524 aa, Unknown
  Description of Unknown: Integrase B3978 sequence
  SM00857,G3DSA:1.10.10.2600,IPR036162,PS51737,G3DSA:3.40.50.1390, IPR006119,IPR038109,PF07508,SSF53041,IPR011109, PTHR30461,Coil,PS51736,cd00338,PF00239
MNESVCIYLRKSRADREAEAHGEGETLARHERILLDLAKKKEYIVGAIYREVVSGETIADRPVMQQLLHEVESGMWDGVLVVEVERLARGDTIDQGVVSRAFQYSDTKIITPTKIYDPNNEFDEEYFEFGLFMSRREYKTIKRRLNAGRISSVKEGKYCGNKPPYGYERVKLEKEKGYTLRPVPTQAEIVKMIYTWYAGDGCEQIGVAKIARKLNEMGIESALGGDWTPASIQGILTNPVYIGKIRWNGRKTVKTIQNGQVIKTRPRSKDTLICNGLHPAVISEDLYNSVQEIRKKNPPRPVSIANSIRNPLAGIVYCSKCGRAMVRRPYQKRRQEDTLMCPYTSCPTVSSKLSLVEKSVIDGIREIVEEYKLNNDINASSKDIDCVITSKQNLIHEKENELESLNSQKAKQYDLLEQGIYTTEIFLERAKTISASIQSCSDTIEKLKEEIKHDENIIKQRSDFIPRCEELLDNYWSLDTESKNKMLKSLIEKVVYSKDTKNAYGKGNEIGFQLDIFPKIQKNN

SEQ ID NO: 3978 - protein, 524 aa, Unknown
  Description of Unknown: Integrase B3979 sequence
  cd00338,SM00857,G3DSA:1.10.10.2600,IPR036162, PF13408,PS51737,G3DSA:3.40.50.1390,IPR025827, IPR006119,IPR038109,PF07508,IPR011109, SSF53041,PTHR30461,PS51736,Coil,PF00239
MSLENVCIYLRKSRADREAEARGEGETLARHERILLDLARSRNYNVGAIYREIVSGETISARPVMQQLLREVEAGSWDGVLVVEVERLARGDTIDQGVVSRAFQFSDTKIITPTKTYDPDNEFDEEYFEFGLFMSRREYKTIKRRLNAGRISSVKEGKYCGSRPPYGYERVKLRGEKGFTLQPVPEQAEVIKMIYSLYSGSSGDRIGVSKIVRKLNDMGIKSPSGKDWVPISVQDVLANPVYAGMIRWNGRKTVKAIQDGVVTQSRPRSKEDDILLFPGRHPAIVSKEMYDSVQQIRKKNPPRPISIKNTIKNPLAGIVYCSKCGRAMVRRPYQKRGQDDTLMCSYTSCPTVSSKLSLVERAVLNGIQDLVDEYRLNDAVPGPDINNAVKSKKKLIAEKEHELEKLNVQKMKQYDLLEQGIYTTEVFLERSNSIASSINSCQDSIECLKEEIRHDKELIDQQSSFIPRCENLLEIYWSLDTATKNKMLKELIERVNYTKDTKNAFRKGNEATFVLDIFPRIQSN

SEQ ID NO: 3979 - protein, 524 aa, Unknown
  Description of Unknown: Integrase B3980 sequence
  PTHR30461:SF3,SM00857,G3DSA:1.10.10.2600,IPR036162,PF13408, PS51737,IPR025827,G3DSA:3.40.50.1390,IPR006119,IPR038109, PF07508,SSF53041,IPR011109,PF00239,PTHR30461, PS51736,Coil,cd00338
MDNLNLANVVIYARYSSAGQNDQSIDGQLAKCREYAQQRGYRVVGEYCDRALSGRYAETRPEFQRLIADSAKRAFDFVLVWKLDRFSRDRYDSAIYKKKLRANGVRVLSVTEGVGDSSESVLLEAILEAMAEEYSRQLAQNVRRGMRQNAEKGLSLGGLAPLGYRVVNKQYEINEDEARIVRFIHEQYADGAGQKQIVSDCARLGYRNQRGNPLTLASVKRILANERYAGRYDYLGEIVIEDAFPAIVSKELKKRVRDRLKANAKAPGHAKAKVEYLLHGKLFCGECGAPMIGECGRGRHGATYYYYTCAARKKQHTCKKRNERKDELEACIVDYIGSCVLTDSWIDGAAERVVAEYQKSYDASGIKPLEKQIRDADKEIDQLVDALISATAEAARRRINERIETAEARKRALEADLASLRIASRVQIKKEDIVVWLSQFRTGDRSDLEYRKKVIDLFVNAIYLYDDSFKLFLNVADSAQVTYADALALAPPSVSDFGASGVPDMHLSEHIIFINGVIGMIVQR

SEQ ID NO: 3980 - protein, 524 aa, Unknown
  Description of Unknown: Integrase B3981 sequence
  cd03768,PTHR30461:SF3,SM00857,IPR036162,PF13408, IPR025827,G3DSA:3.40.50.1390,PS51737,IPR006119,PF07508, IPR011109,SSF53041,PTHR30461,PS51736,Coil, PF00239
MIFCCYGRKSVYSDRSDSVDNQFRMCRDYVNVKYSGQVDDFRAYSDEDFTGANTNRPDLQRLLEDIRSGAADVLIVYQLDRLSRDVRDFANIYATLEEHRVKFVSIKENIDTSTPIGRAMMYVTVVFAQMERETIAARVTDNMIGLAKKGYWVGGNPPVGYVRDQIIVDGKKHCAITPDPEGARYVTWIFDSFIQFGGSIQKMETQFKHKGIRTQRGGFFSASQLHKILTMPYCVEATPEVYDFYQAKGCIMDPGSPREKWDGSVGVMVYGRTTEKNKKHELQPPDQWRVCLGVHKPFMPAEKWLAVQARFAQNQRFKTARWPSPLLKGVIRCKCGALMSIGRKQKVDGSVSSAYYCPKRTRQGADVCDMRQIKCETLDAKVVNILRTVEQDNTAILRYVQKDPDTTAGPDPKKISGQIKSCEAKIEKLAASLALASGSAATKYIIAEMERLDLEIQALNREYTIAASEERKRSAAQVSTQERAKIISEKMRNFDGFTAAERNAIAREVIKKCVWDGETLYVEL

SEQ ID NO: 3981 - protein, 524 aa, Unknown
  Description of Unknown: Integrase B3982 sequence
  cd00338,SM00857,G3DSA:1.10.10.2600,IPR036162,PF13408, PS51737,IPR025827,G3DSA:3.40.50.1390,IPR006119,IPR038109, PF07508,IPR011109,SSF53041,PTHR30461,PS51736, Coil,PF00239
MSLENVCIYLRKSRADREAEARGEGETLARHERILLDLARSRNYNVGAIYREIVSGETISARPVMQQLLREVEAGSWDGVLVVEVERLARGDTIDQGVVSRAFQFSDTKIITPTKTYDPDNEFDEEYFEFGLFMSRREYKTIKRRLNAGRISSVKEGKYCGSRPPYGYERVKLRGEKGFTLQPVPEQAEVIKMIYSLYSGASGDRIGVSKIVRKLNDMGIKSPSGKDWVPISVQDVLANPVYAGMIRWNGRKTVKAIQDGVVTQSRPRSKEDDILLFPGRHPAIVSKEMYDSVQQIRKKNPPRPISIKNTIKNPLAGIVYCSKCGRAMVRRPYQKRGQDDTLMCSYTSCSTVSSKLSLVERAVLNGIQDLVDEYRLNDAVPGPDINNAVKSKKKLIAEKEHELEKLNVQKMKQYDLLEQGIYTTEVFLERSNSIASSINSCQDSIECLKEEIRHDKELIDQQSSFIPRCENLLEIYWSLDTAAKNKMLKELIERVNYTKDVKNAFRMGNEATFVLDIFPRIQSN

SEQ ID NO: 3982 - protein, 524 aa, Unknown
  Description of Unknown: Integrase B3983 sequence
  SM00857,G3DSA:1.10.10.2600,IPR036162,PS51737,G3DSA:3.40.50.1390, IPR006119,IPR038109,PF07508,SSF53041,IPR011109, PTHR30461,Coil,PS51736,cd00338,PF00239
MNESVCIYLRKSRADREAEAHGEGETLARHERILLDLAKKKEYIVGAIYREVVSGETIADRPVMQQLLHEVESGMWDGVLVVEVERLARGDTIDQGVVSRAFQYSDTKIITPTKIYDPNNEFDEEYFEFGLFMSRREYKTIKRRLNAGRISSVKEGKYCGNKPPYGYERVKLEKEKGYTLRPIPAQSEIVKMIYTWYSGDGCEQIGVAKIARKLNEMGIESALGGDGTPASIQGILTNPVYIGKIRWNGRKTVKTIQNGQVIKTRPRSKDTLICNGLHPAVISEDLYNSVQEIRKKNPPRPVSIANSIRNPLAGIVYCSKCGRAMVRRPYQKRRQEDTLMCPYTSCPTVSSKLSLVEKSVIDGIREIVEEYKLNNDINASSKDIDCVITSKQNLIHEKENELESLNSQKAKQYDLLEQGIYTTEIFLERAKTISASIQSCSDTIEKLKEEIKHDKNIIKQRSDFIPRCEELLDNYWSLDTESKNKMLKSLIEKVVYSKDTKNAYGKGNEIGFQLDIFPKIQKNN

SEQ ID NO: 3983 - protein, 524 aa, Unknown
  Description of Unknown: Integrase B3984 sequence
  cd00338,SM00857,G3DSA:1.10.10.2600,IPR036162, PF13408,IPR025827,G3DSA:3.40.50.1390,PS51737, IPR006119,IPR038109,PF07508,IPR011109, SSF53041,PTHR30461,PS51736,Coil,PF00239
MNESVCIYLRKSRADREAEAHGEGETLARHERILLDLAKKKEYIVGAIYREVVSGETIADRPVMQQLLHEVESGMWDGVLVVEVERLARGDTIDQGIVSRAFKFSNTKIITPLKTYDPNNEYDEEYFEFGLFMSRREYKTIKRRLNAGRISSVKEGKYCGNKPPYGYERVKLEKEKGYTLRPVPTQAEIVKMIYTWYSGDGCEQIGVAKIARKLNEMGIESALGGDWTPASIQGILTNPVYIGKIRWNGRKTVKTIQTGQVIKTRPRSKDTLICNGLHPAVISEDLYNSVQEIRKKNPPRPVSIANSIRNPLAGIVYCSKCGRAMVRRPYQKRGQEDTLMCPYTSCPTVSSKLSLVEKAVLDGIREIVEEYKLNNDINTSSQAIDLTIISKQNLIHEKENELESLNAQKAKQYDLLEQGIYTTEVFLERAKTISASIQSCSDTIEKLKEEIKHDENIIKQQSDFIPRCEELLDNYWSLDTESKNKMLKSLIEKVAYSKDTKNAYGKGNEIGFQLDIFPKIQKNN

SEQ ID NO: 3984 - protein, 524 aa, Unknown
  Description of Unknown: Integrase B3985 sequence
  cd03768,PTHR30461:SF3,SM00857,IPR036162,PF13408, IPR025827,G3DSA:3.40.50.1390,PS51737,IPR006119,PF07508, SSF53041,IPR011109,PTHR30461,PS51736,Coil, PF00239
MIFCCYGRKSVYSDRSDSVDNQFRMCRDYVNVKYSGQVDDFRAYSDEDFTGANTNRPDLQRLLEDIRSSAADVLIVYQLDRLSRDVRDFANIYAALEEHRVKFVSIKENIDTSTPIGRAMMYVTVVFAQMERETIAARVTDNMIGLAKKGYWVGGNPPVGYVRDQIIVDGKKHCAITPDPEGARYVTWIFDSFIQFGGSIQKMETQFKHKGIRTQRGGFFSVSQLHKILTMPYCVEATPEVYDFYQAKGCIMDPGSPREKWDGSVGVMVYGRTTEKNKKHELQPPDQWRVCLGVHKPFMPAEKWLAVQARFAQNQRFKSARWPSPLLKGVIRCKCGALMSIGRKQKVDGSVSSAYYCPKRTRQGADACDMRQIKCDILDAKVINILRTVEQDNTAILRYVQKDQDTAARPDPKKISGQIKSCEAKIEKLAASLALASGSAAAKYIIAEMERLDLEIQALNREYTIAASEERKRSAAQVSTRERAKIISEKMRNFDGFTAAERDAIAREVIKKCVWDGETLYVEL

SEQ ID NO: 3985 - protein, 524 aa, Unknown
  Description of Unknown: Integrase B3986 sequence
  PTHR30461:SF3,SM00857,G3DSA:1.10.10.2600,IPR036162,PF13408, PS51737,G3DSA:3.40.50.1390,IPR025827,IPR006119,IPR038109, PF07508,IPR011109,SSF53041,PTHR30461,PS51736, cd00338,PF00239
MNKLRAAAYCRVSTDRAEQSGSLASQRSFFDDYIRNSDSMTLVGVFYDEGTSGTTTLNRYGFNKMISLAVSGGIDIILTKEVSRFARNTVDTLNITRMLRAKGVGIIFINDNIDTRDSDGELRLSIMATIAQEESRKISERVKWGQQRKMEQGVVFGRSCLGYDVKDGKITVNADSAEIVKRIFTEYTVLLKGAESIADGLNAEQIRTVNGGRWSGAFIRKVLRNVKYAGDLEQKKTCTPDFLTHKKRLNSSEHIYIRNHHEPIISRELWEQTQAEISRRKPTDTSRHSDRYVFSGKVYCGVCGSVMVSRVKTLKNGKIYHALRCSGRIGGKSCNNETLNVTALKACIKRIFTDMPIDKTAVINAVIKGLSRTDKPDIPALRRKIETLNAKKRRAVDLMLDGLITQQELIEQKSYYDSIIEKLSQEISSDRSVFETDKIRKSAEKFLDFTSDPIWLLVIRADYIHGTLTVYLNGIEKGFTTCFTATGRGDSYRVITGNTVRSQGIIPGTMQVQKNWFRHDVNDK

SEQ ID NO: 3986 - protein, 524 aa, Unknown
  Description of Unknown: Integrase B3987 sequence
  PTHR30461:SF3,cd00338,SM00857,G3DSA:1.10.10.2600,IPR036162, PF13408,IPR025827,G3DSA:3.40.50.1390,PS51737,IPR006119, IPR038109,PF07508,SSF53041,IPR011109,PTHR30461, PS51736,Coil,PF00239
MCAKKKPAMLEPDMQDAVIYTRYSSHNQRDCSIEQQVADCEIFARQNNLRVVKVYADRHLSGTTDNRPQFQQMLKDASHGHWAYVICWKIDRFARNRYDSATYKFRLKKAGVRVLYAKESIPDGPEGILLESVLEGSAEYYSAALAQNIRRGMKYNAEQCKVNSGSIPFGYCKGPDGRFAIHEANADVVREIFRKAATGMPFVDIANDLNSRGLKTSRGGRWNKGSFRLLMNEAYIGVYHFSDTRIEGGMPALIDQGTFWAANERLKANSSVRGRHQDGGDYLLTGKLKCAHCGSYMIGFSGTGKNGELHYYYGCQKRRRERACKKANVPREWIERVVVKAALDYVLRPDVMEWIADAVMEYQEREAASAQLAALTAELEENQKATDNVMKAIEAGIITSTTKQRLLDLEAKAQDLKRAIELEKLSHVRLERDQVLFWLDRFRGGSLQSQEFRRKVIDAFVSVVYLSDDHLRIAFNYSGGSNAEADFGLVMDAEAAAGELSKKFAQGHVASTIRNADEPSKENE

SEQ ID NO: 3987 - protein, 524 aa, Unknown
  Description of Unknown: Integrase B3988 sequence
  PTHR30461:SF3,SM00857,G3DSA:1.10.10.2600,IPR036162,PF13408, IPR025827,G3DSA:3.40.50.1390,PS51737,IPR006119,IPR038109, PF07508,IPR011109,SSF53041,PTHR30461,PS51736, cd00338,PF00239
MNKLRAAAYCRVSTDRAEQSGSLASQRSFFDDYIRNSDSMTLVGVFYDEGTSGTTTLNRYGFNKMISLAVSGGIDIILTKEVSRFARNTVDTLNITRMLRAKGVGIIFINDNIDTRDSDGELRLSIMATIAQEESRKISERVKWGQQRKMEQGVVFGRSCLGYDVKDGKITVNADSAEIVKRIFTEYTVLLKGAESIADGLNAEQIRTVNGGRWSGAFIRKVLRNVKYVGDLEQKKTCTPDFLTHKKRLNRSEHIYIRNHHEPIISRELWEQTQAEISRRKPTDTSRHSDRYVFSGKVYCGVCGSVMVSRVKTLKNGKIYHALRCSGRIGGKSCNNETLNVTALKACVKRIFTDIPIDKTAVINAVIKGLSRTDKPDIPALRRKIETLNAKKRRAVDLMLDGLITQQELIEQKSYYDSIIEKLSQEISSDRSVFETDKIRKNAERFLDFTSDPLWLLVRRADYIHSTLTVYLKGVEKGFTTCFTATGRGDSYRVITGNTVRSQGIIPGTMQVPKNRCRHDVNDK

SEQ ID NO: 3988 - protein, 524 aa, Unknown
  Description of Unknown: Integrase B3989 sequence
  PTHR30461:SF3,cd00338,SM00857,G3DSA:1.10.10.2600,IPR036162, PF13408,PS51737,IPR025827,G3DSA:3.40.50.1390,IPR006119, IPR038109,PF07508,IPR011109,SSF53041,PTHR30461, PS51736,Coil,PF00239
MYKIHTTVTVFYHILTKKSIGVIKNLKTAVIYARYSSDKQTEQSIEGQLYDCYNYAKQHGITVVQEYIDRAMTGKNDDRPAFQQMLHESAMHKWDSVIVWKLDRFARNTIDSAVNRQILAKNGVKLLSVMESFGDDASGQMMTHIIEAINEYYSADLREKTIRGMRQSALKAQTTGHIPLGYKVVDKKLVIDDETRIIPETVFRMYAEGERLTDIAEHLNAQGYRNRRGRPFTTNSFYNMLSNEKYIGIYKYDDIVIEGGIPQMIPNDVFEAVREKLITNRKRAAKNTAKADYYLSGKLYCGHCGEPMSGLSGTGRNGVKHYYYRCNGVQKKSGCHKKLENKYLIEDEVCRAARSAFEQMDKAETAETIYQMYLQTVRNEYAPAELEKELTECTKQAENVVNAIAQTGGNQLLYDKVRELEERKEQLSSALRLSQAMTDNVPSVEQITVFIDDILATDINTTEGKKAIADIMISKVYVYDDKLTVIFKDKDGKCVDIPLSAVSDSSSADCAPSALGSQANFKAN

SEQ ID NO: 3989 - protein, 524 aa, Unknown
  Description of Unknown: Integrase B3990 sequence
  SM00857,G3DSA:1.10.10.2600,IPR036162,PF13408,IPR025827, G3DSA:3.40.50.1390,PS51737,IPR006119,IPR038109,PF07508, IPR011109,SSF53041,PTHR30461,Coil,PS51736, cd00338,PF00239
MLSIPKVAQYARFSSDNQRSESIDAQIRAMNQFCKQNHWQVVSTYTDEARSATTDNRPQFQQMIADSGKGLFDIVLVHKLDRFSRDRYDSAIYKKKLKKNHVKLCSVLERMDDSPESIMMEAVLEGMSEYYSKNLAREVMKGMNETALQCKHTGGCPPLGYDLDENRHLVINESEAQAVRIIFQMFADGYGYTTIIDYLNAHGYKTKRGKMFGKNSLYEMLSNEKYTGVFVFNKAAARTDGKRNNHAQKESYIRIEGGCPTIIGKKLFAQVQRIKAKNRRNTGRYHSKEFYLLTGKLVCDVCGKRMIGNLRFSGRSKTRLATYRCNTHRAACNNKELNKDYLDAYIDVLIGERLKSKNLRRAVAKVNQQVQKFNHNFDANYEGISAQYTEVQDSLANITRAIEKGIFTDDLLQRAEQLENEKAKLETRLHELKLLEPIAYEDVAYLHTQWKELKRNTEEFRTFIQQFVKAIHVRPYDFDIVLDMGFGVVELTETIPMRRGELYEMFDSKVKEQRICLKNQKADT

SEQ ID NO: 3990 - protein, 524 aa, Unknown
  Description of Unknown: Integrase B3991 sequence
  cd00338,SM00857,G3DSA:1.10.10.2600,IPR036162,PF13408, IPR025827,G3DSA:3.40.50.1390,PS51737,IPR006119,IPR038109, PF07508,IPR011109,SSF53041,PTHR30461,PS51736, Coil,PF00239
MSLENVCIYLRKSRADREAEARGEGETLARHERILLDLARSRNYNVGAIYREIVSGETISARPVMQQLLREVEAGSWDGVLVVEVERLARGDTIDQGVVSRAFQFSDTKIITPTKTYDPDNEFDEEYFEFGLFMSRREYKTIKRRLNAGRISSVKEGKYCGSRPPYGYERVKLRGEKGFTLQPVPEQAEVIKMIYSLYSGASGDRIGVSKIVRKLNDMGIKSPSGKDWVPISVQDVLANPVYAGMIRWNGRKTVRAIQDGMVTQSRPRSKEDDILLFPGRHPAIVSKEMYDSVQQIRKKNPPRPISIKNTIKNPLAGIVYCSKCGRAMVRRPYQKRGQDDTLMCSYTSCPTVSSKLSLVERAVLNGIQDLVDEYRLNDAVPGPDINNAVKSKEKLIAEKEHELEKLNVQKMKQYDLLEQGIYTTEVFLERSNSIASSINSCQDSIECLKEEIRHDKELIDQQSSFIPRCENLLEIYWSLDTAAKNKMLKELIERVNYTKDTKNAFRKGNEATFVLDIFPRIQSN

SEQ ID NO: 3991 - protein, 524 aa, Unknown
  Description of Unknown: Integrase B3992 sequence
  cd00338,SM00857,G3DSA:1.10.10.2600,IPR036162,PF13408, PS51737,G3DSA:3.40.50.1390,IPR025827,IPR006119,IPR038109, PF07508,IPR011109,SSF53041,PTHR30461,PS51736, Coil,PF00239
MNESVCIYLRKSRADREAEAHGEGETLARHEHILLDLAKRQGYSIGAIYREVVSGETISARPVMQKLLHEVESGLWDGVLVVEVERLARGDTIDQGVVSRAFQYSDTKIITPTKIYDPNNEFDEEYFEFGLFMSRREYKTIKRRLNNGRISSVKEGKYCGNKPPYGYERVKLEKEKGYTLRPVPAQAEIVKMIYTWYAGDGCEQIGVAKIVRKLNEMGIESALGGDWTPASIQGILTNPVYIGKIRWNGRKTVKAIQNGQVVKTRPRSKDVLICEGLHPAIISDDLYNSVQEIRQKNPYRPISIKNTVRNPLAGIVYCNKCGRAMVRRPYQKRGQEDTLMCPYTSCSTVSSKLSLVEKAVIDGIREIAEEYKLNNDINVPSNTIDSGITSKQNLIREKESELESLNSQKAKQYDLLEQGIYTTEVFLERSKTISASIQSCSDTIANLREEIEHDENIKAQQSDFVPRCEELLNNYWNLNMESRNRMLKSLVEKVVYSKNIKNTYGKGNEINFELDIFPKIQKND

SEQ ID NO: 3992 - protein, 524 aa, Unknown
  Description of Unknown: Integrase B3993 sequence
  cd00338,SM00857,G3DSA:1.10.10.2600,IPR036162,PF13408, PS51737,G3DSA:3.40.50.1390,IPR025827,IPR006119,IPR038109, PF07508,IPR011109,SSF53041,PTHR30461,PS51736, Coil,PF00239
MNESVCIYLRKSRADREAEAHGEGETLARHERILLDLAKKKEYIVGAIYREVVSGETIADRPVMQQLLREVESGMWDGVLVVEVERLARGDTIDQGVVSRAFQYSDTKIITPTKIYDPNNEFDEEYFEFGLFMSRREYKTIKRRLNAGRISSVKEGKYCGNKPPYGYERVKLEKEKGYTLRPVPTQAEIVKMIYTWYAGDGCEQIGVAKIARKLNEMGIESALGDDWTPASIQGILTNPVYIGKIRWNGRKTVKTIQNGQVIKTRPRSKDTLICDGLHPAIISEDLYNSVQEIRKKNPPRPISIKNSIRNPLSGIVYCSKCGRAMVRRPYQKRGQEDTLMCPYTSCTTVSSKLSLVEKAVIDGIREIVEEYKLNNDINTSSKAIDCGITSKQNLIHEKENELESLNAQKAKQYDLLEQGIYTTEVFLERAKTIAASIQSCSDTIEKLKEEIKHDENIIKQRSDFIPRCEELLDNYWSLDTESKNKMLKSLIEKVTYSKDTKNAYGKGNEIGFQLDIFPKIQKNN

SEQ ID NO: 3993 - protein, 524 aa, Unknown
  Description of Unknown: Integrase B3994 sequence
  PTHR30461:SF3,SM00857,G3DSA:1.10.10.2600,IPR036162,PF13408, IPR025827,PS51737,G3DSA:3.40.50.1390,IPR006119,IPR038109, PF07508,IPR011109,SSF53041,PTHR30461,Coil, PS51736,cd00338,PF00239
MNAVIYARFSSHSQREQSIEGQLRDCYEYAKRYDINIVGEYIDRAISGMTDDRPDFQRMIADAPKKQFERIIVWKLDRFARNRYDSALYKHKLKQYGIRVISAMENVGEGDESILLEALLEASAEYYSLDLKKKILRGQRETIAKGRWCGGPIPYGYKAVDGKLVADEKTAPIIRYVFEQYAQGVPMKEIIDELKRRGVRSSRGGELTYTTFSRALTNPVYIGNFMYKGELVPGVADALIDEDTYNKVQIIVKANAHAPAANKAKVEYLLQGKAFCGHCGSHMVGESGKSRNGDVYYYYSCAARKKAHKCRKKNEKKDFIEWYVVEQTLNYVLTPTRMRDIAKAVVAEYDKEFSGSKVQEYEKAIKQYERELDKLVDALVDAPKVAHKRIYEKMETLETQKASMENELVKLRIASEIRFTEEEVRAWLRRFCTGDLFDPEFRRNIIDTFINCIYLYDDRIIIFYNIKGGKQVSFVDLAESLDSESESSGSDLNANAPPFNIKSEPAYIFVNGVFGCIFPRNDVE

SEQ ID NO: 3994 - protein, 524 aa, Unknown
  Description of Unknown: Integrase B3995 sequence
  SM00857,G3DSA:1.10.10.2600,IPR036162,PF13408,IPR025827, PS51737,G3DSA:3.40.50.1390,IPR006119,IPR038109,PF07508, SSF53041,IPR011109,PTHR30461,Coil,PS51736, cd00338,PF00239
MNESVCIYLRKSRADREAEAHGEGETLARHERILLDLAKKKEYIVGAIYREVVSGETIADRPVMQQLLHEVESGMWDGVLVVEVERLARGDTIDQGVVSRAFQYSDTKIITPTKIYDPNNEFDEEYFEFGLFMSRREYKTIKRRLNAGRISSVKEGKYCGNKPPYGYERVKLEKEKGFTLRPVPDQAEIVKMIYAWYAGDGCEQIGVAKIARKLNEMGIETALGGDWTPASIQGILTNPVYIGKIRWNGRKTVKTIQDGQVIKTRPRSKDTLICDGLHPAIISEDLYNFVQEIRKKNPPRPISIKNSIRNPLSGIVYCSKCGRAMVRRPYQKRGQEDTLMCPYTSCPTVSSKLSLVEKSVIDGIREIVEEYKLNNDINTSSKAIDCGITSKRNLIHEKENELKSLNSQKAKQYDLLEQGIYTTEVFLERAKTIAASIQSCSDTIEKLKEEIKHDQNIIKQQSDFIPRCEELLDNYWSLDTESKNKMLKSLIEKVTYSKDTKNAYGKGNEIGFQLDIFPKIQKNN

SEQ ID NO: 3995 - protein, 524 aa, Unknown
  Description of Unknown: Integrase B3996 sequence
  PTHR30461:SF3,SM00857,G3DSA:1.10.10.2600,IPR036162,PF13408, IPR025827,G3DSA:3.40.50.1390,PS51737,IPR006119,IPR038109, PF07508,SSF53041,IPR011109,PTHR30461,Coil, PS51736,cd00338,PF00239
MPKVTKIPPRLNPATFAPLESVEKRKVAGYARVSTDSEEQKTSYTAQVDYYTKFIKERIDWEFVGVYTDEGISATNTRHREGFNRMIADALNGKIDLIVTKSVSRFARNTVDSLTTIRKLKEKGVEVFFQKENIYTLDSKGELLLTIMSSLSQEESRSISENVTWGQRKRMADGKVSLPYSHFLGYRKGKDGIPEIVPEEAEIVRYIYRSFMEGKTPNHIAECLTFKHVPTPAGKEIWSPSTIESILTNEKYRGSALLQKSFTVDFLSKKKKINEGELMQYYIPESHEAIIPPDEFELVQAEYTRRKRIGRAYNSKSIFSAKLVCECCGGYFGSKIWHSTSKYRRTVWQCNGKFKNGKKCMTPHLYESHIKEKFLTAMNQVLANKTEIIENCLLFKETFSNTAMIEEKIENIQKQMEQLTKQIRMLIQKQSITPIKSEDYYRQYDGLVISFGKLKFKQDTLIQKQDEMENKLKFIMDYIEFLKSQENLIIEFSETLWFRAVDQVTVCTDGKMIFAFKDGSKIKV

SEQ ID NO: 3996 - protein, 524 aa, Unknown
  Description of Unknown: Integrase B3997 sequence
  SM00857,G3DSA:1.10.10.2600,IPR036162,PS51737,G3DSA:3.40.50.1390, IPR006119,IPR038109,PF07508,IPR011109,SSF53041, PF00239,PTHR30461,PS51736,Coil,cd00338
MNESVCIYLRKSRADREAEAHGEGETLARHERILLDLAKKKEYIVGAIYREVVSGETIADRPVMQQLLHEVESGMWDGVLVVEVERLARGDTIDQGIVSRAFQYSDTKIITPTKIYDPNNEFDEEYFEFGLFMSRREYKTIKRRLNAGRISSVKEGKYCGNRPPYGYERVKLEKEKGFTLRPVPDQAEIVKMIYAWYAGDGCEQIGVAKIARKLNEMGIESALGGDWTPTTIQGILTNPVYIGKIRWNGRKTVKTIQNGQVIKTRPRSKNILICNGLHPAIISEDLFNSVQEIRKKNPPHPVSVSKLIRNPLSGIVYCSKCGRAMVRRPYQKSSQEDTLMCPYTSCPTVSSKLSLVEKSVIDGIREIVEEYKLNNDINTSSKDIDCVITSKQNLINEKENELESLNAQKAKQYDLLEQGIYTTEVFLERAKTISASIQSCSDTIEKLKEEIKHDENIIKQQSDFIPRCEELLDNYWSLDTESKNRMLKSLIEKVTYSKDAKNAYGKGNEIGFQLDIFPKIQKNN

SEQ ID NO: 3997 - protein, 524 aa, Unknown
  Description of Unknown: Integrase B3998 sequence
  cd03768,PTHR30461:SF3,SM00857,IPR036162,PF13408,PS51737,G3DSA:3. 40.50.1390,IPR025827,IPR006119,PF07508,IPR011109,SSF53041, PTHR30461,PS51736,Coil,PF00239
MIFCCYGRKSVYSDRSDSVDNQFRMCRDYVNVKYSGQVDDFRAYSDEDFTGANTNRPDLQRLLEDIRSGGADVLIVYQLDRLSRDVRDFANIYAILEEHRVKFVSIKENIDTSTPIGRAMMYVTVVFAQMERETIAARVTDNMIGLAKKGYWVGGNPPVGYVRDQIIVDGKKHCAITPDPEGARYVTWIFDSFVQFGGSIQKMETQFKHKGVRTQRGGFFSASQLHKILTMPYCAEATPEVYDFYQAKGCIMDPGSPREKWDGSVGVMVYGRTTEKNKKHELQPPDQWRVCLGVHKPFMPADKWLAVQARFAQNQRFKSARWPSPLLKGVIRCKCGALMSIGRKQKVDGSVSSAYYCPKRTRQGADACDMRQIKCEILDAKVINILRTVEQDNTAILRYVQKDQDTAARPDPKKISGQIKSCEAKIEKLAASLALASGSAAAKYIIAEMERLDLEIQALNREYTIAASEERKRSAAQVSTQERAKIISEKMRNFDGFTAAERNAIAREVIKKCVWDGETLYVEL

SEQ ID NO: 3998 - protein, 524 aa, Unknown
  Description of Unknown: Integrase B3999 sequence
  cd03768,PTHR30461:SF3,SM00857,IPR036162,PF13408, IPR025827,G3DSA:3.40.50.1390,PS51737,IPR006119,PF07508, IPR011109,SSF53041,PTHR30461,PS51736,Coil, PF00239
MIFCCYGRKSVYSDRSDSVDNQFRMCRDYVNVKYSGQVDDFRAYSDEDFTGANTNRPDLQRLLEDIRSGAADVLIVYQLDRLSRDVRDFANIYATLEEHRVKFVSIKENIDTSTPIGRAMMYVTVVFAQMERETIAARVTDNMIGLAKKGYWVGGNPPVGYVRDRIIVDGKKHCAITPDPEGARYVTWIFDSFIQFGGSIQKMETQFKHKGVRTQRGGFFSASQLHKILTMPYCVEATPEVYDFYQAKGCIMDPGSPREKWDGSVGVMVYGRTTEKNKKHELQPPDQWRVCLGVHKPFMPADKWLAVQARFAQNQRFKSARWPSPLLKGVIRCKCGALMSIGRKQKVDGSVSSAYYCPKRTRQGADVCDMRQIKCETLDAKVVNILRTVEQDNTAILRYVQKDPDTTAGPDPKKISGQIKSCEAKIEKLAASLALASGSAATKYIIAEMERLDLEIQALNREYTIAASEERKRSAAQVSTQERAKIISEKMRNFDGFTAAERNAIAREVIKKCVWDGETLYVEL

SEQ ID NO: 3999 - protein, 524 aa, Unknown
  Description of Unknown: Integrase B4000 sequence
  cd00338,SM00857,G3DSA:1.10.10.2600,IPR036162,PF13408, IPR025827,PS51737,G3DSA:3.40.50.1390,IPR006119,IPR038109, PF07508,IPR011109,SSF53041,PTHR30461,PS51736, Coil,PF00239
MNESVCIYLRKSRADREAEAHGEGETLARHERILLDLAKKKEYIVGAIYREVVSGETIADRPVMQQLLHEVESGMWDGVLVVEVERLARGDTIDQGVVSRAFQYSDTKIITPTKIYDPNNEFDEEYFEFGLFMSRREYKTIKRRLNAGRISSVKEGKYCGNKPPYGYERVKLEKEKGYTLRPVPTQAEIVKMIYTWYAGDGCEQIGVAKIARKLNEMGIESALGGDWTPASIQGILTNPVYIGKIRWNGRKTVKTIQNGQVIKTRPRSKDTLICNGLHPAIISEDLFDSVQEIRKKNPPRPVGIKNSIRNPLSGIVYCSKCGRAMVRRPYQKSGQEDTLMCPYTSCSTVSSKLPLVEKSVIDGIREIVEEYKLNNDINASSNAIDLTIISKQNLIHEKENELESLNAQKAKQYDLLEQGIYTTEVFLERAKTISASIQSCSDTIEKLKEEIKHDENIIKQQSDFIPRCEELLDNYWSLDTESKNKMLKSLIEKVVYSKDTKNAYGKGNEIGFQLDIFPKIQKNN

SEQ ID NO: 4000 - protein, 524 aa, Unknown
  Description of Unknown: Integrase B4001 sequence
  cd03768,PTHR30461:SF3,SM00857,IPR036162,PF13408, IPR025827,G3DSA:3.40.50.1390,PS51737,IPR006119,PF07508, SSF53041,IPR011109,PTHR30461,PS51736,Coil, PF00239
MIFCCYGRKSVYSDRSDSVDNQFRMCRDYVNVKYAGQVDDFRAYSDEDFTGANTNRPDLQRLLEDIRSGGADVLIVYQLDRLSRDVRDFANIYATLEEHRVKFVSIKENIDTSTPIGRAMMYVTVVFAQMERETIAARVTDNMIGLAKKGYWVGGNPPVGYVRDRIIVDGKKHCAITPDPEGARYVTWIFDSFIQFGGSIQKMETQFKHKGIRTQRGGFFSASQLHKILTMPYCVEATPEVYDFYQAKGCIMDPGSPREKWDGSVGVMVYGRTTEKNKKHELQPPDQWRVCLGVHKPFMPADKWLAVQARFAQNQRFKSARWPSPLLKGVIRCKCGALMSIGRKQKVDGSVSSAYYCPKRTRQGADVCDMRQIKCETLDAKVVDILRTVEQDNTAILRYAQKDRDTTAGPDPKKISSQIKSSEAKIEKLAASLALASNSAAAKYIIAEMERLDLEIQALNREYTIAASEERKRSAAQVSTQERAKIISEKMRNFDGFTAAERNAIAREVIRKCVWDGETLYVEL

SEQ ID NO: 4001 - protein, 524 aa, Unknown
  Description of Unknown: Integrase B4002 sequence
  SM00857,G3DSA:1.10.10.2600,IPR036162,PF13408,PS51737, G3DSA:3.40.50.1390,IPR025827,IPR006119,IPR038109,PF07508, IPR011109,SSF53041,PTHR30461,Coil,PS51736, cd00338,PF00239
MNESVCIYLRKSRADREAEAHGEGETLARHERILLDLAKKKEYIVGAIYREVVSGETIADRPVMQQLLHEVESGMWDGVLVVEVERLARGDTIDQGVVSRAFQYSDTKIITPTKIYDPNNEFDEEYFEFGLFMSRREYKTIKRRLNAGRISSVKEGKYCGNKPPYGYERVKLEKEKGYTLRPIPAQSEIVKMIYTWYAGDGCEQIGIAKIVRKLNDMGIESALGGDWTPASIQGILTNPVYIGKIRWNGRKVVKTVQNGQVVKKRPRSKDVLVCDGLHPAVISEDLFNSVQEIRQKNPPHPISMKNTVRNPLSGIVYCSKCGRAMVRRPYQKSGQEDTLLCPYTSCPTVSSKLSVVEKAVLDGIKEIAEEYKLNNNINVPSEAINSGITSKQSLIREKESELENLNVQKSKQYDLLEQGIYTTEVFLERAKTIAASIQSCSDTIAKLREEIEHDKDIMAQQSDFIPRCEELLNNYWSLDTESKNKMLKSLIEKVIYSKDTKNAYGKGNEVSFQLDIFPKIQKNN

SEQ ID NO: 4002 - protein, 524 aa, Unknown
  Description of Unknown: Integrase B4003 sequence
  cd03768,PTHR30461:SF3,SM00857,G3DSA:1.10.10.2600,IPR036162, PF13408,PS51737,IPR025827,G3DSA:3.40.50.1390,IPR006119, IPR038109,PF07508,IPR011109,SSF53041,PTHR30461, PS51736,PF00239
MLMIADYSRKSVYSDKSDSTQAQYNLALDYCKGHYNDYDVIRYEDEGYTGANTDRPAFSRMVEDIKDGKINIVICYKIDRVSRDVKDFSNFFSFLQDHNVEFVSIKEQIDTSTPLGRAMMYICSVFAQMERETIAERVKDGMTDLSKTGKWAGGRAPLGYKRERVEISGKSHTVLVPDAQGCKLLNLISDTFLDTGYSLTQLERYCRENNITTSRGAYFSSSQIWTILKNPIYCTADQAAYDYFEGLGCQMGVDRDKFDGKRAIMSYGRTAGGKRKKHVVNPPEKWVISVGLHAPLWTSEKYIAIQDRFGNNQIDKARKHKIGILKGVVKCKCGYTMRVQHKVDNANGKIYDNYFCSLRNRRGKSFCDMHFTPVSTLDDAVIEILKRIKLDKSMIDNFIVDDSKINVAYRSRSDVQRDIDRIDGKILNLTNALGNASGSTASKYIVREIERLDRELSGLKYELLEISTNEKKRNRANYDRELKYKMVCDIVDNLEYADYDEINGLLKDLFKECVYDGQTLHIKI

SEQ ID NO: 4003 - protein, 524 aa, Unknown
  Description of Unknown: Integrase B4004 sequence
  SM00857,G3DSA:1.10.10.2600,IPR036162,PF13408,IPR025827, G3DSA:3.40.50.1390,PS51737,IPR006119,IPR038109,PF07508, IPR011109,SSF53041,PF00239,PTHR30461,PS51736, Coil,cd00338
MNESVCIYLRKSRADREAEAHGEGETLARHERILLDLAKKKEYIVGAIYREVVSGETISARPVMQQLLREVESGMWDGVLVVEVERLARGDTIDQGVVSRAFQYSDTKIITPTKIYDPNNEFDEEYFEFGLFMSRREYKTIKRRLNAGRISSIKEGKYCGNKPPYGYERVKLEKEKGYTLRPVPTQAEVVKMVYTWYAGDGCEQIGVAKIARKLNEMGIETALGSDWTPASIQGILTNPVYIGKIRWNGRKIVKTVHNGQVVKTRPRSKDTLICDGLHQAIISEDLFNSVQEIRKKNPPRPVGIANSIRNPLSGIVYCSKCGRAMVRRPYQKSGQEDTLMCPYTSCPTVSSKLPIVEKAVLDGIEEIVEKYKLNNDINVSSESISSGISSKQNLINEKEKELESLNAQKAKQYDLLEQEIYTTEVFLERSKTIAASIQSCSDTIAKLREEIEHDKDIIAQQSDFIPRCEELLNNYWSLDTESKNRMLKSLIEKVVYSKDTKNAYGKGNEVSFQLDIFPKIQKEN

SEQ ID NO: 4004 - protein, 524 aa, Unknown
  Description of Unknown: Integrase B4005 sequence
  PTHR30461:SF3,SM00857,G3DSA:1.10.10.2600,IPR036162,PF13408, IPR025827,G3DSA:3.40.50.1390,PS51737,IPR006119,IPR038109, PF07508,IPR011109,SSF53041,PTHR30461,PS51736, cd00338,PF00239
MNKLRAAAYCRVSTDRAEQSGSLASQRSFFDDYIRNSDSMTLVGVFYDEGTSGTTTLNRYGFNKMISLAVSGGIDIILTKEVSRFARNTVDTLNITRMLRAKGVGIIFINDNIDTRDSDGELRLSIMATIAQEESRKISERVKWGQQRKMEQGVVFGRSCLGYDVKDGKITVNADSAEIVKRIFTEYTVLLKGAESIADELNAEQIRTVNGGRWSGAFIRKVLRNVKYVGDLEQKKTCTPDFLTHKKRLNSSEHIYIRNHHEPIISRELWEQTQAEISRRKPTDTSRHSDRYVFSGKVYCGVCGSVMVSRVKTLKNGKIYHALRCSGRIGGKSCNNETLNVTALKACVKRIFTDMPIDKTAVINAVIKGLSRTDKPDIPALRRKIETLNAKKRRAVDLMLDGLITQQELIEQKSYYDSIIEKLSQEISSDRSVFETDKIRKNAERFLDFTSDPIWLLVIRADYIHGTLTVYLKGIEKGFTTCFTATGRGDSYRVITGNTVRSQGIIPGTMQVQKNRCRHDVNDK

SEQ ID NO: 4005 - protein, 524 aa, Unknown
  Description of Unknown: Integrase B4006 sequence
  SM00857,G3DSA:1.10.10.2600,IPR036162,PF13408,IPR025827, G3DSA:3.40.50.1390,PS51737,IPR006119,IPR038109,PF07508, SSF53041,IPR011109,PF00239,PTHR30461,PS51736, Coil,cd00338
MNESVCIYLRKSRADREAEAHGEGETLARHERILLDLAKKKEYTVGAIYREVVSGETIADRPVMQQLLHEVESGMWDGVLVVEVERLARGDTIDQGIVSRAFQYSDTKIITPTKIYDPNNEFDEEYFEFGLFMSRREYKTIKRRLNAGRISSVKEGKYCGNKPPYGYERVKLEKEKGYTLRPVPTQAEIVKMIYTWYAGDGCEQIGIAKIARKLNEMGIESALCGDWTPASIQGILTNPVYIGKIRWNGRKTVKTIQNGHVVKTRPRSKDVLVCEGLHPAIIPDDLYNSVQEIRKKNPPRPISIKNSIRNPLSGIVYCSKCGRAMVRRPYQKRGQEDTLMCPYTSCPTVSSKLSLVEKSVIDGIREIVEEYKLNNDINTSSKAIDCGITSKQNLIHEKENELESLNSQKAKQYDLLEQGIYTTEVFLERAKTIAASIQSCSDTIEKLKEEIKHDKNIIKQQSDFIPRCEELLDNYWSLDTESKNRMLKSLIEKVVYSKDTKNAYGKGDEISFRLDIFPRIQKKS

SEQ ID NO: 4006 - protein, 524 aa, Unknown
  Description of Unknown: Integrase B4007 sequence
  SM00857,G3DSA:1.10.10.2600,IPR036162,PF13408,IPR025827, G3DSA:3.40.50.1390,PS51737,IPR006119,IPR038109,PF07508, SSF53041,IPR011109,PTHR30461,Coil,PS51736, cd00338,PF00239
MNESVCIYLRKSRADREAEAHGEGETLARHEHILLDLAKRQGYSIGAIYREVVSGETISARPVMQKLLHEVESGLWDGVLVVEVERLARGDTIDQGVVSRAFQYSDTKIITPTKIYDPNNEFDEEYFEFGLFMSRREYKTIKRRLNNGRISSVKEGKYCGNKPPYGYERVKLEKEKGYTLRPVPAQAEVVKMIYAWYAGDSCEQIGVAKIVRKLNDMGIESALGGDWTPASIQGILTNPVYVGKIRWNGRKTVKTIQNGQVVKTRPRSRDVLVCEGLHPAIIPDNLYNSVQEIRQKNPPRPISIKNTVRNPLAGIVYCSKCGRAMVRRPYQKRGQEDTLMCPYTSCSTVSSKLSLVEKAVIDGIREMVERYKLNNNINLPYNTINSGIASKQNLIREKESELENLNAQKSKQYDLLEQGIYTTEIFIERSKAIAATIQTCADAIKKIKEEVEHDKGIISQQSAFVPRCEEMLTNYWDLDAESKNKMLKSLIEKVVYSKDKRNAYGHGNEANFELDIFPKIQENN

SEQ ID NO: 4007 - protein, 524 aa, Unknown
  Description of Unknown: Integrase B4008 sequence
  PTHR30461:SF3,SM00857,G3DSA:1.10.10.2600,IPR036162,PF13408, PS51737,IPR025827,G3DSA:3.40.50.1390,IPR006119,IPR038109, PF07508,IPR011109,SSF53041,PF00239,PTHR30461, PS51736,Coil,cd00338
MDGLNLANVVIYARYSSAGQNDQSIDGQLAKCREYAQQRGYRVVGEYCDRALSGRYAETRPEFQRMISDSAKHAFDFVLVWKLDRFSRDRYDSAIYKKKLRANGVRVLSVTEGVGDSSESVLLEAILEAMAEEYSRQLAQNVRRGMRQNAEKALSLGGLAPLGYRVVDKRYEVDEEAAQIVRFVHEQYAAGATQKQIVADCAQRGYRNQRGNPLTIDSVKRILSNERYVGTYRYLDDIVIEDAFPAIVSKDLKKRVRDRLNANAKAPGHAKAKVEYLLHGKLFCGECGAPMIGECGRGRHGATYYYYTCAARKKQHACKKRNERKDELEASIVDYIGSCVLTDSWIDGAAERVVAEYQKSYDASGIKPLEKQIRDADKEIDQLVDALISATAEAARRRINERIETAEARKQALEADLASLRIASRVQIRKGDIVVWLNQFRTGDRSDLEYRKKVIELFVNAIYIYDDRIKMFFNVTDSAQITYPEMLALEAPPGSDFGASGVPDVSLSEHFVFINGVIGMVVHR

SEQ ID NO: 4008 - protein, 524 aa, Unknown
  Description of Unknown: Integrase B4009 sequence
  SM00857,G3DSA:1.10.10.2600,IPR036162,PF13408,IPR025827, G3DSA:3.40.50.1390,PS51737,IPR006119,IPR038109,PF07508, IPR011109,SSF53041,PTHR30461,Coil,PS51736, cd00338,PF00239
MNESVCIYLRKSRADREAEAHGEGETLARHEHILLDLAKRQGYSIGAIYREVVSGETISARPVMQRLLHEVESGLWDGVLVVEVERLARGDTIDQGVVSRAFQYSDTKIITPTKIYDPNNEFDEEYFEFGLFMSRREYKTIKRRLNNGRISSVKEGKYCGNKPPYGYERIKLEKEKGYTLRPVPAQAEVVKMIYTWYAGDGCEQIGVAKIVRKLNDMGIESALGGDWTPASIQGILTNPVYIGKIRWNGRKTVKTIQNGQVVKTRPRSRDVLICEGLHPAIIPDDLYNSAQEIRQKNPSRPISIKNTIRNPLAGIVYCSKCGRAMVRRPYQKRGQEDTLMCPYTSCPTVSSKLSLVEKAVIDGIKGIAEKYKLNNDINVPYNTINSGIVSKQKLIREKESELESLNTQKAKQYDLLEQGIYTTEVFLERSKTISASIQSCSDIITKLREEIEHDENIMTQQSDFIPRCEELLNNYWNLNMESRNRMLKSLIEKVVYSKYKRNTYGHGNEANFELDIFPKIQKND

SEQ ID NO: 4009 - protein, 524 aa, Unknown
  Description of Unknown: Integrase B4010 sequence
  cd00338,SM00857,G3DSA:1.10.10.2600,IPR036162,PF13408, PS51737,IPR025827,G3DSA:3.40.50.1390,IPR006119,IPR038109, PF07508,IPR011109,SSF53041,PTHR30461,PS51736, Coil,PF00239
MNESVCIYLRKSRADREAEAHGEGETLARHQRILLDLAKKKEYIVGAIYREVVSGETIADRPVMQQLLHEVESGMWDGVLVVEVERLARGDTIDQGVVSRAFQYSDTKIITPTKIYDPNNEFDEEYFEFGLFMSRREYKTIKRRLNAGRISSVKEGKYCGNKPPYGYERIKLAREKGYTLRPVPAQAEIVKMIYTWYAGDGCEQIGVAKIVRKLNDMGIKSALGGDWTPASIQGILTNPVYIGKIRWNGRKTVKTIQNGQVVKTRPRSRNVLICEGLHPSIISDDLYNSVQEIRQKNPPRPISIKNTVRNPLAGIVYCSKCGRAMVRRPHQKRGQEDTLMCPYTSCPTVSSKLSLVEKAVLDGIKEITEKYKLNNDINVPYNTINSGIVSKQNLIREKESELESLNVQKAKQYDLLERGIYTTEVFLERSKTIARSIQSCSDIITKLRKEIEHDENIKAQQSNFIPRCEELLNNYWDLNIESRNRMLKNLVEKVVYSKNIKNTYGKGNEINFELDIFPKIQKND

SEQ ID NO: 4010 - protein, 524 aa, Unknown
  Description of Unknown: Integrase B4011 sequence
  SM00857,G3DSA:1.10.10.2600,IPR036162,PF13408,IPR025827, G3DSA:3.40.50.1390,PS51737,IPR006119,IPR038109,PF07508, SSF53041,IPR011109,PTHR30461,Coil,PS51736, cd00338,PF00239
MNESVCIYLRKSRADREAEAHGEGETLARHERILLDLAKKKEYIVGAIYREVVSGETIADRPVMQQLLHEVESGMWDGVLVVEVERLARGDTIDQGVVSRAFQYSDTKIITPTKIYDPNNEFDEEYFEFGLFMSRREYKTIKRRLNAGRISSVKEGKYCGNKPPYGYERVKLEKEKGYTLRPVQTQAEIVKMIYAWYAGDGCEQIGVAKIARKLNEMGIESALGGDWTPASIQGILTNPVYIGKIRWNGRKTVKTIQNGQVIKARPRSKDTLICDGLHPAIILEDLYNSVQEIRKKNPPRPISIKNSIRNPLAGIVYCSKCGRAMVRRPYQKRGQEDTLMCPYTSCPTVSSKLSLVEKAVIDGIREIVEEYKLNNDINISSKAIDCGITSKQNLIHEKENELESLNSQKAKQYDLLEQGIYTTEVFLERAKTIAASIQSCSDTIEKLKEEIKHDKNIIKQQSDFIPRCEELLDNYWSLDTESKNRMLKSLIEKVVYSKDTKNAYGKGDEISFRLDIFPRIQKKS

SEQ ID NO: 4011 - protein, 524 aa, Unknown
  Description of Unknown: Integrase B4012 sequence
  PTHR30461:SF3,SM00857,G3DSA:1.10.10.2600,IPR036162,PF13408, IPR025827,G3DSA:3.40.50.1390,PS51737,IPR006119,IPR038109, PF07508,IPR011109,SSF53041,PTHR30461,PS51736, cd00338,PF00239
MNKLRAAAYCRVSTDRAEQSGSLASQRSFFDDYIRNSDSMTLVGVFYDEGTSGTTTLNRYGFNKMISLAVSGGIDIILTKEVSRFARNTVDTLNITRMLRAKGVGIIFINDNIDTRDSDGELRLSIMATIAQEESRKISERVKWGQQRKMEQGVVFGRSCLGYDVKDGKITINADSAEIVKRIFTEYTVLLKGAESIADGLNAEQIRTVNGGRWSGAFIRKVLRNVKYVGDLEQKKTCTPDFLTHKKRLNRSEHIYIRNHHEPIISRELWEQTQAEISRRKPTDTSRHSDRYVFSGKVYCGVCGSVMVSRVKTLKNGKIYHALRCSGRIGGKSCNNETLNVTALKACVKRIFTDMPIDKTAVINAVIKGLSRTDKPDIPALRRKIETLNAKKRRAVDLMLDGLITQQELIEQKSYYDSIIEKLSQEISSDRSVFETDKIRKNAERFLDFTSDPLWLLVIRADYIHGTLTVYLKGIENGFTTCFTATGRGDSYRVITGNTVRSQGIIPGTMQVQKNRCRHDVNDK

SEQ ID NO: 4012 - protein, 524 aa, Unknown
  Description of Unknown: Integrase B4013 sequence
  PTHR30461:SF3,SM00857,G3DSA:1.10.10.2600,IPR036162,PF13408, PS51737,G3DSA:3.40.50.1390,IPR025827,IPR006119,IPR038109, PF07508,IPR011109,SSF53041,PF00239,PTHR30461, PS51736,Coil,cd00338
MRAFIYGRFSSHKQQELSIEAQIDICREYAEKHNITVVGEYVDRARSARTENRADFRRLIRDACTGVVDCVLVWRYDRFFRDRAESALYRKQLEAAGVHLISVTEFIPDGSAGVITQGMIETVAEYFSAKLSEDVTRGMNKAAQHCQITGGAPLGYRPGPNKRWQIDPVGAELVKRCFEWYDSGKSMGELADHFNKEGHKTAKGNSFNKSSFTTILRNKKYIGIYEYDGTVSIAGGVPRIIEDDLFFRVQRKLDANRHRPGAYKAEVPYLLSGKLFCGKCGSPMTGTAGTGKSGVRHYYYICNNRRAKKCDKKNVRLDLIEEAVLQSALDVLTDDNISYISAEVERRCSENSGNKALVASLRVQLTEVEKQLKNIGNAIAQGIITETTKQMLMDAEADRAALRQQIDRATVQASLEVKAEAVACWLDGFRHGDRKSPEFRKDVFGALVHSVFVYDDYMKIIFNVDSAGAALVPFSAVQNAATSDFVGALPGSYLGGSGVPEKNNPNLFLVENGFGLFLFLGLEQ

SEQ ID NO: 4013 - protein, 524 aa, Unknown
  Description of Unknown: Integrase B4014 sequence
  SM00857,G3DSA:1.10.10.2600,IPR036162,PS51737,G3DSA:3.40.50.1390, IPR006119,IPR038109,PF07508,SSF53041,IPR011109, PTHR30461,Coil,PS51736,cd00338,PF00239
MNESVCIYLRKSRADREAEAHGEGETLARHEHILLDLAKRQGYSIGAIYREVVSGETISARPVMQKLLHEVESGLWDGVLVVEVERLARGDTIDQGVVSRAFQYSDTKIITPTKIYDPNNEFDEEYFEFGLFMSRREYKTIKRRLNNGRISSVKEGKYCGNKPPYGYERVKLEKEKGYTLRPVPAQAEIVKMIYTWYAGDGCEQIGVAKIVRKLNEMGIESALGGDWTPASIQGILTNPVYIGKIRWNGRKTVKAIQNGQVIKTRPRSKDTLICEGLHPAIISEDLFNSVQEIRKKNPPRPVSIANSIRNPLAGIVYCSKCGRAMVRRPYQKRGQEDTLMCPYTSCPTVSSKLSLVEKSVIDGIREIVEEYKLNNDINASSKDIDCVITSKQNLIHEKENELESLNSQKAKQYDLLEQGIYTTEVFLERAKTISASIQSCSDTIEKLKEEIKHDENIIKQRSDFIPRCEELLDNYWSLDTESKNKMLKSLIEKVAYSKDTKNAYGKGNEIGFQLDIFPKIQKNN

SEQ ID NO: 4014 - protein, 524 aa, Unknown
  Description of Unknown: Integrase B4015 sequence
  PTHR30461:SF3,cd00338,SM00857,G3DSA:1.10.10.2600,IPR036162, PF13408,IPR025827,G3DSA:3.40.50.1390,PS51737,IPR006119, IPR038109,PF07508,IPR011109,SSF53041, PTHR30461,PS51736,Coil,PF00239
MDNLNLANVVIYARYSSAGQNDQSIDGQLAKCREYAQQRGYRVVGEYCDRALSGRYAETRPEFQRLIADSAKRAFDFVLVWKLDRFSRDRYDSAIYKKKLRANGVRVLSVTEGVGDSNESVLLEAILEAMAEEYSRQLAQNVRRGMRQNAEKGLSLGGLAPLGYRVVNKQYEINEDEARIVRFIHEQYADGAGQKQIVADCARLGYRNQRGNPLTLASVKRILANERYAGRYDYLGEIVIEDAFPAIVSKDLKKRVRDRLKANAKAPGHAKAKVEYLLHGKLFCGECGAPMIGECGRGRHGATYYYYTCAARKKQHTCKKRNERKDELEASIVDYIGSCVLTDSWIDGAAERVVAEYQKSYDASGIKPLEKQIRDADKEIDQLVDALISATAEAARRRINERIETAEARKRALEADLASLRIASRVRIRKEDIVVWLNQFRTGDRSDLEYRKKVIDLFVNAIYLYDDSFKLFLNVADSAQVTYADALALAPPSVSDFGASGVPDMHLSEHIIFINGVIGMIVQR

SEQ ID NO: 4015 - protein, 524 aa, Unknown
  Description of Unknown: Integrase B4016 sequence
  PTHR30461:SF3,SM00857,G3DSA:1.10.10.2600,IPR036162,PF13408, IPR025827,G3DSA:3.40.50.1390,PS51737,IPR006119,IPR038109, PF07508,IPR011109,SSF53041,PTHR30461,Coil, PS51736,cd00338,PF00239
MPKVTKIPPRLNPATFAPLESVEKRKVAGYARVSTDSEEQKTSYTAQVDYYTKFIKERIDWEFVGVYTDEGISATNTRHREGFNRMIADALNGKIDLVVTKSVSRFARNTVDSLTTIRKLKEKGVEVFFQKENIYTLDSKGELLLTIMSSLSQEESRSISENVTWGQRKRMADGKVSLPYSHFLGYRKGKDGIPEIVPEEAEIVRYIYRSFMEGKTPNHIAECLTFKHVPTPAGKEIWSPSTIESILTNEKYRGSALLQKSFTVDFLSKKKKINEGELMQYYIPESHEAIIPPDEFELVQAEYTRRKRIGRAYNSKSIFSAKLVCECCGGYFGSKIWHSTSKYRRTVWQCNGKFKNGKKCMTPHLYESHIKEKFLTAMNQVLANKTEIIENCLLFKETFSNTAMIEEKIENIQKQMEQLTKQIRMLIQKQSITPIKSEDYYRQYDGLVISFGKLKFKQDTLIQKQDEMENKLKFIMDYIEFLKSQENLIIEFSETLWFRAVDQVTVCTDGKMIFAFKDGSKIKV

SEQ ID NO: 4016 - protein, 524 aa, Unknown
  Description of Unknown: Integrase B4017 sequence
  PTHR30461:SF3,SM00857,G3DSA:1.10.10.2600,IPR036162,PF13408, IPR025827,G3DSA:3.40.50.1390,PS51737,IPR006119,IPR038109, PF07508,IPR011109,SSF53041,PTHR30461,PS51736, cd00338,PF00239
MAGAKNITVIPAKKRVGNTVTAEDKPKLKVAAYCRVSTDSEEQATSYDAQVEHYTEYIRKNPEWEFAGIYADDGISGTNTKKREEFNRMIEDTMAGKIDMIITKSISRFARNTLDCLKYIRQLKEKNVPVFFEKENINTLDAKGEVLLTIMASLAQQESESLSKNVKMGLQFRYQNGEVQVNHNWFLGYTKDENGHLIIDEEQAVVVRRIFREYLQGASLKTIADGLMADGIPTATGNKKWRGDGIRKILTNEKYMGDALLQKTYTVDVLTKKRVSNNGIVPQYYVENNHEAIIPRQLFMQVQQELQRRAHLRTENGKTKRVYSSKYALSSIIYCGKCGDLFRRVAWKARGASYNKWRCASRIEKGPKKGCDAEAISESEIQKAVMRAINKTLGGREEFLVQLQHNIEDVLNGDYTATLEYIDQRMAELQEKLVMCVNKNAEYDVIAKEIDALREKKAAVVTKDAEQEMLRKRINEMRHFLQMQTSRITEYDEQLVRRLIEKITVYDDKLIFEFKSGMTIELKR

SEQ ID NO: 4017 - protein, 524 aa, Unknown
  Description of Unknown: Integrase B4018 sequence
  cd00338,SM00857,G3DSA:1.10.10.2600,IPR036162,PF13408, IPR025827,G3DSA:3.40.50.1390,PS51737,IPR006119,IPR038109, PF07508,IPR011109,SSF53041,PTHR30461,PS51736, Coil,PF00239
MSLENVCIYLRKSRADREAEARGEGETLARHERILLDLARSRNYNVGAIYREIVSGETISARPVMQQLLREVEAGSWDGVLVVEVERLARGDTIDQGVVSRAFQFSDTKIITPTKTYDPDNEFDEEYFEFGLFMSRREYKTIKRRLNAGRISSVKEGKYCGSRPPYGYERVKLRGEKGFTLQPVPEQAEVIKMIYSLYSGASGDRIGVSKIVRKLNDMGIKSPSGKDWVPISVQDVLANPVYAGMIRWNGRKTVRAIQDGMVTQSRPRSKEDDILLFPGRHPAIVSKEMYDSVQQIRKKNPPRPISIKNTIKNPLAGIVYCSKCGRAMVRRPYQKRGQDDTLMCSYTSCPTVSSKLSLVERAVLNGIQDLVDEYRLNDAVPGPDINNAVKSKKKLIAEKEHELEKLNVQKMKQYDLLEQGIYTTEVFLERSNSIASSINSCQDSIECLKEEIRHDKELIDQQSSFIPRCENLLEIYWSLDTATKNKMLKELIERVNYTKDTKNAFRKGNEATFVLDIFPRIQSN

SEQ ID NO: 4018 - protein, 524 aa, Unknown
  Description of Unknown: Integrase B4019 sequence
  SM00857,G3DSA:1.10.10.2600,IPR036162,PF13408,PS51737, G3DSA:3.40.50.1390,IPR025827,IPR006119,IPR038109,PF07508, IPR011109,SSF53041,PTHR30461,Coil,PS51736, cd00338,PF00239
MNESVCIYLRKSRADREAEAHGEGETLARHERILLDLAKKKEYIVGAIYREVVSGETIADRPVMQQLLHEVESGMWDGVLVVEVERLARGDTIDQGVVSRAFQYSDTKIITPTKIYDPNNEFDEEYFEFGLFMSRREYKTIKRRLNNGRISSVKEGKYCGNKPPYGYERVKLEKEKGYTLRPVPAQAEVVKMIYAWYAGDGCEQIGVAKIVRKLNEMGIESALGGDWTPASIQGILTNPVYIGKIRWNGRKTVKTIHNGQVVKTRPRSRDVLICGGLHPAIISDGLYNSVQEIRQKNPPRPISIKNTVRNPLAGIVYCSKCGRAMVRRPYQKRGQEDTLMCPYTSCSTVSSKLSIVEKAVIDGIRDIAEEYKLNNDVNTSSKAIDLTIISKQNLIREKESELENLNTQKAKQYDLLEQGIYTTEVFLERSKTIATSIQSCSDIITKLREEIEHDENIMAQQSDFVPRCEELLNNYWNLDVESRNRMLKSLVEKVVYSKNIKNAYGKSNEINFELDIFPKIQKND

SEQ ID NO: 4019 - protein, 524 aa, Unknown
  Description of Unknown: Integrase B4020 sequence
  PTHR30461:SF3,SM00857,G3DSA:1.10.10.2600,IPR036162,PS51737, G3DSA:3.40.50.1390,IPR006119,IPR038109,PF07508,SSF53041, IPR011109,PTHR30461,Coil,PS51736,cd00338, PF00239
MNTDQIIEKVTSQYTQDKYAMYLRKSRADIEMEALGEGETLAKHKTMLFNLAARHDILPSQITIYQEIVSGESIQDRPEVQRLLEDVYAEKYKGVLVVEVERLARGNTKDQGEVAEAFQMSDTKIITPVKVYDPDNEFDQEYFEFGLFMSRREFKTIRRRLEAGKLQAVLEGNYLLPQRVFGYNIVRKSKDNRYLVINEEEQPLVQMMFDWFTEENRSCDWIAKQFTSMGIPTMQGSREWHKETISCMLKNKLYIGIITWGKSKTVKVRDPKTGKVQKKRVQASPEEVKYINGKHKPIISEAQFRKAQGRFKKNPINHGKELVSPLAGLIHCADCGKALDWINYKDSRGIRYSHKASTYCKKKSLRVEIVFDALVEALEAHIEDFEFKMNHDGNGAERARHLEKISRMDAELEKLEKKRKKLFDDYEDEVYTKEEFIERKQVYAQSIADLKAQLAQAKADVPEVIDYSERIITLQKIIETFKDPALDAQAKNDFLKEFIEDIRYDVIDYGRSKGGKPVLEIIFK

SEQ ID NO: 4020 - protein, 524 aa, Unknown
  Description of Unknown: Integrase B4021 sequence
  SM00857,G3DSA:1.10.10.2600,IPR036162,PS51737,G3DSA:3.40.50.1390, IPR006119,IPR038109,PF07508,IPR011109,SSF53041, PTHR30461,Coil,PS51736,cd00338,PF00239
MNESVCIYLRKSRADREAEAHGDGETLARHERILLDLAKKKEYIVGAIYREVVSGETIADRPVMQQLLHEVESGMWDGVLVVEVERLARGDTIDQGVVSRAFQYSDTKIITPTKIYDPNNEFDEEYFEFGLFMSRREYKTIKRRLNAGRISSVKEGKYCGNKPPYGYERVKLEKEKGYTLRPVPTQAEIVKMIYTWYAGDGCEQIGVAKIARKLNEMGIETALGGDWTPASIQGILTNPVYIGKIRWNGRKTVKTIQNGQVIKTRPRSKDTLICEGLHPAIISEVLYDSVQEIRKKNPPRPVSIANSIRNPLAGIVYCSKCGRAMVRRPYQKRGQEDTLMCPYTSCPTVSSKLSLVEKSVLDGIREIVEEYKLNNDINTSSKAIDCGITSKQNLIHEKENELESLNAQKAKQYDLLEQGIYTTEVFLERAKTISASIQSCSDTIEKLKEEIKHEQNIIKQQSDFIPRCEELLDNYWSLDTESKNKMLKSLIEKIAYSKDNKNAYGKGNKIGFQLDIFPKIQKNN

SEQ ID NO: 4021 - protein, 524 aa, Unknown
  Description of Unknown: Integrase B4022 sequence
  PTHR30461:SF3,cd00338,SM00857,G3DSA:1.10.10.2600,IPR036162, PS51737,G3DSA:3.40.50.1390,IPR006119,IPR038109,PF07508, SSF53041,IPR011109,PTHR30461,PS51736, Coil,PF00239
MRNDPILSLSHVIIYLRKSRADDPNMSVEDVLASHERQLQEYATKTFGSVIPESQIYREVVSGETISDRPVVQQVLRLIESEDIRAVLVIEPQRLSRGDLEDCGRIINLFRYSQTYVLTPMVSYDLCDEYDRKFFEMELTRGNDYLEYTKRILLRGRLAAVKQGDYIGNVAPYGYRKAVIADGKKRHHTLEIVPEEADAVKIMFTMYADGTGFPTIAHHLDALGIIPRNGDHWKVATLKDMLENPVYIGKIRWNWKKTRKVVEDGEIRKIRRRDENCLLFDGLHPAIIDKDLYDRANAIRKSRPHVRKNSQLSNPFAGLLFCECGTAMSMKRYVNHGRSGDRVLYSMICNDQTYCHTKSVSYSDFIDRVISVLRDAIKDFEVKLSDDCTGATIALEAHIHALESNLNQLRKKDERQKDAYENGVYSLSDYIARNSKIQDQIRKTTAALDTAKSTPLPSVDYSGKIVKFQACIDSLLDDSVSAVEKNRLLKECIERIDYHNDMPSLPGVGRHVDNIFDLKISLRL

SEQ ID NO: 4022 - protein, 523 aa, Unknown
  Description of Unknown: Integrase B4023 sequence
  SM00857,G3DSA:1.10.10.2600,IPR036162,PF13408,IPR025827, PS51737,G3DSA:3.40.50.1390,IPR006119,IPR038109,PF07508, IPR011109,SSF53041,PTHR30461,Coil,PS51736, cd00338,PF00239
MNESVCIYLRKSRADREAEAHGEGETLARHERILLELAKKKEYIVGAIYREVVSGETIADRPVMQQLLREVESGMWDGVLVVEVERLARGDTIDQGVVSRAFQYSDTKIITPTKIYDPNNEFDEEYFEFGLFMSRREYKTIKRRLNNGRISSVKEGKYCGNKPPYGYERVKLEKEKGYTLRPVPAQAEVVKMIYTWYAGDECEQIGVAKIVRKLNDMGIKSASGNDWTPTSVQGILANPVYIGKIRWNGRKTVKTIQNGQVVKTRPRSKDVLICEGLHPAIISDDLYNSAQKIRQKNPYRPISIKNTVRNPLAGIVYCSKCGRAMVRRPYQKRGQEDTLMCPYTSCSTVSSKLSLVEKAVIDGIREIAEEYKLNNDINVPSNTIDSGITSKQNLIREKESELESLNTQKAKQYDLLEQGIYTTEIFLERAKTISASIQSCSDTIEKLKEEIKHDQNIIKQQSDFIPRCEELLDNYWSLDTESKNKMLKSLIEKVVYSKNTKNAYGKGNEIGFQLDIFPKIQEK

SEQ ID NO: 4023 - protein, 523 aa, Unknown
  Description of Unknown: Integrase B4024 sequence
  PTHR30461:SF3,cd00338,SM00857,IPR036162,PF13408, IPR025827,G3DSA:3.40.50.1390,PS51737,IPR006119,PF07508, SSF53041,IPR011109,PTHR30461,PS51736,Coil, PF00239
MFFGIYGRKSVYSDKSDSVDNQHRMCNDYIKAHFKADDITLVTSYSDEDYTGANTKRPDLQRLLEDVKSGAINVLVVYQLDRISRDVRDFSNIYAMLEEYHVMFISIKENIDTTTPIGRAMMYVTVVFAQMERETIATRVRDNMIGLAKKGFWTGGNPPYGYVRKNILINGKKHVTIEPDPDGVAYNIWIYDSFLKNHCSLQSMETYFRKEGIKTRNGAFFSTTQLYKILTMPYCVEATPEIYDYFAAKGCQMDPDSPREKWDGSVGVMIYGRSTGVNKKHQLQPPEKWLVCLGLHKPFMPAAKWLAVQNQFSENKFDKTQKYDIPLLKGILRCSCGSIMAVSRKKKINSEVSSWYYCLRRMKNGVEACDRKQIKVDIIDQKLLNTLHSIEIDPSMIYRFVQKSELPLPDIKTINNKISSIELRIGRLASSLALADGSAASKYIVAEIERLDSDLQFLKRERAVINVEIKKRGELNESAEGKAQHIQNVMKGLNGFTAEEKNRIMRDILKECVWDGSELSIVL

SEQ ID NO: 4024 - protein, 523 aa, Unknown
  Description of Unknown: Integrase B4025 sequence
  SM00857,G3DSA:1.10.10.2600,IPR036162,PS51737,G3DSA:3.40.50.1390, IPR006119,IPR038109,PF07508,IPR011109,SSF53041, PTHR30461,Coil,PS51736,cd00338,PF00239
MNESVCIYLRKSRADREAEAHGEGETLARHERILLDLAKKKEYIVGAIYREVVSGETIADRPVMQQLLHEVESGMWDGVLVVEVERLARGDTIDQGIVSRAFQYSDTKIITPTKIYDPNNEFDEEYFEFGLFMSRREYKTIKRRLNAGRISSVKEGKYCGNKPPYGYERVKLEKEKGYTLRPVPTQAEVVKMIYTWYAGDGCEQIGVAKIARKLNEMGIESALGGDWTPASIQGILTNPVYIGKIRWNGRKTVKTIQNGQVIKTRPRSKDTLICEGLHPAIISEDLFNSVQEIRKKNPPRPVSIANSIRNPLAGIVYCSKCGRSMVRRPYQKRGQEDTLMCPYTSCPTVSSKLSLVEKSVIDGIREIVEEYKLNNDINISSKAIDCGITSKQNLIHEKENELESLNAQKAKQYDLLEQGIYTTEVFLERAKTISASIQSCSNTIEKLKEEIKHDENIIKQQSDFIPRCEELLDNYWSLDTESKNKMLKSLIEKVAYSKDNKNAYGKGNEIGFQLDIFPKIQEK

SEQ ID NO: 4025 - protein, 523 aa, Unknown
  Description of Unknown: Integrase B4026 sequence
  PTHR30461:SF3,SM00857,G3DSA:1.10.10.2600,IPR036162,PS51737, G3DSA:3.40.50.1390,IPR006119,IPR038109,PF07508,IPR011109, SSF53041,PF00239,PTHR30461,PS51736, Coil,cd00338
MVSFDSIIIYLRKSRSDDPAQTVEEVLAKHEHILQDYCMKEYGKAIPEKRIYREVVSGETIQDRPVMQQLLKELEAENISGVLIVEPQRLSRGDLQDCGQIINSFRYTNTAVITPGKTYDLSDEYDRKFFEMELTRGNDYLEYTKKILSRGRVASVRQGNYICSVRPYGYRKITLGSGKDKCHTLEIIPEEADAIRLMYHLYLDENMGFTNIARTLDSLHIKPLKSDNWSAATIRDMIDNPIYIGKVVWNSRKVVKKWENEQITKVRPRNKGDDVICVNGRHEAIIDEHTFEAARNKRGLNPKVKKFKELRNPLAGLLFCGTCGHGMSMKKYVDKRSHTGKITTVMLCNQQAVCHTKSAQYEGILAKIKVSLANAIFDFEIKLKEQENNNIDMHELRIASLEEELNRLYNKDVRQKDAYEDGIYTKEEYIERNSKLQERILNVKEDIADEKKNIPVKIDYEDKIITFKDCLASLDDPNISAADKNILLKSCIDKIIYYNDMPSKPGIGRYIENSFRLEIFLKL

SEQ ID NO: 4026 - protein, 523 aa, Unknown
  Description of Unknown: Integrase B4027 sequence
  PTHR30461:SF3,cd00338,SM00857,IPR006118,G3DSA:1.10.10.2600, IPR036162,PS51737,G3DSA:3.40.50.1390,IPR006119,IPR038109, PF07508,IPR011109,SSF53041,PTHR30461,PS00397, PS51736,Coil,PF00239
MNNNYENITVDDLLKNLPIYKELIQHINTLDSTCKIRIAAAYLRVSTDMQTEYSPEAQLEDIIKYCIKENIMLPKENIYIEPGLSGTRADKRPKFQMMMLKAEEKEKPFDLILVHKYDRFARNREDSIVYKSKLRKKLGIDIIAVKEQLPEDKKLAMMMESQLETWGEYYSMNLSDEVKKGQRKKADRGESSAPAPFGYEKVIKEIRKEKNRDKIIRELIVKKDEADIVIKIFDKFINGESLRNITIWLNSLGIKTKRNGKFSDRAVLWILNNPIYIGYIRWTEDGMQRDFNNPDTIVKKSTHEHIITDEVWEKAQEKLKTMNEVYGHRKHQVKHEHWLRGLIRCDNCGEMLVKNGKAFQCTGYTHARCTISHSITVKSVEEAILEQLKINFKNKPINIEISRKSFDNTDEVAILQNQLSQIEIKEKRVKLAYENGIDSLEEYKENKERLNNDKQLILKEIAKKGKSKSEIEKREDVFKRCKDAYGILTDPTISDDDKAIVTHSLIDHIVFVKNERKLVITYK

SEQ ID NO: 4027 - protein, 523 aa, Unknown
  Description of Unknown: Integrase B4028 sequence
  cd03768,PTHR30461:SF3,SM00857,IPR036162,PF13408, PS51737,IPR025827,G3DSA:3.40.50.1390,IPR006119,PF07508, IPR011109,SSF53041,PTHR30461,PS51736,Coil, PF00239
MRFFSYGRKSVFSDKSDSIDNQFRMNREYCESKFSGQVDSWQQFSDEDFTGANTSRPDLQRMLSFIKGGFCDVLVVYQLDRLSRDVRDFANIYALLEEHGVMFISIKENIDTTTPIGRAMMYVTVVFAQMERETIAARVTDNMLGLAKKGYWTGGNPPVGYVRKHIVVNGKKHCSIEVDPDGARYVTQIFDTFLAYNCSLQGMETRFKNQGIRTQSGKFFSTTQLHKMLTMPYCVEATPEVYDFYAAKGCIMDPGSPREMWDGSVGVIIYGRSTEKNKKHQAQPPEKWTVCLGKHKPFMPAEKWLAVQSRFTQNKCIKDAKWPVPLLKGVLRCKCGNLMQVSRKKKVDGTCSSWYYCRKRMRQGVDACDMGQIKCDLLDEKVLELFRGITADPALIQKFVKAEAPADVPDLKAAQARVSACERKIGRLAASLALAEDSAASKYIIAEMERLDVELGALKREASLAEMESHRAAASAKDAKATAAEIAKLIHGLDGFDDKEKNAIARAVIQECTWDGERLFIKL

SEQ ID NO: 4028 - protein, 523 aa, Unknown
  Description of Unknown: Integrase B4029 sequence
  cd03768,PTHR30461:SF3,SM00857,IPR036162,PF13408, IPR025827,PS51737,G3DSA:3.40.50.1390,IPR006119,PF07508, IPR011109,SSF53041,PTHR30461,PS51736,Coil, PF00239
MRFFSYGRKSVFSDKSDSIDNQFRMNREYCESKFSGQVDSWQQFSDEDFTGANTSRPDLQRMLSFIKGGFCDVLVVYQLDRLSRDVRDFANIYALLEEHGVMFISIKENIDTTTPIGRAMMYVTVVFAQMERETIAARVTDNMLGLAKKGYWTGGNPPVGYVRKHIVVNGKKHCSIEVDPDGARYVTQIFDTFLAYNCSLQGMETRFKNQGIRTQSGKFFSTTQLHKMLTMPYCVEATPEVYDFYAAKGCIMDPGSPREMWDGSVGVIIYGRSTEKNKKHQAQPPEKWTVCLGKHKPFMPAEKWLAVQSRFTQNKCIKDAKWPVPLLKGVLRCKCGNLMQVSRKKKVDGTCSSWYYCRKRMRQGVDACDMGQIKCDLLDEEVLELFRGITADPALIQKFVKAEAPADVPDLKAAQARVSACERKIGRLAASLALAEDSAASKYIIAEMERLDVELGALKREASLAEMESHQAAASAKDAKATAAEIAKLIHGLDGFDDKEKNAIARAVIQECTWDGERLFITL

SEQ ID NO: 4029 - protein, 523 aa, Unknown
  Description of Unknown: Integrase B4030 sequence
  PTHR30461:SF3,cd00338,SM00857,IPR006118,G3DSA:1.10.10.2600, IPR036162,PS51737,G3DSA:3.40.50.1390,IPR006119,IPR038109, PF07508,SSF53041,IPR011109,PTHR30461,PS00397, PS51736,Coil,PF00239
MNNNYENITVDDLLKNLPIYKELIQHINTLDSTCKIRIAAAYLRVSTDMQTEYSPEAQLEDIIKYCIKENIMLPKENIYIEPGLSGTRADKRPKFQMMMLKAEEKEKPFDLILVHKYDRFARNREDSIVYKSKLRKKLGIDIIAVKEQLPEDKKLAMMMESQLETWGEYYSMNLSDEVKKGQRKKADRGESSAPAPFGYEKVIKEIRKEKNRDKIIRELIVKKDEADIVIKIFDKFINGESLRNITIWLNSLGIKTKRNGKFSDRAVLWILNNPIYIGYIRWTEDGMQRDFNNPDTIVKKSTHEHIITDEVWEKAQEKLKTMNEVYGHRKHQVKHEHWLRGLIRCDNCGEMLVKNGKAFQCTGYTHARCTISHSITVKSVEEAILEQLKINFKDKPINIEISRKSFDNTDEVAILQNQLSQIEIKEKRVKLAYENGIDSLEEYKENKERLNNDKQLILKEIAKKGKSKSEIEKREDVFKRCKDAYGILTDPTISDDDKAIVTHSLIDHIVFVKNERKLVITYK

SEQ ID NO: 4030 - protein, 523 aa, Unknown
  Description of Unknown: Integrase B4031 sequence
  PTHR30461:SF3,cd00338,SM00857,IPR036162,PF13408, IPR025827,PS51737,G3DSA:3.40.50.1390,IPR006119,PF07508, IPR011109,SSF53041,PTHR30461,PS51736,Coil, PF00239
MFFGIYGRKSVYSDKSDSVDNQHRMCNDYIKTHFKSDDITLITSYSDEDYTGANTKRPDLQRLLEDVKSGAINVLVVYQLDRISRDVRDFSNIYALLEEYHVMFISIKENIDTTTPIGRAMMYVTVVFAQMERETIATRVRDNMIGLAKKGFWTGGNPPYGYVRKNIVINGKKHVTIEPDPDGVAYNIWIYDSFLKNHCSLQSMETYFRKEGIKTRNGAFFSSTQLYKILTMPYCVEATPEIYDYFAAKGCQMDPDSPRDKWDGSVGVMVYGRSTEVNKKHQLQPPEKWLICLGLHKPFMPAAKWLAVQNQFSKNKFDKTPKYDIPLLKGVLRCSCGSIMAVSRKKKINGEVSSWYYCLRRMRNGVEACDRKQIKVDIIDQKLLNTLHSIESDPSMIFCFVQKKELPLPDIKTINNKISSVESKISKLASSLALADGSAASKYIVAEIERLDSDLQFLKRERAAINIEIKKRDELNESAESKALHIQNVMKGLSGFTAEEKNLIMRDILKECVWDGSELSIVL

SEQ ID NO: 4031 - protein, 523 aa, Unknown
  Description of Unknown: Integrase B4032 sequence
  cd03768,PTHR30461:SF3,SM00857,IPR036162,PF13408, IPR025827,G3DSA:3.40.50.1390,PS51737,IPR006119,PF07508, IPR011109,SSF53041,PTHR30461,PS51736,Coil, PF00239
MRFFSYGRKSVFSDKSDSIDNQFRMNREYCESKFSGQVDSWQQFSDEDFTGANTSRPDLQRMLSFIKGGFCDVLVVYQLDRLSRDVRDFANIYALLEEHGVMFISIKENIDTTTPIGRAMMYVTVVFAQMERETIAARVTDNMLGLAKKGYWTGGNPPVGYVRKHIVVNGKKHCSIEVDPEGARYVTQIFDTFLAYNCSLQGMETRFKNQGIRTQNGKFFSTAQLHKMLTMPYCVEATPEVYDFYAAKGCIMDPGSPREMWDGSVGVIIYGRSTEKNKKHQAQPPEKWTVCLGKHKPFMPAEKWLAVQSRFTQNKCIKDAKWPVPLLKGVLRCKCGNLMQVSRKKKVDGTCSSWYYCRKRMRQGVDACDMGQIKCDLLDEEVLELFRGITADPALIQKFVKAEAPADVPDLKAAQARVSACERKIGRLAASLALAEDSAASKYIIAEMERLDVELGALKREASLAEMESHQAAASAKDAKATAAEIAKLIHGLEGFDDKEKNAIARAVIQECTWDGERLFITL

SEQ ID NO: 4032 - protein, 523 aa, Unknown
  Description of Unknown: Integrase B4033 sequence
  PTHR30461:SF3,SM00857,G3DSA:1.10.10.2600,IPR036162,PS51737, G3DSA:3.40.50.1390,IPR006119,IPR038109,PF07508,IPR011109, SSF53041,PTHR30461,Coil,PS51736,cd00338, PF00239
MPNTKSFTVNEVLVYLRKSRSDSPDMSVEEVLRKHEEMIQQYASTHFHSPIPEKNIFREVVSGETIDSRPQMKNLLKMIESEQFKAVLVVEPQRLSRGDLEDCGRLINILRYTNTTVLTLTHSFNLQEEYERKFFEMEITRGNDYLEYTKRILKRGREASVAKGNYIGSVDPYGYKKTVIKKDGVTCHTLEIIPEEADTVKLIHELYAYTPGGIGFTNIAHKLDAMHIKPKKAAHWTPAIISSILCNPLYLGMVRWNNRKVVKYINEGQLAKARPQNSEAKYYKGLHKPIITQELYDACMARRGTNPSLRRNKELCNPFTGLLYCGTCGHAMSLKIYKNHNSVSQMMLCNHQAYCHTKSVLYSAFLRRFMSSMEDTLNDFELAQKSDDGRAQAISKTIVVNLENKLKKLNEKDARQKDAYEDGIYSKEEFLERNVRTQQDIASTIIALEDARAKKADIIDYEEKIRRFKDCLHALNDPELSAAEKNRFLKSCVDKILYYNNMESKAGIGRYIENVFSLEIQYK

SEQ ID NO: 4033 - protein, 523 aa, Unknown
  Description of Unknown: Integrase B4034 sequence
  SM00857,G3DSA:1.10.10.2600,IPR036162,PF13408,PS51737, G3DSA:3.40.50.1390,IPR025827,IPR006119,IPR038109,PF07508, IPR011109,SSF53041,PF00239,PTHR30461,PS51736, Coil,cd00338
MNENVCIYLRKSRADQEAELRGEGETLARHERILLDLAKSRNYSVGAIYREIVSGETISARPVMQQLLREVEAGSWDGVLVVEVERLARGDTIDQGVVSRAFQFSDTKIITPTKTYDPDNEFDEEYFEFGLFMSRREYKTIKRRLNAGRIASVKEGKYCGSKPPYGYERVKLHGEKGFTLQPVPEQAEVIKMIYSLYSGASGDRIGVSKIVRKLNDMGIKSPSGKDWVPISVQDVLANPVYAGMIRWNGRKTVRAIQDGMVTQSRPRSKDDDILLFPGRHPAIVSKEMYDSVQQIRKKNPPRPISIKNTIKNPLAGIVYCSKCGRAMVRRPYQKRGQDDTLMCSYTSCPTVSSKLSLVERAVLNGIQDLVDEYRLNDAVPGPDINNAVKSKKKLIAEKEHELEKLNVQKMKQYDLLEQGIYTTEVFLERSNSIASSINSCQDSIECLKEEIRHDKELIDQQSSFIPRCENLLEIYWSLDTAAKNKMLKELIERVNYTKDVKNAFRMGNEATFVLDIFPRIQSN

SEQ ID NO: 4034 - protein, 523 aa, Unknown
  Description of Unknown: Integrase B4035 sequence
  cd03768,PTHR30461:SF3,SM00857,IPR036162,PF13408, IPR025827,G3DSA:3.40.50.1390,PS51737,IPR006119,PF07508, SSF53041,IPR011109,PTHR30461,PS51736,Coil, PF00239
MRFFSYGRKSVFSDKSDSIDNQFRMNREYCESKFSGQVDSWQQFSDEDFTGANTSRPDLQRMLSFIKGGFCDVLVVYQLDRLSRDVRDFANIYALLEEHGVMFISIKENIDTTTPIGRAMMYVTVVFAQMERETIAARVTDNMLGLAKKGYWTGGNPPVGYVRKHIVVNGKKHCSIEVDPEGARYVTQIFDTFLAYNCSLQGMETRFKNQGIRTQNGKFFSTAQLHKMLTMPYCVEATPEVYDFYAAKGCIMDPGSPREMWDGSVGVIIYGRSTEKNKKHQAQPPEKWTVCLGKHKPFMPAEKWLAVQSRFTQNKCIKDAKWPVPLLKGVLRCKCGNLMQVSRKKKVDGTCSSWYYCRKRMRQGVDACDMGQIKCDLLDEEVLELFRGITADPALIQKFVKAEAPADVPDLKAAQARVSACERKIGRLAASLALAEDSAASKYIIAEMERLDVELGALKREASLAEMESHRAAASAKDAKATAAEIAKLIHGLDGFDDKEKNAIARAVIQECTWDGERLFITL

SEQ ID NO: 4035 - protein, 523 aa, Unknown
  Description of Unknown: Integrase B4036 sequence
  cd03768,PTHR30461:SF3,SM00857,IPR036162,PF13408, IPR025827,G3DSA:3.40.50.1390,PS51737,IPR006119,PF07508, SSF53041,IPR011109,PTHR30461,PS51736,Coil, PF00239
MRFFSYGRKSVFSDKSDSIDNQFRMNREYCESKFSGQVDSWQQFSDEDFTGANTSRPDLQRMLSFIKGGFCDVLVVYQLDRLSRDVRDFANIYALLEEHGVMFISIKENIDTTTPIGRAMMYVTVVFAQMERETIAARVTDNMLGLAKKGYWTGGNPPVGYVRKHIVVNGKKHCSIEVDPDGARYVTQIFDTFLAYNCSLQGMETRFKNQGIRTQSGKFFSTTQLHKILTMPYCVEATPEVYDFYAAKGCIMDPGSPREMWDGSVGVIIYGRSTEKNKKHQAQPPEKWTVCLGKHKPFMPAEKWLAVQSRFTQNKCIKDAKWPVPLLKGVLRCKCGNLMQVSRKKKVDGTCSSWYYCRKRMRQGVDACDMGQIKCDLLDEEVLELFRGITADPALIQKFVKAETPADVPDLKAAQARVSACERKIGRLAASLALAEDSAASKYIIAEMERLDVELGALKREASLAEMESHRAAASAKDAKATAAEIAKLIHGLDGFDDKEKNAIARAVIQECTWDGERLFITL

SEQ ID NO: 4036 - protein, 523 aa, Unknown
  Description of Unknown: Integrase B4037 sequence
  cd03768,PTHR30461:SF3,SM00857,IPR036162,PF13408, PS51737,G3DSA:3.40.50.1390,IPR025827,IPR006119,PF07508, IPR011109,SSF53041,PTHR30461,PS51736,Coil, PF00239
MRFFSYGRKSVFSDKSDSIDNQFRMNREYCESKFSGQVDSWQQFSDEDFTGANTSRPDLQRMLSFIKGGFCDVLVVYQLDRLSRDVRDFANIYALLEEHGVMFISIKENIDTTTPIGRAMMYVTVVFAQMERETIAARVTDNMLGLAKKGYWTGGNPPVGYVRKHIVVDGKKHCSIEVDPDGARYVTQIFDTFLAYNCSLQGMETRFKNQGIRTQSGKFFSTTQLHKMLTMPYCVEATPEVYDFYAAKGCIMDPGSPREMWDGSVGVIIYGRSTEKNKKHQAQPPEKWTVCLGKHKPFMPAEKWLAVQSRFTQNKCIKDAKWPVPLLKGVLRCKCGNLMQVSRKKKVDGTCSSWYYCRKRMRQGVDACDMGQIKCDLLDEKVLELFRGITADPGLIQKFVKTKAPDDIPNLKAAQARVSACERKIGRLAASLALAEDSTASKYIIAEMERLDVELGALKREASLAEMENHRAAANAKDAKATAAEIAKLIHGLEGFDDKEKNAIARAVIQECTWDGERLFITL

SEQ ID NO: 4037 - protein, 523 aa, Unknown
  Description of Unknown: Integrase B4038 sequence
  cd03768,PTHR30461:SF3,SM00857,G3DSA:1.10.10.2600,IPR036162, PF13408,IPR025827,G3DSA:3.40.50.1390,PS51737,IPR006119, IPR038109,PF07508,IPR011109,SSF53041,PTHR30461, PS51736,Coil,PF00239
MNTIAIYTRKSKFTGKGESIENQIEKCKKFIEFKFNIDSENVNIFIDEGFSGKNENRPQYQLMMEKIKKKEIDSIVIYQLNRLGRNARDIHNTMQLCDDLGVIIYSATEGFDSSTSFGRAVIGILASLAQLEREQLAERVKDNMYTLAKMGRWLGGQSPLGFDGSREYYIDETGKERSITKLKKNEEELKLVKLLYDKYLEEKSLSQVGKWALINHLTGKNGGNLNKNAINVILQNPVYVKSSKEVFEYLSNEGYEVCGEPNGNGLLRYGKDDEPIVATAKHKGVIPSDQWIEVQKILKGNAYKAPRMGKTNTALLTGLLRCKCGSTMRISYGQKRKDGTKPFYYICNMKINSGGARCNLKNLNGNLFEKNFIQFLKNYSKETLFAELQKLLNNSKDLESTISSNKIDVEIEKSNKAIKQILNKLKLTDDDELSKILLQEIKVENNNLKALSKQKEELLNDQSEVVITQSEVLAILDDLDNFQKTFDDLNLEDKQKALKSLIESITLTDDKFIVDFNIKKKTR

SEQ ID NO: 4038 - protein, 523 aa, Unknown
  Description of Unknown: Integrase B4039 sequence
  PTHR30461:SF3,SM00857,IPR036162,PF13408,PS51737, G3DSA:3.40.50.1390,IPR025827,IPR006119,PF07508,IPR011109, SSF53041,PTHR30461,Coil,PS51736,cd00338, PF00239
MNICCYGRKSIYSDHSDSIDNQFRMCRDYVEMKFSGQVDSFLEYQDEAFTGANTKRPDLQRLLADISAGNCDVLIVYQLDRLSRDVRDFANIYAILEEHRVKFISIKENIDTSTPIGRAMMYVTVVFAQMERETIAARVADNMIGLAKKGYWTGGNPPEGYVRTRIEANGKKHCSIVPDPEGVKYVNWIFDTFLQNDYSLQSMETAFKNQGIRTRRGAFFSTAQLHKILTMPYCVQATPEVYDYYVARGCQMDPESPRESWDGTCGVMIYGRTTQKNKKHQMQPPEKWLVCLGAHEPFMPADKWLAVQARFCRNKFDKTMKYDVPLLKGVLRCSCGSIMCVARKKKKEGVSSWYYCLKRMRQGKEVCDSHQIKCELLDQKVLELLQSIERDPALIHQFAEQNAEVLAGPDPKVLASKISTCQTRIDRLVSSLSLAAESSAQKYILAELERLDLEIQALRREHNLALTAERNRTRQQQDTFSKVSEISRLIGDMDSFSASEKNAIVKDVIKKCVWDGESLSIML

SEQ ID NO: 4039 - protein, 523 aa, Unknown
  Description of Unknown: Integrase B4040 sequence
  cd03768,PTHR30461:SF3,SM00857,IPR036162,PF13408, PS51737,IPR025827,G3DSA:3.40.50.1390,IPR006119,PF07508, IPR011109,SSF53041,PTHR30461,PS51736,Coil, PF00239
MRFFSYGRKSVFSDKSDSIDNQFRMNREYCESKFSGQVDSWQQFSDEDFTGANTSRPDLQRMLSFIKGGFCDVLVVYQLDRLSRDVRDFANIYALLEEHGVMFISIKENIDTTTPIGRAMMYVTVVFAQMERETIAARVTDNMLGLAKKGYWTGGNPPVGYVRKHIVVNGKKHCSIEVDPDGARYVTQIFDTFLAYNCSLQGMETRFKNQGIRTQSGKFFSTTQLHKMLTMPYCVEATPEVYDFYAAKGCIMDPGSPREMWDGSVGVIIYGRSTEKNKKHQAQPPEKWTVCLGKHKPFMPAEKWLAVQSRFTQNKCIKDAKWPVPLLKGVLRCKCGNLMQVSRKKKVDGTCSSWYYCRKRMRQGVDACDMGQIKCDLLDGEVLELFRGITADPALIQKFVKAEAPADVPDLKAAQARVSACERKIGRLAASLALAEDSAASKYIIAEMERLDVELGALKREASLAEMESHRAAASAKDAKATAAEIAKLIHGLDGFDDKEKNAIARAVIQECTWDGERLFIKL

SEQ ID NO: 4040 - protein, 523 aa, Unknown
  Description of Unknown: Integrase B4041 sequence
  cd03768,PTHR30461:SF3,SM00857,IPR036162,PF13408, PS51737,G3DSA:3.40.50.1390,IPR025827,IPR006119,PF07508, IPR011109,SSF53041,PTHR30461,PS51736,Coil, PF00239
MRFFSYGRKSVFSDKSDSIDNQFRMNREYCESKFSGQVDSWQQFSDEDFTGANTSRPDLQRMLSFIKGGFCDVLVVYQLDRLSRDVRDFANIYALLEEHGVMFISIKENIDTTTPIGRAMMYVTVVFAQMERETIAARVTDNMLGLAKKGYWTGGNPPVGYVRKHIVVNGKKHCSIEVDPDGARYVTQIFDTFLAYNCSLQGMETRFKNQGIRTQSGKFFSTTQLHKMLTMPYCVEATPEVYDFYAAKGCIMDPGSPREMWDGSVGVIIYGRSTEKNKKHQAQPPEKWTVCLGKHKPFMPAEKWLAVQSRFTQNKCIKDAKWPVPLLKGVLRCKCGNLMQVSRKKKVDGTCSSWYYCRKRMRQGVDACDMGQIKCNLLDEKVLELFRGITADPALIQKFVKAEAPTDVPDLKAAQARVSACERKIGRLAASLALAEDSAASKYIIAEMERLDVELGALKREASLAEMEIHRAAASAKDAKATAAEIAKLIHGLDGFDDKEKNAIARAVIQECIWDGERLFITL

SEQ ID NO: 4041 - protein, 523 aa, Unknown
  Description of Unknown: Integrase B4042 sequence
  cd03768,PTHR30461:SF3,SM00857,IPR036162,PF13408, IPR025827,PS51737,G3DSA:3.40.50.1390,IPR006119,PF07508, IPR011109,SSF53041,PTHR30461,PS51736,Coil, PF00239
MRFFSYGRKSVFSDKSDSIDNQFRMNREYCESKFSGQVDSWQQFSDEDFTGANTSRPDLQRMLSFIKGGFCDVLVVYQLDRLSRDVRDFANIYALLEEHGVMFISIKENIDTTTPIGRAMMYVTVVFAQMERETIAARVTDNMLGLAKKGYWTGGNPPVGYVRKHIVVNGKKHCSIEVDPDGARYVTQIFDTFLAYNCSLQGMETRFKNQGIRTQSGKFFSTTQLHKMLTMPYCVEATPEVYDFYAAKGCIMDPGSPREMWDGSVGVIIYGRSTEKNKKHQAQPPEKWTVCLGKHKPFMPAEKWLAVQSRFTQNKCIKDAKWPVPLLKGVLRCKCGNLMQVSRKKKVDGTCSSWYYCRKRMRQGVDACDMGQIKCDLLDEEVLELFRGITADPALIQKFVKAEAPADVPDLKAAQARVSACERKIGRLAASLALAEDSAASKYIIAEMERLDVELGALKREASLAEMESHRAAASAKDAKATAAEIAKLIHGLDGFDDKEKNAIARAVIQECTWDGERLFITL

SEQ ID NO: 4042 - protein, 523 aa, Unknown
  Description of Unknown: Integrase B4043 sequence
  PTHR30461:SF3,SM00857,IPR036162,PF13408,IPR025827, PS51737,G3DSA:3.40.50.1390,IPR006119,PF07508,IPR011109, SSF53041,PTHR30461,Coil,PS51736,cd00338, PF00239
MNICCYGRKSIYSDHSDSIDNQFRMCRDYVEMKFSGQVDSFLEYQDEAFTGANIKRPDLQRLLVDIAAGNCDILIVYQLDRLSRDVRDFANIYAILEEHHVKFISIKENIDTSTPIGRAMMYVTVVFAQMERETIAARVADNMIGLAKKGYWTGGNPPEGYVRTRIEANGKKHCSIVPDPEGVKYVTWIFDTFLQNGYSLQSMETAFKKQGIRTRTGAFFSTTQLHKILTMPYCAQATPEVYDYYAAKGCQMDIESPREQWDGTCGVMIYGRTTQKNKKHQMQPPEKWLVCLGAHEPFMPADKWLAVQARFAQNKFDKTMKYDVPLLKGVLRCSCGSIMCVSRKKKKEGVSSWYYCLKRMRQGKEVCDSHHIKCELLDQKVLELLQSIKRDPGVIQKFAEQNTEVLSGPDPKVLASKINTCQTRIDRLVSSLSLAADSSAQKYILAELERLDLEIQALRREHNLALAVERKRSLQQQDTLSKVSEINRLVSDLDSFSAAEKNAIVKDVIKKCVWDGESLSIML

SEQ ID NO: 4043 - protein, 523 aa, Unknown
  Description of Unknown: Integrase B4044 sequence
  cd03768,PTHR30461:SF3,SM00857,IPR036162,PF13408, PS51737,G3DSA:3.40.50.1390,IPR025827,IPR006119,PF07508, IPR011109,SSF53041,PTHR30461,PS51736,Coil, PF00239
MRFFSYGRKSVFSDKSDSIDNQFRMNREYCESKFSGQVDSWQQFSDEDFTGANTSRPDLQRMLSFIKGGFCDVLVVYQLDRLSRDVRDFANIYALLEEHGVMFISIKENIDTTTPIGRAMMYVTVVFAQMERETIAARVTDNMLGLAKKGYWTGGNPPVGYVRKHIVVNGKKHCSIEVDPDGARYVTQIFDTFLAYNCSLQGMETRFKNQGIRTQSGKFFSTTQLHKMLTMPYCVEATPEVYDFYAAKGCIMDPGSPREMWDGSVGVIIYGRSTEKNKKHQAQPPEKWTVCLGKHKPFMPAEKWLAVQSRFTQNKCIKDAKWPVPLLKGVLRCKCGNLMQVSRKKKVDGTCSSWYYCRKRMRQGVDACDMGQIKCDLLDDEVLELFRGIAADPGLIQKFVKAEAPADVPDLKAAQARVSACERKIGRLAASLALAEDSAASKYIIAEMERLDVELGALKREASLAEMESHRAAASAKDAKATAAEIAKLIHGLDGFDDKEKNAIARAVIQECTWDGERLFIKL

SEQ ID NO: 4044 - protein, 523 aa, Unknown
  Description of Unknown: Integrase B4045 sequence
  PTHR30461:SF3,SM00857,G3DSA:1.10.10.2600,IPR036162,PF13408, PS51737,G3DSA:3.40.50.1390,IPR025827,IPR006119,IPR038109, PF07508,IPR011109,SSF53041,PTHR30461,Coil, PS51736,cd00338,PF00239
MAKSVTTIPATLSRFTAAPINSTKKRRVAAYARVSTDNEEQLTSYEAQIDYYTNYINGRDDWEFVGVYPDEGITGTNTKKREQFRQMVADALDGKIDLIITKSVSRFARNTVDSLTTIRKLKEHNVEVYFEKENIWTFDSKGELLLTIMSSLAQEESRSISENCTWGQRKRFADGKVTVPFKRFLGYDMGPDHNLVVNPEQAKLVKRIYGMFLQGQSPFQIARTLTEEGIPSPGGKDHWNPSNIKSILTNEKYKGDALLQKSFTVDFLTKKKKTNEGEIPQYYVKDNHEAIIDPETFEMVQTLMTTRTKGRNRKSSVSIFSSKVKCGDCGSWYGPKVWHSNDAYRKVIWQCNHKFDGQKCATPTLTEDEIKELFLRAANQVIDQKEQFIAIYEQVLSRNLDTTALESELSDLEAEINIAAELIEECIKENAHVALDQDEYQKRYDALVARFDKAKARHTEVTDLIAERMARKHQIEAYLKNLRSREPLTEFRETDWLAMVDYIIVHNKKDIRVTFKDGTEIET

SEQ ID NO: 4045 - protein, 523 aa, Unknown
  Description of Unknown: Integrase B4046 sequence
  PTHR30461:SF3,SM00857,G3DSA:1.10.10.2600,IPR036162,PS51737, G3DSA:3.40.50.1390,IPR006119,IPR038109,PF07508,IPR011109, SSF53041,PF00239,PTHR30461,PS51736,Coil, cd00338
MVSFDSIIIYLRKSRSDDPAQTVEEVLAKHEHILQDYCMKEYGKAIPEKRIYREVVSGETIQDRPVMQQLLKELETGNISGVLIVEPQRLSRGDLQDCGQIINSFRYTNTAVITPGKTYDLSDEYDRKFFEMELTRGNDYLEYTKKILSRGRVASVRQGNYICSVRPYGYRKITLGSGKDKCHTLEIIPEEADAIRLMYHLYLDENMGFTNIARTLDSLHIKPLKSDNWSAATIRDMIDNPIYIGKVVWNSRKVVKKWENEQITKVRPRNKGDDVICVNGRHEAIIDEHTFEAARNKRGLTPKVKKFKELRNPLAGLLFCGTCGHGMSMKKYVDKRSHTGKVTTVMLCNQQAVCHTKSAQYEDILAKIKVSLANAISDFKIKLKEQENNNIDMHELRIASLEEELNRLYNKDVRQKDAYEDGIYTKEEYIERNSKLQERILNVKEEIADEKNNVPVKIDYEDKIMTFKDCLSSLDDSDISAADKNILLKSCIDKIIYYNDMPSKPGIGRYIENSFRLEIFLKL

SEQ ID NO: 4046 - protein, 523 aa, Unknown
  Description of Unknown: Integrase B4047 sequence
  cd03768,PTHR30461:SF3,SM00857,IPR036162,PF13408, IPR025827,PS51737,G3DSA:3.40.50.1390,IPR006119,PF07508, IPR011109,SSF53041,PTHR30461,PS51736,Coil, PF00239
MRFFSYGRKSVFSDKSDSIDNQFRMNREYCESKFSGQVDSWQQFSDEDFTGANTSRPDLQRMLSFIKGGFCDVLVVYQLDRLSRDVRDFANIYALLEEHGVMFISIKENIDTTTPIGRAMMYVTVVFAQMERETIAARVTDNMLGLAKKGYWTGGNPPVGYVRKHIVVNGKKHCSIEVDPDGARYVTQIFDTFLAYNCSLQGMETRFKNQGIRTQSGKFFSTTQLHKMLTMPYCVEATPEVYDFYAAKGCIMDPGSPREMWDGSVGVIIYGRSTEKNKKHQAQPPEKWTVCLGKHKPFMPAEKWLAVQSRFTQNKCIKDAKWPVPLLKGVLRCKCGNLMQVSRKKKVDGTCSSWYYCRKRMRQGVDACDMGQIKCDLLDEEVLELFRGITADPALIQKFVKAEAPADVPDLKAAQARVSACERKIGRLAASLALAEDSAASKYIIAEMERLDVELGALKREASLAEMESHRAAASAKDAKATAAEIAKLIHGLDGFDDKEKNAIARAVIQECTWDGERLFIKL

SEQ ID NO: 4047 - protein, 523 aa, Unknown
  Description of Unknown: Integrase B4048 sequence
  PTHR30461:SF3,SM00857,G3DSA:1.10.10.2600,IPR036162,PS51737, G3DSA:3.40.50.1390,IPR006119,IPR038109,PF07508,IPR011109, SSF53041,PF00239,PTHR30461,PS51736,Coil, cd00338
MVSFDSIIIYLRKSRSDDPAQTVEEVLAKHERILQDYCMKEYGKAIPEKRIYREVVSGETIQDRPVMQQLLKELEAENISGVLIVEPQRLSRGDLQDCGQIINSFRYTNTAVITPGKTYDLSDEYDRKFFEMELTRGNDYLEYTKKILSRGRVASVRQGNYICSVRPYGYKKITLGSGKDKCHTLEIIPEEADAIRLMYHLYLDENMGFTNIARTLDSLHIKPLKSDNWSAATIRDMIDNPIYIGKVVWNSRKVVKKWENEQITKVRPRNKGDDVICVNGRHEAIIDEHTFEAARNKRGLTPKVKKFKELRNPLAGLLFCGTCGHGMSMKKYVDKRSHTGKVTTVMLCNQQAVCHTKSAQYEDILAKIKVSLANAISDFKIKLKEQENNNIDMHELRIASLEEELNRLYNKDVRQKDAYEDGIYTKEEYIERNSKLQERILNVKEEIADEKNNVPVKIDYEDKIMTFKDCLSSLDDSDISAADKNILLKSCIDKIIYYNDMPSKPGIGRYIENSFRLEIFLKL

SEQ ID NO: 4048 - protein, 523 aa, Unknown
  Description of Unknown: Integrase B4049 sequence
  PTHR30461:SF3,SM00857,G3DSA:1.10.10.2600,IPR036162,PS51737, G3DSA:3.40.50.1390,IPR006119,IPR038109,PF07508,IPR011109, SSF53041,PF00239,PTHR30461,PS51736,Coil, cd00338
MVSFDSIIIYLRKSRSDDPAQTVEEVLAKHERILQDYCMKEYGKAIPEKRIYREVVSGETIQDRPIMQQLLKELETGNISGVLIVEPQRLSRGDLQDCGQIINSFRYTNTAVITPGKTYDLSDEYDRKFFEMELTRGNDYLEYTKKILSRGRVASVRQGNYICSVRPYGYRKITLGSGKDKCHTLEIIPEEADAIRLMYHLYLDENMGFTNIARTLDSLHIKPLKSDNWSAATIRDMIDNPIYIGKVVWNSRKVVKKWENEQITKVRPRNKGDDVICVNGRHEAIIDEHTFEAARNKRGLTPKIKKFKELRNPLAGLLFCGTCGHGMSMKKYVDKRSHTGKVTTVMLCNQQAVCHTKSAQYEDILAKIKVSLANAISDFKIKLKEQENNNIDMHELRIASLEEELNRLYNKDVRQKDAYEDGIYTKEEYIERNSKLQERILNVKEEIADEKNNVPVKIDYEDKIMTFKDCLSSLDDSDISAADKNILLKSCIDKIIYYNDMPSKPGIGRYIENSFRLEIFLKL

SEQ ID NO: 4049 - protein, 523 aa, Unknown
  Description of Unknown: Integrase B4050 sequence
  PTHR30461:SF3,SM00857,G3DSA:1.10.10.2600,IPR036162,PF13408, PS51737,IPR025827,G3DSA:3.40.50.1390,IPR006119,IPR038109, PF07508,IPR011109,SSF53041,PTHR30461,Coil, PS51736,cd00338,PF00239
MNTARTVTVIPATLNLFTSTPKMSQNKRKVAAYARVSTDNEEQLSSYAAQVDYYTRYIKSKTEWDFVDIYTDEGITATNTKKRDGFKRMVKDALDGKIDLIVTKSVSRFARNTVDTLTTVRKLKEKGIEVYFEKENIYTLDSKGELLITIMSSLAQEESRSISENTTWGQRKRFADGKVSLPYKKFLGYERGEDGIPQIVEKEAKIVRLIYRLFLEGRTTTGIATHLTRLKVPTPAGKEKWTTSTIKSILTNEKYKGDALLQKSYTVDFLTKKKKKNEGEVPQYYVENSHEAIISPEVFDMVQYEFEKRKGRVQSGANCFSSKIVCGDCGRFYGSKIWHSNDKYRKIIWRCNAKFKNKEKCKTPHVTEQQIKEAFVKTVNSMIENKEQVIKDCKELILELTDTTLIEEKEIKLQGERSILYNSMKELIERNSRSKIDQIKYNERYEELRGRYDKVTEQLSKIEDLKFEMKAKEHKINEFIRNLKQSTEIITGFDEKLWYTLIGKVIINRDGNIKFEFKNGKII

SEQ ID NO: 4050 - protein, 523 aa, Unknown
  Description of Unknown: Integrase B4051 sequence
  cd03768,PTHR30461:SF3,SM00857,IPR036162,PF13408, IPR025827,PS51737,G3DSA:3.40.50.1390,IPR006119,PF07508, IPR011109,SSF53041,PTHR30461,PS51736,Coil, PF00239
MRFFSYGRKSVFSDKSDSIDNQFRMNREYCESKFSGQVDSWQQFSDEDFTGANTSRPDLQRMLSFIKGGFCDVLVVYQLDRLSRDVRDFANIYALLEEHGVMFISIKENIDTTTPIGRAMMYVTVVFAQMERETIAARVTDNMLGLAKKGYWTGGNPPVGYVRKHIVVNGKKHCSIEVDPDGARYVTQIFDTFLAYNCSLQGMETRFKNQGIRTQNGKFFSTAQLHKMLTMPYCVEATPEVYDFYAAKGCIMDPGSPREMWDGSAGVIIYGRSTEKNKKHQLQPPEKWTVCLGKHKPFMPAEKWLAVQSRFTQNKCIKDAKWPVPLLKGVLRCKCGNLMQVSRKKKVDGTCSSWYYCRKRMRQGVDACDMGQIKCDLLDEEVLELFRGITADPALIQKFVKAEAPADVPDLKAAQARVSACERKIGRLAASLALAEDSAASKYIIAEMERLDVELGALKREASLAEMESHQAAASAKDAKATAAEIAKLIHGLDGFDDKEKNAIARAVIQECTWDGERLFIKL

SEQ ID NO: 4051 - protein, 523 aa, Unknown
  Description of Unknown: Integrase B4052 sequence
  PTHR30461:SF3,SM00857,G3DSA:1.10.10.2600,IPR036162,PF13408, IPR025827,G3DSA:3.40.50.1390,PS51737,IPR006119,IPR038109, PF07508,SSF53041,IPR011109,PTHR30461,cd00338, PF00239
MPTSKNMARKYAAGGGSDNSCDVEPLRAVIYARYSSSGQREESIEGQLRDCYDFAKKHGIIVIGEYIDKAMTGRVDRRPDFQRMMKDSEKGRFNCVLLWKMDRFARNRYDSAMYKYKLKKNGIRIFYAKETIPDGPEGIILESVMEGYAEYYSENLAQNVKRGNYDSALELKTLGKTCLGLKTGPDGRYMVDQAEAAIVRRIFEEYAEGERAKDIYERLNSEGYRTSRGGKFNKNSLRRILSNKKYIGVYEYEDIYVENGIPAIITDRDLFERVQKMLKINHDAPARGKAQNFLLTTKLFCGLCGSPMIGDGGTSHTGKAYAYYSCTKRKRGRSCKKESVPKDWIEDLVVGELVKIVHNDELIEQIADRVMEYQKREKDQSGLHALEIRQKENEKAISNMLAAIEAGIITPSTKTRLMELEADRADIEKGIAHELLAEPEFERDQIIYFLERFRSGDINDEAYRIMLVDTFLNSVYLYDDDHLVLVMNYSGENCKVDLKLVEGAVSGDGCKGSAFAPSSALTF

SEQ ID NO: 4052 - protein, 523 aa, Unknown
  Description of Unknown: Integrase B4053 sequence
  SM00857,G3DSA:1.10.10.2600,IPR036162,PF13408,IPR025827, G3DSA:3.40.50.1390,PS51737,IPR006119,IPR038109,PF07508, IPR011109,SSF53041,PF00239,PTHR30461,PS51736, Coil,cd00338
MNENVCIYLRKSRADQEAELRGEGETLARHERILLDLAKSRNYSVGAIYREIVSGETISARPVMQQLLREVEAGSWDGVLVVEVERLARGDTIDQGVVSRAFQFSDTKIITPTKTYDPDNEFDEEYFEFGLFMSRREYKTIKRRLNAGRIASVKEGKYCGSKPPYGYERVKLHGEKGFTLQPVPDQAEVIKMIYSLYSGSSGDRIGVSKIVRKLNDMGIKSPSGKDWVPISVQDVLANPVYAGMIRWNGRKTVRAIQDGVVTQSRPRSKEDDILLFPGRHPAIVSKEMYDSVQQIRKKNPPRPISIKNTIKNPLAGIVYCSKCGRAMVRRPYQKRGQDDTLMCSYTSCPTVSSKLSLVERAVLNGIQDLVDEYRLNDAVPGPDINNAVKSKKKLIAEKEHELEKLNVQKMKQYDLLEQGIYTTEVFLERSNSIASSINSCQDSIECLKEEIRHDKELIDQRSSFIPRCENLLEIYWSLDTAAKNKMLKELIERVNYTKDVKNAFRMGNEATFVLDIFPRIQSN

SEQ ID NO: 4053 - protein, 523 aa, Unknown
  Description of Unknown: Integrase B4054 sequence
  cd03768,PTHR30461:SF3,SM00857,IPR036162,PF13408, IPR025827,PS51737,G3DSA:3.40.50.1390,IPR006119,PF07508, IPR011109,SSF53041,PTHR30461,PS51736,Coil, PF00239
MRFFSYGRKSVFSDKSDSIDNQFRMNREYCESKFSGQVDSWQQFSDEDFTGANTSRPDLQRMLSFIKGGFCDVLVVYQLDRLSRDVRDFANIYALLEEHGVMFISIKENIDTTTPIGRAMMYVTVVFAQMERETIAARVTDNMLGLAKKGYWTGGNPPVGYVRKHIVVDGKKHCSIEVDPDGARYVTQIFDTFLAYNCSLQGMETRFKNQGIRTQSGKFFSTTQLHKMLTMPYCVEATPEVYDFYAAKGCIMDPGSPREMWDGSVGVIIYGRSTEKNKKHQAQPPEKWTVCLGKHKPFMPAEKWLAVQSRFTQNKCIKDAKWPVPLLKGVLRCKCGNLMQVSRKKKVDGTCSSWYYCRKRMRQGVDACDMGQIKCDLLDEKVLELFRGITADPGLIQKFVKTKAPDDIPNLKAAQARVAACERKIGRLAASLALAEDSTASKYIIAEMERLDVELGALKREASLAEMENHRATANAKDAKATAVEIAKLIHGLEGFDDKERNTIARAVIQECTWDGERLFITL

SEQ ID NO: 4054 - protein, 523 aa, Unknown
  Description of Unknown: Integrase B4055 sequence
  PTHR30461:SF3,SM00857,G3DSA:1.10.10.2600,IPR036162,PF13408, IPR025827,G3DSA:3.40.50.1390,PS51737,IPR006119,IPR038109, PF07508,SSF53041,IPR011109,PF00239,PTHR30461, PS51736,Coil,cd00338
MDGLNLANVVIYARYSSVGQNDQSIDGQLTKCREYAQQHGFRVVAEYCDRALSGRYAETRPEFQRMIADSAKHAFEYVLVWKLDRFSRDRYDSAIYKKKLRANGVRVLSVTEGISENSESLLLEAILEAMAEEYSRQLAQNVRRGMRQNAEKGLSLGGLAPLGYDVINKRYEINEGEAQIVRYIHERYAAGTGQAQIVAECRERGYCCKRGNEFTVNAVNRILKNEKYAGTYICDDLILEDAVPAIVPKELKKKVRNRLAANAKAPGHAKAKVEYLLHGKLFCGECGAPMIGECGRGKNGTTHHYYTCATRKKSHSCKKRNEQKDALERFIVNYICMYVLTDEWINAAAERVVAEYRKSYDASGIKPLEKQIRDLDKELDKLVDTLINTASSAAIKRINERIDAAELKKSTLEADLASLRIASRVEIKKEDIAAWLNQFRNGNVDDIDYCKKVIESFVNAIYVYDDKIKMFFNSRESAQTTYPQMLAFDMPESSDLEASGVPSIDLSELFCFINGVIGIVVRR

SEQ ID NO: 4055 - protein, 523 aa, Unknown
  Description of Unknown: Integrase B4056 sequence
  SM00857,G3DSA:1.10.10.2600,IPR036162,PF13408,IPR025827, G3DSA:3.40.50.1390,PS51737,IPR006119,IPR038109,PF07508, SSF53041,IPR011109,PTHR30461,PS51736,cd00338, PF00239
MNESVCIYLRKSRADREAEAHGEGETLARHERILLELAKKKEYIVGAIYREVVSGETIADRPVMQQLLHEVESGMWDGVLVVEVERLARGDTIDQGVVSRAFQYSDTKIITPTKIYDPNNEFDEEYFEFGLFMSRREYKTIKRRLNNGRISSVKEGKYCGNKPPYGYERVKLEKEKGYTLRPVPAQAEIVKMIYTWYAGDGCEQIGVAKIVRKLNDMGIESALGGDWTPASIQGILTNPVYIGKIRWNGRKTVKTIQNGQVVKTRPRSKDVLICEGLHPAIISDDLYNSVQEIRKKNPPRPISIKNTVRNPLAGIVYCSKCGRAMVRRPHQKRGQEDTLMCPYTSCSTVSSKLSLVEKAVIDGIKELTEKYKLNNDINVPSNTINSGIVYKQNLIREKESELESLNVQKAKQYDLLEQGIYTTEVFLERSKTIAISIQSCSDTITKLREEIEHDENIKAQQSNFIPRCEELLNNYWDLNMESRNRMLKNLVEKVVYSKNMKNTYGKGNEINFELDIFPKIQEK

SEQ ID NO: 4056 - protein, 523 aa, Unknown
  Description of Unknown: Integrase B4057 sequence
  SM00857,G3DSA:1.10.10.2600,IPR036162,PF13408,IPR025827, G3DSA:3.40.50.1390,PS51737,IPR006119,IPR038109,PF07508, IPR011109,SSF53041,PF00239,PTHR30461,PS51736, Coil,cd00338
MNENVCIYLRKSRADQEAELRGEGETLARHERILLDLAKSRNYSVGAIYREIVSGETISARPVMQQLLREVEAGSWDGVLVVEVERLARGDTIDQGVVSRAFQFSDTKIITPTKTYDPDNEFDEEYFEFGLFMSRREYKTIKRRLNAGRIASVKEGKYCGSKPPYGYERVKLHGEKGFTLQPVPEQAEVIKMIYSLYSGASGDRIGVSKIVRKLNDMGIKSPSGKDWVPISVQDVLANPVYAGMIRWNGRKTVKAIQDGVVTQSRPRSKEDDILLFPGRHPAIVSKEMYDSVQQIRKKNPPRPISIKNTIKNPLAGIVYCSKCGRAMVRRPYQKRGQDDTLMCSYTSCPTVSSKLSLVERAVLNGIQDLVDEYRLNDAVPGPDINNAVKSKKKLIAEKEHELEKLNVQKMKQYDLLEQGIYTTEVFLERSNSIASSINSCQDSIECLKEEIRHDKELIDQQSSFIPRCENLLEIYWSLDTAAKNKMLKELIERVNYTKDVKNAFRMGNEATFVLDIFPRIQSN

SEQ ID NO: 4057 - protein, 523 aa, Unknown
  Description of Unknown: Integrase B4058 sequence
  cd03768,PTHR30461:SF3,SM00857,IPR036162,PF13408, PS51737,G3DSA:3.40.50.1390,IPR025827,IPR006119,PF07508, IPR011109,SSF53041,PTHR30461,PS51736,Coil, PF00239
MRFFSYGRKSVFSDKSDSIDNQFRMNREYCESKFSGQVDSWQQFSDEDFTGANTSRPDLQRMLSFIKGGFCDVLVVYQLDRLSRDVRDFANIYALLEEHGVMFISIKENIDTTTPIGRAMMYVTVVFAQMERETIAARVTDNMLGLAKKGYWTGGNPPVGYVRKHIVVNGKKHCSIEVDPDGARYVTQIFDTFLAYNCSLQGMETRFKNQGIRTQSGKFFSTTQLHKMLTMPYCVEATPEVYDFYAAKGCIMDPGSPREMWDGSVGVIIYGRSTEKNKKHQAQPPEKWTVCLGKHKPFMPAEKWLAVQSRFTQNKCIKDAKWPVPLLKGVLRCKCGNLMQVSRKKKVDGTCSSWYYCRKRMRQGVDACDMGQIKCDLLDEKVLELFRGITADPALIQKFVKSEAPADVPDLKAAQARVSACERKIGRLAASLALAEDSAASKYIIAEMERLDVELGALKREASLAEMESHRAAASAKDAKATAAEIAKLIHGLEGFDDKEKNAIARAVIQECTWDGERLFITL

SEQ ID NO: 4058 - protein, 523 aa, Unknown
  Description of Unknown: Integrase B4059 sequence
  PTHR30461:SF3,SM00857,G3DSA:1.10.10.2600,IPR036162,PS51737, G3DSA:3.40.50.1390,IPR006119,IPR038109,PF07508,IPR011109, SSF53041,PTHR30461,Coil,PS51736,cd00338, PF00239
MPNTKSFTVNEVLVYLRKSRSDSPDMSVEEVLRKHEEMIQQYASTHFHSPIPEKNIFREVVSGETIDSRPQMKNLLKMIESEQFKAVLVVEPQRLSRGDLEDCGRLINILRYTNTTVLTLTHSFNLQEEYERKFFEMEITRGNDYLEYTKRILKRGREASVAKGNYIGSVDPYGYKKTVIKKDGITCHTLEIIPEEADTVKLIHELYAYTPEGIGFTNIAHKLDAMHIKPKKAAHWTPAIISSILCNPLYLGMVRWNNRKVVKYINEGQLAKARPQNTEAKYYKGLHEPIITQKLYDACMARRGTNPSLRRNKELCNPFAGLLYCGTCGHAMSLKIYKNHNSVSQMMLCNHQAYCHTKSVLYSAFLRRFISSMEDTLNDFELAQKSDDGRTQAISKTIVINLENKLKKLNEKDARQKDAYEDGIYSKEEFLKRNVRTQQDIASTIIALEDARAKKADIIDYEEKIRRFKDCLHALNDPELSAAEKNRFLKSCVDKILYYNNMESKAGIGRYIENVFSLEIQYK

SEQ ID NO: 4059 - protein, 523 aa, Unknown
  Description of Unknown: Integrase B4060 sequence
  PTHR30461:SF3,SM00857,G3DSA:1.10.10.2600,IPR036162,PS51737, G3DSA:3.40.50.1390,IPR006119,IPR038109,PF07508,IPR011109, SSF53041,PF00239,PTHR30461,PS51736,Coil, cd00338
MVSFDSIIIYLRKSRSDDPAQTVEEVLAKHERILQDYCIKEYGKAIPEKRIYREVVSGETIQDRPVMQQLLKELEAENISGVLIVEPQRLSRGDLQDCGQIINSFRYTNTAVITPGKTYDLSDEYDRKFFEMELTRGNDYLEYTKKILSRGRVASVRQGNYICSVRPYGYRKITLGSGKDKCHTLEIIPEEADVIRLMYHLYIDENMGFTNIARTLDSLHIKPLKSDNWSAATIRDMIDNPIYIGKVVWNSRKVVKKWENEQITKVRPRNKGDDVICVNGRHEAIIDEHTFEAARNKRGLTPKVKKFKELRNPLAGLLFCGTCGHGMSMKKYVDKRSHTGKVTTVMLCNQQAVCHTKSAQYEDILAKIKVSLANAISDFKIKLKEQENNNIDMHELRIASLEEELNRLYNKDVRQKDAYEDGIYTKEEYIERNSKLQESILNVKEEIADEKNNVPVKIDYEDKIMTFKDCLSSLDDSDISAADKNILLKSCIDKIIYYNDMPSKPGIGRYIENSFRLEIFLKL

SEQ ID NO: 4060 - protein, 523 aa, Unknown
  Description of Unknown: Integrase B4061 sequence
  PTHR30461:SF3,SM00857,G3DSA:1.10.10.2600,IPR036162,PS51737, G3DSA:3.40.50.1390,IPR006119,IPR038109,PF07508,IPR011109, SSF53041,PF00239,PTHR30461,PS51736,Coil, cd00338
MVSFDSIIIYLRKSRSDDPAQTVEEVLAKHERILQDYCIKEYGKAIPEKRIYREVVSGETIQDRPVMQQLLKELEAENISGVLIIEPQRLSRGDLQDCGQIINSFRYTNTAVITPGKTYDLSDEYDRKFFEMELTRGNDYLEYTKKILSRGRVASVRQGNYICSVRPYGYRKITLGSGKDKCHTLEIIPEEADVIRLMYHLYIDENMGFTNIARTLDSLHIKPLKSDNWSAATIRDMIDNPIYIGKVVWNSRKVVKKWENEQITKVRPRNKGDDVICVNGRHEAIIDEHTFEAARNKRGLTPKVKKFKELRNPLAGLLFCGTCGHGMSMKKYVDKRSHTGKVTTVMLCNQQAVCHTKSAQYEDILAKIKVSLANAISDFKIKLKEQENNNIDMHELRIASLEEELNRLYNKDVRQKDAYEDGIYTKEEYIERNSKLQESILNVKEEIADEKNNVPVKIDYEDKIMTFKDCLSSLDDSDISAADKNILLKSCIDKIIYYNDMPSKPGIGRYIENSFRLEIFLKL

SEQ ID NO: 4061 - protein, 523 aa, Unknown
  Description of Unknown: Integrase B4062 sequence
  PTHR30461:SF3,SM00857,G3DSA:1.10.10.2600,IPR036162,PS51737, G3DSA:3.40.50.1390,IPR006119,IPR038109,PF07508,IPR011109, SSF53041,PTHR30461,Coil,PS51736,cd00338, PF00239
MPNIESFTVNEVLVYLRKSRSDSPDMSVEEVLRKHEEMIQQYASTHFQSPIPEKNIFREVVSGETIDSRPQMKNLLKMIESEQFKAVLVVEPQRLSRGDLEDCGRLINILRYTNTTVLTLTHSFNLQEEYERKFFEMEITRGNDYLEYTKRILKRGREASVAKGNYIGSVDPYGYKKTVIKKDGITCHTLEIIPEEADTVKLIHELYAYTPGGIGFTNIAHKLDAMHIKPKKAAHWTPAIISSILCNPLYLGMVRWNNRKVVKYINEGQLAKARPQNSESKYYKGLHEPIITQELYDACMARRGTNPSLRRNKELCNPFAGLLYCGTCGHAMSLKIYKNHNSVSQMMLCNHQAYCHTKSVLYSAFLRRFMSSMEDTLNDFELAQKSDDGRAQAISKTIVVNLENKLKKLNEKDARQKDAYEDGIYSKEEFLKRNVRTQQDIASTIIALEDARAKKADIIDYEEKIRRFKDCLHALNDPELSAAEKNRFLKSCVDKILYYNNMESKAGIGRYIENVFSLEIQYK

SEQ ID NO: 4062 - protein, 523 aa, Unknown
  Description of Unknown: Integrase B4063 sequence
  cd03768,PTHR30461:SF3,SM00857,IPR036162,PF13408, PS51737,G3DSA:3.40.50.1390,IPR025827,IPR006119,PF07508, IPR011109,SSF53041,PTHR30461,PS51736,Coil, PF00239
MRFFSYGRKSVFSDKSDSIDNQFRMNREYCESKFSGQVDSWQQFSDEDFTGANTSRPDLQRMLSFIKGGFCDVLVVYQLDRLSRDVRDFANIYALLEEHGVMFISIKENIDTTTPIGRAMMYVTVVFAQMERETIAARVTDNMLGLAKKGYWTGGNPPVGYVRKHIVVNGKKHCSIEVDPDGARYVTQIFDTFLAYNCSLQGMETRFKNQGIRTQSGKFFSTTQLHKMLTMPYCVEATPEVYDFYAAKGCIMDPGSPREMWDGSVGVIIYGRSTEKNKKHQAQPPEKWTVCLGKHKPFMPAEKWLAVQSRFTQNKCIKDAKWPVPLLKGVLRCKCGNLMQVSRKKKVDGTCSSWYYCRKRMRQGVDACDMGQIKCDLLDEKVLELFRGITADPALIQKFVKAEAPADVPDLKAAQARVSACERKIGRLAASLALAEDSAASKYIIVEMERLDVELGALKREASLAEMEGHRAAASAKDAKATAAEIAKLIHGLEGFDDKEKNAIARAVIQECTWDGERLFIKL

SEQ ID NO: 4063 - protein, 523 aa, Unknown
  Description of Unknown: Integrase B4064 sequence
  PTHR30461:SF3,SM00857,IPR036162,PF13408,IPR025827, G3DSA:3.40.50.1390,IPR006119,PF07508,SSF53041,IPR011109, PF00239,PTHR30461,PS51736,Coil,cd00338
MFFGIYGRKSVYSDKSDSVDNQHRMCNDYIKAHFKADDITLVTSYSDEDYTGANTKRPDLQRLLEDVKSGAINVLVVYQLDRISRDVRDFSNIYAMLEEYHVMFISIKENIDTTTPIGRAMMYVTVVFAQMERETIATRVRDNMIGLAKKGFWTGGNPPYGYVRKNILINGKKHVTIEPDPDGVAYNIWIYDSFLKNHCSLQSMETNFRKEGIKTRNGAFFSTTQLYKILTMPYCVEATPEIYDYFAAKGCQMDPDSPREKWDGSVGVMIYGRSTGVNKKHQLQPPEKWLVCLGLHKPFMPAAKWLAVQNQFSENKFDKTQKYDIPLLKGILRCSCGSIMAVSRKKKINGEVSSWYYCLRRMKNGVEACDRKQIKVDIIDQKLLNTLHSIEIDPSMIYRFVQKSELPLPDIKTINNKISSIESRIGRLASSLALADGSAASKYIVAEIERLDSDLQFLKRERAVINVEIKKRDELNESAEGKAQHIQNVMKGLNGFTAEEKNRIMRDILKECVWDGSELSIVL

SEQ ID NO: 4064 - protein, 523 aa, Unknown
  Description of Unknown: Integrase B4065 sequence
  PTHR30461:SF3,cd00338,SM00857,G3DSA:1.10.10.2600,IPR036162, PF13408,PS51737,IPR025827,G3DSA:3.40.50.1390,IPR006119, IPR038109,PF07508,IPR011109,SSF53041, PTHR30461,PS51736,Coil,PF00239
MDGLNLANVVIYARYSSVGQNDQSIDGQLTKCREYAQQHGFRVVSEYCDRALSGRYAETRPEFQRMIADSAKHAFEYVLVWKLDRFSRDRYDSAIYKKKLRANGVRVLSVTEGISENSESLLLEAILEAMAEEYSRQLAQNVRRGMRQSAEKGLSLGGIAPLGYDVINKRYEINEGEAQIVRYIHERYAAGTGQAQIVAECRERGYCCKRGNEFTVNAVNRILKNEKYAGTYICGDLILEDAVPAIVPKELKKKVRNRLAANAKAPGHAKAKVEYLLHGKLFCGECGAPMIGECGRGKNGTTHHYYTCATRKKSHSCKKRNEQKDALERFIVNYICMYVLTDEWINTAAERVVAEYRKSYDASGIKPLEKQIRDLDKELDKLVDTLINTASSAAIKRINERIDAAELKKSTLEADLASLRIASRVEIKKEDIAAWLHQFQNGNVDDIDYCKKVIESFVNAIYVYDDKIKMFFNSCESAQITYPQVLAFDMPESSDLEASGVPSIDLSELFYFINGVIGIVVRR

SEQ ID NO: 4065 - protein, 523 aa, Unknown
  Description of Unknown: Integrase B4066 sequence
  PTHR30461:SF3,cd00338,SM00857,G3DSA:1.10.10.2600,IPR036162, PF13408,PS51737,IPR025827,G3DSA:3.40.50.1390,IPR006119, IPR038109,PF07508,IPR011109,SSF53041,PTHR30461, PS51736,Coil,PF00239
MNENVTLIPARKRPGNRISKAVEKPKLKVAAYCRVSTDSDEQAGSYEVQVQHYTDYIGRNKEWEFAGIYADDGISGTNTKKREGFNGMIEDCMAGKIDMVITKSISRFARNTIDCLKYVRQLKEKNIAIIFEKENINTLEASGELLLTIMASLAQQESASLSQNVKLGLQFRYQDGKVQINHNHFLGYTKDENGNLIIEEEEAKVVRRIFREYLEGASFRDIAKGLERDKIKTGGKRYKWHLSTIQGILQNEKYMGDALLQKTITTDFIEKTRIKNDGSVPQYYVKDSQEAIIPRDIFTQVQEEMVRRANLFSGVENKKKRVYSSKYALSSICTCSKCGDIYRRIAWNNRGKHSIVWRCCTRVENGPSACDAPTVQETELQQATVQAINQLVKSSSTTLDVLMKNIEIALADDNAGELEKINALLSEKQKQLVKLAHAKKDYSSLADEIDLLRDKKQELLVAKAENEGFKKRIKELEEFLKEADQELTEYDESMVRRYIDKIVVYEDKFTVCFKAGVDLDIER

SEQ ID NO: 4066 - protein, 523 aa, Unknown
  Description of Unknown: Integrase B4067 sequence
  cd03768,PTHR30461:SF3,SM00857,IPR036162,PF13408, PS51737,G3DSA:3.40.50.1390,IPR025827,IPR006119,PF07508, IPR011109,SSF53041,PTHR30461,PS51736,Coil, PF00239
MRFFSYGRKSVFSDKSDSIDNQFRMNREYCESKFSGQVDSWQQFSDEDFTGANTSRPDLQRMLSFIKGGFCDVLVVYQLDRLSRDVRDFANIYALLEEHGVMFISIKENIDTTTPIGRAMMYVTVVFAQMERETIAARVTDNMLGLAKKGYWTGGNPPVGYVRKHIVVNGKKHCSIEVDPDGARYVTQIFDTFLAYNCSLQGMETRFKNQGIRTQSGKFFSTTQLHKMLTMPYCVEATPEVYDFYAAKGCIMDPGSPREMWDGSVGVIIYGRSTEKNKKHQAQPPEKWTVCLGKHKPFMPAEKWLAVQSRFTQNKCIKDAKWPVPLLKGVLRCKCGNLMQVSRKKKVDGTCSSWYYCRKRMRQGVDACDMGQIKCNLLDEKVLELFRGITADPALIQKFVKAEAPTDVPDLKAAQARVSACERKIGRLAASLALAEDSAASKYIIAEMERLDVELGALKREASLAEMESHRAAASAKDAKATAAEIAKLIHGLDGFDDKEKNAIARAVIQECIWDGERLFITL

SEQ ID NO: 4067 - protein, 523 aa, Unknown
  Description of Unknown: Integrase B4068 sequence
  cd03768,PTHR30461:SF3,SM00857,IPR036162,PF13408, IPR025827,PS51737,G3DSA:3.40.50.1390,IPR006119,PF07508, IPR011109,SSF53041,PTHR30461,PS51736,Coil, PF00239
MRFFSYGRKSVFSDKSDSIDNQFRMNREYCESKFSSQVDSWQQFSDEDFTGANTSRPDLQRMLSFIKNGFCDVLVVYQLDRLSRDVRDFANIYALLEEHGVMFISIRENIDTTTPIGRAMMYVTVVFAQMERETIAARVTDNMLGLAKKGYWTGGNPPVGYVRKHIVVNGKKHCSIEVDPDGARYVTQIFDTFLAYNCSLQGMETRFKNQGIRTRAGKFFSTTQLHKMLTMPYCVEATPEVYDFYAAKGCIMDPGSPREMWDGSVGVIIYGRSTEKNKKHQVQPPEKWTVCLGKHKPFMPAEKWLAVQSRFTQNKCIKDAKWPVPLLKGVLRCKCGNLMQISRKKKGDGTCSSWYYCRKRMRQGVDACDMSQIKCDLLDEKVLELFRGIAADPGLIQKFVKTKAPTDIPDLKAAQARLATCERKIGRLAASLALAEDSAASKYIIAEMERLDVELGALKREASLAEMESHRAAASAKDAKATAAEIAKLIHGLDGFDDKEKNAIARAVIQECTWDGERLFITL

SEQ ID NO: 4068 - protein, 523 aa, Unknown
  Description of Unknown: Integrase B4069 sequence
  SM00857,G3DSA:1.10.10.2600,IPR036162,PF13408,IPR025827, G3DSA:3.40.50.1390,PS51737,IPR006119,IPR038109,PF07508, SSF53041,IPR011109,PTHR30461,PS51736,cd00338, PF00239
MNESVCIYLRKSRADREAEAHGEGETLARHERILLELAKKKEYIVGAIYREVVSGETIADRPVMQQLLHEVESGMWDGVLVVEVERLARGDTIDQGVVSRAFQYSDTKIITPTKIYDPNNEFDEEYFEFGLFMSRREYKTIKRRLNNGRISSVKEGKYCGNKPPYGYERVKLEKEKGYTLRPVPAQAEIVKMIYTWYVGDGCEQIGVAKIVRKLNDMGIESALGGDWTPASIQGILTNPVYIGKIRWNGRKTVKTIQNGQVVKTRPRSKDVLICEGLHPAIISDDLYNSVQEIRKKNPPRPISIKNTVRNPLAGIVYCSKCGRAMVRRPHQKRGQEDTLMCPYTSCSTVSSKLSLVEKAVIDGIKELTEKYKLNNDINVPSNTINSGIVYKQNLIREKESELESLNVQKAKQYDLLEQGIYTTEVFLERSKTIAISIQSCSDTITKLREEIEHDENIKAQQSNFIPRCEELLNNYWDLNMESRNRMLKNLVEKVVYSKNMKNTYGKGNEINFELDIFPKIQEK

SEQ ID NO: 4069 - protein, 523 aa, Unknown
  Description of Unknown: Integrase B4070 sequence
  SM00857,G3DSA:1.10.10.2600,IPR036162,PF13408,IPR025827, G3DSA:3.40.50.1390,PS51737,IPR006119,IPR038109,PF07508, SSF53041,IPR011109,PF00239,PTHR30461,PS51736, Coil,cd00338
MNESVCIYLRKSRADREAEAHGEGETLARHQRILLDLAKKKEYIVGAIYREVVSGETIADRPVMQQLLREVESGMWDGVLVVEVERLARGDTIDQGVVSRAFQYSDTKIITPTKIYDPNNEFDEEYFEFGLFMSRREYKTIKRRLNNGRISSVKEGKYCGNKPPYGYERVKLEKEKGYTLRPIPAQAEVVKMIYTWYAGDGCEQIGVAKIVRKLNDMGIESALGGDWTPASIQGILTNPVYIGKIRWNGRKTVKTIQNGQVVKTRPRSMDVLICEGLHPAIISDDLYNSVQEIRQKNPYRPISIKNTVRNPLAGIVYCNKCGRAMVRRPYQKRGQEDTLMCPYTSCSTVSSKLSLVEKAVIDGIREIAEKYKLNNDINVPSNTIDSGITSKQNLIREKESELESLNAQKAKQYDLLEQGIYTTEVFLERSKTISASIQSCSDTIANLREEIEHDENIKAQQSDFVPRCEELLNNYWSLDTESRNRMLKNLVEKVVYSKNIKNTYGKGNEINFELDIFPRIQKK

SEQ ID NO: 4070 - protein, 523 aa, Unknown
  Description of Unknown: Integrase B4071 sequence
  cd03768,PTHR30461:SF3,SM00857,IPR036162,PF13408, PS51737,IPR025827,G3DSA:3.40.50.1390,IPR006119,PF07508, IPR011109,SSF53041,PTHR30461,PS51736,Coil, PF00239
MRFFSYGRKSVFSDKSDSIDNQFRMNREYCESKFSGQVDSWQQFSDEDFTGANTSRPDLQRMLSFIKGGFCDVLVVYQLDRLSRDVRDFANIYALLEEHGVMFISIKENIDTTTPIGRAMMYVTVVFAQMERETIASRVTDNMLGLAKKGYWTGGNPPVGYVRKHIVVNGKKHCSIEVDPDGARYVTQIFDTFLAYNCSLQGMETRFKNQGIRTQSGKFFSTTQLHKMLTMPYCVEATPEVYDFYAAKGCIMDPGSPREMWDGSVGVIIYGRSTEKNKKHQAQPPEKWTVCLGKHKPFMPAEKWLAVQSRFTQNKCIKDAKWPVPLLKGVLRCKCGNLMQVSRKKKVDGTCSSWYYCRKRMRQGVDACDMGQIKCDLLDEKVLELFRGITADPALIQKFVKAEAPADVPDLKAAQARVSACERKIGRLAASLALAEDSAASKYIIAEMERLDVELGALKREASLAEMESHRAAASAKDAKATAVEIAKLIHGLEGFDDKEKNAIARAVIQECTWDGERLFITL

SEQ ID NO: 4071 - protein, 523 aa, Unknown
  Description of Unknown: Integrase B4072 sequence
  cd03768,PTHR30461:SF3,SM00857,IPR036162,PF13408, PS51737,G3DSA:3.40.50.1390,IPR025827,IPR006119,PF07508, IPR011109,SSF53041,PTHR30461,PS51736,Coil, PF00239
MRFFSYGRKSVFSDKSDSIDNQFRMNREYCESKFSGQVDSWQQFSDEDFTGANTSRPDLQRMLSFIKGGFCDVLVVYQLDRLSRDVRDFANIYALLEEHGVMFISIKENIDTTTPIGRAMMYVTVVFAQMERETIAARVTDNMLGLAKKGYWTGGNPPVGYVRKHIVVNGKKHCSIEVDPDGARYVTQIFDTFLAYNCSLQGMETRFKNQGIRTQNGKFFSTAQLHKMLTMPYCVEATPEVYDFYAAKGCIMDPGSPREMWDGSAGVIIYGRSTEKNKKHQLQPPEKWTVCLGKHKPFMPAEKWLAVQSRFTQNKCIKDAKWPVPLLKGVLRCKCGNLMQVSRKKKVDGTCSSWYYCRKRMRQGVDACDMGQIKCDLLDEKVLELFRGITADPALIQKFVKAEAPADVPDLKAAQARVSACERKIGRLAASLALAEDSAASKYIIAEMERLDVELGALKREASLAEMESHQAAASAKDAKTTAAEIAKLIHGLDGFDDKEKNAIARAVIQECTWDGERLFIKL

SEQ ID NO: 4072 - protein, 523 aa, Unknown
  Description of Unknown: Integrase B4073 sequence
  PTHR30461:SF3,SM00857,G3DSA:1.10.10.2600,IPR036162,PS51737, G3DSA:3.40.50.1390,IPR006119,IPR038109,PF07508,SSF53041, IPR011109,PTHR30461,Coil,PS51736,cd00338, PF00239
MPNTESFTVNEILVYLRKSRSDSPDMSVEEVLRKHEEMIQQYASTHFHSPIPEKNIFREVVSGETIDSRPQMKNLLKMIESEQFKAVLVVEPQRLSRGDLEDCGRLINILRYTNTTVLTLTHSFNLQEEYERKFFEMEITRGNDYLEYTKRILKRGREASVAKGNYIGSVDPYGYKKTVIKKDGVTCHTLEIIPEEANTVKLIHELYAYTPEGIGFTNIAHKLDAMHIKPKKAAHWTPAIISSILCNPLYLGMVRWNNRKVVKYINEGQLAKARPQNTEAKYYKGLHEPIITQELYDTCMARRGTNPSLRRNKELCNPFAGLLYCGTCGHAMSLKIYKNHNSVSQMMLCNHQAYCHTKSVLYSAFLRRFMSSMEDTLNDFELAQKSDDGRAQAISKTIVVNLENKLKKLNEKDARQKDAYEDGIYSKEEFLKRNVRTQQDIASTIIALEDARAKKADIVDYEEKIRRFKDCLHALNDPELSAAEKNRFLKSCVDKILYYNNMESKAGIGRYIENVFSLEIQYK

SEQ ID NO: 4073 - protein, 523 aa, Unknown
  Description of Unknown: Integrase B4074 sequence
  PTHR30461:SF3,SM00857,G3DSA:1.10.10.2600,IPR036162,PS51737, G3DSA:3.40.50.1390,IPR006119,IPR038109,PF07508,SSF53041, IPR011109,PTHR30461,Coil,PS51736,cd00338, PF00239
MVSFDSIIIYLRKSRSDDPAQTVEEVLAKHERILQDYCMKEYGKAIPEKRIYREVVSGETIQDRPVMQQLLKELETGNISGVLIVEPQRLSRGDLQDCGQIINSFRYTNTAVITPGKTYNLSDEYDRKFFEMELTRGNDYLEYTKKILSRGRVASVRQGNYICSVRPYGYRKITLGSGKDKCHTLEIIPEEADAIRLMYHLYLDENMGFTNIARTLDSLHIKPLKSDNWSAATIRDMIDNPIYIGKVVWNSRKVVKKWENEQITKVRPRNKGDDVICVNGRHEAIIDEHTFEAARNKRGLTPKIKKFKELRNPLAGLLFCGTCGHGMSMKKYVDKRSHTGKVTTVMLCNQQAVCHTKSAQYEDILAKIKVSLANAIFDFEIKLKEQENNNIDMHELRMSSLLDELNRLYSKDVRQKDAYEDGIYTKEEYIERNSKLQERILNVKEDIADEKKNIPVKIDYEDKIITFKDCLASLDDPNISAADKNILLKSCIDKIIYYNDMPSKPGIGRYIENSFRLEIFLKL

SEQ ID NO: 4074 - protein, 523 aa, Unknown
  Description of Unknown: Integrase B4075 sequence
  SM00857,G3DSA:1.10.10.2600,IPR036162,PF13408,IPR025827, G3DSA:3.40.50.1390,PS51737,IPR006119,IPR038109,PF07508, IPR011109,SSF53041,PTHR30461,Coil,PS51736, cd00338,PF00239
MAKPEVSELAVVYARYSSHSQGEQSIEGQLSNARDYAAAHGYTIVHEYVDRAKSGRTDNRAEFQQMLKDTAKRQFSVIILWKVDRFGRNREEIAINKMKCRKNGVRVEYVAETIPDSPEGVILESVLEGFAEYYSLQLSQNIRRGRAESAEKCQSLGGNRPLGYKTGPDKKFVIDENTAPTVKMIFTMYADGKTVTEIVDKLNEMGLRTLRGGPFTKNSLHSILKNKKYIGVYEYQGREIKDGVPRIIEDDVFNKVQEMLKINKRAPAKTWSRADYILTDKLFCGKCGALMFGESGTSKTGVKHNYYICSNKKRFRSCDKKAVRQADIEDTVLNATHELLQDDELLDYIVDRTWEYYLAQDNSQEELRNLQRQLAQTDTAISNLIRAIEAGILTEETKKRMDELTQQKADLKASIADREIARGFHLQKSHIAFYLRSLRDADWSDKEAQKRLIQTFVNAVFVYDDHITLTYNFSGDKSTITLHDMQRFEDGEEFGCRASRSTKGVLHEPFYFVGGFAVTIWFR

SEQ ID NO: 4075 - protein, 523 aa, Unknown
  Description of Unknown: Integrase B4076 sequence
  cd03768,PTHR30461:SF3,SM00857,IPR036162,PF13408, IPR025827,PS51737,G3DSA:3.40.50.1390,IPR006119,PF07508, IPR011109,SSF53041,PTHR30461,PS51736,Coil, PF00239
MRFFSYGRKSVFSDKSDSIDNQFRMNREYCESKFSGQVDSWQQFSDEDFTGANTSRPDLQRMLSFIKGGFCDVLVVYQLDRLSRDVRDFANIYALLEEHGVMFISIKENIDTTTPIGRAMMYVTVVFAQMERETIAARVTDNMLGLAKKGYWTGGNPPVGYVRKHIVVNGKKHCSIEVDPDGARYVTQIFDTFLAYNCSLQGMETRFKNQGIRTQSGKFFSTTQLHKMLTMPYCVEATPEVYDFYAAKGCIMDPGSPREMWDGSVGVIIYGRSTEKNKKHQAQPPEKWTVCLGKHKPFMPAEKWLAVQSRFTQNKCIKDAKWPVPLLKGVLRCKCGNLMQVSRKKKVDGTCSSWYYCRKRMRQGVDACDMGQIKCDLLDEEVLELFRGITADPALIQKFIKAEAPADVPDLKAAQARVSACERKIGRLAASLALAEDSAASKYIIAEMERLDVELGALKREASLAEMESHRAAASAKDAKATATEIAKLIHGLDGFDDKEKNAIARAVIQECTWDGERLFIML

SEQ ID NO: 4076 - protein, 523 aa, Unknown
  Description of Unknown: Integrase B4077 sequence
  cd03768,PTHR30461:SF3,SM00857,IPR036162,PF13408, PS51737,IPR025827,G3DSA:3.40.50.1390,IPR006119,PF07508, IPR011109,SSF53041,PTHR30461,PS51736,Coil, PF00239
MRFFSYGRKSVFSDKSDSIDNQFRMNREYCESKFSGQVDSWQQFSDEDFTGANTSRPDLQRMLSFIKGGFCDVLVVYQLDRLSRDVRDFANIYALLEEHGVMFISIKENIDTTTPIGRAMMYVTVVFAQMERETIAARVTDNMLGLAKKGYWTGGNPPVGYVRKHIVVNGKKHCSIEVDPDGARYVTQIFDTFLAYNCSLQGMETRFKNQGIRTQSGKFFSTTQLHKMLTMPYCVEATPEVYDFYAAKGCIMDPGSSREMWDGSVGVIIYGRSTEKNKKHQAQPPEKWTVCLGKHKPFMPAEKWLAVQSRFTQNKCIKDAKWPVPLLKGVLRCKCGNLMQVSRKKKVDGTCSSWYYCRKRMRQGVDACDMGQIKCDLLDEKVLELFRGITADPALIQKFVKAEAPADVPDLKAAQARVSACERKIGRLAASLALAEDSAASKYIIAEMERLDVELGALKREASLAEMESHRAAASAKDAKATAAEIAKLIHGLDGFDDKEKNAIARAVIQECTWDGERLFIKL

SEQ ID NO: 4077 - protein, 523 aa, Unknown
  Description of Unknown: Integrase B4078 sequence
  PTHR30461:SF3,SM00857,G3DSA:1.10.10.2600,IPR036162,PS51737, G3DSA:3.40.50.1390,IPR006119,IPR038109,PF07508,SSF53041, IPR011109,PTHR30461,Coil,PS51736,cd00338, PF00239
MPNTESFTVNEVLVYLRKSRSDSPDMSVEEVLRKHEEMIQQYASTHFRSPIPEKNIFREVVSGETIDSRPQMKNLLKMIESEQFKAVLVVEPQRLSRGDLEDCGRLINILRYTNTTVLTLTHSFNLQEEYERKFFEMEITRGNDYLEYTKRILKRGREASVAKGNYIGSVDPYGYKKTVIKKDGITCHTLEIIPEEADTVKLIHELYAYTPGGIGFTNIAHKLDAMHIKPKKAAHWTPAIISSILCNPLYLGMVRWNNRKVVKYINEGQLAKARPQNTEAKYYKGLHEPIITQELYDACMARRGTNPSLRRNKELCNPFAGLLYCGTCGHAMSLKIYKNHNSVSQMMLCNHQAYCHTKSVLYSAFLRRFISSMEDTLNDFELAQKSDDGRTQAISKTIVINLENKLKKLNEKDARQKDAYEDGIYSKEEFLKRNVRTQQDIASTIIALEDARAKKADIVDYEEKIRRFKDCLHALNDPELSAAEKNRFLKSCVDKILYYNNMESKAGIGRYIENVFSLEIQYK

SEQ ID NO: 4078 - protein, 523 aa, Unknown
  Description of Unknown: Integrase B4079 sequence
  PTHR30461:SF3,SM00857,IPR036162,PF13408,PS51737, IPR025827,G3DSA:3.40.50.1390,IPR006119,PF07508,IPR011109, SSF53041,PTHR30461,Coil,PS51736,cd00338, PF00239
MNICCYGRKSIYSDHSDSIDNQFRMCRDYVEMKFSGQVDSFLEYQDEAFTGANIKRPDLQRLLVDIAAGNCDVLIVYQLDRLSRDVRDFANIYAILEEHHVKFISIKENIDTSTPIGRAMMYVTVVFAQMERETIAARVADNMIGLAKKGYWTGGNPPEGYVRTRIEANGKKHCSIVPDPEGVKYVNWIFDTFLQNDYSLQSMETAFKNQGIRTRRGAFFSTAQLHKILTMPYCVQATPEVYDYYVARGCQMDPESPRESWDGTCGVMIYGRTTQKNKKHQMQPPEKWLICLGAHEPFMPADKWLAVQARFCRNKFDKTMKYDVPLLKGVLRCSCGSIMCVARKKKKEGVSSWYYCLKRMRQGKEVCDSHQIKCELLDQKVLELLQSIERDPALIHQFAEQNAEVLAGPDPKVLASKISTCQTRIDRLVSSLSLAAESSAQKYILAELERLDLEIQALRREHNLALTAERNRTRQQQDTFSKVSEISRLIGDMDSFSASEKNAIVKDVIKKCVWDGESLSIML

SEQ ID NO: 4079 - protein, 523 aa, Unknown
  Description of Unknown: Integrase B4080 sequence
  cd03768,PTHR30461:SF3,SM00857,IPR036162,PF13408, PS51737,G3DSA:3.40.50.1390,IPR025827,IPR006119,PF07508, IPR011109,SSF53041,PTHR30461,PS51736,Coil, PF00239
MRFFSYGRKSVFSDKSDSIDNQFRMNREYCDTKFSGQVDSWQQFSDEDFTGANTQRPDLQRMLSFIKNGFCDVLVVYQLDRLSRDVRDFANIYSLLEEHGVMFVSIKENIDTTTPIGRAMMYVTVVFAQMERETIAARVTDNMLGLAKKGYWTGGNPPRGYVRKHIVVDGKKHCSIEPDPDGVRYVTRIFDTFLAMNCSLQGMETRFKNQGIRTESGKFFSTTQLHKILTMPYCVEATPEVYDFYASKGCIMDPGSPREKWDGSVGVIIYGRSTEKNKKHQAQPPEKWTVCLGMHKPFMPAEKWLAVQARFGQNKCIKDAKWPVPLLKGVLRCKCGNLMQVSRKKKVDGTCSSWYYCRKRMRQGVDACDMGQIKCDLLDNEVLELFRGIAADPAMIQKFVKAEAPDEVPDLKAAQARVSACENKIGRLAASLALAEESSASKYIIAEMERLDVELGALKREAALAEMESHRAAASAKDAKATAVEIAKLIHGLEGFDDKEKNAIARAVIQECTWDGERLFITL

SEQ ID NO: 4080 - protein, 523 aa, Unknown
  Description of Unknown: Integrase B4081 sequence
  PTHR30461:SF3,cd00338,SM00857,G3DSA:1.10.10.2600,IPR036162, PF13408,PS51737,G3DSA:3.40.50.1390,IPR025827,IPR006119, IPR038109,PF07508,IPR011109,SSF53041,PTHR30461, PS51736,Coil,PF00239
MNVSKNITIIPARRRVGNTAKSVQTPKIRVAAYCRVSTDSDEQATSYEAQVEHYTTYIRMNPEWEFAGIFADDGISGTNTKKREQFNRMIERAMAGEIDMIVTKSISRFARNTLDCLKFIRKLKEKNIPVYFEKENINTMDAKGEVLLTIMASLAQQESQSLSQNVKLGIQYRYQQGYVKVNHNRFLGYTKDENGKLIIEKEGAEVVKRIYREYLEGASLQKICMGLEADGILTGAGKKIWRSDALRLILKNEKYIGDALLQKTYTVDFLEKKRVPNDGLMPQYYVENSHEAIIPRDVFMRVQEEMHRRANLHSGRQGKKRVYSSKYALSSIVYCSNCGDIYRRIQWRAHGEKYTVWRCCNRVENGPAACDADAILEEELHDVVVQAINRTLSKRENMKVVLASNIESVLTEVNGIPLGTIDSQLEELQNELIKVANAKGNYDSITDEIYRLRELKQNAMKKTAECKGIRLRVEEMRRFLEEQEVDITEYDERLTRRLIKRITVYDDHYSVEFKSGISVDIHK

SEQ ID NO: 4081 - protein, 523 aa, Unknown
  Description of Unknown: Integrase B4082 sequence
  PTHR30461:SF3,SM00857,G3DSA:1.10.10.2600,IPR036162,PS51737, G3DSA:3.40.50.1390,IPR006119,IPR038109,PF07508,IPR011109, SSF53041,PF00239,PTHR30461,Coil,cd00338
MYQLPNLQSSQVLIYLRKSRADDPSLSVEEVLSKHEQMLNEWAARSLPEPHVVPEENRYREVVSGETIDSRPKMQELLRRIESPSIRAVLVVEPQRLSRGDLEDIGRIVKILRYTNTLVITLQYSYDMHDAHDRDAFERELKRGNEFLEYQKRIMNNGKVLSVKNGNYIGNVPPYGYRKVRIKDGKRYAYTLEPDPIEAPILKAIFTWYADGIGTTHICDKLEEMGVKPRKAKAWSPYSIAGFFNNQHYIGKVIWAHRATVRTIENGDVVVRRPRADDYMVFDGKHEPLIDMELWNRVQAIKSLYPPVKKGRDVKSPYAGMMYCKKCGRAIKRQTYTTGEIRYVCINQRACKTASCTDIEMRDAVAKLLSDSLEAFEVQLEQMEEKNKAAAMRQDILSSLKQRLEDLYALEAAQWNEKAKGAMPDRVFERLNAEVVSEIESIQKSIAESEANPPEPCDIAERIVAFQTALDLLMDDTAPAKEKNALLKMCFSRIWYSRKQKDAEYGRRWGQSHPISLLAELKV

SEQ ID NO: 4082 - protein, 523 aa, Unknown
  Description of Unknown: Integrase B4083 sequence
  cd03768,PTHR30461:SF3,SM00857,IPR036162,PF13408,PS51737,G3DSA:3 .40.50.1390,IPR025827,IPR006119,PF07508,IPR011109,SSF53041, PTHR30461,PS51736,PF00239
MRFFSYGRKSVFSDKSDSIDNQFRMNREYCESKFSGQVDSWQQFSDEDFTGANTSRPDLQRMLSFIKGGFCDVLVVYQLDRLSRDVRDFANIYALLEEHGVMFISIKENIDTTTPIGRAMMYVTVVFAQMERETIAARVTDNMLGLAKKGYWTGGNPPVGYVRKHIIVNGKKHCSIEVDPDGARYVTQIFDTFLAYNCSLQGMETRFKNQGIRTQSGKFFSTTQLHKMLTMPYCVEATPEVYDFYAAKGCIMDPGSPREMWDGSVGVIIYGRSTEKNKKHQAQPPEKWTVCLGKHKPFMPAEKWLAVQSRFTQNKCIKDAKWPVPLLKGVLRCKCGNLMQVSRKKKVDGTCSSWYYCRKRMRQGVDACDMGQIKCDLLDEEVLELFRGITADPALIQKFVKAEAPADVPDLKAAQARVSACERKIGRLAASLALAEDSAASKYIIAEMERLDVELGALKRETSLAEMESHRAAASAKDAKATAAEIAKLIHGLDGFDDKEKNAIARAVIQECTWDGERLFITL

SEQ ID NO: 4083 - protein, 523 aa, Unknown
  Description of Unknown: Integrase B4084 sequence
  PTHR30461:SF3,IPR036162,PS51737,IPR011109,PTHR30461, PF00239,G3DSA:1.10.10.2600,IPR006119,SSF53041,cd00338, SM00857,IPR025827,IPR038109,mobidb-lite,PS51736, PF13408,G3DSA:3.40.50.1390,PF07508,Coil
MARKKNIAAGQNAVIYARYSSHNQREVSIEQQVRECMKHAAELGLHVVGTYEDRAISGKTDKRPNFQRMMRDAEKGKFQAVVAWKSNRIGRNMLQAMVNEAKLEDCGVKVFYAEEDFDDTAAGRFALRNMMNVNQFYSENMAEDITRGLYDNASKCMANGRQPLGYKRGEDGRVVLDEANAAVVREIFTRVAAGDLFVDIARDLNAQGIKTSKGANWNKGSFQSICQNERYRGIYIYGDVRVVDGIPRIVSDDLWYRVQEAMRMKKNPVGTRHRVGAEDYLLTGKLRCGHCGSYMTGVSGTSRNGELHYYYTCQKRRTEHACDKKNIRRDVIEPAVAQAIKMYCLTDDVIEWMADRTVEYWEKHDNDLQIEALEQQLEENKKATSNMLKAIEMGIITEATRTRMVELETEQSRLSVQLNAAKEDVVKIDREQIISYLELLQQGDIHDRDFQMELFKNFLVAVYVYDDNRMKLVFSCMGDQNSVEIPLETGEDPPDGGLSPGAKMFVLTPDSSTIGSNKSYKHR

SEQ ID NO: 4084 - protein, 523 aa, Unknown
  Description of Unknown: Integrase B4085 sequence
  cd03768,PTHR30461:SF3,SM00857,IPR036162,PF13408, PS51737,IPR025827,G3DSA:3.40.50.1390,IPR006119,PF07508, IPR011109,SSF53041,PTHR30461,PS51736,Coil, PF00239
MRFFSYGRKSVFSDKSDSIDNQFRMNREYCESKFSGQVDSWQQFSDEDFTGANTSRPDLQRMLSFIKGGFCDVLVVYQLDRLSRDVRDFANIYALLEEHGVMFISIKENIDTTTPIGRAMMYVTVVFAQMERETIAARVTDNMLGLAKKGYWTGGNPPVGYVRKHIVVNGKKHCSIEVDPDGARYVTQIFDTFLAYNCSLQGMETRFKNQGIRTQNGKFFSTAQLHKMLTMPYCVEATPEVYDFYAAKGCIMDPGSPREMWDGSAGVIIYGRSTEKNKKHQLQPPEKWTVCLGKHKPFMPAEKWLAVQSRFTQNKCIKDAKWPVPLLKGVLRCKCGNLMQVSRKKKVDGTCSSWYYCRKRMRQGVDACDMGQIKCDLLDEKVLELFRGITADPALIQKFVKAEAPADVPDLKAAQARVSACERKIGRLAASLALAEDSAASKYIIAEMERLDVELGALKREASLAEMESHQAAASAKDAKATAAEIAKLIHGLDGFDDKEKNAIARAVIQECTWDGERLFIKL

SEQ ID NO: 4085 - protein, 523 aa, Unknown
  Description of Unknown: Integrase B4086 sequence
  PTHR30461:SF3,cd00338,SM00857,G3DSA:1.10.10.2600,IPR036162, PF13408,PS51737,G3DSA:3.40.50.1390,IPR025827,IPR006119, IPR038109,PF07508,IPR011109,SSF53041,PTHR30461, PS51736,Coil,PF00239
MARKKNIAAGQNAVIYARYSSHNQREVSIEQQVRECMKHAAELGLHVVGTYEDRAISGKTDKRPNFQRMMRDAEKGKFQAVVAWKSNRIGRNMLQAMVNEAKLEDCGVKVFYAEEDFDDTAAGRFALRNMMNVNQFYSENMAEDITRGLYDNASKCMANGRQPLGYKRGEDGRVVLDEANAAVVREIFTRVAAGDLFVDIARDLNAQGIKTSKGANWNKGSFQSICQNERYRGIYIYGDVRVADGIPRIVSDDLWYRVQEAMRMKKNPVGTRHRVGAEDYLLTGKLRCGHCGSYMTGVSGTSRNGELHYYYTCQKRRTEHACDKKNIRRDVIEPAVAQAIKMYCLTDDVIAWIADRTVEYWEKHDNDLQIEALEQQLEENKKATSNMLKAIEMGIITEATRTRMVELETEQSRLSVQLNAAKEDVVKIDREQIISYLELLQQGDIHDRDFQMELFKNFLVAVYVYDDNRMKLVFSCMGDQNSVEIPLETGEDPPDGGLSPDAKMFVLTPDSSTIQFVLEPDSL

SEQ ID NO: 4086 - protein, 523 aa, Unknown
  Description of Unknown: Integrase B4087 sequence
  SM00857,G3DSA:1.10.10.2600,IPR036162,PF13408,IPR025827, G3DSA:3.40.50.1390,PS51737,IPR006119,IPR038109,PF07508, IPR011109,SSF53041,PTHR30461,Coil,PS51736, cd00338,PF00239
MPDYAIYLRKSRKDNEAEQRGEGETLARHRKLLLDYAKCEGLRIAKIYEEVVSGESIATRPQMQLLLADVEQGLYDGVLVVEVERLARGDTMDQGLVAQTFKYSNTKIYTPMKVYDPNNEFDEEYFEFGLFMSRREYKTINRRLQRGRRASASEGKYIAGRAPYGYEKIKIPNDKGNTLRIIPEQAEVIKQIYDWYVNGLDGEDAGLSKIATKLNSLGIKPYRNDYWSKETLRDIITNPVYAGFIRWGYRRNKKTVVDGKTVTSRPVTLDENCVLSKGLHEAIITQELYDKAQRKIKSIPPPPVGYKKELKGSLAGIVICKNCGHKMTLRSPSTKGKPPYLVCHYRYCDNVSTPYDIVEKRVLDTLKEWAEKYKLKEKQSKKNSSSSIDMLKSSVESAKKKVATLQQQLDGMCDLLEQGIYTPDMFRQRSVSVTERITKAKAEYEQLSEQLESMEKLLTEKSEFIPKVEHVLKIYDTLSTPADKNRVLKEVIDHAEYSKAKSGAYKGVSVDDFNLTVFPKMPL

SEQ ID NO: 4087 - protein, 523 aa, Unknown
  Description of Unknown: Integrase B4088 sequence
  cd03768,PTHR30461:SF3,SM00857,IPR036162,PF13408, IPR025827,G3DSA:3.40.50.1390,PS51737,IPR006119,PF07508, SSF53041,IPR011109,PTHR30461,PS51736,Coil, PF00239
MRFFSYGRKSVFSDKSDSIDNQFRMNREYCESKFSGQVDSWQQFSDEDFTGANTSRPDLQRMLSFIKGGFCDVLVVYQLDRLSRAVRDFANIYALLEEHGVMFISIKENIDTTTPIGRAMMYVTVVFAQMERETIAARVTDNMLGLAKKGYWTGGNPPVGYVRKHIVVNGKKHCSIEVDPDGARYVTQIFDTFLAYNCSLQGMETRFKNQGIRTQSGKFFSTTQLHKMLTMPYCVEATPEVYDFYAAKGCIMDPGSPREMWDGSVGVIIYGRSTEKNKKHQAQPPEKWTVCLGKHKPFMPAEKWLAVQSRFTQNKCIKDAKWPVPLLKGVLRCKCGNLMQVSRKKKVDGTCSSWYYCRKRMRQGVDACDMGQIKCDLLDEEVLELFRGITADPTLIQKFVKAEAPADVPDLKAAQARVSACERKIGRLAASLALAEDSAASKYIIAEMERLDVELGALKREASLAEMESHRAAASAKDAKATAAEIAKLIHGLDGFDDKEKNAIARAVIQECTWDGERLFIKL

SEQ ID NO: 4088 - protein, 523 aa, Unknown
  Description of Unknown: Integrase B4089 sequence
  SM00857,G3DSA:1.10.10.2600,IPR036162,PF13408,IPR025827, G3DSA:3.40.50.1390,PS51737,IPR006119,IPR038109,PF07508, IPR011109,SSF53041,PF00239,PTHR30461,PS51736, Coil,cd00338
MNENVCIYLRKSRADQEAELRGEGETLARHERILLDLAKSRNYSVGAIYREIVSGETISARPVMQQLLREVEAGSWDGVLVVEVERLARGDTIDQGVVSRAFQFSDTKIITPTKTYDPDNEFDEEYFEFGLFMSRREYKTIKRRLNAGRIASVKEGKYCGSKPPYGYERVKLHGEKGFTLQPVPDQAEVIKMIYSLYSGAFGDRIGVSKIVRKLNDMGIKSPSGKDWVPISVQDVLANPVYAGMIRWNGRKTVRAIQDGVVTQSRPRSKEDDILLFPGRHPAIVSKEMYDSVQQIRKKNPPRPISIKNTIKNPLAGIVYCSKCGRAMVRRPYQKRGQDDTLMCSYTSCPTVSSKLSLVERAVLNGIQDLVDEYRLNDTVPGPDINNAVKSKEKLIAEKEHELEKLNVQKMKQYDLLEQGIYTTEVFLERSNSIASSINSCQDSIECLKEEIRHDKELIDQQSSFIPRCENLLEIYWSLDTAAKNKMLKELIERVNYTKDVKNAFRMGNEATFVLDIFPRIQSN

SEQ ID NO: 4089 - protein, 523 aa, Unknown
  Description of Unknown: Integrase B4090 sequence
  cd00338,SM00857,G3DSA:1.10.10.2600,IPR036162,PF13408, PS51737,G3DSA:3.40.50.1390,IPR025827,IPR006119,IPR038109, PF07508,IPR011109,SSF53041,PTHR30461,PS51736, Coil,PF00239
MSNYLENNCIYLRKSRADREAEARGEGETLARHERILLDLAKKRGCHIGAIYKEVVSGETISARPVMQQLLREVEAGMWDGVLVVEIERLARGDTIDQGTVSRAFQYSDTKIITPAKVYDPNNEFDEEYFEFGLFMSRREYKTIKRRLNAGRISSVKEGKYCGNRPPYGYERVKLEHEKGFSLRPLPDEAEIVKLIFNWYVYGVDGERLGMAKIARRLNNMNVVTQKGRDWTIPSVSSILQNPVYAGKIRWNSRKVVRKIENGSVVLSRPRSNDVLLADGRHESLISWDLYQKAMDLKSKNPPRPVPTYSTVKNPLSGIIYCKKCGRSMVRRPYAKRGQEDSLICPYTSCNTVSSKLSLVEKAVITGLSDLVQNYKLNDTLQDHSGMDMIAAKEALIASKKEELKKLNAQKLKQYDLLEQGIYTSEIFLERSSINAQQIQSCTKSIEDLQVELEHDQQLLAQKNTFIPRCENLLSNYWSWDAKTRNDVLKELIERIDYSKDTKNAFRKGNDITFSLDIYPKIQ

SEQ ID NO: 4090 - protein, 523 aa, Unknown
  Description of Unknown: Integrase B4091 sequence
  cd00338,SM00857,G3DSA:1.10.10.2600,IPR036162,PF13408, PS51737,G3DSA:3.40.50.1390,IPR025827,IPR006119,IPR038109, PF07508,IPR011109,SSF53041,PTHR30461,PS51736, Coil,PF00239
MVQEKLRAVFYARVSTEEERQLNALEKQVAECKDAILQKGWKLVDQYVDEGKSGTQIKRRDEYRRLFEDLENDKFDIVVIKSQDRLQRNTLDWYIWIDRLTTHGKRLYMYLEDTFYSPDNALISGIKAILAEEYSRELSKKINNSYKRRIEAAKNGEKISIVNNSRSLGYDKVNGELVINEKEAEVVRMIFNMYASGEGLRAISNTLYDMGYRNRSGNEIDPTTISRMLSSEKYKGVYVINQRHYDFDTKKTVLNPKSEWVHIPGAVPAIVEPELWDRVQEIKGSKVQSIKNEKRGRNCGKSIFSGKIYCAKCGAKYWRSLENGYVKFKCSSYSKYGKIPGKGCDNKSFSENALYSILQSLSEQIVEVNTAEVRKSLLNWLESLRERLRASQGDDTIKEEIRKQTARKEKLTDAYMDGIISKEDYSKRYKELEKTLEDLKDKLLTLEVNEDLQSIEEVIQNIDKEMEEYLQTQSFNESRVEFLNQHLTKVTVNKDSFLLEFDLIGGAILTGKDFYLFVDNPRK

SEQ ID NO: 4091 - protein, 523 aa, Unknown
  Description of Unknown: Integrase B4092 sequence
  cd03768,PTHR30461:SF3,SM00857,IPR036162,PF13408, PS51737,G3DSA:3.40.50.1390,IPR025827,IPR006119,PF07508, IPR011109,SSF53041,PTHR30461,PS51736,Coil, PF00239
MRFFSYGRKSVFSDKSDSIDNQFRMNREYCESKFSGQVDSWQQFSDEDFTGANTSRPDLQRMLSFIKGGFCDVLVVYQLDRLSRDVRDFANIYALLEEHGVMFISIKENIDTTTPIGRAMMYVTVVFAQMERETIAARVTDNMLGLAKKGYWTGGNPPVGYVRKHIVVDGKKHCSIEVDPDGARYVTQIFDTFLAYNCSLQGMETRFKNQGIRTQSGKFFSTTQLHKMLTMPYCVEATPEVYDFYAAKGCIMDPGSPREMWDGSVGVIIYGRSTEKNKKHQAQPPEKWTVCLGKHKPFMPAEKWLAVQSRFTQNKCIKDAKWPVPLLKGVLRCKCGNLMQVSRKKKVDGTCSSWYYCRKRMRQGVDACDMGQIKCDLLDEKVLELFRGITADPGLIQKFVKTKAPDDIPNLKAAQARVSACERKIGRLAASLALAEDSTASKYIIAEMERLDVELGALKREASLAEMENHRATANAKDAKVTAAEIAKLIHGLEGFDDKEKNAIARAVIQECTWDGERLFITL

SEQ ID NO: 4092 - protein, 523 aa, Unknown
  Description of Unknown: Integrase B4093 sequence
  SM00857,G3DSA:1.10.10.2600,PS51736,PF13408,PS51737, IPR025827,G3DSA:3.40.50.1390,IPR036162,IPR006119,IPR038109, PF07508,IPR011109,SSF53041,PTHR30461,Coil, mobidb-lite,cd00338,PF00239
MYEEIKTACLYLRYSSSNQTEQSIEGQMHVCQDFCKRHNIRIVEMYIDRATSASKDIEKRVGFLKMIKDSEKGNFDAVIVYKLDRFARSRYDSATYKYRLKRNGVQLVSATENITQDPEGIILESVLEGMAEFYSAELSQKIGRGMKESAMKHNSTGGVIPLGYKIVNKKLIIDESTAPIVREAFQRYADGESVAEICRTFNARGYKTAKGANFGKSSFTLMFRNEKYIGTYRYSDYQAKDAIPAIIDKDLWDKVQMRVGKTQKAPARNKAKHVYLLTGKLFCGHCRSTMNGDCNSDGYLYYRCYGKKMHKNCTKRNVGKNFIETLVVQDAISFLTDDYIEKIATIACDRNKQEIESASPIPMIQDRIAQIDVSLTNLLKAIEIGATPDTLVQRMKELETEKKSMEIQLKKEMGNQVYIDKEQVIFWLEKFKNGNINDEQFCQTVIDLFINSVTIWDDDNNTFKVTIAYNISSIPTKTYRPSKDGRSSDFTSNGQGLSANPTIHENVLIRTFQISIPHHKIVK

SEQ ID NO: 4093 - protein, 523 aa, Unknown
  Description of Unknown: Integrase B4094 sequence
  PTHR30461:SF3,cd00338,SM00857,G3DSA:1.10.10.2600,IPR036162, PS51737,G3DSA:3.40.50.1390,IPR006119,IPR038109,PF07508, SSF53041,IPR011109,PTHR30461,PS51736,Coil, PF00239
MVSFDNIIIYLRKSRSDDPVQTVEEVLAKHERILQDYCMKEYGKAIPEKRIYREVVSGETIQDRPIMQKLLKELETDNISGVLIVEPQRLSRGDLQDCGQIINSFRYTNTAVITPTKTYNLSDEYDRKFFEMELTRGNDYLEYTKKILNRGRVASVKQGNYICSVRPYGYKKIVIGTGKDKCHTLEIIPEEAEAIKLMYHLYLDENMGFTNIARTLDSMHIKPLKSSNWSAATIRDMIDNPIYIGKIVWNNRKVVKKWENEQIIKVRPRNKGDDVICVDGKHEAIIDEETFNAARQKRGLTPKVRKFKELRNPLAGILFCSTCGHSMSMKKYVDKRSHTGKVTTIMLCNKQAVCHTKSAQYEQIVAKIKESLADAIANFEIKMKEQENNNIDIHKQRITSLKDELNRLYNKDVRQKDAFEDGIYTKEEYIERNSKLQSQILNIKAEIENEKNNTPVIIDYQNKITTFTECLTSLDDDSISAADKNSLLKNCIDKIIYHNDMPSLPGIGRYIENSFRLEIFLKM

SEQ ID NO: 4094 - protein, 523 aa, Unknown
  Description of Unknown: Integrase B4095 sequence
  PTHR30461:SF3,SM00857,G3DSA:1.10.10.2600,IPR036162,PF13408, PS51737,G3DSA:3.40.50.1390,IPR025827,IPR006119,IPR038109, PF07508,IPR011109,SSF53041,PF00239,PTHR30461, PS51736,Coil,cd00338
MAEKTITVIPARKRVGSRKQVTEEKPKLRVAAYCRVSTDRDEQESSYEAQVEHYTEFIDRNPEWQLAGIYADDGISGTNTKKREEFNRMIEDCMASKIDMVITKSISRFARNTLDCLKYIRQLKEKNISVYFEKENINTMDAKGEVLLTIMASLAQQESQSLSQNVKLGLQFRYQAGKVQVNHNRFLGYTKDDEGNLVIVPEEAEIVLRIYREYLEGASLFQIGQGLEADGIKTAAGSDYWLQSTLKKILTNEKYIGDALLQKTYTVDFLNKKRVANNGIVPQYYVENSHPAIIPREKFMKVREEMYRRAHMECGPDQKRRIYSSRYALSSIVYCAHCNDIFRRINWNNRGCKSTVWRCLSRVEKDRPSCTARTVKEELLHEVVVRAVNEVITGSSSFIPALQASFERCLGDSNSAAVEGIDAHLLELQQELLKLANAKQNYETLADEIDELRAEKEELLLQEANKEGIRQRIADMMAYLQSEPEEVTEYSEALVRRMIEKITVYDDHFVVEFKSGIEITINE

SEQ ID NO: 4095 - protein, 523 aa, Unknown
  Description of Unknown: Integrase B4096 sequence
  cd03768,PTHR30461:SF3,SM00857,IPR036162,PF13408, IPR025827,G3DSA:3.40.50.1390,PS51737,IPR006119,PF07508, SSF53041,IPR011109,PTHR30461,PS51736,Coil, PF00239
MRFFSYGRKSVFSDKSDSIDNQFRMNREYCESKFSGQVDSWQQFSDEDFTGANTSRPDLQRMLSFIKGGFCDVLVVYQLDRLSRDVRDFANIYALLEEHGVMFISIKENIDTTTPIGRAMMYVTVVFAQMERETIAARVTDNMLGLAKKGYWTGGNPPVGYVRKHIVVNGKKHCSIEVDPDGARYVTQIFDTFLAYNCSLQGMETRFKNQGIRTQSGKFFSTTQLHKMLTMPYCVEATPEVYDFYAAKGCIMDPGSPREMWDGSVGVIIYGRSTEKNKKHQAQPPEKWTVCLGKHKPFMPAEKWLAVQSRFTQNKCIKDAKWPVPLLKGVLRCKCGNLMQVSRKKKVDGTCSSWYYCRKRMRQGVDACDMGQIKCDLLDEEVLELFRGITADPALIQKFVKAEAPADVPDLKAAQARVSACERKIGRLAASLALAEDSAASKYIIAEMERLDVELGALKREASLAEMESHQAAASAKDAKATAAEIAKLIHGLDGFDDKEKNAIARAVIQECTWDGERLFIKL

SEQ ID NO: 4096 - protein, 523 aa, Unknown
  Description of Unknown: Integrase B4097 sequence
  cd03768,PTHR30461:SF3,SM00857,IPR036162,PF13408, PS51737,IPR025827,G3DSA:3.40.50.1390,IPR006119,PF07508, IPR011109,SSF53041,PTHR30461,PS51736,Coil, PF00239
MRFFSYGRKSVFSDKSDSIDNQFRMNREYCESKFSGQVDSWQQFSDEDFTGANTSRPDLQRMLSFIKGGFCDVLVVYQLDRLSRDVRDFANIYALLEEHGVMFISIKENIDTTTPIGRAMMYVTVVFAQMERETIAARVTDNMLGLAKKGYWTGGNPPVGYVRKHIVVNGKKHCSIEVDPDGARYVTQIFDTFLAYNCSLQGMETRFKNQGIRTQNGKFFSTAQLHKMLTMPYCVEATPEVYDFYAAKGCIMDPGSPREMWDGSVGVIIYGRSTEKNKKHQAQPPEKWTVCLGKHKPFMPAEKWLAVQSRFTQNKCIKDAKWPVPLLKGVLRCKCGNLMQVSRKKKVDGTCSSWYYCRKRMRQGVDACDMGQIKCDLLDEEVLELFRGITADPALIQKFVKAEAPADVPDLKAAQARVSACERKIGRLAASLALAEDSAASKYIIAEMERLDVELGALKREASLAEMESHRAAASAKDAKATAAEIAKLIHGLDGFDDKEKNAIARAVIQECTWDGERLFITL

SEQ ID NO: 4097 - protein, 523 aa, Unknown
  Description of Unknown: Integrase B4098 sequence
  SM00857,G3DSA:1.10.10.2600,IPR036162,PF13408,PS51737, G3DSA:3.40.50.1390,IPR025827,IPR006119,IPR038109,PF07508, IPR011109,SSF53041,PTHR30461,Coil,PS51736, cd00338,PF00239
MVKNRAAIYARFSSHNQRSESIEIQVENSREYCEREGLHVVREYCDYAQTGRNVDRAEFQRMMSDAKLGLFDFVVIYKVTRIMRNRDEMALARIMLRKAGVEILYAGEEIASGSSGVLQLGMLEVLAEWESAIDSERIRDGIQKNAERCMANGRTLYGWDIVEGRYAINEREAAVLRRMKNLLFSGNSVAEIVRAVDAERSKRGAKFNQDTVTKLLKRVQNAGVYKYAGHEVEGGMPALWSQAEQDMINSILSDRHRPRRKVDSALEFPLSGKLYCARCGMPMAGTSGTSKNGSAYHYYKCRKCRRTVRRDLIEDAVVDMTYEAVKQADVRKRIAKTLAGYEAERATEEKPESYFIKKEIRRIDTAFERIWQAIEDGIAPPGGRERTTELKRQRAELEARLRVAEQAESLEPSVDDVLLWLDDLANDTTPLEILNEFVRFVEIDGKDVTVYFMFDELPDDFTPKQKKAEHPCYQRCSTNSLVVELMRKTANSTSTANRAAIHLDTCIVRVSKNWFVVVGTCQK

SEQ ID NO: 4098 - protein, 523 aa, Unknown
  Description of Unknown: Integrase B4099 sequence
  cd03768,PTHR30461:SF3,SM00857,IPR036162,PF13408, IPR025827,PS51737,G3DSA:3.40.50.1390,IPR006119,PF07508, IPR011109,SSF53041,PTHR30461,PS51736,Coil, PF00239
MRFFSYGRKSVFSDKSDSIDNQFRMNREYCESKFSGQVDSWQQFSDEDFTGANTSRPDLQRMLSFIKGGFCDVLVVYQLDRLSRDVRDFANIYALLEEHGVMFISIKENIDTTTPIGRAMMYVTVVFAQMERETIAARVTDNMLGLAKKGYWTGGNPPVGYVRKHIVVNGKKHCSIEVDPDGARYVTQIFDTFLAYNCSLQGMETRFKNQGIRTQSGKFFSTTQLHKMLTMPYCVEATPEVYDFYAAKGCIMDPGSPREMWDGSVGVIIYGRSTEKNKKHQAQPPEKWTVCLGKHKPFMPAEKWLAVQSRFTQNKCIKDAKWPVPLLKGVLRCKCGNLMQVSRKKKVDGTCSSWYYCRKRMRQGVDACDMGQIKCDLLDEEVLELFRGITADPALIQKFVKAEAPADVPDLKAAQARVSACERKIGRLAASLALAEDSAASKYIIAEMERLDVELGALKREASLAEMESHRAAASAKDAKATATEIAKLIHGLDGFDDKEKNAIARAVIQECTWDGERLFITL

SEQ ID NO: 4099 - protein, 523 aa, Unknown
  Description of Unknown: Integrase B4100 sequence
  PTHR30461:SF3,cd00338,SM00857,G3DSA:1.10.10.2600,IPR036162, PS51737,G3DSA:3.40.50.1390,IPR006119,IPR038109,PF07508, IPR011109,SSF53041,PTHR30461,PS51736,Coil, PF00239
MNIGNQLGKLKKSDQFCIYLRKSRADAEAEKLGEGETLARHKKILTKLAAKKELYVEKIYHEIVSGESIAARPEMQKLIKDCYDGKYRGIIVIDVDRLSRGNQADMQTIMDCLKYSNNRNGLLVVTPTKTYDVANNYDDEEYIEFVLFMSRREYKTILKRMERGRKQSIIEGNYLGSTAPYGYDILKTRAGRTLIPNQEEAKIVKQIFEMYISGETSYKICTKLSSQGIKTPAGNEYWHDSTIRSIITNPVYIGRVSWSAKLTTKKLVDGKLIVQRKKSRKTDQYMEYDGKHKPIISEEMFKAANNRIPVSKTKRNCKLRNILAGIIVCKKCGKAMLYQHQYNKSTAPRYIHAPRTECTIKSVRVSDVIDALIRALELSIEDFEIKVNNLPTVDENNIQSQIEAIEKQIKKTEKKLSKLFDSWEEDLISANEFLERKNIHNKNIQSCKLQIKELKQSIPDKEEFEESISSLHEALQLLKDDAIDADIKNEYLKTIIEKIEFSRKSVDEFILDIKFKDNIIVNE

SEQ ID NO: 4100 - protein, 523 aa, Unknown
  Description of Unknown: Integrase B4101 sequence
  cd03768,PTHR30461:SF3,SM00857,IPR036162,PF13408, IPR025827,G3DSA:3.40.50.1390,PS51737,IPR006119,PF07508, IPR011109,SSF53041,PTHR30461,PS51736,Coil, PF00239
MRFFSYGRKSVFSDKSDSIDNQFRMNREYCESKFSGQVDSWQQFSDEDFTGANTSRPDLQRMLSFIKGGFCDVLVVYQLDRLSRDVRDFANIYALLEEHGVMFISIKENIDTTTPIGRAMMYVTVVFAQMERETIAARVTDNMLGLAKKGYWTGGNPPVGYVRKHIVVNGKKHCSIEVDPDGARYVTQIFDTFLAYNCSLQGMETRFKNQGIRTQSGKFFSTTQLHKMLTMPYCVEATPEVYDFYAAKGCIMDPGSPREMWDGSVGVIIYGRSTEKNKKHQAQPPEKWTVCLGKHKPFMPAEKWLAVQSRFTQNKCIKDAKWPVPLLKGVLRCKCGNLMQVSRKKKVDGTCSSWYYCRKRMRQGVDACDMGQIKCDLLDEEVLELFRGITADPALIQKFVKAEAPADVPDLKAAQARVSACERKIGRLAASLALAEDSAASKYIIAEMERLDVELGALKREASLAEMESHRAAASAKDAKATAVEIAKLIHGLEGFDDKEKNAIARAVIQECTWDGERLFITL

SEQ ID NO: 4101 - protein, 523 aa, Unknown
  Description of Unknown: Integrase B4102 sequence
  cd03768,PTHR30461:SF3,SM00857,IPR036162,PF13408, PS51737,IPR025827,G3DSA:3.40.50.1390,IPR006119,PF07508, IPR011109,SSF53041,PTHR30461,PS51736,Coil, PF00239
MRFFSYGRKSIFSDKSDSIDNQFRMSREYCESKFSGQVDSWQQFSDEDFTGANADRPDLQRMLSFIKNGFCDVLVVYQLDRLSRDVRDFANIYALLEEHGVMFISIKENIDTTTPIGRAMMYVTVVFAQMERETIAARVTDNMLGLAKKGYWTGGNPPVGYVRKHIVVNGKKHCSIEVDPDGARYVTQIFDTFLAYNCSLQGMETRFKNQGIRTRAGKFFSTTQLHKMLTMPYCVEATPEVYDFYAAKGCIMDPGSPREMWDGSVGVIIYGRSTEKNKKHQVQPPEKWTVCLGKHKPFMPAEKWLAVQSRFSQNKCIKDAKWPVPLLKGVLRCKCGNLMQISRKKKGDGTCSSWYYCRKRMRQGIDACDMGQIKCDLLDEEVLELFRGIAADPGLIQKFVKMEAPADVPDLKAAQARVSVCERKIGRLAASLAMAEDSVASKYIIAEMERLDVELGALKREASLAEMESHRAAVSAKDAKATAAEIAKLIHGLEGFDDKEKNAIARAVIQECTWDGERLFITL

SEQ ID NO: 4102 - protein, 523 aa, Unknown
  Description of Unknown: Integrase B4103 sequence
  PTHR30461:SF3,SM00857,G3DSA:1.10.10.2600,IPR036162,PS51737, G3DSA:3.40.50.1390,IPR006119,IPR038109,PF07508,SSF53041, IPR011109,PTHR30461,Coil,PS51736,cd00338, PF00239
MPNTESFTVNEILVYLRKSRSDSPDMSVEEVLRKHEEMIQQYASTHFCSPIPEKNIFREVVSGETIDSRPQIKNLLKMIESEQFKAVLVVEPQRLSRGDLEDCGRLINILRYTNTTVLTLTHSFDLQEEYERKFFEMEITRGNDYLEYTKRILKRGREASVAKGNYIGSVDPYGYKKTVIKKDGVTCHTLEIIPEEADTVKLIHELYAYTPEGIGFTNIAHKLDAMHIKPKKAAHWTPAIISSILCNPLYLGMVRWNNRKVVKYINEGQLAKARPQNSEAKYYKGLHEPIITHELYDACMARRGTNPSLRRNKELCNPFAGLLYCGTCGHAMSLKIYKNHNSVSQMMLCNHQAYCHTKSVLYSAFLRRFISSMENTLNDFELAQKSDDGRTQAISKTIVINLENKLKKLNEKDARQKDAYEDGIYSKEEFLKRNVRTQQDIASTIIALEDARAKKADIVDYEEKIRRFKDCLHALNDPELSAAEKNRFLKSCVDKILYYNNMESKAGIGRYIENVFSLEIQYK

SEQ ID NO: 4103 - protein, 523 aa, Unknown
  Description of Unknown: Integrase B4104 sequence
  cd03768,PTHR30461:SF3,SM00857,IPR036162,PF13408, PS51737,IPR025827,G3DSA:3.40.50.1390,IPR006119,PF07508, IPR011109,SSF53041,PTHR30461,PS51736,Coil, PF00239
MRFFSYGRKSVFSDKSDSIDNQFRMNREYCESKFSGQVDSWQQFSDEDFTGANTSRPDLQRMLSFIKGGFCDVLVVYQLDRLSRDVRDFANIYALLEEHGVMFISIKENIDTTTPIGRAMMYVTVVFAQMERETIAARVTDNMLGLAKKGYWTGGNPPVGYVRKHIVVNGKKHCSIEVDPDGARYVTQIFDTFLAYNCSLQGMETRFKNQGIRTQSGKFFSTTQLHKMLTMPYCVEATPEVYDFYAAKGCIMDPGSPREMWDGSVGVIIYGRSTEKNKKHQAQPPEKWTVCLGKHKPFMHAEKWLAVQSRFTQNKCIKDAKWPVPLLKGVLRCKCGNLMQVSRKKKVDGTCSSWYYCRKRMRQGVDACDMGQIKCDLLDEKVLELFRGITADPALIQKFVKAEAPADVPDLKAAQARVSACERKIGRLAASLALAEDSAASKYIIAEMERLDVELGALKREASLAEMESHRAAASAKDAKATAAEIAKLIHGLDGFDDKEKNAIARAVIQECTWDGERLFITL

SEQ ID NO: 4104 - protein, 523 aa, Unknown
  Description of Unknown: Integrase B4105 sequence
  PTHR30461:SF3,IPR036162,PS51737,IPR011109,PTHR30461, PF00239,G3DSA:1.10.10.2600,IPR006119,SSF53041,cd00338, SM00857,IPR025827,IPR038109,mobidb-lite,PS51736, PF13408,G3DSA:3.40.50.1390,PF07508,Coil
MKACLYLRYSSSSQTEQSIEGQQRVCLDYCKRQGITVVATYIDRATSASKHTEKRHEFLQMIKDAEKGLFDAVIVYKLDRFARNRYDSANYKYRLKKVGVRLISATENLTDSPESIILESVLEGMAEFYSAELAQKVSRGMQESAYKCQVTGGTIPLGYKIENKHFVIDPRTAPIVQEAFRLYDEGKSISMISEIFNNKGYRTTRGYAFNKNSFKSMFRNEKYIGVYQYKEHRVEGGVPAIVDKALFDRVQEKLKLTANAPARGKAKVDYLLSGKLFCGHCGEQMNGDTGTSAQGVSYNYYSCYGHKQHRCQKKSIRKELIEDVVVQDALTLLTPDIMNLIADATMQEYYKEIQIEGKIPALEEHLQELDAALKNITAAIERGVVPETLLNRMVELEKEKKSCQKELEYEKQKKDAITKQDVLEFLTRIAQGNIKTEAAKKRIINLFVNSVTLWDEPDGWFKITTAYNVTDVPSKTYRIKSDTGKGSDLERNGGPNKNNPNLFPIGDGFGLFVFFGKLAFAKQ

SEQ ID NO: 4105 - protein, 523 aa, Unknown
  Description of Unknown: Integrase B4106 sequence
  cd03768,PTHR30461:SF3,SM00857,IPR036162,PF13408, IPR025827,PS51737,G3DSA:3.40.50.1390,IPR006119,PF07508, SSF53041,IPR011109,PTHR30461,PS51736,Coil, PF00239
MRFFSYGRKSVFSDKSDSIDNQFRMNREYCESKFSGQVDSWQQFSDEDFTGANTSRPDLQRMLSFIKGGFCDVLVVYQLDRLSRDVRDFANIYALLEEHSVMFISIKENIDTTTPIGRAMMYVTVVFAQMERETIAARVTDNMLGLAKKGYWTGGNPPVGYVRKHIVVNGKKHCSIEVDPDGARYVTQIFDTFLAYNCSLQGMETRFKNQGIRTQSGKFFSTTQLHKMLTMPYCVEATPEVYDFYAAKGCIMDPGSPREMWDGSVGVIIYGRSTEKNKKHQAQPPEKWTVCLGKHKPFMPAEKWLAVQSRFTQNKCIKDAKWPVPLLKGVLRCKCGNLMQVSRKKKVDGTCSSWYYCRKRMRQGVDACDMGQIKCDLLDEEVLELFRGITADPALIQKFVKAEAPADVTDLKAAQARVSACERKIGRLAASLALAEDSAASKYIIAEMERLDVELGALKREASLAEMESHRAAASAKDAKATAAEIAKLIHGLDGFDDKEKNAIARAVIQECTWDGERLFITL

SEQ ID NO: 4106 - protein, 523 aa, Unknown
  Description of Unknown: Integrase B4107 sequence
  PTHR30461:SF3,SM00857,G3DSA:1.10.10.2600,IPR036162,PF13408, PS51737,G3DSA:3.40.50.1390,IPR025827,IPR006119,IPR038109, PF07508,IPR011109,SSF53041,PTHR30461,Coil, PS51736,cd00338,PF00239
MGKKQKTNGGDAVIYARYSSHNQRDVSIEQQVEACRKHAAELGLTVTATYEDRAISGKTDKRPSFQRMMRDAEQHKFAYVLAWKSNRIGRNMMQALVNESRLVDCGVKVFYAEEDFDDNAAGRFALRSMMNVNQFYIENMAEDVKRGLYDNAKKGLVNGSLPLGYKRGADGKPEIDEPKAAIVREIYTRVAAGELFASIADDLNARGIKTARGREWNKGSFHVLCHNDRYRGIYMYGDIRIPGGMPRIISDELFYDAQEAYSMKKDNRYGRARHGAENYLLTGKLYCGHCGGYMVGISGTSKTGEMHYYYACQKHRLEHTCEKKAIRRDVIENAVARAIMMYCLDDETIDFIVDSTIAYFKQKDHELHIEAMENELAAVQQAISNLMKAIEAGIITPTTRTRLLDLEEQQAKLSAKINTAKAERVEIDRDDLIAGLQLFRTGDIKNKKFLAKLFNTFLIAVYLYDDNRLKIVFSFTGNHNSVEIPLELDNDCPDSQIVSDETEVRMSHLECDGRESNPRPTDS

SEQ ID NO: 4107 - protein, 523 aa, Unknown
  Description of Unknown: Integrase B4108 sequence
  PTHR30461:SF3,SM00857,IPR036162,PF13408,PS51737, G3DSA:3.40.50.1390,IPR025827,IPR006119,PF07508,IPR011109, SSF53041,PTHR30461,Coil,PS51736,cd00338, PF00239
MNICCYGRKSIYSDHSDSIDNQFRMCRDYVEMKFSGQVDSFLEYQDEAFTGANTKRPDLQRLLTDISAGNCDVLIVYQLDRLSRDVRDFANIYAILEEHRVKFISIKENIDTSTPIGRAMMYVTVVFAQMERETIAARVADNMIGLAKKGYWTGGNPPEGYVRTRIEANGKKHCSIVPDPEGVKYVNWIFDTFLQNDYSLQSMETAFKNQGIRTRRGAFFSTAQLHKILTMPYCVQATPEVYDYYVARGCQMDPESPRESWDGTCGVMIYGRTTQKNKKHQMQPPEKWLVCLGAHEPFMPADKWLAVQARFCRNKFDKTMKYDVPLLKGVLRCSCGSIMCVARKKKKEGVSSWYYCLKRMRQGKEVCDSHQIKCELLDQKVLELLQSIERDPALIHQFAEQNAEVLAGPDPKVLASKISTCQTRIDRLVSSLSLAAESSAQKYILAELERLDLEIQALRREHNLALTAERNRTRQQQDTFSKVSEISRLIGDMDSFSASEKNAIVKDVIKKCAWDGESLSIML

SEQ ID NO: 4108 - protein, 523 aa, Unknown
  Description of Unknown: Integrase B4109 sequence
  cd03768,PTHR30461:SF3,SM00857,IPR036162,PF13408, PS51737,IPR025827,G3DSA:3.40.50.1390,IPR006119,PF07508, IPR011109,SSF53041,PTHR30461,PS51736,Coil, PF00239
MRFFSYGRKSVFSDKSDSIDNQFRMSREYCDTKFSGQVDSWQQFSDEDFTGANTQRPDLQRMLSFIKNGFCDVLVVYQLDRLSRDVRDFANIYSLLEEHGVMFVSIKENIDTTTPIGRAMMYVTVVFAQMERETIAARVTDNMLGLAKKGYWTGGNPPRGYVRKHIVVDGKKHCSIEPDPDGVRYVTRIFDTFLAMNCSLQGMETRFKNQGIRTESGKFFSTTQLHKILTMPYCVEATPEVYDFYASKGCIMDPGSPREMWDGSVGVIIYGRSTEKNKKHQAQPPEKWTVCLGMHKPFMPAEKWLAVQARFGQNKCIKDAKWPVPLLKGVLRCKCGNLMQVSRKKKVDGTCSSWYYCRKRMRQGVDACDMGQIKCDLLDDEVLELFRGIAADPAMIQKFVKAEAPDEVPDLKAAQARVSACERKIGRLAASLALAEESSASKYIIAEMERLDVELGALKREASLAEMESHRAAASAKDAKATAVEIAKLIHGLEGFDDKEKNAIARAVIQECTWDGERLFITL

SEQ ID NO: 4109 - protein, 523 aa, Unknown
  Description of Unknown: Integrase B4110 sequence
  PTHR30461:SF3,cd00338,SM00857,G3DSA:1.10.10.2600,IPR036162, PS51737,G3DSA:3.40.50.1390,IPR006119,IPR038109,PF07508, IPR011109,SSF53041,PTHR30461,PS51736,Coil, PF00239
MVSFDSIIIYLRKSRSDDPAQTVEEVLAKHERILQDYCMKEYGKAIPEKRIYREVVSGETIQDRPIMQQLLKELEAENISGVLIVEPQRLSRGDLQDCGQIINSFRYTNTAVITPGKTYDLSDEYDRKFFEMELTRGNDYLEYTKKILSRGRVASVRQGNYICSVRPYGYRKITLGSGKDKCHTLEIIPEEADVIRLMYHLYIDENMGFTNIARTLDSLHIKPLKSDNWSAATIRDMIDNPIYIGKVVWNSRKVVKKWENEQITKVRPRNKGDDVICVNGRHEAIIDERTFEAARNKRGLTPKVKKFKELRNPLAGLLFCGTCGHGMSMKKYVDKRSHTGKITTVMLCNQQAVCHTKSAQYEDILAKIKISLANAISDFKIKLKEQENNNIDMHELRIASLEEELNRLYNKDVRQKDAYEDGIYTKEEYIERNSKLQERILNVKEEIADEKNNVPVKIDYEDKIMTFKDCLSSLDDSDISAADKNILLKSCIDKIIYYNDMPSKPGIGRYIENSFRLEIFLKL

SEQ ID NO: 4110 - protein, 523 aa, Unknown
  Description of Unknown: Integrase B4111 sequence
  SM00857,G3DSA:1.10.10.2600,IPR036162,PF13408,IPR025827, PS51737,G3DSA:3.40.50.1390,IPR006119,IPR038109,PF07508, SSF53041,IPR011109,PF00239,PTHR30461,PS51736, Coil,cd00338
MKTAVIYARYSSDRQTEQSIEGQVRVCNDYAERNEILIVNQYIDRATTGTNDNRDAFQQMLKDSDKKQFDFVLVYKLDRFSRNKFEMAMHRKHLKDNGIKILSAMENIPDSPEGILLESLLEGMNQYYSEELSQKTRRGQKETRLKGLHCAGKLNYGYYTEKKKVFIHEEEGPIVKEIFERYAAGERGNEIAISFAERGILYRGKPFSAANIYVILHGEKYTGKYTLHGEVYDNIYPRIIEPELFERCKAKIDANRYGNHIPDYSYLLRKRVYCGECGTRMTSYSGTSKSSKVSKYYKCWNARDRKKCNAKFIKKDLLESIVLKALQETLTGKNLSVIVDEIYKQHNAKLLGDNPVKILEKELLQINKSINNIMKAIEQGIITDTTKERLQELENTRKDLQEKLIFERMQEKVVLDKKVIENYLKKAVEKEPEIMIELLVEKVYVYSDDHIEIMLHYVDTPIKPKPIEYDKDTNPEGESLRGSLIYTTKIFVDNDIFKGMNKKILEPTFKETQKMPVLIEIRG

SEQ ID NO: 4111 - protein, 523 aa, Unknown
  Description of Unknown: Integrase B4112 sequence
  cd03768,PTHR30461:SF3,SM00857,IPR036162,PF13408, IPR025827,G3DSA:3.40.50.1390,PS51737,IPR006119,PF07508, SSF53041,IPR011109,PTHR30461,PS51736,Coil, PF00239
MRFFSYGRKSVFSDKSDSIDNQFRMNREYCESKFSGQVDSWQQFSDEDFTGANTQRPDLQRMLSFIKNGFCDVLVVYQLDRLSRDVRDFANIYSLLEEHGVMFVSIKENIDTTTPIGRAMMYVTVVFAQMERETIAARVTDNMLGLAKKGYWTGGNPPRGYVRKHIVVDGKKHCSIEVDPDGARYVTQIFDTFLAYNCSLQGMETRFKNQGILTESGKFFSTTQLHKILTMPYCVEATPDVYDFYAAKGCIMDPGSPREKWDGSVGVMIYGRSTEKNKKHQAQPPEKWTVCLGMHKPFMPAEKWLAVQSRFTQNKCIKDAKWPVPLLKGVLRCKCGNLMQVSRKKKVDGTCSSWYYCRKRMRQGVDACDMGQIKCDLLDEKVLELFRGITADPALIQKFVKAEAPADVPDLKAAQARVSACERKIGRLAASLALAEDSAASKYIIAEMERLDVELGALKREAALAEMESHRAAASAKDAKATAVEIAKLIHGLEGFDDKEKNAIARAVIQECTWDGERLFITL

SEQ ID NO: 4112 - protein, 523 aa, Unknown
  Description of Unknown: Integrase B4113 sequence
  PTHR30461:SF3,SM00857,G3DSA:1.10.10.2600,IPR036162,PS51737, G3DSA:3.40.50.1390,IPR006119,IPR038109,PF07508,IPR011109, SSF53041,PTHR30461,Coil,PS51736,cd00338, PF00239
MVSFDSIIIYLRKSRSDDPAQTVEEVLAKHERILQDYCMKEYGKAIPEKRIYREVVSGETIQDRPVMQQLLKELEAENISGVLIVEPQRLSRGDLQDCGQIINSFRYTNTAVITPGKTYDLSDEYDRKFFEMELTRGNDYLEYTKKILSRGRVASVRQGNYICSVRPYGYRKITLGSGKDKCHTLEIIPEEADAIRLMYHLYLDENMGFTNIARTLDSLHIKPLKSDNWSAATIRDMIDNPIYIGKVVWNSRKVVKKWENEQITKVRPRNKGDDVICVNGRHEAIIDEHTFEAARNKRGLTPKVKKFKELRNPLAGLLFCGTCGHGMSMKKYVDKRSHTGKVTTVMLCNQQAVCHTKSAQYEDILAKIKVSLANAIFDFEIKLKEQENNNIDMHELRMSSLLDELNRLYSKDVRQKDAYEDGIYTKEEYIERNSKLQERILNVKEDIADEKKNIPVKIDYEDKIITFKDCLASLDDPNISAADKNILLKSCIDKIIYYNDMPSKPGIGRYIENSFRLEIFLKL

SEQ ID NO: 4113 - protein, 523 aa, Unknown
  Description of Unknown: Integrase B4114 sequence
  cd03768,PTHR30461:SF3,SM00857,IPR036162,PF13408, IPR025827,PS51737,G3DSA:3.40.50.1390,IPR006119,PF07508, IPR011109,SSF53041,PTHR30461,PS51736,Coil, PF00239
MRFFSYGRKSVFSDKSDSIDNQFRMNREYCESKFSGQVDSWQQFSDEDFTGANTSRPDLQRMLSFIKGGFCDVLVVYQLDRLSRDVRDFANIYALLEEHGVMFISIKENIDTTTPIGRAMMYVTVVFAQMERETIAARVTDNMLGLAKKGYWTGGNPPVGYVRKHIVVNGKKHCSIEVDPDGARYVTQIFDTFLAYNCSLQGMETRFKNQGIRTQNGKFFSTAQLHKMLTMPYCVEATPEVYDFYAAKGCIMDPGSPREMWDGSAGVIIYGRSTEKNKKHQLQPPEKWTVCLGKHKPFMPAEKWLAVQSRFTQNKCIKDAKWPVPLLKGVLRCKCGNLMQVSRKKKVDGTCSSWYYCRKRMRQGVDACDMGQIKCDLLDEEVLELFRGITADPALIQKFVKAEAPADVPDLKAAQARVSACERKIGRLAASLALAEDSAASKYIIAEMERLDVELGALKREASLAEMESHRAAASAKDAKATATEIAKLIHGLEGFDDKEKNAIARAVIQECTWDGERLFITL

SEQ ID NO: 4114 - protein, 523 aa, Unknown
  Description of Unknown: Integrase B4115 sequence
  cd03768,PTHR30461:SF3,SM00857,IPR036162,PF13408, PS51737,IPR025827,G3DSA:3.40.50.1390,IPR006119,PF07508, IPR011109,SSF53041,PTHR30461,PS51736,Coil, PF00239
MRFFSYGRKSVFSDKSDSIDNQFRMNREYCESKFSGQVDSWQQFSDEDFTGANTSRPDLQRMLSFIKGGFCDVLVVYQLDRLSRDVRDFANIYALLEEHGVMFISIKENIDTTTPIGRAMMYVTVVFAQMERETIAARVTDNMLGLAKKGYWTGGNPPVGYVRKHIVVDGKKHCSIEVDPDGARYVTQIFDTFLAYNCSLQGMETRFKNQGIRTQSGKFFSTTQLHKMLTMPYCVEATPEVYDFYAAKGCIMDPGSPREMWDGSVGVIIYGRSTEKNKKHQAQPPEKWTVCLGKHKPFMPAEKWLAVQSRFTQNKCIKDAKWPVPLLKGVLRCKCGNLMQVSRKKKVDSTCSSWYYCRKRMRQGVDACDMGQIKCDLLDEKVLELFRGITADPGLIQKFVKTKAPDDIPNLKAAQARVAACERKIGRLAASLALAEDSTASKYIIAEMERLDVELGALKREASLAEMENHRATANANDAKATAAEIAKLIHGLEGFDDKEKNAIARAVIQECTWDGERLFITL

SEQ ID NO: 4115 - protein, 523 aa, Unknown
  Description of Unknown: Integrase B4116 sequence
  SM00857,G3DSA:1.10.10.2600,IPR036162,PF13408,PS51737, G3DSA:3.40.50.1390,IPR025827,IPR006119,IPR038109,PF07508, IPR011109,SSF53041,PTHR30461,Coil,PS51736, cd00338,PF00239
MPDYAIYLRKSRKDNEAEQRGEGETLARHRKLLLDYAKCEGLHIAKIYEEVVSGESIATRPQMQLLLADVEQGLYDGVLVVEVERLARGDTMDQGLVAQTFKYSSTKIYTPMKVYDPNNEFDEEYFEFGLFMSRREYKTINRRLQRGRRASASEGKYIAGRAPYGYEKIKIPNDKGNTLRIIPEQAEVIKQIYDWYVNGLDGEDVGLTKIATKLNSMGIKPYRNDYWGKEALRDIITNPVYAGYIRWGYRRNKKTVVDGKTVTCRPVTLDENCVLSKGLHEAIIPQELYDKAQRKIKSVPPPPVGYKKELKGSLAGIVICKNCGHKMTLRSPSTKGKPPYLVCHYRYCDNVSTPYDIVEKRVLDTLQEWAEKYKLKEKQNKKNSSGSIDMLKSSVESAKKKVATLQQQLDGMCDLLEQGIYTPDMFRQRSVSVTERITKAKAEYEQLSEQLVSMEKLLTEKSEFIPKVEHVLKIYDTLSTPADKNRVLKEVIDHAEYSKTKSGAYKGVSVDDFNLTVFPKMPL

SEQ ID NO: 4116 - protein, 523 aa, Unknown
  Description of Unknown: Integrase B4117 sequence
  cd03768,PTHR30461:SF3,SM00857,IPR036162,PF13408, IPR025827,G3DSA:3.40.50.1390,PS51737,IPR006119,PF07508, SSF53041,IPR011109,PTHR30461,PS51736,Coil, PF00239
MRFFSYGRKSVFSDKSDSIDNQFRMNREYCESKFSSQVDSWQQFSDEDFTGANTSRPDLQRMLSFIKGGFCDVLVVYQLDRLSRDVRDFANIYALLEEHGVMFISIKENIDTTTPIGRAMMYVTVVFAQMERETIAARVTDNMLGLAKKGYWTGGNPPVGYVRKHIVVNGKKHCSIEVDPDGARYVTQIFDTFLAYNCSLQGMETRFKNQGIRTQSGKFFSTTQLHKMLTMPYCVEATPEVYDFYAAKGCIMDPGSPREMWDGSVGVIIYGRSTEKNKKHQAQPPEKWTVCLGKHKPFMPAEKWLAVQSRFTQNKCIKDAKWPVPLLKGVLRCKCGNLMQVSRKKKVDGTCSSWYYCRKRMRQGVDACDMGQIKCDLLDEEVLELFRGIAADPGLIQKFVKAEAPADVPDLKAAQARVSACERKIGRLAASLALAEDSAASKYIIAEMERLDVELGALKREASLAEMESHRAAASAKDAKATAVEIAKLIHGLEGFDDKEKNAIARAVIQECTWDGERLFITL

SEQ ID NO: 4117 - protein, 523 aa, Unknown
  Description of Unknown: Integrase B4118 sequence
  cd00338,SM00857,G3DSA:1.10.10.2600,IPR036162,PF13408, IPR025827,G3DSA:3.40.50.1390,PS51737,IPR006119,IPR038109, PF07508,IPR011109,SSF53041,PTHR30461,PS51736, Coil,PF00239
MKKVQVIPATLQNYTEKPIHSQKKRRVAGYARVSTDRDEQLTSYEAQVDYYTNYIKGRSDWEFAGMYTDEGISATNTLHREGFKSMIRDAMDGKIDLIITKSVSRFARNTVDSLTIVRKLRDKGVEIYFEKENIWTLDAKGELLITIMSSLAQEESRSISENVTWGHRKRFADGKVSLAFSHFLGYDRGADGNLVVNKEQAETVKLIYRLYLSGYTFHSIAKKLTEQKVPTPAGGKMWRTNTVRSILMNEKYKGDALLQKKFTVDFLTKKSKRNEGEVPQYYVQNDHEAIISPQVFDLVQETIKKRRNIKGRKRYSGVSIFSSKIKCGQCGSWYGAKVWHSTDKYRQTVYRCNDKFKRHCKTPHLTENEIENVFVRAVNQLIKNKDEILSNIILLKIRLVDTTDLEKKRNALELNMNLLAERVQQLISENACLTQDQMEYNQEYSKLVNRYEKIKIKYGQICDTMKQRTSRGQELERFIENLQKQEFISIFDKRLWCSLVDFITVNEKDDIWVTFKDGTEIKA

SEQ ID NO: 4118 - protein, 523 aa, Unknown
  Description of Unknown: Integrase B4119 sequence
  PTHR30461:SF3,cd00338,SM00857,G3DSA:1.10.10.2600,IPR036162, PF13408,IPR025827,G3DSA:3.40.50.1390,PS51737,IPR006119, IPR038109,PF07508,IPR011109,SSF53041,PTHR30461, PS51736,Coil,PF00239
MIPAVIYARFSSHSQTEQSIEGQLAACYDFAEREGYTVIGEYIDRAISARTDDRPDFQRMIADSAKHTFEVILVYQLDRFSRNRYDSAVNKQKLKKNGVRVVSARENITADASGVLMEAVLEGMAEYYSAELAQKIRRGMDISGSKCLATGGRPALGYKVDETKHYQIDEDTAPMVVKIFEMYASGMTVAQIITELNQQNIKTSTGADFNKNSLRKMLTNKRYIGIYTYKGTETPGGIPRIVSDELFNRVAEMMEKNKKAPARARAKEEYLLTTKLFCGHCREMMTGISGTSKTGTIHNYYTCNGRKKKLCSKKNVQKEYIEDRVIALARAQLTDENISKISKAVAALCEREKESSEYRRLERQRRDIEKQKANLVDALKYGKATETLLNEIAKLESSIEGIDRQILMEKVKCLDLKEPEIAFFLTKLRDGDINDITYRRAIIAVMVNAVYLYDDGRLTVIFNSSDRPVEVTEGLLADVEEDAAEFVSGLCRSTNLIAGRTPEVTIVVLPYGFVLATQIKDRL

SEQ ID NO: 4119 - protein, 523 aa, Unknown
  Description of Unknown: Integrase B4120 sequence
  cd00338,SM00857,G3DSA:1.10.10.2600,IPR036162,PS51737, G3DSA:3.40.50.1390,IPR006119,IPR038109,PF07508,SSF53041, IPR011109,PTHR30461,PS51736,Coil,PF00239
MELLNVCIYLRKSRADREAEARGEGETLARHERILLDLAKKRGYNVGAIYKEIVSGETISARPVMQQVLHEVESGMWDGVLVVEVERLARGDTIDQGVVSRAFQYSGTMIITPSKTYDPNNEFDEEYFEFGLFMSRREYKTIKRRLNAGRISSVKEGKYCGNKPPYGYKRVKLQREKGWTLEPVPEQAEVVKMIFSWYAGYGCEQIGMAKIVRKLNDAGVATMYKKPWTVASLSKMLSNPVYIGMVRWNARKTVKSVKDGVITRSRPLAKDYLLCPGRHPAIISEELYNAAQHIRKKNPPRPVGVRNTVKNPLAGIVYCSKCGRAMVRRPYQKSGQEDTLLCPYTSCPTVSSKLSLVEESLLDGLRELVDGYKLNGDVSESDTNDMISSKEILIAEKHAEIKKLNEQKLKQYDLLEQGIYSTEIFLERSKATAATLEACSAAIERLQEELEHDRLLLEQRSSFIPRCEDLLEHYWDLDIPTRNRILRELIDKVLYTKDTKNAFLEGDKITFLLDIFPKIQENT

SEQ ID NO: 4120 - protein, 523 aa, Unknown
  Description of Unknown: Integrase B4121 sequence
  SM00857,G3DSA:1.10.10.2600,IPR036162,PF13408, IPR025827,G3DSA:3.40.50.1390,PS51737,IPR006119, IPR038109,PF07508,IPR011109,SSF53041, PF00239,PTHR30461,PS51736,Coil,cd00338
MNENVCIYLRKSRADQEAELRGEGETLARHERILLDLAKSRNYSVGAIYREIVSGETISARPVMQQLLREVEAGSWDGVLVVEVERLARGDTIDQGIVSRAFQFSDTKIITPTKTYDPDNEFDEEYFEFGLFMSRREYKTIKRRLNAGRISSVKEGKYCGSRPPYGYERVKLRGEKGFTLQPVPEQAEVIKMIYSLYSGASGDRIGVSKIVRKLNDMGIKSPSGKDWVPISVQDVLSNPVYAGMIRWNGRKTVRAIQDGVVTQSRPRSKEDDILLFPGRHPAIVSKEMYDSVQQIRKKNPPRPISIKNTIKNPLAGIVYCSKCGRAMVRRPYQKRGQDDTLMCSYTSCPTVSSKLSLVERAVLNGIQDLVDEYRLNAAVPGPDINNAVKSKEKLIAEKEHELEKLNVQKMKQYDLLEQGIYTTEVFLERSNSIASSINSCQDSIECLKEEIRHDKELIDQQSSFIPRCENLLEIYWSLDTAAKNKMLKELIERINYTKDAKNAFRMGNEATFVLDIFPRIQPN

SEQ ID NO: 4121 - protein, 523 aa, Unknown
  Description of Unknown: Integrase B4122 sequence
  cd03768,PTHR30461:SF3,SM00857,IPR036162,PF13408, PS51737,G3DSA:3.40.50.1390,IPR025827,IPR006119,PF07508, IPR011109,SSF53041,PTHR30461,PS51736,Coil, PF00239
MRFFSYGRKSVFSDKSDSIDNQFRMSREYCESKFSGQVDSWQQFSDEDFTGANTQRPDLQRMLSFIKNGFCDVLVVYQLDRLSRDVRDFANIYSLLEEHGVMFVSIKENIDTTTPIGRAMMYVTVVFAQMERETIAARVTDNMLGLAKKGYWTGGNPPRGYVRKHIVVDGKKHCSIEPDPDGVRYVTRIFDTFLAMNCSLQGMETRFKNQGIRTESGKFFSTTQLHKILTMPYCVEATPEVYDFYASKGCIMDPGSPREMWDGSVGVIIYGRSTEKNKKHQAQPPEKWTVCLGKHKPFMPAEKWLAVQSRFTQNKCIKDAKWPVPLLKGVLRCKCGNLMQVSRKKKVDGTCSSWYYCRKRMRQGVDACDMGQIKCDLLDEEVLELFRGITTDPALIQKFVKAEAPADVPDLKAAQARVSACERKIGRLAASLALAEDSAASKYIIAEMERLDVELGALKREASLAEMESHRAAASVKDAKATAAEIAKLIHGLDGFDDKEKNAIARAVIQECTWDGERLFITL

SEQ ID NO: 4122 - protein, 523 aa, Unknown
  Description of Unknown: Integrase B4123 sequence
  SM00857,G3DSA:1.10.10.2600,IPR036162,PS51737,G3DSA:3.40.50.1390, IPR006119,IPR038109,PF07508,IPR011109,SSF53041, PTHR30461,Coil,PS51736,cd00338,PF00239
MTVFEMNDAIDNAFSGKMDKYAIYLRKSRADLEAERDGEGDSLARHKMILTEVAARKGLYVEKIYQEIVSGETIEARPEIQKLINDCYAGKYRGILIVDITRLSRGNQGDAQTILDCLKYSNSNNGILVVTPTKTYDVANNSDDEEYMEFELFMSRREYKMIRKRMERGKLQSIVEGNYLATHRPYGYNILNTKTGRTLIPNEEEAPFVKKIFEWTVKENMTAGEIARRLTAMGVPTYSGSPEWSLYSIKHILTNPVYMGKIRWNDRMTVKRLVNGELAKSRPRSSHNDHYIEIEGKHVKHALIDEETFRNAAARFHSDRTKVGLKLVNPLAGLLYCKECGMIMQYKDYGGTRNPRLAHKPSQVCKVKSALFTDVMDALVHALKLYIEDFEMKIDNMPDVDENTIVSQLESLQKEKNRIEKVLSKLFDSWERDEITNNEFAQRKAVNNARIESIKNEMNNLEETVPEKEEYTENIMKLSDALNALLDDNLDAETKNKYLKAIVRRIEFSRENNDEFILDTYLK

SEQ ID NO: 4123 - protein, 523 aa, Unknown
  Description of Unknown: Integrase B4124 sequence
  cd03768,PTHR30461:SF3,SM00857,IPR036162, PF13408,IPR025827,PS51737,G3DSA:3.40.50.1390, IPR006119,PF07508,IPR011109,SSF53041, PTHR30461,PS51736,Coil,PF00239
MRFFSYGRKSVFSDKSDSIDNQFRMNREYCESKFSSQVDSWQQFSDEDFTGANTSRPDLQRMLSFIKGGFCDVLVVYQLDRLSRDVRDFANIYALLEEHGVMFISIKENIDTTTPIGRAMMYVTVVFAQMERETIAARVTDNMLGLAKKGYWTGGNPPVGYVRKHIVVNGKKHCSIEVDPDGARYVTQIFDTFLAYNCSLQGMETRFKNQGIRTQSGKFFSTTQLHKMLTMPYCVEATPEVYDFYAAKGCIMDPGSPREMWDGSVGVIIYGRSTEKNKKHQAQPPEKWTVCLGKHKPFMPAEKWLAVQSRFTQNKCIKDAKWPVPLLKGVLRCKCGNLMQVSRKKKVDGTCSSWYYCRKRMRQGVDACDMGQIKCDLLDEEVLELFRGITADPALIQKFVKAEAPADVPDLKAAQARVSACERKIGRLAASLALAEDSAASKYIIAEMERLDVELGALKREASLAEMESHRAAASAKDAKATAAEIAKLIHGLDGFDDKEKNAIARAVIQECTWDGERLFITL

SEQ ID NO: 4124 - protein, 523 aa, Unknown
  Description of Unknown: Integrase B4125 sequence
  cd03768,PTHR30461:SF3,SM00857,IPR036162,PF13408, IPR025827,PS51737,G3DSA:3.40.50.1390,IPR006119,PF07508, IPR011109,SSF53041,PTHR30461,PS51736,Coil, PF00239
MRFFSYGRKSVFSDKSDSIDNQFRMNREYCESKFSGQVDSWQQFSDEDFTGANTSRPDLQRMLSFIKGGFCDVLVVYQLDRLSRDVRDFANIYALLEEHGVMFISIKENIDTTTPIGRAMMYVTVVFAQMERETIAARVTDNMLGLAKKGYWTGGNPPVGYVRKHIVVNGKKHCSIEVDPDGARYVTQIFDTFLAYNCSLQGMETRFKNQGIRTQSGKFFSTTQLHKMLTMPYCVEATPEVYDFYAAKGCIMDPGSPREMWDGSVGVIIYGRSTEKNKKHQAQPPEKWTVCLGKHKPFMPAEKWLAVQSRFTQNKCIKDAKWPVPLLKGVLRCKCGNLMQVSRKKKVDGTCSSWYYCRKRMRQGVDACDMGQIKCDLLDEEVLELFRGITADPALIQKFVKAEAPADVPDLKAAQARVSACERKIGRLAASLALAEDSAASKYIIAEMERLDVELGALKREASLAEMEGHRAAASAKDAKATAAEIAKLIHGLDGFDDKEKNAIARAVIQECTWDGERLFITL

SEQ ID NO: 4125 - protein, 523 aa, Unknown
  Description of Unknown: Integrase B4126 sequence
  PTHR30461:SF3,SM00857,G3DSA:1.10.10.2600,IPR036162,PF13408, PS51737,G3DSA:3.40.50.1390,IPR025827,IPR006119,IPR038109, PF07508,IPR011109,SSF53041,PTHR30461,Coil, PS51736,cd00338,PF00239
MAKSVTTIPATLSRFTAAPINSTKKRRVAAYARVSTDNEEQLTSYEAQIDYYTNYINGRDDWEFVGVYPDEGITGTNTKKREQFRQMVADALDGKIDLIITKSVSRFARNTVDSLTTIRKLKEHNVEVYFEKENIWTFDSKGELLLTIMSSLAQEESRSISENCTWGQRKRFADGKVTVPFKRFLGYDMGPDHNLVVNPEQAKLVKRIYGMFLQGQSPFQIARTLTEEGIPSPGGKDHWNPSNIKSILTNEKYKGDALLQKSFTVDFLTKKKKTNEGEIPQYYVKDNHEAIIDPETFEMVQTLMTTRTKGRNRKSSVSIFSSKVKCGDCGSWYGPKVWHSNDAYRKVIWQCNHKFDGQKCATPTLTEDEIKELFLRAANQVIDQKEQFIAIYEQVLSRSLDTTALESELSDLEAEINIAAELIEECIKENAHVALDQDEYQKRYDALVARFDKAKARHTEVTDLIAERMARKHQIESYLKELRSREPLTEFRETDWLAMVDYITVHSKKDIRVTFKDGTEIKA

SEQ ID NO: 4126 - protein, 523 aa, Unknown
  Description of Unknown: Integrase B4127 sequence
  SM00857,G3DSA:1.10.10.2600,IPR036162,PF13408,PS51737, IPR025827,G3DSA:3.40.50.1390,IPR006119,IPR038109,PF07508, IPR011109,SSF53041,PTHR30461,Coil,PS51736, cd00338,PF00239
MNENVCIYLRKSRADQEAELRGEGETLARHERILLDLAKSRNYSVGAIYREIVSGETISARPVMQQLLREVEAGSWDGVLVVEVERLARGDTIDQGVVSRAFQFSDTKIITPTKTYDPDNEFDEEYFEFGLFMSRREYKTIKRRLNAGRISSVKEGKYCGSRPPYGYERVKLRGEKGFTLQPIPEQAEVIKMIYSLYSGASGDRIGVSKIVRKLNDMGIKSPSGKSWVPISVQDVLANPVYAGMIRWNGRKTVRAIQDGVVTQSRPRSKEDDILLFPGRHPAIVSKEMYDSVQQIRKKNPPRPISIKNTIKNPLAGIVYCSKCGRAMVRRPYQKRGQDDTLMCSYTSCPTVSSKLSLVERAVLNGIQDLVDEYRLNDAVPGPDINNAVKSKKKLIAEKEHELEKLNVQKMKQYDLLEQGIYTTEVFLERSNSIAFSINSCQDSIECLKEEIRHDKELIDQQSSFIPRCENLLEIYWSLDTAAKNKMLKELIERVNYTKDTKNAFRKGNEATFVLDIFPRIQSN

SEQ ID NO: 4127 - protein, 523 aa, Unknown
  Description of Unknown: Integrase B4128 sequence
  cd03768,PTHR30461:SF3,SM00857,IPR036162,PF13408, IPR025827,G3DSA:3.40.50.1390,PS51737,IPR006119,PF07508, IPR011109,SSF53041,PTHR30461,PS51736,Coil, PF00239
MRFFSYGRKSVFSDKSDSIDNQFRMNREYCESKFSSQVDSWQQFSDEDFTGANTSRPDLQRMLSFIKGGFCDVLVVYQLDRLSRDVRDFANIYALLEEHGVMFISIKENIDTTTPIGRAMMYVTVVFAQMERETIAARVTDNMLGLAKKGYWTGGNPPVGYVRKHIVVNGKKHCSIEVDPDGARYVTQIFDTFLAYNCSLQGMETRFKNQGIRTQSGKFFSTTQLHKMLTMPYCVEATPEVYDFYAAKGCIMDPGSPREMWDGSVGVIIYGRSTEKNKKHQAQPPEKWTVCLGKHKPFMPAEKWLAVQSRFTQNKCIKDAKWPVPLLKGVLRCKCGNLMQVSRKKKVDGTCSSWYYCRKRMRQGVDACDMGQIKCDLLDEEVLELFRGITADPALIQKFVKAEAPADVPDLKAAQARVSACERKIGRLAASLALAEDSAASKYIIAEMERLDVELGALKREASLAEMESHQAAASAKDAKATAAEIAKLIHGLDGFDDKEKNAIARAVIQECTWDGERLFIKL

SEQ ID NO: 4128 - protein, 523 aa, Unknown
  Description of Unknown: Integrase B4129 sequence
  SM00857,G3DSA:1.10.10.2600,IPR036162,PF13408,IPR025827, G3DSA:3.40.50.1390,PS51737,IPR006119,IPR038109,PF07508, IPR011109,SSF53041,PF00239,PTHR30461,PS51736, Coil,cd00338
MNENVCIYLRKSRADQEAELRGEGETLARHERILLDLAKSRNYSVGAIYREIVSGETISARPVMQQLLREVEAGSWDGVLVVEVERLARGDTIDQGVVSRAFQFSDTKIITPTKTYDPDNEFDEEYFEFGLFMSRREYKTIKRRLNAGRIASVKEGKYCGSKPPYGYERVKLRGEKGFTLQPVPEQAEIIKMIYSLYSGSSGDRIGVSKIVRKLNDMGIKSPSGKDWVPISVQDVLANPVYAGMIRWNGRKTVRAIQDGVVTQSRPRSKEDDILLFPGRHPAIVSKEMYDSVQQIRKKNPPRPISIKNTIKNPLAGIVYCSKCGRAMVRRPYQKRGQDDTLMCSYTSCPTVSSKLSLVERAVLNGIQDLVDEYRLNDAVPGPDINNAVKSKEKLIAEKEHELEKLNVQKMKQYDLLEQGIYTTEVFLERSNSIASSINSCQDSIECLKEEIRHDKELIDQQSSFIPRCENLLEIYWSLDTAAKNKMLKELIERVNYTKDVKNAFRMGNEATFVLDIFPRIQSN

SEQ ID NO: 4129 - protein, 523 aa, Unknown
  Description of Unknown: Integrase B4130 sequence
  cd03768,PTHR30461:SF3,SM00857,IPR036162,PF13408, IPR025827,G3DSA:3.40.50.1390,PS51737,IPR006119,PF07508, SSF53041,IPR011109,PTHR30461,PS51736,Coil, PF00239
MRFFSYGRKSVFSDKSDSIDNQFRMNREYCESKFSGQVDSWQQFSDEDFTGANTSRPDLQRMLSFIKGGFCDVLVVYQLDRLSRDVRDFANIYALLEEHGVMFISIKENIDTTTPIGRAMMYVTVVFAQMERETIAARVTDNMLGLAKKGYWTGGNPPVGYVRKHIVVNGKKHCSIEVDPDGARYVTQIFDTFLAYNCSLQGMETRFKNQGIRTQSGKFFSTTQLHKMLTMPYCVEATPEVYDFYAAKGCIMDPGSPREMWDGSVGVIIYGRSTEKNKKHQAQPPEKWTVCLGKHKPFMPAEKWLAVQSRFTRNKCIKDAKWPVPLLKGVLRCKCGNLMQVSRKKKVDGTCSSWYYCRKRMRQGVDACDMGQIKCDLLDEEVLELFRGITADPALIQKFVKAEAPADVPDLKAAQARVSACERKIGRLAASLALAEDSAASKYIIAEMERLDVELGALKREASLAEMESHRAAASAKDAKATAAEIAKLIHGLDGFDDKEKNAIARAVIQECTWDGERLFITL

SEQ ID NO: 4130 - protein, 523 aa, Unknown
  Description of Unknown: Integrase B4131 sequence
  cd03768,PTHR30461:SF3,SM00857,IPR036162,PF13408, PS51737,IPR025827,G3DSA:3.40.50.1390,IPR006119,PF07508, IPR011109,SSF53041,PTHR30461,PS51736,Coil, PF00239
MRFFSYGRKSVFSDKSDSIDNQFRMNREYCESKFSGQVDSWQQFSDEDFTGANTSRPDLQRMLSFIKGGFCDVLVVYQLDRLSRDVRDFANIYALLEEHGVMFISIKENIDTTTPIGRAMMYVTVVFAQMERETIAARVTDNMLGLAKKGYWTGGNPPVGYVRKHIVVNGKKHCSIEVDPDGARYVTQIFDTFLAYNCSLQGMETRFKNQGIRTQSGKFFSTTQLHKMLTMPYCVEATPEVYDFYAAKGCIMDPGSPREMWDGSVGVIIYGRSTEKNKKHQAQPPEKWTVCLGKHKPFMPAEKWLAVQSRFTQNKCIKDAKWPVPLLKGVLRCKCGNLMQVSRKKKVDGTCSSWYYCRKRMRQGVDACDMGQIKCNLLDEKVLELFRGITADPALIQKFVKAEAPTDVPDLKAAQARVSACERKIGRLAASLALAEDSAASKYIIAEMERLDVELGALKREASLAEMESHRAAASAKDAKATAAEIAKLIHGLDGFDDKEKNAIARAVIQECTWDGERLFITL

SEQ ID NO: 4131 - protein, 523 aa, Unknown
  Description of Unknown: Integrase B4132 sequence
  PTHR30461:SF3,SM00857,G3DSA:1.10.10.2600,IPR036162,PF13408, IPR025827,G3DSA:3.40.50.1390,PS51737,IPR006119,IPR038109, PF07508,IPR011109,SSF53041,PTHR30461,Coil, PS51736,cd00338,PF00239
MREFKQEELLPAVAYYRYSPGGGQTEQSIEGQRRDCMAYAKSHGYVIVKEYIDRHLTGRNDKRPAFQMMMQDAQLHRFTTLIAWKNDRISRNRRDALNYKDQLKKCGVQICYAEMDIPKGPEGILMESLMDGLAEYYSAELSQKIRRGMTESAYKCHALGSYPPFGLMVREKKFVPDPQTAPYVRWIYEQYAQGTQIKTICDALNAKGLRTRRGGEFNKNSLRRILSNKKYIGIYEAKGIRTENAIEPIIDRDLFDAVQARIPLNNHQGGRTGAKRIYPLSGIAYCAICGAPLIGDQGTGRAGRTYSYYACTGKKHRRHCNKKNVRQEVLDDAVLHTTLDYVLAPSVLPQIAAQAAAASASNDTTRAELNAAQAALDDTNRRINNILTAMEDGSFSKAAASRLTVLESEQSRLEAQIKALKRKRPTLSPNRIEFFLESMSQRTGELPQDYLNRIIKIFVSRVDLSNEDLKITYALTKKTAIPHGTAVNSATNKERTIELNPCSTVALSGGADGSRTHVRKEIS

SEQ ID NO: 4132 - protein, 523 aa, Unknown
  Description of Unknown: Integrase B4133 sequence
  PTHR30461:SF3,SM00857,G3DSA:1.10.10.2600,IPR036162,PS51737, G3DSA:3.40.50.1390,IPR006119,IPR038109,PF07508,IPR011109, SSF53041,PTHR30461,Coil,PS51736,cd00338, PF00239
MPNTESFTVNEVLVYLRKSRSDSPDMSVEEVLRKHEEMIQQYASTHFHSPIPEKNIFREVVSGETIDSRPQIKNLLKMIESEQFKAVLVVEPQRLSRGDLEDCGRLINILRYTNTTVLTLTHSFDLQEEYERKFFEMEITRGNDYLEYTKRILKRGREASVAKGNYIGSVDPYGYKKTVIKKDGITCHTLEIIPEEADTVKLIHELYAYTPEGIGFTNIAHKLDAMHIKPKKAAHWTPAIISSILCNPLYLGMVRWNNRKVVKYINEGQLAKARPQNSEAKYYKGLHEPIITHELYDACMARRGTNPSLRRNKELCNPFAGLLYCGTCGHAMSLKIYKNHNSVSQMMLCNHQAYCHTKSVLYSAFLRRFISSMEDTLNDFELAQKSDDGRTQAISKTIVINLENKLKKLNEKDARQKDAYEDGIYSKEEFLKRNVKTQQDIASTIIALEDARAKKADIIDYEEKIRRFKDCLHALNDPELSAAEKNRFLKSCVDKILYYNNMESKAGIGRYIENVFSLEIQYK

SEQ ID NO: 4133 - protein, 523 aa, Unknown
  Description of Unknown: Integrase B4134 sequence
  PTHR30461:SF3,cd00338,SM00857,G3DSA:1.10.10.2600,IPR036162, PF13408,IPR025827,G3DSA:3.40.50.1390,PS51737,IPR006119, IPR038109,PF07508,SSF53041,IPR011109,PTHR30461, PS51736,Coil,PF00239
MKKKQRVVIYIRYSSHKQAESFSIEYQVAECTRFIEMNDYELVDTYIDEAKTGQKIAGRDAFDKMMFEAGQDKFDKIIVFSFSRSFRNTRDALNCNHDLQEKYGIMIESVIERIDLSDPHGKFSGTNLFAMHELQAAIIAAHVRSGMYYAAQQGYYLGGFVPFGYELYETGELSRGKERKKYSPNPEEAELVREMFDLYADGFSLNFIQTAMKLKNVRGRRGDIIGQQTIARILKNPMYIGTVEAKFKGHDPLSIPNAVPAIIDMDTWGRVQARHKGNKLVQPRRTKRLYSLTGKITCAKCGGHMFGTYKGDKRSNNWHYAYYHCANKKIKGTCNALNVRKDQIDAYCLQEIKKHILNEEAMRSISEQIATAVGNSADDMAKAKAKAEKRMEQIVDILAKIKEDYYEGKITEAVERRMAAKYEAEQLELESSLRGLKTALKSAITSETVYSYLQELLSLYGSNNDELQKMLFDKLIDKILVHDDRIEVTLVVSPFGHIGDNSPSGQPKYEQSLMVGRKEIRHI

SEQ ID NO: 4134 - protein, 523 aa, Unknown
  Description of Unknown: Integrase B4135 sequence
  cd03768,PTHR30461:SF3,SM00857,IPR036162,PF13408, PS51737,IPR025827,G3DSA:3.40.50.1390,IPR006119,PF07508, IPR011109,SSF53041,PTHR30461,PS51736,Coil, PF00239
MRFFSYGRKSVFSDKSDSIDNQFRMNREYCESKFSGQVDSWQQFSDEDFTGANTSRPDLQRMLSFIKGGFCDVLVVYQLDRLSRDVRDFANIYALLEEHGVMFISIKENIDTTTPIGRAMMYVTVVFAQMERETIAARVTDNMLGLAKKGYWTGGNPPVGYVRKHIVVNGKKHCSIEVDPDGARYVTQIFDTFLAYNCSLQGMETRFKNQGIRTQSGKFFSTTQLHKMLTMPYCVEATPEVYDFYAAKGCIMDPGSPREMWDGSVGVIIYGRSTEKNKKHQAQPPEKWTVCLGKHKPFMPAEKWLAVQSRFTQNKCIKDAKWPVPLLKGVLRCKCGNLMQVSRKKKVDGTCSSWYYCRKRMRQGVDACDMGQIKCNLLDEEVLELFRGITADPALIQKFVKAEAPADVPDLKAAQARVSACERKIGRLAASLALAEDSAASKYIIAEMERLDVELGALKREASLAEMESHRAAASAKDAKATAAEIAKLIHGLDGFDDKEKNAIARAVIQECTWDGERLFITL

SEQ ID NO: 4135 - protein, 523 aa, Unknown
  Description of Unknown: Integrase B4136 sequence
  PTHR30461:SF3,SM00857,G3DSA:1.10.10.2600,IPR036162,PS51737, G3DSA:3.40.50.1390,IPR006119,IPR038109,PF07508,SSF53041, IPR011109,PTHR30461,Coil,PS51736,cd00338, PF00239
MPNTESFTVNEVLVYLRKSRSDNPDMSVEEVLRKHEEMIQQYASTHFRSPIPEKNIFREVVSGETINSRPQMKNLLKMIESEQFKAVLVVEPQRLSRGDLEDCGRLINILRYTNTTVLTLTHSFNLQEEYERKFFEMEITRGNDYLEYTKRILRRGREASVAKGNYIGSVDPYGYKKTVIKKDGITCHTLEIIPEEADTVKLIHELYAYTPGGIGFTNIAHKLDAMHIKPKKAAHWTPAIISSILCNPLYLGMVRWNNRKVVKYINEGQLAKARPQNSEAKYYKGLHEPIITQELYDACMARRGTNPSLRRNKELCNPFAGLLYCGTCGHAMSLKIYKKHNSVSQMMLCNHQAYCHTKSVLYSAFLRRFISSMEDTLNDFELAQKSDDGRTQAISKTIVINLENKLKKLNEKDARQKDAYEDGIYSKEEFLKRNVRTQQDIASTIIALEDARAKKADIIDYEEKIRRFKDCLHALNDPELSAAEKNRFLKSCVDKILYYNNMESKAGIGRYIENVFSLEIQYK

SEQ ID NO: 4136 - protein, 523 aa, Unknown
  Description of Unknown: Integrase B4137 sequence
  cd03768,PTHR30461:SF3,SM00857,IPR036162,PF13408, IPR025827,G3DSA:3.40.50.1390,PS51737,IPR006119,PF07508, IPR011109,SSF53041,PTHR30461,PS51736,Coil, PF00239
MRFFSYGRKSVFSDKSDSIDNQFRMNREYCESKFSGQVDSWQQFSDEDFTGANTSRPDLQRMLSFIKGGFCDVLVVYQLDRLSRDVRDFANIYALLEEHGVMFISIKENIDTTTPIGRAMMYVTVVFAQMERETIAARVTDNMLGLAKKGYWTGGNPPVGYVRKHIVVDGKKHCSIEVDPDGARYVTQIFDTFLAYNCSLQGMETRFKNQGIRTQSGKFFSTTQLHKMLTMPYCVEATPEVYDFYAAKGCIMDPGSPREMWDGSVGVIIYGRSTEKNKKHQAQPPEKWTVCLGKHKPFMPAEKWLAVQSRFTQNKCIKDAKWPVPLLKGVLRCKCGNLMQVSRKKKVDGTCSSWYYCRKRMRQGVDACDMGQIKCDLLDEKVLELFRGITADPGLIQKFVKTKAPDDIPNLKAAQARVAACERKIGRLAASLALAEDSTASKYIIAEMERLDVELGALKREASLAEMESHQATANAKDAKATAVEIAKLIHGLKGFDDKEKNAIARAVIQECTWDGERLFITL

SEQ ID NO: 4137 - protein, 523 aa, Unknown
  Description of Unknown: Integrase B4138 sequence
  cd03768,PTHR30461:SF3,SM00857,IPR036162,PF13408, IPR025827,PS51737,G3DSA:3.40.50.1390,IPR006119,PF07508, IPR011109,SSF53041,PTHR30461,PS51736,Coil, PF00239
MRFFSYGRKSVFSDKSDSIDNQFRMNREYCESKFSGQVDSWQQFSDEDFTGANISRPDLQRMLSFIKGGFCDVLVVYQLDRLSRDVRDFANIYALLEEHGVMFISIKENIDTTTPIGRAMMYVTVVFAQMERETIAARVTDNMLGLAKKGYWTGGNPPVGYVRKHIVVDGKKHCSIEVDPDGARYVTQIFDTFLAYNCSLQGMETRFKNQGIRTQSGKFFSTTQLHKMLTMPYCVEATPEVYDFYAAKGCIMDPGSPREMWDGSVGVIIYGRSTEKNKKHQAQPPEKWTVCLGKHKPFMPAEKWLAVQSRFTQNKCIKDAKWPVPLLKGVLRCKCGNLMQVSRKKKVDGTCSSWYYCRKRMRQGVDACDMGQIKCELLDDKVLELFRGIAADPGLIQKFVKAKAPDDIPNLKAAQARVSACERKIGRLAASLALAEDSTASKYIIAEMERLDVELGALKREASLAEMENHRATANAKDAKATAVEIAKLIHGLEGFDDKERNAIARAVIQECTWDGERLFITL

SEQ ID NO: 4138 - protein, 523 aa, Unknown
  Description of Unknown: Integrase B4139 sequence
  SM00857,G3DSA:1.10.10.2600,IPR036162,PF13408,PS51737, IPR025827,G3DSA:3.40.50.1390,IPR006119,IPR038109,PF07508, IPR011109,SSF53041,PTHR30461,Coil,PS51736, cd00338,PF00239
MAKPEVSELAVVYARYSSHSQGEQSIEGQLSNARDYAAAHGYTIVHEYVDRAKSGRTDNRAEFQQMLKDTAKRQFSVIILWKVDRFGRNREEIAINKMKCRKNGVRVEYVAETIPDSPEGVILESVLEGFAEYYSLQLSQNIRRGRAESAEKCQSLGGNRPLGYKTGPDKKFVIDENTAPTVKMIFTMYADGKTVTEIVDKLNEMGLRTLRGGPFTKNSLHSILKNKKYIGIYEYQGREIKDGVPRIIEDDVFNKVQEMLKINKRAPAKTWSRADYILTDKLFCGKCGALMFGESGTSKTGVKHNYYICSNKKRFRSCDKKAVRQADIEDTVLNATHELLQDDELLDYIVDRTWEYYLAQDNSQEELRNLQRQLAQTDTAISNLIRAIEAGILTEETKKRMDELTQQKADLKASIADREIARGFHLKKSHIAYYLRSLRDADWSDKEAQKRLIQTFVNAVFVYDDHITLTYNFSGDKNTITLRDMQRFEDGEEFGCRASRSTKGVLHEPFYFVGGFAVTIWFR

SEQ ID NO: 4139 - protein, 523 aa, Unknown
  Description of Unknown: Integrase B4140 sequence
  cd03768,PTHR30461:SF3,SM00857,IPR036162,PF13408, PS51737,G3DSA:3.40.50.1390,IPR025827,IPR006119,PF07508, IPR011109,SSF53041,PTHR30461,PS51736,Coil, PF00239
MRFFSYGRKSVFSDKSDSIDNQFRMNREYCESKFSGQVDSWQQFSDEDFTGANTSRPDLQRMLSFIKGGFCDVLVVYQLDRLSRDVRDFANIYALLEEHGVMFISIKENIDTTTPIGRAMMYVTVVFAQMERETIAARVTDNMLGLAKKGYWTGGNPPVGYVRKHIVVDGKKHCSIEVDPDGARYVTQIFDTFLAYNCSLQGMETRFKNQGIRTQSGKFFSTTQLHKMLTMPYCVEATPEVYDFYAAKGCIMDPGSPREMWDGSVGVIIYGRSTEKNKKHQAQPPEKWTVCLGKHKPFMPAEKWLAVQSRFTQNKCIKDAKWPVPLLKGVLRCKCGNLMQVSRKKKVDGTCSSWYYCRKRMRQGVDACDMGQIKCDLLDEKVLELFRGITADPSLIQKFVKTKAPTDISDLKAAQARVSACERKIGRLAASLALAEDSTASKYIIAEMERLDVELGALKREASLAEMENHRATANAKDAKATVVEIAKLIHGLEGFDDKEKNAIARAVIQECTWDGERLFITL

SEQ ID NO: 4140 - protein, 523 aa, Unknown
  Description of Unknown: Integrase B4141 sequence
  PTHR30461:SF3,cd00338,SM00857,G3DSA:1.10.10.2600,IPR036162, PF13408,PS51737,G3DSA:3.40.50.1390,IPR025827,IPR006119, IPR038109,PF07508,IPR011109,SSF53041,PTHR30461, PS51736,Coil,PF00239
MARKKNIAAGLDAVIYARYSSHNQREVSIEQQIAECTKHAAALGLRVVGTYEDRAISGKTDNRPRFQQMMRDAEKGKFQAVVAWKSNRIGRNMLQAMVNEAKLDDYGVKVFYAEEDFDDTAAGRFALRNMMNVNQFYSENMAEDITRGLYDNANKCMANGRQPLGYKRGADGKVMLDEPAAAVVREIFTRVATGDLFVDIARDLNAKGIKTSKGAAWNKGSFQSICQNERYKGIYIYGNVRIVDGIPRIVSDELWYRVQEAMRMKKNPVGTRHRVGAEDYLLTGKLRCGHCGSYMTGVSGTSRNGELHYYYTCQKRRTEHACNKKNVRRDVIEPAIAQAIKMYCLTDDVIEWVADRTVEYWEKHDNDLHIEALEQQLEENKKATSNMLKAIEMGIITDATRSRMIELETEQSKLAVQLNAAKADVVKIDRDDLIDELQIFRDMDVNNRSVQAELFKDFLVAAYLYDDNRLKLVFSFMGKEKNVEIPLETGEDPPDGGDSPDTKMFVFAPDCSTIQFVPEPNSL

SEQ ID NO: 4141 - protein, 523 aa, Unknown
  Description of Unknown: Integrase B4142 sequence
  PTHR30461:SF3,SM00857,G3DSA:1.10.10.2600,IPR036162,PS51737, G3DSA:3.40.50.1390,IPR006119,IPR038109,PF07508,IPR011109, SSF53041,PF00239,PTHR30461,PS51736,Coil, cd00338
MVSFDSIIIYLRKSRSDDPAQTVEEVLAKHERILQDYCMKEYGKAIPEKRIYREVVSGETIQDRPVMQQLLKELETGNISGVLIVEPQRLSRGDLQDCGQIINSFRYTNTAIITPGKTYNLSDEYDRKFFEMELTRGNDYLEYTKKILNRGRVASVRQGNYICSVRPYGYKKITLGSGKDKCHTLEIIPEEADAIRLMYHLYLDENMGFTNIARTLDSLHIKPLKSDNWSAATIRDMIDNPIYIGKVVWNSRKVVKKWENEQITKVRPRNKGDDVICVNGRHEAIIDEHTFDAARNKRGLTPKVKKFKELRNPLAGLLFCGTCGHGMSMKKYVDKRSHTGKVTTVMLCNQQAVCHTKSAQYEDILAKIKVSLSNAISDFKIKLKEQENNNIDMHELRIASLEEELNRLYNKDVRQKDAYEDGIYTKEEYIERNSKLQERILNVKEEIADEKNNVPVKIDYEDKIMTFKDCLSSLDDSDISAADKNILLKSCIDKIIYYNDMPSKPGIGRYIENSFRLEIFLKL

SEQ ID NO: 4142 - protein, 523 aa, Unknown
  Description of Unknown: Integrase B4143 sequence
  PTHR30461:SF3,SM00857,G3DSA:1.10.10.2600,IPR036162,PF13408, PS51737,IPR025827,G3DSA:3.40.50.1390,IPR006119,IPR038109, PF07508,IPR011109,SSF53041,PTHR30461,Coil, PS51736,cd00338,PF00239
MNAVIYARFSSHSQREQSIEGQLRDCYEYAKRYDINIVGEYIDRAISGMTDDRPDFQRMIADAPKKQFERIIVWKLDRFARNRYDSALYKHKLKQYGIRVISAMENVGEGDESILLEALLEASAEYYSLDLKKKILRGQRETIAKGRWCGGPIPYGYKAVDGKLVADEKTAPIIRYVFEQYAQGFPMKEIIDELKRRGVRSSRGGELTYTTFSRALTNPVYIGNFMYKGELVPGVADALIDEDTYNKVQIIVKANAHAPAANKAKVEYLLQGKAFCGHCGSHMVGESGKSRNGDVYYYYSCAARKKAHKCRKKNEKKDFIEWYVVEQTLQYVLTPARMRDIAKAVVAEYDKEFAGSRVEEYEKAIKQYERELDKLVDALVDAPKVAHKRIYEKMETLETQKASMENELVKLRIASEIRFTEEEVRAWLRRFCTGDLFDPEFRRNIIDTFINCIYLYDDRIIIFYNIKGGKQVSFVDLAESLDNESESSGSDLNANAPPNPRNPNVIPIGDGFGFLLFISSIVV

SEQ ID NO: 4143 - protein, 523 aa, Unknown
  Description of Unknown: Integrase B4144 sequence
  cd03768,PTHR30461:SF3,SM00857,IPR036162,PF13408, IPR025827,G3DSA:3.40.50.1390,PS51737,IPR006119,PF07508, SSF53041,IPR011109,PTHR30461,PS51736,Coil, PF00239
MRFFSYGRKSVFSDKSDSIDNQFRMNREYCESKFSGQVDSWQQFSDEDFTGANTSRPDLQRMLSFIKGGFCDVLVVYQLDRLSRDVRDFANIYALLEEHSVMFISIKENIDTTTPIGRAMMYVTVVFAQMERETIAARVTDNMLGLAKKGYWTGGNPPVGYVRKHIVVNGKKHCSIEVDPDGARYVTQIFDTFLAYNCSLQGMETRFKNQGIRTQSGKFFSTTQLHKMLTMPYCVEATPEVYDFYAAKGCIMDPGSPREMWDGSVGVIIYGRSTEKNKKHQAQPPEKWTVCLGKHKPFMPAEKWLAVQSRFTQNKCIKDAKWPVPLLKGVLRCKCGNLMQVSRKKKVDGTCSSWYYCRKRMRQGVDACDMGQIKCDLLDEEVLELFRGITADPALIQKFVKAEAPADVTDLKAAQARVSACERKIGRLAASLALAEDSAASKYIIAEMERLDVELGALKREASLAEMESHRAAASAKDAKATAVEIAKLIHGLEGFDDKEKNAIARAVIQECTWDGERLFITL

SEQ ID NO: 4144 - protein, 523 aa, Unknown
  Description of Unknown: Integrase B4145 sequence
  SM00857,G3DSA:1.10.10.2600,IPR036162,PF13408,PS51737, G3DSA:3.40.50.1390,IPR025827,IPR006119,IPR038109,PF07508, IPR011109,SSF53041,PF00239,PTHR30461,PS51736, Coil,cd00338
MNENVCIYLRKSRADQEAELRGEGETLARHERILLDLAKSRNYSVGAIYREIVSGETISARPVMQQLLREVEAGSWDGVLVVEVERLARGDTIDQGVVSRAFQFSDTKIITPTKTYDPDNEFDEEYFEFGLFMSRREYKTIKRRLNAGRIASVKEGKYCGSKPPYGYERVKLHGEKGFTLQPVPDQAEVIKMIYSLYSGASGDRIGVSKIVRKLNDMGIKSPSGKNWVPISVQDVLANPVYAGMIRWNGRKTVRAIQDGVVTQSRPRSKEDDILLFPGRHPAIVSKEMYDSVQQIRKKNPPRPISIKNTIKNPLAGIVYCSKCGRAMVRRPYQKRGQDDTLMCSYTSCPTVSSKLSLVERAVLNGIQDLVDEYRLNDAVPGPDINNAVKSKKKLITEKEHELEKLNVQKMKQYDLLEQGIYTTEVFLERSNSIASSINSCQDSIECLKEEIRHDKELIDQQSSFIPRCENLLEIYWSLDTAAKNKMLKELIERVNYTKDVKNAFRMGNEATFVLDIFPRIQSN

SEQ ID NO: 4145 - protein, 523 aa, Unknown
  Description of Unknown: Integrase B4146 sequence
  SM00857,G3DSA:1.10.10.2600,IPR036162,PF13408,IPR025827, PS51737,G3DSA:3.40.50.1390,IPR006119,IPR038109,PF07508, IPR011109,SSF53041,PTHR30461,Coil,PS51736, cd00338,PF00239
MNESVCIYLRKSRADREAEAHGEGETLARHERILLELAKKKEYIVGAIYREVVSGETIADRPVMQQLLREVESGMWDGVLVVEVERLARGDTIDQGVVSRAFQYSDTKIITPAKIYDPNNEFDEEYFEFGLFMSRREYKTIKRRLNNGRISSVKEGKYCGNKPPYGYERVKLEKEKGYTLRPVPAQAEVVKMIYTWYAGDECEQIGVAKIVRKLNDMGIKSASGNDWTPTSVQGILANPVYIGKIRWNGRKTVKTIQNGQVVKTRPRSKDVLICEGLHPAIISDDLYNSAQKIRQKNPYRPISIKNTVRNPLAGIVYCSKCGRAMVRRPYQKRGQEDTLMCPYTSCSTVSSKLSLVEKAVIDGIREIAEEYKLNNDINVPSNTIDSGITSKQNLIREKESELESLNTQKAKQYDLLEQGIYTTEIFLERAKTISASIQSCSDTIEKLKEEIKHDQNIIKQQSDFIPRCEELLDNYWSLDTESKNKMLKSLIEKVVYSKNTKNAYGKGNEIGFQLDIFPKIQEK

SEQ ID NO: 4146 - protein, 523 aa, Unknown
  Description of Unknown: Integrase B4147 sequence
  cd03768,PTHR30461:SF3,SM00857,IPR036162,PF13408, PS51737,G3DSA:3.40.50.1390,IPR025827,IPR006119,PF07508, IPR011109,SSF53041,PTHR30461,PS51736,PF00239
MRFFSYGRKSVFSDKSDSIDNQFRMNREYCESKFSGQVDSWQQFSDEDFTGANTSRPDLQRMLSFIKGGFCDVLVVYQLDRLSRDVRDFANIYALLEEHGVMFISIKENIDTTTPIGRAMMYVTVVFAQMERETIAARVTDNMLGLAKKGYWTGGNPPVGYVRKHIVVNGKKHCSIEVDPDGARYVTQIFDTFLAYNCSLQGMETRFKNQGIRTQSGKFFSTTQLHKMLTMPYCVEATPEVYDFYAAKGCIMDPGSPREMWDGSVGVIIYGRSTEKNKKHQAQPPEKWTVCLGKHKPFMPAEKWLAVQSRFTQNKCIKDAKWPVPLLKGVLRCKCGNLMQVSRKKKVDGTCSSWYYCRKRMRQGVDACDMGQIKCDLLDEKVLELFRGITADPALIQKFVKAEAPADVPDLKAAQARVSACERKIGRLAASLALAEDSAASKYIIAEMERLDVELGALKRETSLAEMESHRAAASAKDAKATAAEIAKLIHGLDGFDDKEKNAIARAVIQECTWDGERLFITL

SEQ ID NO: 4147 - protein, 523 aa, Unknown
  Description of Unknown: Integrase B4148 sequence
  cd03768,PTHR30461:SF3,SM00857,IPR036162, PF13408,IPR025827,PS51737,G3DSA:3.40.50.1390, IPR006119,PF07508,IPR011109,SSF53041, PTHR30461,PS51736,Coil,PF00239
MRFFSYGRKSVFSDKSDSIDNQFRMNREYCESKFSGQVDSWQQFSDEDFTGANTSRPDLQRMLSFIKGGFCDVLVVYQLDRLSRDVRDFANIYALLEEHGVMFISIKENIDTTTPIGRAMMYVTVVFAQMERETIAARVTDNMLGLAKKGYWTGGNPPVGYVRKHIVVNGKKHCSIEVDPDGARYVTQIFDTFLAYNCSLQGMETRFKNQGIRTQSGKFFSTTQLHKMLTMPYCVEATPEVYDFYAAKGCIMDPGSPREMWDGSVGVIIYGRSTEKNKKHQAQPPEKWTVCLGKHKPFMPAEKWLAVQSRFTQNKCIKDAKWPVPLLKGVLRCKCGNLMQVSRKKKVDGTCSSWYYCRKRMRQGVDACDMGQIKCDLLDEEVLELFRGITADPALIQKFVKAEAPADVPDLKAAQARVSACERKIGRLAASLALAEDSAASKYIIAEMERLDVELGALKREASLAEMESHQAAASAKDAKATAAEIAKLIHGLDGFDAKEKNAIARAVIQECTWDGERLFITL

SEQ ID NO: 4148 - protein, 523 aa, Unknown
  Description of Unknown: Integrase B4149 sequence
  PTHR30461:SF3,cd00338,SM00857,G3DSA:1.10.10.2600,IPR036162, PF13408,IPR025827,G3DSA:3.40.50.1390,PS51737,IPR006119, IPR038109,PF07508,SSF53041,IPR011109,PTHR30461, PS51736,Coil,PF00239
MTTAKNVMVIPARRRLGNTVQAEERPKLRVAAYCRVSTDSDEQATSYEAQVEHYTAFIKQNSELEFAGIFADDGISGTNTKKREEFNRMIGECMAGNIDLIVTKSISRFARNTLDCLKYIRELKEKNIPVFFEKENINTMDSKGEVLLTIMASLAQQESQSLSQNVKLGLQYRYQNGEVQVNHNRFLGYTKDEDGHLIIEPVEAEVVKRIYREYLEGASLLQICRSLKADSILTAANKPHWRPETVKKILQNEKYIGDALLQKTYTVDFLSKKRVKNNGIVPQYYVENSHEPIIPRELFMQVQEEMVRRANLRGGKDGKKRVYSSKYALSSIVYCGQCGDIYRRVHWNNRGYKSIVWRCVSRLEEKGSECTAPTINEETLQTAVVKAINELLANKEPFLQALQKNIATILNEENDNATNDIDSKLEELQQQLLIQAKSKNDYEDVADEIYHLRELKQNALVENAEREGKRQRIAEMTDFFNEQSCELEEYDEQLVRRLIEKVTVFHDKFAVEFKSGVEIDVEG

SEQ ID NO: 4149 - protein, 523 aa, Unknown
  Description of Unknown: Integrase B4150 sequence
  PTHR30461:SF3,cd00338,SM00857,G3DSA:1.10.10.2600,IPR036162, PS51737,G3DSA:3.40.50.1390,IPR006119,IPR038109,PF07508, IPR011109,SSF53041,PTHR30461,PS51736,Coil, PF00239
MTTFDMNNAVEIAKMDIYAIYLRKSRADMEAEKLGEGETLARHKKILTELAARKGLYIGKIYQEIVSGETIEDRPEIQKLIKDCYDGKYKGILIVEVTRLSRGNQGDAQKIMDCLKYSNMNNGLLVITPTKTYDVAHNTDDEEYMEFELFMSRREHKMIGKRMLRGRHQSVVEGNYISSYRPYGYNIIKTRTSRTLIPNKDEAPIVKMIFDMAVNQNMSSGKIARYLTISGIPTYYGEREWNPDTIKAILTNETYTGKVRWNYTMKIKTMVDGNLVSKRTNASETDHYMLYDGKHKEHALVDEDTFRKASTKYYHDKTKTNLRLSNPLAGLLFCKSCGRAMAYQSYAHRKGSVSPRYCHKTSTSCKIKSVVTQDVIDAVVYALKLYIDNFEIKMDSLPDVDENTIYDQIEVLEREIRKTERILSKLFDSWELEQISDNEFVQRKAIHNEKIESLKNRIEEIENSIPEKENYEDIIYHLSDALQKLTDDTLEAGIKNEYLKRVFSKIEFSRENNHEFILDINLR

SEQ ID NO: 4150 - protein, 523 aa, Unknown
  Description of Unknown: Integrase B4151 sequence
  cd03768,PTHR30461:SF3,SM00857,IPR036162,PF13408, PS51737,G3DSA:3.40.50.1390,IPR025827,IPR006119,PF07508, IPR011109,SSF53041,PTHR30461,PS51736,PF00239
MRFFSYGRKSVFSDKSDSIDNQFRMNREYCESKFSGQVDSWQQFSDEDFTGANTSRPDLQRMLSFIKGGFCDVLVVYQLDRLSRDVRDFANIYALLEEHGVMFISIKENIDTTTPIGRAMMYVTVVFAQMERETIAARVTDNMLGLAKKGYWTGGNPPVGYVRKHIVVNGKKHCSIEVDPDGARYVTQIFDTFLAYNCSLQGMETRFKNQGIRTQSGKFFSTTQLHKMLTMPYCVEATPEVYDFYAAKGCIMDPGSPREMWDGSVGVIIYGRSTEKNKKHQAQPPEKWTVCLGKHKPFMPAEKWLAVQSRFTQNKCIKDAKWPVPLLKGVLRCKCGNLMQVSRKKKVDGTCSSWYYCRKRMRQGVDACDMGQIKCDLLDEKVLELFRGITADPALIQKFVKAEAPADVPDLKATQARVSACERKIGRLAASLALAEDSAASKYIIAEMERLDVELGALKRETSLAEMESHRAAASAKDAKATAAEIAKLIHGLDGFDDKEKNAIARAVIQECTWDGERLFITL

SEQ ID NO: 4151 - protein, 523 aa, Unknown
  Description of Unknown: Integrase B4152 sequence
  PTHR30461:SF3,SM00857,IPR036162,PF13408,PS51737, G3DSA:3.40.50.1390,IPR025827,IPR006119,PF07508,SSF53041, IPR011109,PF00239,PTHR30461,PS51736, Coil,cd00338
MNICCYGRKSIYSDHSDSIDNQFRMCRDYVEMKFSGQVDSFLEYQDEAFTGANIKRPDLQRLLTDISAGNCDVLIVYQLDRLSRDVRDFANIYAILEEHRVKFISIKENIDTSTPIGRAMMYVTVVFAQMERETIAARVADNMIGLAKKGYWTGGNPPEGYVRTRIEANGKKHCSIVPDPEGVKYVTWIFDTFLQNGYSLQSMETAFKKQGIRTRTGAFFSTTQLHKILTMPYCVQATPEVYDYYAAKGCQMDIESPREQWDGACGVMIYGRTTQKNKKHQMQPPEKWLVCLGAHEPFMPADKWLAVQARFAQNKFDKTMKYDVPLLKGVLRCSCGSIMCVARKKKKEGVSSWYYCLKRMRQGKEVCDSHHIKCELLDQKVLELLQSIKRDPGVIQKFAEQNTEVLSGPDPKVLASKINTCQTRIDRLVSSLSLAADSSAQKYILAELERLDLEIQALRREHNLALAVERKRSLQQQDTLSKVSEINRLVSDLDSFSAAEKNAIVKDVIKKCVWDGESLSIML

SEQ ID NO: 4152 - protein, 523 aa, Unknown
  Description of Unknown: Integrase B4153 sequence
  SM00857,G3DSA:1.10.10.2600,IPR036162,PF13408,IPR025827, G3DSA:3.40.50.1390,PS51737,IPR006119,IPR038109,PF07508, IPR011109,SSF53041,PTHR30461,Coil,PS51736, cd00338,PF00239
MNESVCIYLRKSRADREAEAHGEGETLARHEHILLDLAKRQGYSIGAIYREVVSGETISARPVMQKLLHEVESGMWDGVLVVEVERLARGDTIDQGVVSRAFQYSDTKIITPTKIYDPNNEFDEEYFEFGLFMSRREYKTIKRRLNNGRISSVKEGKYCGNKPPYGYERVKLEKEKGYTLRPVPAQAEIVKMIYTWYAGDGCEQIGVAKIVRKLNDMKIESALGGDWTPASIQGILTNPVYIGKIRWNGRKTVKTIQNGQVIKTRPRSRDVLICEGLHPAIISDDLYNSVQEIRQKNPPRPISIKNTVRNPLAGIVYCSKCGRAMVRRPYQKRGQEDTLMCPYTSCPTVSSKLSLVEKAVIDGIEEIVEEYKLNNDISVSSKDIDLGIVSKQNLIHEKESELERLNNQKTKQYDLLEQGIYTTEVFLERSKAIAESAQTCSDTIEKLREEISHDKTIIEQQSAFIPRCEELLNNYWNLDMESRNKMLKSLIDKAIYTKDSKNAYGRGNEIKFELDIFPKIQEK

SEQ ID NO: 4153 - protein, 523 aa, Unknown
  Description of Unknown: Integrase B4154 sequence
  cd00338,SM00857,G3DSA:1.10.10.2600,IPR036162,PF13408, IPR025827,G3DSA:3.40.50.1390,PS51737,IPR006119,IPR038109, PF07508,SSF53041,IPR011109,PTHR30461,PS51736, Coil,PF00239
MNENVCIYLRKSRADQEAELRGEGETLARHERILLDLAKSRNYSVGAIYREIVSGETISARPVMQQLLREVEAGSWDGVLVVEVERLARGDTIDQGIVSRAFQFSNTKIITPTKTYDPDNEFDEEYFEFGLFMSRREYKTIKRRLNAGRISSVKEGKYCGSRPPYGYERVKLRGEKGFTLQPVPEQAEVIKMIYSLYSGASGDRIGVSKIVRKLNDMGIKSPSGKDWVPISVQDVLSNPVYAGMIRWNGRKTVRAIQDGVVTQSRPRSKEDDILLFPGRHPAIVSKEMYDSVQQIRKKNPPRPISIKNTIKNPLAGIVYCSKCGRAMVRRPYQKRGQDDTLMCSYTSCPTVSSKLSLVERAVLNGIQDLVDEYRLNAAVPGPDINNAVKSKEKLIAEKEHELEKLNVQKMKQYDLLEQGIYTTEVFLERSNSIASSINSCQDSIECLKEEIRHDKELIDQQSSFIPRCENLLEIYWSLDTAAKNKMLKELIERINYTKDAKNAFRMGNEATFVLDIFPRIQPN

SEQ ID NO: 4154 - protein, 523 aa, Unknown
  Description of Unknown: Integrase B4155 sequence
  PTHR30461:SF3,cd00338,SM00857,G3DSA:1.10.10.2600,IPR036162, PF13408,IPR025827,G3DSA:3.40.50.1390,PS51737,IPR006119, IPR038109,PF07508,IPR011109,SSF53041,PTHR30461, PS51736,Coil,PF00239
MAKTVRVIPASPKIFRSEVTAEPRRRRTAGYARVSTDHEEQASSYEMQMAHYKNYIESRADWDFVGMYSDEGISGTNTKKRDGFNQMIEDALAGKIDLIITKSVSRFARNTVDSLQNVRKLKEHGVEIYFEKENIWTFDSRGELLITIMSSLAQEESRSISENTTWGKRKQFAEGKTSVGYSAFLGYDKDFKINEEQAKIVRLIYKLFVGGRSFYAITKELEKRSIKSPSGKDKWYISIVRSILTNEKYRGDALIQKEYTADFLDKTRRKNTGEIPQYYVEEHHEAIIPPDLFDFVQAEIKHREQNGKHSGVSIFANKIKCGCCGTWYGAKVWHSTDKYRRVIYRCNKKYAHKGKPCGTRHLTEEEIKQIFVKALNSLVEVKENVIAELRSLINGVCQTGELTEEHDRTEQELGVLTERLETLIRENARVAQDQTAYLKQENEIRARYLEKQGHLARLDEQIAERESKRKTLETMIQVVCGINGEQTGFDEDLWGGLLDHIVVKADGQIVVIVKGGVEIGVGG

SEQ ID NO: 4155 - protein, 523 aa, Unknown
  Description of Unknown: Integrase B4156 sequence
  PTHR30461:SF3,cd00338,SM00857,G3DSA:1.10.10.2600,IPR036162, PF13408,PS51737,G3DSA:3.40.50.1390,IPR025827,IPR006119, IPR038109,PF07508,IPR011109,SSF53041,PTHR30461, PS51736,Coil,PF00239
MARKKNIAAGLDAVIYARYSSHNQREVSIEQQIAECTKHAAALGLRIVGTYEDRAISGKTDNRPRFQQMMRDAEKGKFQAVVAWKSNRIGRNMLQAMVNEAKLDDYGVKVFYAEEDFDDTAAGRFALRNMMNVNQFYSENMAEDITRGLYDNANKCMANGRQPLGYKRGADGKVMLDEPAAAVVREIFTRVAAGDLFVDIARDLNAKGIKTSKGAEWNKGSFQSICQNERYKGIYIYGDVRIVDGIPRIVSDELWYRVQEAMRMKKNPVGTRHRVGAEDYLLTGKLRCGHCGSYMTGVSGTSRNGELHYYYTCQKRRTEHACNKKNVRRDVIEPAIAQAIKMYCLTDDVIEWMADQTVQYWEKHDNDLQIEALEQQLAENKKATSNMLKAIEMGIITAATRSRMVELETENSKLTAQLSAAKRDVVKINREDLIDELHILRSKDIHDREVQAELFKDFLVAAYIYDDNRLKLVFSFMGKDNSVEIPLETGEDPPDGEDSPDAKMFVLTPDCSTIQFVLEPDSL

SEQ ID NO: 4156 - protein, 523 aa, Unknown
  Description of Unknown: Integrase B4157 sequence
  PTHR30461:SF3,cd00338,SM00857,G3DSA:1.10.10.2600,IPR036162, PF13408,IPR025827,PS51737,G3DSA:3.40.50.1390,IPR006119, IPR038109,PF07508,IPR011109,SSF53041,PTHR30461, PS51736,Coil,PF00239
MRAFIYCRFSSHKQQELSIEGQRDICQEYADKHNITVVGQYADRARSGKTENRADFRRLMRDAATGVVDCVLVWRYDRFFRNRAESALYRKQLEAAGVHLISVTEYIPEGSAGIITQGMIETVAEYFSAKLSEDVSRGMNKAAQHCQIVGRAPLGYRAGPNKRWQIDPVGAELVRRIFEWYASGKAMGQLAAQLNEEGHRTTNGTLYTRSSFNSILRNEKYIGVYSYGGEVRIEGGCPRIIEDELFFTVQRRLSANRHRPGAYKAEVPYLLSGKLFCGLCGAPMTGTAGTSHTGARHYYYICNNRRAKTCEKKNVRLDLIEEAVLQSALDILTDENIAYISAEVERRCAENSDSAALLASLNAQLEEVQRRLKNIGNAIAQGIITETTKELLEEAEADRTALRQQIDRAKVQAALVVKAEAVACWLDGFRRGDRTDPDFRRQVFGALVHSVFVYDDYLKIIFNVDSAGAAVVPYEAAQAATPSEAPPGSYLDTLGAPKNALHESVGRFLLQSFKEGSIWCTIG

SEQ ID NO: 4157 - protein, 523 aa, Unknown
  Description of Unknown: Integrase B4158 sequence
  cd03768,PTHR30461:SF3,SM00857,IPR036162,PF13408, PS51737,IPR025827,G3DSA:3.40.50.1390,IPR006119,PF07508, IPR011109,SSF53041,PTHR30461,PS51736,Coil, PF00239
MRFFSYGRKSVFSDKSDSIDNQFRMNREYCESKFSGQVDSWQQFSDEDFTGANTQRPDLQRMLSFIKNGFCDVLVVYQLDRLSRDVRDFANIYSLLEEHGVMFVSIKENIDTTTPIGRAMMYVTVVFAQMERETIAARVTDNMLGLAKKGYWTGGNPPRGYVRKHIVVDGKKHCSIEPDPDGVRYVTRIFDTFLAMNCSLQGMETRFKNQGIRTESGKFFSTTQLHKILTMPYCVEATPEVYDFYASKGCIMDPGSPREMWDGSVGVIIYGRSTEKNKKHQAQPPEKWTVCLGMHKPFMPAEKWLAVQARFGQNKCIKDAKWPVPLLKGVLRCKCGNLMQVSRKKKVDGTCSSWYYCRKRMRQGVDACDMGQIKCDLLDDEVLELFRGITADPALIQKFVKAEAPADVPDLKAAQARVSACERKIGRLAASLALAEDSAASKYIIAEMERLDVELGALKREAALAEMESHRAAASAKDAKATAAEIAKLIHGLDGFDDKEKNAIARAVIQECTWDGERLFITL

SEQ ID NO: 4158 - protein, 523 aa, Unknown
  Description of Unknown: Integrase B4159 sequence
  PTHR30461:SF3,cd00338,SM00857,IPR036162,PF13408, IPR025827,PS51737,G3DSA:3.40.50.1390,IPR006119,PF07508, IPR011109,SSF53041,PTHR30461,PS51736,Coil, PF00239
MFFGIYGRKSVYSDKSDSVDNQHRMCNDYIKTHFKSDDITLITSYSDEDYTGANTKRPDLQRLLEDVKSGAINVLVVYQLDRISRDVRDFSNIYALLEEYHVMFISIKENIDTTTPIGRAMMYVTVVFAQMERETIATRVRDNMIGLAKKGFWTGGNPPYGYVRKNIVINGKKHVTIEPDPDGVAYNIWIYDSFLKNHCSLQSMETYFRKEGIKTRNGAFFSSTQLYKILTMPYCVEATPEIYDYFAAKGCQMDPDSPRDKWDGSVGVMVYGRSTEVNKKHQLQPPEEWLICLGLHKPFMPAAKWLAVQNQFSKNKFDKTPKYDIPLLKGVLRCSCGSIMAVSRKKKINGEVSSWYYCLRRMRNGVEACDRKQIKVDIIDQKLLNTLHSIESDPSMIFCFVQKKELPLPDIKTINNKISSVESKISKLASSLALADGSAASKYIVAEIERLDSDLQFLKRERAAINIEIKKRDELNESAESKALHIQNVMKGLSGFTAEEKNLIMRDILKECVWDGSELSIVL

SEQ ID NO: 4159 - protein, 523 aa, Unknown
  Description of Unknown: Integrase B4160 sequence
  cd00338,SM00857,G3DSA:1.10.10.2600,IPR036162,PF13408, IPR025827,G3DSA:3.40.50.1390,PS51737,IPR006119,IPR038109, PF07508,SSF53041,IPR011109,PTHR30461,PS51736, Coil,PF00239
MNESVCIYLRKSRADREAEARGEGETLARHERILLDLAKKKEYIVGAIYREVVSGETIADRPVMQQLLHEVESGLWDGVLVVEVERLARGDTIDQGVVSRAFQYSDTKIITPTKVYDPNNEFDEEYFEFGLFMSRREYKTIKRRLNNGRISSVKEGKYCGNKPPYGYERVKLEKEKGYTLRPVPAQAEIVKMIYTWYAGDGCEQIGTSKIVRKLNDMGIKSMSGNNWTPASIQGILTNPVYIGKIRWNGRKTVKTIQDGQVVKTRPRSKDALVCDGLHPAIVPDDLYNSVQEIRQKNPPRPISIKNTVRNPLAGIVYCSKCGRAMVRRPYQKSGQEDTLMCPYTSCSTVSSKLSLVEKAVIDGIREIAEKYKLNNDINVPSSTINSGIVSKQNLIREKENELENLNSQKAKQYDLLEQGIYTTEVFLERSKTISASIQSCSDTIANLREEIEHDENIKAQQSDFIPRCEELLNNYWNLNMESRNRMLKSLIEKVVYSKDKRNAYGHGNEANFELDIFPKIQEK

SEQ ID NO: 4160 - protein, 523 aa, Unknown
  Description of Unknown: Integrase B4161 sequence
  SM00857,G3DSA:1.10.10.2600,IPR036162,PF13408,IPR025827, G3DSA:3.40.50.1390,PS51737,IPR006119,IPR038109,PF07508, IPR011109,SSF53041,PF00239,PTHR30461,PS51736, Coil,cd00338
MNENVCIYLRKSRADQEAELRGEGETLARHERILLDLAKSRNYSVGAIYREIVSGETISARPVMQQLLREVEAGSWDGVLVVEVERLARGDTIDQGVVSRAFQFSDTKIITPTKTYDPDNEFDEEYFEFGLFMSRREYKTIKRRLNAGRIASVKEGKYCGSKPPYGYERVKLHGEKGFTLQPVPDQAEVIKMIYSLYSGSSGDRIGVSKIVRKLNDMGIKSPSGKDWVPISVQDVLANPVYAGMIRWNGRKTVRAIQNGVVTQSRPRSKEDDILLFPGRHPAIVSKEMYDSVQQIRKKNPPRPISIKNTIKNPLAGIVYCSKCGRAMVRRPYQKRGQDDTLMCSYTSCPTVSSKLSLVERAVLNGIQDLVDEYRLNDAVPGPDINNAVKSKEKLIAEKEHELEKLNVQKMKQYDLLEQGIYTTEVFLERSNSIASSINSCQDSIECLKEEIRHDKELIDQQSSFIPRCENLLEIYWSLDTATKNKMLKELIERVNYTKDTKNAFRKGNEATFVLDIFPRIQSN

SEQ ID NO: 4161 - protein, 523 aa, Unknown
  Description of Unknown: Integrase B4162 sequence
  cd03768,PTHR30461:SF3,SM00857,IPR036162,PF13408, PS51737,IPR025827,G3DSA:3.40.50.1390,IPR006119,PF07508, IPR011109,SSF53041,PTHR30461,PS51736,Coil, PF00239
MRFFSYGRKSVFSDKSDSIDNQFRMSREYCDTKFSGQVDSWQQFSDEDFTGANTQRPDLQRMLSFIKNGFCDVLVVYQLDRLSRDVRDFANIYSLLEEHGVMFVSIKENIDTTTPIGRAMMYVTVVFAQMERETIAARVTDNMLGLAKKGYWTGGNPPRGYVRKHIVVDGKKHCSIEPDPDGVRYVTRIFDTFLAMNCSLQGMETRFKNQGIRTESGKFFSTTQLHKILTMPYCVEATPEVYDFYAAKGCIMDPGSPREMWDGSVGVIIYGRSTEKNKKHQAQPPEKWTVCLGMHKPFMPAEKWLAVQARFGQNKCIKDAKWPVPLLKGVLRCKCGNLMQVSRKKKVDGTCSSWYYCRKRMRQGVDACDMGQIKCDLLDEKVLELFRGITADPALIQKFVKAEAPADVPDLKAAQARVSACERKIGRLAASLALAEDSAASKYIIAEMERLDVELGALKREASLAEMESHRAAASAKDAKATAAEIAKLIHGLDGFDDKEKNAIARAVIQECTWDGERLFITL

SEQ ID NO: 4162 - protein, 523 aa, Unknown
  Description of Unknown: Integrase B4163 sequence
  cd03768,PTHR30461:SF3,SM00857,IPR036162,PF13408, IPR025827,G3DSA:3.40.50.1390,PS51737,IPR006119,PF07508, IPR011109,SSF53041,PTHR30461,PS51736,Coil, PF00239
MRFFSYGRKSVFSDKSDSIDNQFRMNREYCESKFSGQVDSWQQFSDEDFTGANTSRPDLQRMLSFIKGGFCDVLVVYQLDRLSRDVRDFANIYALLEEHGVMFISIKENIDTTTPIGRAMMYVTVVFAQMERETIAARVTDNMLGLAKKGYWTGGNPPVGYIRKHIVVDGKKHCSIEVDPDGARYVTQIFDTFLAYNCSLQGMETRFKNQGIRTQSGKFFSTTQLHKMLTMPYCVEATPEVYDFYAAKGCIMDPGSPREMWDGSVGVIIYGRSTEKNKKHQAQPPEKWTVCLGKHKPFMPAEKWLAVQSRFTQNKCIKDAKWPVPLLKGVIRCKCGNLMQVSRKKKVDGTCSSWYYCRKRMRQGVDACDMSQIKCDLLDEKVLELFRGIAADPGLIQKFVKTKAPTDISDLKAAQARVSACERKIGRLAASLALAEDSTASKYIIAEMERLDVELGALKREASLAEMENHRATANAKDAKATAVEIAKLIHGLKGFDDKEKNAIARAVIQECTWDGERLFITL

SEQ ID NO: 4163 - protein, 523 aa, Unknown
  Description of Unknown: Integrase B4164 sequence
  cd03768,PTHR30461:SF3,SM00857,IPR036162,PF13408, PS51737,IPR025827,G3DSA:3.40.50.1390,IPR006119,PF07508, IPR011109,SSF53041,PTHR30461,PS51736,Coil, PF00239
MRFFSYGRKSVFSDKSDSIDNQFRMNREYCESKFSGQVDSWQQFSDEDFTGANTSRPDLQRMLSFIKGGFCDVLVVYQLDRLSRDVRDFANIYALLEEHGVMFISIKENIDTTTPIGRAMMYVTVVFAQMERETIAARVTDNMLGLAKKGYWTGGNPPVGYVRKHIVVNGKKHCSIEVDPDGARYVTQIFDTFLAYNCSLQGMETRFKNQGIRTQSGKFFSTTQLHKMLTMPYCVEATPEVYDFYAAKGCIMDPGSPREMWDGSVGVIIYGRSTEKNKKHQAQPPEKWTVCLGKHKPFMPAEKWLAVQSRFTQNKCIKDAKWPVPLLKGVLRCKCGNLMQVSRKKKVDGTCSSWYYCRKRMRQGVDACDMGQIKCDLLDEKVLELFRGITADPALIQKFVKAEAPTDVPDLKAAQARVSACERKIGRLAASLALAEDSAASKYIIAEMERLDVELGALKREASLAEMESHRAAASAKDAKATAAEIAKLIHGLDGFDDKEKNAIARAVIQECTWDGERLFIKL

SEQ ID NO: 4164 - protein, 523 aa, Unknown
  Description of Unknown: Integrase B4165 sequence
  cd00338,SM00857,G3DSA:1.10.10.2600,IPR036162,PF13408, PS51737,IPR025827,G3DSA:3.40.50.1390,IPR006119,IPR038109, PF07508,IPR011109,SSF53041,PTHR30461,PS51736, Coil,PF00239
MNESVCIYLRKSRADREAEAHGEGETLARHERILLDLAKKKEYIVGAIYREVVSGETIADRPVMQQLLHEVESGMWDGVLVVEVERLARGDTIDQGVVSRAFQYSDTKIITPTKIYDPNNEFDEEYFEFGLFMSRREYKTIKRRLNAGRISSVKEGKYCGNKPPYGYERVKLEKEKGYTLRPVPTQAEIVKMIYTWYAGDGCEQIGVAKIARKLNEMGIESALCGDWTPASIQGILTNPVYIGKIRWNGRKTVKTIQNGQVIKTRPRSKDTLICDGLHPAIISEDLFNSVQEIRKKNPPRPISIKNSIRNPLSGIVYCSKCGRAMVRRPYQKRGQEDTLMCPYTSCPTVSSKLSLVEKAVLDGIREIVEKYKLNNDINTSSQAIDLTIISKQNLIHEKENELESLNAQKAKQYDLLEQGIYTTEVFLERAKTISASIQSCSDTIEKLKEEIKHDENIIKQQSDFIPRCEELLDNYWSLDTESKNKMLKSLIEKVAYSKDTKNAYGKGNEIGFQLDIFPKIQEK

SEQ ID NO: 4165 - protein, 523 aa, Unknown
  Description of Unknown: Integrase B4166 sequence
  PTHR30461:SF3,cd00338,SM00857,IPR036162,PF13408, IPR025827,G3DSA:3.40.50.1390,PS51737,IPR006119,PF07508, SSF53041,IPR011109,PTHR30461,PS51736,Coil, PF00239
MFFGIYGRKSVYSDKSDSVDNQHRMCNDYIKAHFKADDITLVTSYSDEDYTGANTKRPDLQRLLEDVKSGAINVLVVYQLDRISRDVRDFSNIYAMLEEYHVMFISIKENIDTTTPIGRAMMYVTVVFAQMERETIATRVRDNMIGLAKKGFWTGGNPPYGYVRKNILINGKKHVTIEPDPDGVAYNIWIYDSFLKNHCSLQSMETYFRKEGIKTRNGAFFSTTQLYKILTMPYCVEATPEIYDYFAAKGCQMDPDSPREKWDGSVGVMIYGRSTGVNKKHQLQPPEKWLVCLGLHKPFMPAAKWLAVQNQFSENKFDKTQKYDIPLLKGILRCSCGSIMAVSRKKKINGEVSSWYYCLRRMKNGVEACDRKQIKVDIIDQKLLNTLHSIEIDPSMIYRFVQKSELPLPDIKTINNKISSIESRIGRLASSLALADGSAASKYIVAEIERLDSDLQFLKRERAVINVEIKKRDELNESAEGKAQHIQNVMKGLNGFTAEEKNRIMRDILKECVWDGSELSIVL

SEQ ID NO: 4166 - protein, 523 aa, Unknown
  Description of Unknown: Integrase B4167 sequence
  SM00857,G3DSA:1.10.10.2600,IPR036162,PF13408,PS51737, G3DSA:3.40.50.1390,IPR025827,IPR006119,IPR038109,PF07508, SSF53041,IPR011109,PTHR30461,PS51736,cd00338, PF00239
MNESVCIYLRKSRSDREAEAHGEGETLARHEHILLDLAKRQGYSIGAIYREVVSGETISARPVMQKLLHEVESGMWDGVLVVEVERLARGDTIDQGVVSRAFQYSDTKIITPTKIYDPNNEFDEEYFEFGLFMSRREYKTIKRRLNNGRISSVKEGKYCGNKPPYGYERVKLEKEKGYTLRPVPAQAEIVKMIYTWYAGDGCEQIGVAKIVRKLNDMGIESALGGDWTPASIQGILTNPVYIGKIRWNGRKTVKTIQNGQVVKTRPRSKDVLICEGLHPAIISDDLYNSVQEIRKKNPPRPISIKNTVRNPLAGIVYCSKCGRAMVRRPHQKRGQEDTLMCPYTSCSTVSSKLSLVEKAVIDGIKELTEKYKLNNDINVPSNTINSGIVYKQNLIREKESELESLNVQKAKQYDLLEQGIYTTEVFLERSKTIAISIQSCSDTITKLRGEIKHDENIMVQQSDFVPRCEELLNNYWDLNMESRNRMLKNLVEKVVYSKNIKNTYGKGNEINFELDIFPKIQEK

SEQ ID NO: 4167 - protein, 523 aa, Unknown
  Description of Unknown: Integrase B4168 sequence
  PTHR30461:SF3,SM00857,G3DSA:1.10.10.2600,IPR036162,PF13408, IPR025827,PS51737,G3DSA:3.40.50.1390,IPR006119,IPR038109, PF07508,SSF53041,IPR011109,PTHR30461,Coil, PS51736,cd00338,PF00239
MGKKQKITGGDAVIYARYSSHNQRDVSIEQQIEACRKYAASLSLKVTLTYEDRAISGRTDNRPAFQRMMRDAENGKFQYVLAWKSNRMGRNMMQAMVNEARLVDCGVKVFYAEEDFDDNAAGRFALRSMMNVNQFYIENMAEDVKRGLYDNAKKGLVNGSLPLGYKRGADGKPEIDEPKAAIVREIYTRVAAGELFASIAADLNARGIKTARGREWNKGSFHVLCHNDRYRGIYMYGDIRIPGGMPRIISDELFYDAQEAYGMKKDNRYGRARHGAENYLLTGKLYCGHCGDYMVGISGTSKSGEMHHYYACQKHRLEHTCEKKAIRRDVIENAVAQAIMMYCLDDETIDFIVDSTIAYFKQKDHELHIEVMENELAAVQQAISNLMKAIEAGIITSTTRTRLLDLEEQQAKLSAKINTAKAERVEIDRDDLIAGLQLFRAGDVKNKKFLAKLFNTFLIAVYLYNDNRLKIVFSFTGNHNSVEIPLELNNDCPDNEIVSDETEVRMSHLECDGRDSNPRPTDS

SEQ ID NO: 4168 - protein, 523 aa, Unknown
  Description of Unknown: Integrase B4169 sequence
  cd03768,PTHR30461:SF3,SM00857,IPR036162,PF13408, IPR025827,PS51737,G3DSA:3.40.50.1390,IPR006119,PF07508, IPR011109,SSF53041,PTHR30461,PS51736,Coil, PF00239
MRFFSYGRKSVFSDKSDSIDNQFRMNREYCESKFSGQVDSWQQFSDEDFTGANTSRPDLQRMLSFIKGGFCDVLVVYQLDRLSRDVRDFANIYAMLEEHGVMFISIKENIDTTTPIGRAMMYVTVVFAQMERETIAARVTDNMLGLAKKGYWTGGNPPVGYVRKHIVVNGKKHCSIEVDPDGARYVTQIFDAFLSYNCSLQGMETRFKNQGIRTQSGKFFSTTQLHKILTMPYCVEATPEVYDFYAAKGCIMDPGSPREMWDGSSGVIIYGRSTEKNKKHQLQPPEKWTVCLGKHKPFMPAEKWLAVQSRFTQNKCIKDAKWPVPLLKGVLRCKCGNLMQVSRKKKVDGTCSSWYYCRKRMRQGVDACDMGQIKCDLLDEEVLELFRGIAADPGLIQKFVKAEAPADVPDLKAAQARVSACERKIGRLAASLALAEDSAASKYIIAEMERLDVELGALKREASLAEMESHRAAASAKDAKATAAEIAKLIHGLEGFDDKEKNAIARAVIQECTWDGERLFITL

SEQ ID NO: 4169 - protein, 523 aa, Unknown
  Description of Unknown: Integrase B4170 sequence
  cd03768,PTHR30461:SF3,SM00857,IPR036162,PF13408, PS51737,G3DSA:3.40.50.1390,IPR025827,IPR006119,PF07508, IPR011109,SSF53041,PTHR30461,PS51736,Coil, PF00239
MRFFSYGRKSVFSDKSDSIDNQFRMNREYCESKFSGQVDSWQQFSDEDFTGANTSRPDLQRMLSFIKGGFCDVLVVYQLDRLSRNVQDFANIYALLEERGVMFISIKENIDTTTPIGRAMMYVTVVFAQMERETIAARVTDNMLGLAKKGYWTGGNPPVGYVRKHIVVNGKKHCSIEVDPDGARYVTQIFDTFLAYNCSLQGMETRFKNQGIRTQGGKFFSTTQLHKMLTMPYCVEATPEVYDFYAAKGCIMDPGSPREMWDGSAGVIIYGRSTEKNKKHQLQPPEKWTVCLGKHKPFMSAEKWLAVQSRFTQNKCIKDAKWPVPLLKGVLRCKCGNLMQVSRRKKVDGTCSSWYYCRKRMRQGVDACDMGQIKCDLLDEEVLELFRGIAADPALIQKFVKAEAPADVPDLKAAQARVAACERKIGRLAASLALAEDSAASKYIIAEMERLDVELGALKREASLAEMESHRAAASAKDAKATAAEIAKLIHGLDGFDDKEKNAIARAVIQECTWNGERLLITL

SEQ ID NO: 4170 - protein, 523 aa, Unknown
  Description of Unknown: Integrase B4171 sequence
  cd03768,PTHR30461:SF3,SM00857,IPR036162,PF13408, IPR025827,PS51737,G3DSA:3.40.50.1390,IPR006119,PF07508, IPR011109,SSF53041,PTHR30461,PS51736,Coil, PF00239
MRFFSYGRKSVFSDKSDSIDNQFRMNREYCESKFSGQVDSWQQFSDEDFTGANTSRPDLQRMLSFIKGGFCDVLVVYQLDRLSRDVRDFANIYALLEEHGVMFISIKENIDTTTPIGRAMMYVTVVFAQMERETIAARVTDNMLGLAKKGYWTGGNPPVGYVRKHIVVNGKKHCSIEVDPDGARYVTQIFDTFLAYNCSLQGMETRFKNQGIRTQSGKFFSTTQLHKMLTMPYCVEATPEVYDFYAAKGCIMDPGSPREMWDGSVGVIIYGRSTEKNKKHQAQPPEKWTVCLGKHKPFMPAEKWLAVQSRFTQNKCIKDAKWPVPLLKGVLRCKCGNLMQVSRKKKVDGTCSSWYYCRKRMRQGVDACDMGQIKCDLLDEEVLELFRGITADPALIQKFVKAEAPADVPDLKAAQARVSACERKIGRLAASLALAEDSAASKYIIAEMERLDVELGALKREASLAEMESHRAAASAKDAKATAAEIAKLIHGLEGFDDKEKNAIARAVIQECTWDGERLFITL

SEQ ID NO: 4171 - protein, 523 aa, Unknown
  Description of Unknown: Integrase B4172 sequence
  PTHR30461:SF3,SM00857,G3DSA:1.10.10.2600,IPR036162,PF13408, IPR025827,G3DSA:3.40.50.1390,PS51737,IPR006119,IPR038109, PF07508,IPR011109,SSF53041,PF00239,PTHR30461, PS51736,Coil,cd00338
MRAFIYCRFSSHKQQELSIEGQRDICQEYADKHSITVVGQYADRARSGKTENRADFRRLMRDAATGVVDCVLVWRYDRFFRNRAESALYRKQLEAAGVHLISVTEYIPEGSAGIITQGMIETVAEYFSAKLSEDVSRGMNKAAQHCQIVGRAPLGYRAGPNKRWQIDPVGAELVRRIFEWYASGKAMGQLAAQLNEEGHRTTNGTLYTRSSFNSILRNEKYIGVYSYGGEVRIEGGCPRIIEDELFFTVQRRLSANRHRPGAYKAEVPYLLSGKLFCGLCGAPMTGTAGTSHTGARHYYYICNNRRAKTCKKKNVRLDLIEEAVLQSALDVLTDENIAYISTEVERRCAENSESAALLASLNAQLEEVQRRLKNIGNAIAQGIITETTKELLEEAEADRTALRQQIDRAKVQAALVVKAEAVACWLDGFRRGDRTDPDFRRQVFGALVHSVFVYDDYLKIIFNVDSAGAAVVPYEATQAAAPSEAPPGSYLDTLGAPKYALQEIAARFLLQSFKEGSIWCTIG

SEQ ID NO: 4172 - protein, 523 aa, Unknown
  Description of Unknown: Integrase B4173 sequence
  SM00857,G3DSA:1.10.10.2600,IPR036162,PF13408,IPR025827, G3DSA:3.40.50.1390,PS51737,IPR006119,IPR038109,PF07508, IPR011109,SSF53041,PTHR30461,Coil,PS51736, cd00338,PF00239
MPDYAIYLRKSRKDNEAEQRGEGETLARHRKLLLDYAKCEGLRIAKIYEEVVSGESIATRPQMQLLLADVEQGLYDGVLVVEVERLARGDTMDQGLVAQTFKYSNTKIYTPMKVYDPNNEFDEEYFEFGLFMSRREYKTINRRLQRGRRASASEGKYIAGRAPYGYEKIKIPNDKGNTLRIISEQAEVIKQIYDWYVNGLDGEDAGLSKIATKLNSLGIKPYRNDYWSKETLRDIITNPVYAGFIRWGYRRNKKTVIDGKTVTSRPVTLDENCVLSKGLHEAIVTQELYDKAQCKIKSVPPPPVGYKKELKGSLAGIVICKNCGHKMTLRSPSTKGKPPYLVCHYRYCDNVSTPYDIVEKRVLDTLKEWAEKYKLKEKQNKKNSSSSIDMLQSSVESAKKKVATLQQQLDGMCDLLEQGIYTPDMFRQRSVSVTERITKAKAEYEQLSEQLVSTEKLLTEKSEFIPKVEHVLKIYDTLSTPADKNRVLKEVIDHAEYSKAKSGAYKGVSVDDFNLTVFPKMPL

SEQ ID NO: 4173 - protein, 523 aa, Unknown
  Description of Unknown: Integrase B4174 sequence
  cd03768,PTHR30461:SF3,SM00857,IPR036162,PF13408, IPR025827,G3DSA:3.40.50.1390,PS51737,IPR006119,PF07508, SSF53041,IPR011109,PTHR30461,PS51736,Coil, PF00239
MRFFSYGRKSVFSDKSDSIDNQFRMNREYCESKFSGQVDSWQQFSDEDFTGANTSRPDLQRMLSFIKNGFCDVLVVYQLDRLSRDVRDFANIYALLEEHGVMFISIKENIDTTTPIGRAMMYVTVVFAQMERETIAARVTDNMLGLAKKGYWTGGNPPVGYVRKHIVVNGKKHCSIEVDPDGARYVTQIFDTFLAYNCSLQGMETRFKNQGIRTQSGKFFSTTQLHKILTMPYCVEATPEVYDFYAAKGCIMDPGSPREMWDGSVGVIIYGRSTEKNKKHQAQPPEKWTVCLGKHKPFMPAEKWLAVQSRFTQNKCIKDAKWPVPLLKGVLRCKCGNLMQVSRKKKVDGTCSSWYYCRKRMRQGVDACDMGQIKCDLLDEEVLELFRGITADPALIQKFVKAEAPADVPDLKAAQARVSACERKIGRLAASLALAEDSAASKYIIAEMERLDVELGALKREASLAEMESHRAAASAKDAKATAAEIAKLIHGLDGFDDKEKNAIARAVIQECTWDGERLFITL

SEQ ID NO: 4174 - protein, 523 aa, Unknown
  Description of Unknown: Integrase B4175 sequence
  cd03768,PTHR30461:SF3,SM00857,IPR036162,PF13408, PS51737,G3DSA:3.40.50.1390,IPR025827,IPR006119,PF07508, IPR011109,SSF53041,PTHR30461,PS51736,Coil, PF00239
MRFFSYGRKSVFSDKSDSIDNQFRMNREYCESKFSGQVDSWQQFSDEDFTGANTSRPDLQRMLSFIKGGFCDVLVVYQLDRLSRDVRDFANIYALLEEHGVMFISIKENIDTTTPIGRAMMYVTVVFAQMERETIAARVTDNMLGLAKKGYWTGGNPPVGYVRKHIVVNGKKHCSIEVDPEGARYVTQIFDTFLAYNCSLQGVETRFKKQGIRTQNGKFFSTAQLHKMLTMPYCVEATPEVYDFYAAKGCIMDPGSPREMWDGSVGVIIYGRSTEKNKKHQAQPPEKWTVCLGKHKPFMPAEKWLAVQSRFTQNKCIKDAKWPVPLLKGVLRCKCGNLMQVSRKKKVDGTCSSWYYCRKRMRQGVDACDMGQIKCDLLDDEVLELFRGIAADPGLIQKFVKAEAPADVPDLKAAQARVSACERKIGRLAASLALAEDSAASKYIIAEMERLDVELGALKREASLAEMESHRAAASAKDAKATAAEIAKLIHGLDGFDDKEKNAIARAVIQECTWDGERLFITL

SEQ ID NO: 4175 - protein, 523 aa, Unknown
  Description of Unknown: Integrase B4176 sequence
  cd03768,PTHR30461:SF3,SM00857,IPR036162,PF13408, IPR025827,PS51737,G3DSA:3.40.50.1390,IPR006119,PF07508, IPR011109,SSF53041,PTHR30461,PS51736,Coil, PF00239
MRFFSYGRKSVFSDKSDSIDNQFRMNREYCESKFSGQVDSWQQFSDEDFTGANTSRPDLQRMLSFIKGGFCDVLVVYQLDRLSRDVRDFANIYALLEEHGVMFISIKENIDTTTPIGRAMMYVTVVFAQMERETIAARVTDNMLGLAKKGYWTGGNPPVGYVRKHIVVNGKKHCSIEVDPDGARYVTQIFDTFLAYNCSLQGMETRFKNQGIRTQSGKFFSTTQLHKMLTMPYCVEATPEVYDFYAAKGCIMDPGSPREMWDGSVGVIIYGRSTEKNKKHQAQPPEKWTVCLGKHKPFMPAEKWLAVQSRFTQNKCIKDAKWPVPLLKGVLRCKCGNLMQVSRKKKVDGTCSSWYYCRKRMRRGVDACDMGQIKCDLLDEEVLELFRGITADPALIQKFVKAEHPAAVPDLKAAQARVSACERKIGRLAASLALAEDSAASKYIIAEMERLDVELGALKREASLAEMESHRAAASAKDAKATAAEIAKLIHGLDGFDDKEKNAIARAVIQECTWDGERLFITL

SEQ ID NO: 4176 - protein, 523 aa, Unknown
  Description of Unknown: Integrase B4177 sequence
  PTHR30461:SF3,cd00338,SM00857,IPR036162,PF13408, IPR025827,G3DSA:3.40.50.1390,IPR006119,PF07508,IPR011109, SSF53041,PTHR30461,PS51736,Coil,PF00239
MFFGIYGRKSVYSDKSDSVDNQHRMCNDYIKTHFKADDITLITSYSDEDYTGANTKRPDLQRLLEDVKSGAINVLVVYQLDRISRDVRDFSNIYAMLEEYHVMFISIKENIDTTTPIGRAMMYVTVVFAQMERETIATRVRDNMIGLAKKGFWTGGNPPYGYVRKNILINGKKHVTIEPDPDGVAYNIWIYDSFLKNHCSLQSMETNFRKEGIKTRNGAFFSTTQLYKILTMPYCVEATPEIYDYFAAKGCQMDPDSPREKWDGSVGVMIYGRSTGVNKKHQLQPPEKWLVCLGLHKPFMPAAKWLAVQNQFSENKFDKTQKYDIPLLKGILRCSCGSIMAVSRKKKINGEVSSWYYCLRRMKNGVEACDRKQIKVDIIDQKLLNTLHSIEIDPSMIYRFVQKSELPLPDIKTINNKISSIESRIGRLASSLALADGSAASKYIVAEIERLDSDLQFLKRERAVINVEIKKRDELNESAEGKAQHIQNVMKGLNGFTAEEKNRIMRDILKECVWDGSELSIVL

SEQ ID NO: 4177 - protein, 523 aa, Unknown
  Description of Unknown: Integrase B4178 sequence
  PTHR30461:SF3,SM00857,G3DSA:1.10.10.2600,IPR036162,PS51737, G3DSA:3.40.50.1390,IPR006119,IPR038109,PF07508,IPR011109, SSF53041,PTHR30461,Coil,PS51736, cd00338,PF00239
MPNTESFTVNEILVYLRKSRSDSQDMSVEEVLRKHEEMIQQYASTHFHSPIPEKNIFREVVSGETIDSRPQMKNLLKMIESEQFKAVLVVEPQRLSRGDLEDCGRLINILRYTNTTVLTLTHSFDLQEEYERKFFGMEITRGNDYLEYTKRILKRGREASVAKGNYIGSVDPYGYKKTVIKKDGVTCHTLEIIPEEADTVKLIHELYAYTPEGIGFTNIAHKLDAMHIKPKKAAHWTPAIISSILCNPLYLGMVRWNNRKVVKYINEGQLAKARPQNTEAKYYKGLHEPIITQELYDACMARRGTNPSLRRNKELCNPFAGLLYCGTCGHAMSLKIYKNHNSVSQMMLCNHQAYCHTKSVLYSAFLRRFISSMEDTLNDFELAQKSDDGRTQAISKTIVINLENKLKKLNEKDARQKDAYEDGIYSKEEFLKRNVRTQQDIASTIIALEDARAKKADIIDYEEKIRRFKDCLHALNDPELSAAEKNRFLKSCVDKILYYNNMESKAGIGRYIENVFSLEIQYK

SEQ ID NO: 4178 - protein, 523 aa, Unknown
  Description of Unknown: Integrase B4179 sequence
  cd03768,PTHR30461:SF3,SM00857,IPR036162,PF13408, IPR025827,PS51737,G3DSA:3.40.50.1390,IPR006119,PF07508, IPR011109,SSF53041,PTHR30461,PS51736,Coil, PF00239
MRFFSYGRKSVFSDKSDSIDNQFRMNREYCESKFSGQVDSWQQFSDEDFTGANTSRPDLQRMLSFIKGGFCDVLVVYQLDRLSRDVRDFANIYALLEEHGVMFISIKENIDTTTPIGRAMMYVTVVFAQMERETIAARVTDNMLGLAKKGYWTGGNPPVGYVRKHIVVDGKKHCSIEVDPDGARYVTQIFDTFLAYNCSLQGMETRFKNQGIRTQSGKFFSTTQLHKMLTMPYCVEATPEVYDFYAAKGCIMDPGSPREMWDGSVGVIIYGRSTEKNKKHQAQPPEKWTVCLGKHKPFMPAEKWLAVQSRFTQNKCIKDAKWPVPLLKGVLRCKCGNLMQVSRKKKVDGTCSSWYYCRKRMRQGVDACDMGQIKCDLLDEKVLELFRGITADPALIQKFVKAEAPADVPDLKAAQARVSACERKIGRLAASLALAEDSAASKYIIAEMERLDVELGALKREASLAEMESHRAAASAKDAKATAAEIAKLIHGLDGFDDKEKNAIARAVIQECTWDGERLFITL

SEQ ID NO: 4179 - protein, 523 aa, Unknown
  Description of Unknown: Integrase B4180 sequence
  PTHR30461:SF3,IPR036162,PS51737,IPR011109,PTHR30461, PF00239,G3DSA:1.10.10.2600,IPR006119,SSF53041,cd00338, SM00857,PS01300,IPR025827,IPR038109,IPR015967, PS51736,PF13408,G3DSA:3.40.50.1390,PF07508,Coil
MKRAVFYGRYSSDRQTEQSIEGQRRVCEEFAKAEQIQIVGEYIDRATSGTSTEQREQFQKMLKDSKNGGWDYVLVYKLDRFARSRYDSAISKQQLKKNGVKVLSATERITDSPEGILIEGLLESMDEYFSRELSRKCKRGIRESIIKGHNFGGRVLYGYDRKDKRFVVNEEQAVNVRRIFKSYLSGCTIQSIADQLNADGYRTNYGNEFKRYTVSDILHNDKYTGIHYIDGIEEPETCPAIISQTTFERVKEKLNQSAHRSREHTTGHTYALSGLLQCGVCGRYVCGSSVERKYFYYACRSREHAENSVHIHADKLEQVVIDALQTFFTEEQVSTLAERLYQIYTTDMDGKPDRSKRLNEIEKQIQGTVNALIACPSSKALQEKLTQLEEQKAEIEKMPILQPQLKKEHFENYFRWLALRLEHIEDRQTFFHTVIHKVLVYPEKAVIILNMTDEMADPPKREQVEAFMSNVGEVSLYPCPNCTIVKPSPSRFCDICTAPQRSNAISLIWNFCPSSSMKFSIKP

SEQ ID NO: 4180 - protein, 523 aa, Unknown
  Description of Unknown: Integrase B4181 sequence
  PTHR30461:SF3,SM00857,G3DSA:1.10.10.2600,IPR036162,PF13408, PS51737,G3DSA:3.40.50.1390,IPR025827,IPR006119,IPR038109, PF07508,IPR011109,SSF53041,PTHR30461,cd00338, PF00239
MPRKPAKHPAKPKRGKKLEIEEPGVLYGRYSSHNQKDISIEQQFEKCYELAAEYGIRIIDTYADRAVSGRTDKRVDFQRMMADAAKGKFRYVLAWKSNRIGRNMLEALVNEARFQELGVRVLYVEEDFDDTAAGRFAARSMMNVNQFYSENMAEDIKRGLYDNAANCMVTNGHLPYGYKADETLHYAIDEPRAAVIREIFTRVSCGEAFVDIMSSLNARGITTSYGRPWGRSSFQKILSNERYRGIYIYGDVRIEGGIPRIVSDELYFKVQEAITTKKNPQGRHRVNGDYLLTGKLFCGHCKSPMTGISGTGRAGKLHFYYVCQKRRTEKPCHKKNVRRDVIELKIAKAIRDYALKDDIIEWIADSCVEDHDRRVSESHLSVFEDQLAEVNRSIKNVMSAIEKGIITETTKGRLMELEAERTAIEGKICAAKAAIVPTNRERLVEWLRSLREGDVHDKKYQAGLFDTFLVAAYLYDDNRVKIVFSFAGDKNTIEIPLEDVIDSIDDEASCVRLSSTLSHQNPH

SEQ ID NO: 4181 - protein, 523 aa, Unknown
  Description of Unknown: Integrase B4182 sequence
  PTHR30461:SF3,SM00857,G3DSA:1.10.10.2600,IPR036162,PS51737, G3DSA:3.40.50.1390,IPR006119,IPR038109,PF07508,IPR011109, SSF53041,PTHR30461,Coil,PS51736,cd00338, PF00239
MVSFDSIIIYLRKSRSDDPAQTVEEVLAKHEHILQDYCMKEYGKAIPEKRIYREVVSGETIQDRPVMQQLLKELEAENISGVLIVEPQRLSRGDLQDCGQIINSFRYTNTAVITPGKTYDLSDEYDRKFFEVELTRGNDYLEYTKKILSRGRVASVRQGNYICSVRPYGYRKITLGSGKDKCHTLEIIPEEADAIRLMYHLYLDENMGFTNIARTLDSLHIKPLKSDNWSAATIRDMIDNPIYIGKVVWNSRKVVKKWENEQITKVRPRNKGDDVICVNGRHEAIIDEHTFEAARNKRGLTPKIKKFKELRNPLAGLLFCGTCGHGMSMKKYVDKRSHTGKVTTVMLCNQQAVCHTKSAQYEDILAKIKVSLANAIFDFEIKLKEQENNNIDMHELRMSSLLDELNRLYSKDVRQKDAYEDGIYTKEEYIERNSKLQERILNVKEDIADEKKNIPVKIDYEDKIITFKDCLASLDDPNISAADKNILLKSCIDKIIYYNDMPSKPGIGRYIENSFRLEIFLKL

SEQ ID NO: 4182 - protein, 523 aa, Unknown
  Description of Unknown: Integrase B4183 sequence
  PTHR30461:SF3,SM00857,G3DSA:1.10.10.2600,IPR036162,PS51737, G3DSA:3.40.50.1390,IPR006119,IPR038109,PF07508,IPR011109, SSF53041,PF00239,PTHR30461,PS51736,Coil, cd00338
MVSFDSIIIYLRKSRSDDPAQTVEEVLAKHERILQDYCIKEYGKAIPEKRIYREVVSGETIQDRPVMQQLLKELETGNISGVLIVEPQRLSRGDLQDCGQIINSFRYTNTAVITPGKTYNLSDEYDRKFFEMELTRGNDYLEYTKKILSRGRVASVRQGNYICSVRPYGYRKITLGSGKDKCHTLEIIPEEADAIRLMYHLYLDENMGFTNIARTLDSLHIKPLKSDNWSAATIRDMIDNPIYIGKVVWNSRKVVKKWENEQITKVRPRNKGDDVICVNGRHEAIIDEHTFEAARNKRGLTPKVKKFKELRNPLAGLLFCGTCGHGMSMKKYVDKRSHTGKVTTIMLCNQQAICHTKSAQYEDILAKIKVSLANAISDFKIKLKEQENNNIDMHELRIASLEEELNRLYNKDVRQKDAYEDGIYTKEEYIERNSKLQERILNVKEEIADEKNNVPVKIDYEDKIMTFKDCLSSLDDSDISAADKNILLKSCIDKIIYYNDMPSKPGIGRYIENSFRLEIFLKL

SEQ ID NO: 4183 - protein, 523 aa, Unknown
  Description of Unknown: Integrase B4184 sequence
  cd03768,PTHR30461:SF3,SM00857,IPR036162,PF13408, PS51737,IPR025827,G3DSA:3.40.50.1390,IPR006119,PF07508, IPR011109,SSF53041,PTHR30461,PS51736,Coil, PF00239
MRFFSYGRKSVFSDKSDSIDNQFRMNREYCESKFSGQVDSWQQFSDEDFTGANTSRPDLQRMLSFIKGGFCDVLVVYQLDRLSRDVRDFANIYALLEEHGVMFISIKENIDTTTPIGRAMMYVTVVFAQMERETIAARVTDNMLGLAKKGYWTGGNPPVGYVRKHIVVNGKKHCSIEVDPDGARYVTQIFDTFLAYNCSLQGMETRFKNQGIRTQSGKFFSTTQLHKMLTMPYCVEATPEVYDFYAAKGCIMDPGSPREMWDGSVGVIIYGRSTEKNKKHQAQPPEKWTVCLGKHKPFMPAEKWLAVQSRFTQNKCIKDAKWPVPLLKGVLRCKCGNLMQVSRKKKVDGTCSSWYYCRKRMRQGVDACDMGQIKCDLLDEKVLELFRGITADPALIQKFVKAEAPADVPDLKAAQARVSACERKIGRLAASLALAEDSAASKYIIAEMERLDVELGALKREASLAEMESHRAAASAKDAKATAAEIAKLIHGLDGFDDKEKNAIARAVIQECTWDGERLFITL

SEQ ID NO: 4184 - protein, 523 aa, Unknown
  Description of Unknown: Integrase B4185 sequence
  PTHR30461:SF3,SM00857,G3DSA:1.10.10.2600,IPR036162,PF13408, PS51737,G3DSA:3.40.50.1390,IPR025827,IPR006119,IPR038109, PF07508,IPR011109,SSF53041,PTHR30461,cd00338, PF00239
MPTSKNTARKYAAGGGSDNSCGVEPLRAVIYARYSSSGQREESIEGQLRDCYEFAKKHGIIVIGEYIDKAMTGRVDRRPDFQRMMKDSEKGRFNCVLLWKMDRFARNRYDSAMYKYKLKKNGIRIFYAKETIPDGPEGIILESVMEGYAEYYSENLAQNVKRGNYDSALELKTLGKTCLGLKTGPDGRYMIDQAEATIVRRIFEEYAEGERAKDIYERLNSEGYRTSRGGKFNKNSLRRILSNKKYIGVYEYEDIYVENGIPAIITDRDLFERVQKMLKINHDAPARGKAQNFLLTTKLFCGLCGSPMIGDGGTSHTGKAYAYYSCTKRKRGRSCKKESVPKDWIEDLVVGELVKIVHNDELIEQIADRVMEYQKREKDQSGLHALEIRQKENEKAISNMLAAIEAGIITPSTKTRLMELEADRADIEKGIAHELLAEPEFERDQIIYFLERFRSGDINDEAYRIMLVDTFLNSVYLYDDDHLVLVMNYSGENCKVDLKLVEGAVSGDGCKGSAFAPSSAVDL

SEQ ID NO: 4185 - protein, 523 aa, Unknown
  Description of Unknown: Integrase B4186 sequence
  PTHR30461:SF3,cd00338,SM00857,G3DSA:1.10.10.2600,IPR036162, PS51737,G3DSA:3.40.50.1390,IPR006119,IPR038109,PF07508, IPR011109,SSF53041,PTHR30461,PS51736,Coil, PF00239
MVSFDSIIIYLRKSRSDDPAQTVEEVLAKHERILQDYCMKEYGKAIPEKRIYREVVSGETIQDRPIMQQLLKELEAENISGVLIVEPQRLSRGDLQDCGQIINSFRYTNTAVITPGKTYDLSDEYDRKFFEMELTRGNDYLEYTKKILSRGRVASVRQGNYICSVRPYGYRKITLGSGKDKCHTLEIIPEEADAIRLMYHLYLDENMGFTNIARTLDSLHIKPLKSDNWSAATIRDMIDNPIYIGKVVWNSRKVVKKWENEQITKVRPRNKGDDVICVNGRHEAIIDERTFEAARNKRGLTPKVKKFKELRNPLAGLLFCGTCGHGMSMKKYVDKRSHTGKITTVMLCNQQAVCHTKSAQYEDILAKIKISLANAISNFKIKLKEQENNNIDMHELRIASLEEELNRLYNKDVRQKDAYEDGIYTKEEYIERNSKLQERILNVKEEIADEKNNVPVKIDYEDKIMTFKDCLSSLDDSDISAADKNILLKSCIDKIIYYNDMPSKPGIGRYIENSFRLEIFLKL

SEQ ID NO: 4186 - protein, 523 aa, Unknown
  Description of Unknown: Integrase B4187 sequence
  cd03768,PTHR30461:SF3,SM00857,IPR036162,PF13408, IPR025827,PS51737,G3DSA:3.40.50.1390,IPR006119,PF07508, IPR011109,SSF53041,PTHR30461,PS51736,Coil, PF00239
MRFFSYGRKSVFSDKSDSIDNQFRMNREYCESKFSGQVDSWQQFSDEDFTGANTSRPDLQRMLSFIKGGFCDVLVVYQLDRLSRDVRDFANIYALLEEHGVMFISIKENIDTTTPIGRAMMYVTVVFAQMERETIAARVTDNMLGLAKKGYWTGGNPPVGYVRKHIVVNGKKHCSIEVDPDGARYVTQIFDTFLAYNCSLQGMETRFKNQGIRTQSGKFFSTTQLHKMLTMPYCVEATPEVYDFYAAKGCIMDPGSPREMWDGSVGVIIYGRSTEKNKKHQAQPPEKWTVCLGKHKPFMPAEKWLAVQSRFTQNKCIKDAKWPVPLLKGVLRCKCGNLMQVSRKKKVDGTCSSWYYCRKRMRQGVDACDMGQIKCDLLDEEVLELFRGITADPALIQKFVKAEAPADVPDLKAAQARVSACERKIARLAASLALAEDSAASKYIIAEMERLDVELGALKREASLAEMESHRAAASAKDAKATAAEIAKLIHGLDGFDDKEKNAIARAVIQECAWDGERIFITL

SEQ ID NO: 4187 - protein, 523 aa, Unknown
  Description of Unknown: Integrase B4188 sequence
  PTHR30461:SF3,SM00857,G3DSA:1.10.10.2600,IPR036162,PS51737, G3DSA:3.40.50.1390,IPR006119,IPR038109,PF07508,IPR011109, SSF53041,PF00239,PTHR30461,PS51736,Coil, cd00338
MVSFDSIIIYLRKSRSDDPAQTVEEVLAKHERILQDYCMKEYGKAIPEKRIYREVVSGETIQDRPVMQQLLKELEAENISGVLIVEPQRLSRGDLQDCGQIINSFRYTNTAVITPGKTYDLSDEYDRKFFEMELTRGNDYLEYTKKILSRGRVASVRQGNYICSVRPYGYRKITLGSGKDKCHTLEIIPEEADAIRLMYHLYLDENMGFTNIARTLDSLHIKPLKSDNWSAATIRDMIDNPIYIGKVVWNSRKVVKKWENEQITKVRPRNKGDDVICVNGRHEAIIDERTFEAARNKRGLTPKVKKFKELRNPLAGLLFCGTCGHGMSMKKYVDKRSHTGKITTVILCNQQAVCHTKSAQYEDILAKIKISLANAISNFKIKLKEQENNNIDMHELRIASLEEELNRLYNKDVRQKDAYEDGIYTKEEYIERNSKLQERILNVKEEIADEKKNIPVKIDYEDKIITFKDCLASLDDPNISAADKNILLKSCIDKIIYYNDMPSKPGIGRYIENSFRLEIFLKL

SEQ ID NO: 4188 - protein, 523 aa, Unknown
  Description of Unknown: Integrase B4189 sequence
  PTHR30461:SF3,cd00338,SM00857,G3DSA:1.10.10.2600,IPR036162, PF13408,PS51737,G3DSA:3.40.50.1390,IPR025827,IPR006119, IPR038109,PF07508,IPR011109,SSF53041,PTHR30461, PS51736,Coil,PF00239
MARKKNIAAGLDAVIYARYSSHNQREVSIEQQIAECTKHAAALGLRIVGTYEDRAISGKTDNRPRFQQMMRDAEKGKFQAVVAWKSNRIGRNMLQAMVNEAKLDDYGVKVFYAEEDFDDTAAGRFALRNMMNVNQFYSENMAEDITRGLYDNANKCMANGRQPLGYKRGADGKVMLDEPAAAVVREIFNRVATGDLFVDIARDLNAKGIKTSKGATWNKGSFQSICQNERYKGIYIYGNVRIVDGIPRIVSDELWYKVQEAMRMKKNPVGTRHRVGAEDYLLTGKLRCGHCGSYMTGVSGTSRNGELHYYYTCQKRRTEHACNKKNVRRDVIEPAIAQAIKMYCLTDDVIEWVANRTVEYWEKHDNDLHIEALEQQLEENKKATSNMLKAIEMGIITDATRSRMIELETEQSKLAVQLNAAKADVVKIDRDDLIDELQIFRDMDVNNRSVQAELFKDFLVAAYIYDDNRLKLVFSFMGKDNSVEIPLETGEDPPDGGDSPDAKMFVLTPDCSTIGSNKSYKHR

SEQ ID NO: 4189 - protein, 523 aa, Unknown
  Description of Unknown: Integrase B4190 sequence
  PTHR30461:SF3,cd00338,SM00857,G3DSA:1.10.10.2600,IPR036162, PF13408,IPR025827,PS51737,G3DSA:3.40.50.1390,IPR006119, IPR038109,PF07508,IPR011109,SSF53041,PTHR30461, PS51736,Coil,PF00239
MSIKAVSYCRYSTDNQTENSIMYQMAAAEEYCKKHGMVLIDVYSDEAKTGTNTNREGLQRLIKDCDTSKFDAIIIYDQSRLSRNISDWFELRQLFSSKGKQLYSCNEQLSSDYLNSNAFLSEGIHALFAQNHVIETRRKTLDGVKSKAKQAGFCGGTPPLGYDIVNGEYVINEKEAPAIRKMFEMYALGKSYDDIMQVLYREGYRSKRGNKISSNAIYYLLRNERYVGIYYWNKYQYTVMRKRITRKENPEIVRIENAIPPIIDKETWTMVQEQLSKNKGASTRTKRQYLLSGLIKCGYCGGTYTGFASKNRRSGEETVYYTCSTKERLKTCKAKNVRGDEIESFVYYTLKDRIFNQDLAEQVADMIINQSKDIVTFDSAAVKREISKKKQAINNLFQAIENGLNAEITTDRINTLQDEIKALELSLEQSMKQNDTVIDREKLIQSLLEDAKKIDLDFEHRRAIIRKYVVKIEITDDTVNLHCIGDSSTTGGATPQYGVLLFAIDRISLKNIVRQVPTPTSKV

SEQ ID NO: 4190 - protein, 523 aa, Unknown
  Description of Unknown: Integrase B4191 sequence
  cd00338,SM00857,G3DSA:1.10.10.2600,IPR036162,PF13408, PS51737,G3DSA:3.40.50.1390,IPR025827,IPR006119,IPR038109, PF07508,IPR011109,SSF53041,PTHR30461,PS51736, Coil,PF00239
MNESVCIYLRKSRADREAEAHGEGETLARHQRILLDLAKKKEYIVGAIYREVVSGETIADRPVMQQLLHEVESGMWDGVLVVEVERLARGDTIDQGIVSRAFQYSDTKIITPTKIYDPNNEFDEEYFEFGLFMSRREYKTIKRRLNAGRISSVKEGKYCGNKPPYGYERVKLEKEKGYTLRPVPAQSEIVKMIYTWYAGDGCEQIGVAKITRKLNEMGIESSLGGDWTPASIQGILTNPVYIGKIRWNGRKTVKTIQNGQVIKTRPRSKDTLICEGLHPAIISEVLYDSVQEIRKKNPPRPISIKNSIRNPLSGIVYCSKCGRAMVRRPYQKCGQEDTLMCPYTSCPTVSSKLSLVEKAVIDGIREIVEEYKLNNDINISSKAIDLTIISKQNLIHEKENELESLNAQKAKQYDLLEQGIYTTEVFLERAKTISASIQSCSNTIEKLKEEIKHDENIIKQQSDFIPRCEELLDNYWSLDTESKNKMLKSLIEKVAYSKDNKNAYGKGNEIGFQLDIFPKIQEK

SEQ ID NO: 4191 - protein, 523 aa, Unknown
  Description of Unknown: Integrase B4192 sequence
  cd03768,PTHR30461:SF3,SM00857,IPR036162,PF13408, IPR025827,PS51737,G3DSA:3.40.50.1390,IPR006119,PF07508, SSF53041,IPR011109,PTHR30461,PS51736,Coil, PF00239
MRFFSYGRKSVFSDKSDSIDNQFRMNREYCESKFSSQVDSWQQFSDEDFTGANTSRPDLQRMLSFIKNGFCDVLVVYQLDRLSRDVRDFANIYALLEEHGVMFISIRENIDTTTPIGRAMMYVTVVFAQMERETIAARVTDNMLGLAKKGYWTGGNPPVGYVRKHIVVNGKKHCSIEVDPDGARYVTQIFDTFLAYNCSLQGMETRFKNQGIRTQSGKFFSTTQLHKMLTMPYCVEATPEVYDFYAAKGCIMDPGSPREMWDGSVGVIIYGRSTEKNKKHQVQPPEKWTVCLGKHKPFMPAEKWLAVQSRFTQNKCIKDAKWPVPLLKGVLRCKCGNLMQISRKKKGDGTCSSWYYCRKRMRQGVDACDMSQIKCDLLDEKVLELFRGIAADPGLIQKFVKTKAPTDIPDLKAAQARLATCERKIGRLAASLALAEDSAASKYIIAEMERLDVELGALKREASLAEMESHRAAASAKDAKATAAEIAKLIHGLDGFDDKEKNAIARAVIQECTWDGERLFITL

SEQ ID NO: 4192 - protein, 523 aa, Unknown
  Description of Unknown: Integrase B4193 sequence
  SM00857,G3DSA:1.10.10.2600,IPR036162,PF13408,IPR025827, G3DSA:3.40.50.1390,PS51737,IPR006119,IPR038109,PF07508, SSF53041,IPR011109,PTHR30461,Coil,PS51736, cd00338,PF00239
MPDYAIYLRKSRKDNDAEQRGEGETLARHRKLLLDYAKCEGLHIAKIYEEVVSGESIATRPQMQLLLADVEQGLYDGVLVVEVERLARGDTMDQGLVAQTFKYSNTKIYTPMKVYDPNNEFDEEYFEFGLFMSRREYKTINRRLQRGRRASASEGKYIAGRAPYGYEKIKIPNDKGNTLRIIPEQAEVIKQIYDWYVNGLDGEDVGLTKIATKLNSMGIKPYRNDYWGKEALRDIITNPVYAGYIRWGYRRNKKTVVDGKTITSRPVTLDENCVLSKGLHEAIVTQELYDKAQCKIKSVPPPPVGYKKELKGSLAGMVICKKCGHKMTLRNPSTKGKPPYLVCHYRYCDNVSTPYDIVEKRVLDTLKEWAEKYKLKEKQSKKNNAGSIDMLKSSVESAKKKVATLQQQLDGMCDLLEQGIYTPDMFRQRSVSVTERITKAKAEYEQLSEQLVSMEKLLTEKSEFIPKVEHVLKIYDTLSTPADKNRVLKEVIDHAEYSKAKSGAYKGVSVDDFNLTVFPKMPL

SEQ ID NO: 4193 - protein, 523 aa, Unknown
  Description of Unknown: Integrase B4194 sequence
  cd03768,PTHR30461:SF3,SM00857,IPR036162,PF13408, PS51737,G3DSA:3.40.50.1390,IPR025827,IPR006119,PF07508, IPR011109,SSF53041,PTHR30461,PS51736,Coil, PF00239
MRFFSYGRKSVFSDKSDSIDNQFRMNREYCESKFSGQVDSWQQFSDEDFTGANTSRPDLQRMLSFIKGGFCDVLVVYQLDRLSRDVRDFANIYALLEEHGVMFISIKENIDTTTPIGRAMMYVTVVFAQMERETIAARVTDNMLGLAKKGYWTGGNPPVGYVRKHIVVDGKKHCSIEVDPDGARYVTQIFDTFLAYNCSLQGMETRFKNQGIRTQSGKFFSTTQLHKMLTMPYCVEATPEVYDFYAAKGCIMDPGSPREMWDGSVGVIIYGRSTEKNKKHQAQPPEKWTVCLGKHKPFMPAEKWLAVQSRFTQNKCIKDAKWPVPLLKGVLRCKCGNLMQVSRKKKVDGTCSSWYYCRKRMRQGVDACDMGQIKCDLLDEKVLDLFRGITADPGLIQKFVKTKAPDDIPNLKAAQARVAACERKIGRLAASLALAEDSTASKYIIAEMERLDVELGALKREASLAEMENHRATANAKDAKATAVEIAKLIHGLEGFDDKERNAIARAVIQECTWDGERLFITL

SEQ ID NO: 4194 - protein, 523 aa, Unknown
  Description of Unknown: Integrase B4195 sequence
  cd03768,PTHR30461:SF3,SM00857,IPR036162,PF13408, IPR025827,PS51737,G3DSA:3.40.50.1390,IPR006119,PF07508, IPR011109,SSF53041,PTHR30461,PS51736,Coil, PF00239
MRFFSYGRKSVFSDKSDSIDNQFRMNREYCESKFSGQVDSWQQFSDEDFTGANTSRPDLQRMLSFIKGGFCDVLVVYQLDRLSRDVRDFANIYALLEEHGVMFISIKENIDTTTPIGRAMMYVTVVFAQMERETIAARVTDNMLGLAKKGYWTGGNPPVGYVRKHIVVNGKKHCSIEVDPDGARYVTQIFDTFLAYNCSLQGMETRFKNQGIRTQSGKFFSTTQLHKMLTMPYCVEATPEVYDFYAAKGCIMDPGSPREMWDGSVGVIIYGRSTEKNKKHQAQPPEKWTVCLGKHKPFMPAEKWLAVQSRFTQNKCIKDAKWPVPLLKGVLRCKCGNLMQVSRKKKVDGTCSSWYYCRKRMRQGVDACDMGQIKCDLLDEEVLELFRGITADPALIQKFVKAEAPADVPDLKAAQARVSACERKIGRLAASLALAEDSAASKYIIVEMERLDVELGALKREASLAEMEGHRAAASAKDAKATAAEIAKLIHGLEGFDDKEKNAIARAVIQECTWDGERLFITL

SEQ ID NO: 4195 - protein, 523 aa, Unknown
  Description of Unknown: Integrase B4196 sequence
  PTHR30461:SF3,SM00857,IPR036162,PF13408,IPR025827, PS51737,G3DSA:3.40.50.1390,IPR006119,PF07508,IPR011109, SSF53041,PTHR30461,Coil,PS51736,cd00338, PF00239
MNICCYGRKSIYSDHSDSIDNQFRMCRDYVEMKFSGQVDSFLEYQDEAFTGANIKRPDLQRLLVDIAAGNCDVLIVYQLDRLSRDVRDFANIYAILEEHHVKFISIKENIDTSTPIGRAMMYVTVVFAQMERETIAARVADNMIGLAKKGYWTGGNPPEGYVRTRIEANGKKHCSIVPDPEGVKYVTWIFDTFLQNGYSLQSMETAFKKQGIRTRTGAFFSTTQLHKILTMPYCAQATPEVYDYYAAKGCQMDIESPREQWDGTCGVMIYGRTTQKNKKHQMQPPEKWLVCLGAHEPFMPADKWLSVQARFAQNKFDKTMKYDVPLLKGVLRCSCGSIMCVSRKKKKEGVSSWYYCLKRMRQGKEVCDSHQIKCELLDQKVLELLQSIERDPALIHQFAEQNAEVLAGPDPKVLASKISTCQTRIDRLVSSLSLAAESSAQKYILAELERLDLEIQALRREHNLALTTERNRTRQQQDTFSKVSEISRLIGDMDSFSASEKNAIVKDVIKKCVWDGESLSIML

SEQ ID NO: 4196 - protein, 523 aa, Unknown
  Description of Unknown: Integrase B4197 sequence
  cd03768,PTHR30461:SF3,SM00857,G3DSA:1.10.10.2600,IPR036162, PF13408,PS51737,G3DSA:3.40.50.1390,IPR025827,IPR006119, IPR038109,PF07508,IPR011109,SSF53041,PTHR30461, PS51736,Coil,PF00239
MIAIYTRQSLFKKDSLSTSQQADLCIASCCGEEYEIFEDLGYSGKNLNRPAFEQMMKKVRNGQITKILVYKLDRISRNISDFANLLCELQKCSCEFQSVSENFDTSTPIGRAMIYICMVFAQMERENTSQRVHDNYYYRTELGFWGGGYAPYGYRLTKLKYKGKYHTVLEPDEKTAPLVKQIYEWYLEPNNSISTILDKLNNQLHIPSRKGALWSSRVIADILSRPLYAPNDMAIYNYLLGIGANISNAPEEFDGMASVDMYGKKNASASRHKRTRSADEMYCNISNHEAIIDSDTWLRVQYKRKSLLVTPSRAGTGKNSWFTGLMKCGCCGAGVSYTNSSGTQGYYLCSTKKNRGYYTCEQKPASKKKTDPMIIQNIIEHYSKQSVIDRIRNAEIKESERTASDLKERNDLMIKLNQVQTEIDNLMQSLSQGNEVLIKYINEKIVDLDKKKSSIASRLSEIDSGNTKNQEEVSLLKQLNLVLDDIPTTLQNGTFDEIKNLCHILVKRIVFQKDGQIDIEYTI

SEQ ID NO: 4197 - protein, 523 aa, Unknown
  Description of Unknown: Integrase B4198 sequence
  cd03768,PTHR30461:SF3,SM00857,IPR036162,PF13408, IPR025827,G3DSA:3.40.50.1390,PS51737,IPR006119,PF07508, SSF53041,IPR011109,PTHR30461,PS51736,Coil, PF00239
MRFFSYGRKSVFSDKSDSIDNQFRMNREYCESKFSGQVDSWQQFSDEDFTGANTSRPDLQRMLSFIKGGFCDVLVVYQLDRLSRDVRDFANIYALLEEHGVMFISIKENIDTTTPIGRAMMYVTVVFAQMERETIAARVTDNMLGLAKKGYWTGGNPPVGYVRKHIVVNGKKHCSIEVDPEGARYVTQIFDTFLAYNCSLQGMETRFKNQGIRTQNGKFFSTAQLHKMLTMPYCVEATPEVYDFYAAKGCIMDPGSPREMWDGSVGVIIYGRSTEKNKKHQAQPPEKWTVCLGKHKPFMPAEKWLAVQSRFTQNKCIKDAKWPVPLLKGVLRCKCGNLMQVSRKKKVDGTCSSWYYCRKRMRQGVDACDMGQIKCDLLDGEVLELFRGITADPALIQKFVKAEAPADVPDLKAAQARVSACERKIGRLAASLALAEDSAASKYIIAEMERLDVELGALKREASLAEMESHRAAASAKDAKATAAEIAKLIHGLDGFDDKEKNAIARAVIQECTWDGERLFITL

SEQ ID NO: 4198 - protein, 523 aa, Unknown
  Description of Unknown: Integrase B4199 sequence
  PTHR30461:SF3,cd00338,SM00857,G3DSA:1.10.10.2600,IPR036162, PF13408,PS51737,IPR025827,G3DSA:3.40.50.1390,IPR006119, IPR038109,PF07508,SSF53041,IPR011109,PTHR30461, PS51736,Coil,PF00239
METVKNITVIPARRRVGNTAKESEIPKLRVAAYCRVSTDSDEQATSYEAQVEHYTDYIRKNPEWEFAGIFADDGISGTNTKKREEFNRMIDEAMAGKIDMIVSKSISRFARNTLDCLKYIRQLKEKNIPVYFEKENINTMDAKGEVLLTIMASLAQQESQSLSQNVKLGFQYRYQQGQITVNHNRFLGYTKDEKGQLIIEPDEAEVVKRIFREYLEGASLQQIGRGLEADGILTGAGKKKWRAETLQKILKNEKYIGDALFQKTYTVDFLEKKRVPNNGLVLQYYVENSHEAIIPRELYMQVQEEMVRRANLHSGQNRKKRVYSSKYALSSIVYCSKCGDIYRRVVWNNRGKHSIVWRCCTRVEHGPGACNADAIHESELQNLVVRAINMALGQKDTMYDVLQRNVEAVLTGTDGISLDEIDARLEELQRELLNVANANGNYDSIVDEIYRLREAKQNAQVEGATREGMKQRISEMQQFFAEQTQDITEYDEQLVRRLIEKITVYDEKVIVEFKSGTNVDIHR

SEQ ID NO: 4199 - protein, 523 aa, Unknown
  Description of Unknown: Integrase B4200 sequence
  PTHR30461:SF3,SM00857,G3DSA:1.10.10.2600,IPR036162,PS51737, G3DSA:3.40.50.1390,IPR006119,IPR038109,PF07508,SSF53041, IPR011109,PTHR30461,Coil,PS51736,cd00338, PF00239
MPNTESFTVNEVLVYLRKSRSDSPDMSVEEVLRKHEEMIQQYASTHFCSPIPEKNIFREVVSGETIDSRPQMKNLLKMIESEQFKAVLVVEPQRLSRGDLEDCGRLINILRYTNTTVLTLTHSFNLQEEYERKFFEMEITRGNDYLEYTKRILRRGREASVAKGNYIGSVDPYGYKKTVIKKDGITCHTLEIIPEEADTVKLIHELYAYTPGGIGFTNIAHKLDAMHIKPKKAAHWTPAIISSILCNPLYLGMVRWNNRKVVKYINEGQLAKARPQNSEAKYYKGLHEPIITHELYDACMARRGTNPSLRRNKELCNPFAGLLYCGTCGHAMSLKIYKNHNSVSQMMLCNHQAYCHTKSVLYSAFLRRFISSMEDTLNDFELAQKSDDGRTQAISKTIVINLENKLKKLNEKDARQKDAYEDGIYSKEEFLKRNVRTQQDIASTIIALEDARAKKADIVDYEEKIRRFKDCLHALNDPELSAAEKNRFLKSCVDKILYYNNMESKAGIGRYIENVFSLEIQYK

SEQ ID NO: 4200 - protein, 523 aa, Unknown
  Description of Unknown: Integrase B4201 sequence
  cd03768,PTHR30461:SF3,SM00857,IPR036162,PF13408, IPR025827,PS51737,G3DSA:3.40.50.1390,IPR006119,PF07508, IPR011109,SSF53041,PTHR30461,PS51736,Coil, PF00239
MRFFSYGRKSVFSDKSDSIDNQFRMNREYCESKFSGQVDSWQQFSDEDFTGANTSRPDLQRMLSFIKGGFCDVLVVYQLDRLSRDVRDFANIYALLEEHGVMFISIKENIDTTTPIGRAMMYVTVVFAQMERETIAARVTDNMLGLAKKGYWTGGNPPVGYVRKHIVVNGKKHCSIEVDPDGARYVTQIFDTFLAYNCSLQGMETRFKNQGIRTQSGKFFSTTQLHKMLTMPYCVEATPEVYDFYAAKGCIMDPGSPREMWDGSVGVIIYGRSTEKNKKHQAQPPEKWTVCLGKHKPFMPAEKWLAVQSRFTQNKCIKDAKWPVPLLKGVLRCKCGNLMQVSRKKKVDGTCSSWYYCRKRMRQGVDACDMRQIKCDLLDEKVLELFRGITADPALIQKFVKAEAPADVPDLKAAQARVSACERKIGRLAASLALAEDSAASKYIIAEMERLDVELGALKREASLAEMESHRAAASAKDAKATAAEIAKLIHGLDGFDDKEKNAIARAVIQECTWDGERLFITL

SEQ ID NO: 4201 - protein, 523 aa, Unknown
  Description of Unknown: Integrase B4202 sequence
  PTHR30461:SF3,SM00857,G3DSA:1.10.10.2600,IPR036162,PF13408, IPR025827,G3DSA:3.40.50.1390,PS51737,IPR006119,IPR038109, PF07508,SSF53041,IPR011109,PTHR30461,Coil, PS51736,cd00338,PF00239
MSVRNIIIYLRKSRSDDPGMSVEDVLAKHERQLQEYAISEYGEQIPEDHIFREVVSGETIADRPVMKQVMQLLEAGNITAVLVIEPQRLSRGDLEDCGRIINTFRYTHTLVATPPKTYDLTNEYDRKFFEMELMRGNDYLEYTKKILNRGRVASVRQGNFIGSVAPYGYKRVRLGSGKDISYTLEIIPEEAEFLKLMYHLYLDEGYGFTRIAKHLDSIGAKPRKAEHWSPAAIKDMLENPVYIGKIRWNWRKTEKVMTNGQIIKTRPKTKDEAQWIYVDGKHKAIIDESLFRAVIDRRGKNPCVRKSKELINPFAGLLFCGTCGKAMSYKHFKQYRGKSENICTSMVCNNQSHCKTKSVLYDAFLDRVISTLEDTITDFKIKLQNDDCDSAKLHANVVKNLELELQKLQQKDFRQKDAYEDGIYTKEEYAARNAKLQEQIATTMDSLSKAKESVLPSVDYNEKIMRFTDCLNALKSPDVSATEKNMLLKSCINKIVYYNSMPSKAGAGRWIDNVFSLDIFLNL

SEQ ID NO: 4202 - protein, 523 aa, Unknown
  Description of Unknown: Integrase B4203 sequence
  PTHR30461:SF3,SM00857,G3DSA:1.10.10.2600,IPR036162,PS51737, G3DSA:3.40.50.1390,IPR006119,IPR038109,PF07508,IPR011109, SSF53041,PF00239,PTHR30461,PS51736,Coil, cd00338
MVSFDSIIIYLRKSRSDDPAQTVEEVLAKHEHILQDYCMKEYGKAIPEKRIYREVVSGETIQDRPIMQQLLKELEAENISGVLIVEPQRLSRGDLQDCGQIINSFRYTNTAVITPGKTYDLSDEYDRKFFEMELTRGNDYLEYTKKILSRGRVASVRQGNYICSVRPYGYRKITLGSGKDKCHTLEIIPEEADVIRLMYHLYIDENMGFTNIARTLDSLHIKPLKSDNWSAATIRDMIDNPIYIGKVVWNSRKVVKKWENEQITKVRPRNKGDDVICVNGRHEAIIDERTFEAARNKRGLTPKVKKFKELRNPLAGLLFCGTCGHGMSMKKYVDKRSHTGKITTVMLCNQQAVCHTKSAQYEDILAKIKISLANAISDFKIKLKEQENNNIDMHELRIASLEEELNRLYNKDVRQKDAYEDGIYTKEEYIERNSKLQERILNVKKEIADEKNNVPVKIDYEDKIMTFKDCLSSLDDSDISAADKNILLKSCIDKIIYYNDMPSKPGIGRYIENSFRLEIFLKL

SEQ ID NO: 4203 - protein, 523 aa, Unknown
  Description of Unknown: Integrase B4204 sequence
  cd03768,PTHR30461:SF3,SM00857,IPR036162,PF13408, IPR025827,G3DSA:3.40.50.1390,PS51737,IPR006119,PF07508, IPR011109,SSF53041,PTHR30461,PS51736,Coil, PF00239
MRFFSYGRKSVFSDKSDSIDNQFRMNREYCESKFSSQVDSWQQFSDEDFTGANTSRPDLQRMLSFIKGGFCDVLVVYQLDRLSRDVRDFANIYALLEEHGVMFISIKENIDTTTPIGRAMMYVTVVFAQMERETIAARVTDNMLGLAKKGYWTGGNPPVGYVRKHIVVNGKKHCSIEVDPDGARYVTQIFDTFLAYNCSLQGMETRFKNQGIRTQSGKFFSTTQLHKMLTMPYCVEATPEVYDFYAAKGCIMDPGSPREMWDGSVGVIIYGRSTEKNKKHQAQPPEKWTVCLGKHKPFMPAEKWLAVQSRFTQNKCIKDAKWPVPLLKGVLRCKCGNLMQVSRKKKVDGTCSSWYYCRKRMRQGVDACDMGQIKCDLLDEEVLELFRGITADPALIQKFVKAEAPADVPDLKAAQARVSACERKIGRLAASLALAEDSAASKYIIAEMERLDVELGALKREASLAEMESHQAAASAKDAKATAAEIAKLIHGLDGFDDKEKNAIARAVIQECTWDGERLFITL

SEQ ID NO: 4204 - protein, 523 aa, Unknown
  Description of Unknown: Integrase B4205 sequence
  cd03768,PTHR30461:SF3,SM00857,IPR036162,PF13408, IPR025827,PS51737,G3DSA:3.40.50.1390,IPR006119,PF07508, IPR011109,SSF53041,PTHR30461,PS51736,Coil, PF00239
MRFFSYGRKSIFSDKSDSIDNQFRMSREYCESKFSGQVDSWQQFSDEDFTGANADRPDLQRMLSFIKNGFCDVLVVYQLDRLSRDVRDFANIYALLEEHGVMFISIKENIDTTTPIGRAMMYVTVVFAQMERETIAARVTDNMLGLAKKGYWTGGNPPVGYVRKHIVVDGKKHCSIEVDPDGARYVTQIFDTFLAYNCSLQGMETRFKNQGIRTQGGKFFSTTQLHKMLTMPYCVEATPEVYDFYAAKGCIMDPGSPREMWDGSVGVIIYGRSTEKNKKHQVQPPEKWTVCLGKHKPFMPAEKWLAVQSRFSQNKCIKDAKWPVPLLKGVLRCKCGNLMQISRKKKGDGTCSSWYYCRKRMRQGIDACDMGQIKCDLLDEEVLELFRGIAADPGLIQKFVKTEAPADVPDLKAAQARVSVCERKIGRLAASLAMAEDSVASKYIIAEMERLDVELGALKREASLAEMESHRAAVSAKDAKATAAEIAKLIHGLEGFDDKEKNAIARAVIQECTWDGERLFITL

SEQ ID NO: 4205 - protein, 523 aa, Unknown
  Description of Unknown: Integrase B4206 sequence
  PTHR30461:SF3,SM00857,G3DSA:1.10.10.2600,IPR036162,PS51737, G3DSA:3.40.50.1390,IPR006119,IPR038109,PF07508,SSF53041, IPR011109,PTHR30461,Coil,PS51736,cd00338, PF00239
MPNTESFTVNEVLVYLRKSRSDSPDMSVEEVLRKHEEMIQQYASTHFHSPIPEKNIFREVVSGETIDSRPQMKNLLKMIESEQFKAVLVVEPQRLSRGDLEDCGRLINILRYTNTTVLTLTHSFNLQEEYERKFFEMEITRGNDYLEYTKRILKRGREASVAKGNYIGSVDPYGYKKTVIKKDGVTCHTLAIIPEEADTVKLIHELYAYTPEGIGFTNIAHKLDAMHIKPKKAAHWTPAIISSILCNPLYLGMVRWNNRKVVKYINEGQLAKARPQNSEAKYYKGLHEPIITQELYDACMARRGTNPSLRRNKELCNPFAGLLYCGTCGHAMSLKIYKNHNSVSQMMLCNHQAYCHTKSVLYSAFLRRFISSMEGTLNDFELAQKSDDGRAQAISKTIVVNLENKLKKLNEKDARQKDAYEDGIYSKEEFLVRNVKTQQDIASTIIALEDARAKKADIIDYEEKIRRFKDCLHALNDPELSAAEKNRFLKSCVDKILYYNNMESKAGIGRYIENVFSLEIQYK

SEQ ID NO: 4206 - protein, 523 aa, Unknown
  Description of Unknown: Integrase B4207 sequence
  PTHR30461:SF3,SM00857,G3DSA:1.10.10.2600,IPR036162,PS51737, G3DSA:3.40.50.1390,IPR006119,IPR038109,PF07508,IPR011109, SSF53041,PF00239,PTHR30461,PS51736,Coil, cd00338
MVSYDSIIIYLRKSRSDDPAQTVEEVLAKHERILQDYCMKEYGKAIPEKRIYREVVSGETIQDRPVMQQLLKELETGNISGVLIVEPQRLSRGDLQDCGQIINSFRYTNTAVITPGKTYDLSDEYDRKFFEMELTRGNDYLEYTKKILSRGRVASVRQGNYICSVRPYGYRKITLGTGKDKCHTLEIIPEEADTIRLMYHLYLDENMGFTNIARTLDSLHIKPLKSDNWSAATIRDMIDNPIYIGKVVWNSRKVVKKWENEQITKVRPRNKGDDVICVNGRHEAIIDEHTFEAARNKRGLTPKVKKFKELRNPLAGLLFCGTCGHGMSMKKYVDKRSHTGKITTVMLCNQQAVCHTKSAQYEGILAKIKVSLANAIFDFEIKLKEQENNNIDMHELRIASLEEELNRLYNKDVRQKDAYEDGIYTKEEYIERNSKLQERILNVKEDIADEKKNIPVKIDYEDKIITFKDCLASLDDPNISAADKNILLKSCIDKIIYYNDMPSKPGIGRYIENSFRLEIFLKL

SEQ ID NO: 4207 - protein, 523 aa, Unknown
  Description of Unknown: Integrase B4208 sequence
  SM00857,G3DSA:1.10.10.2600,IPR036162,PF13408,PS51737, G3DSA:3.40.50.1390,IPR025827,IPR006119,IPR038109,IPR011109, SSF53041,PTHR30461,Coil,PS51736,cd00338, PF00239
MVKNRAAIYARFSSHNQRSESIEIQVENSREYCKREGLQVVREYCDYAQTGRNVDRAEFQRMMSDAKLGLFDFVVIYKVTRIMRNRDEMALARIMLRKAGVEILYAGEEIASGSSGVLQLGMLEVLAEWESAIDSERIRDGIQKNAERCMANGRTLYGWDIVEGRYAINEREAAVLRRMKNLLFSGNSVAEIVRAVDGERSKRGAKFNQDTVTKLLKRVQNAGVYKYAGHEVEDGMPALWSQAEQDMINSILGDRHRPRRKIDSALEFPLSGKLYCARCGMPMAGTSGTSKNGSAYHYYKCRKCRRTVRRDLIEDAVVDMTYEAVKQTDVRKRIAKTLAGYEAERVTEEKPESYFIKKEIRRIDTAFERIWQAIEDGIAPPGGRERTTELKRQRAELEARLRVAEQSEALEPSVGDVLLWLDDLANDTTPLEILNEFVRFVEIDGKDVTVYFMFDELPDDFTPKQKKAEHPCYQRCSTNSLMVELMRKTANSTSTANRAAIQLDTCIVRVSKNWFVVVGTCQK

SEQ ID NO: 4208 - protein, 523 aa, Unknown
  Description of Unknown: Integrase B4209 sequence
  cd03768,PTHR30461:SF3,SM00857,IPR036162,PF13408, PS51737,G3DSA:3.40.50.1390,IPR025827,IPR006119,PF07508, SSF53041,IPR011109,PTHR30461,PS51736,Coil, PF00239
MRFFSYGRKSVFSDKSDSIDNQFRMNREYCESKFSSQVDSWQQFSDEDFTGANTSRPDLQRMLSFIKGGFCDVLVVYQLDRLSRDVRDFANIYALLEEHGVMFISIKENIDTTTPIGRAMMYVTVVFAQMERETIAARVTDNMLGLAKKGYWTGGNPPVGYVRKHIVVNGKKHCSIEVDPDGARYVTQIFDTFLAYNCSLQGMETRFKNQGIRTQNGKFFSTAQLHKMLTMPYCVEATPEVYDFYAAKGCIMDPGSPREMWDGSAGVIIYGRSTEKNKKHQLQPPEKWTVCLGKHKPFMPAEKWLAVQSRFTQNKCIKDAKWPVPLLKGVLRCKCGNLMQVSRKKKVDGTCSSWYYCRKRMRQGVDACDMGQIKCDLLDEEVLELFRGITADPALIQKFVKAEAPADVPDLKAAQARVSACERKIGRLAASLALAEDSAASKYIIAEMERLDVELGALKREASLAEMESHRAAASAKDAKATAAEIAKLIHGLDGFDDKEKNAIARAVIQECTWDGERLFITL

SEQ ID NO: 4209 - protein, 523 aa, Unknown
  Description of Unknown: Integrase B4210 sequence
  PTHR30461:SF3,cd00338,SM00857,G3DSA:1.10.10.2600,IPR036162, PF13408,IPR025827,G3DSA:3.40.50.1390,PS51737,IPR006119, IPR038109,PF07508,IPR011109,SSF53041,PTHR30461, PS51736,Coil,PF00239
MARKKNIAAGLDAVIYARYSSHNQREVSIEQQIAECTKHAAALGLRIVGTYEDRAISGKTDNRPRFQQMMRDAEKGKFQAVVAWKSNRIGRNMLQAMVNEAKLDDYGVKVFYAEEDFDDTAAGRFALRNMMNVNQFYSENMAEDITRGLYDNANKCMANGRQPLGYKRGADGKVMLDEPAAAVVREIFTRVAAGDLFVDIARDLNAKGIKTSKGATWNKGSFQSICQNERYKGIYIYGNVRIVDGIPRIVSDELWYKVQEAMRMKKNPVGTRHRVGAEDYLLTGKLRCGHCGSYMTGVSGTSRNGELHYYYTCQKRRTEHACNKKNVRRDVIEPAIAQAIKMYCLTDDVIEWVANRTVEYWEKHDNDLHIEALEQQLEENKKATSNMLKAIEMGIITDATRSRMIELETEQSKLAVQLNAAKADVVKIDRDDLIDELQIFRDMDVNNRSVQAELFKDFLVAAYIYDDNRLKLVFSFMGKDNSIEIPLETGEDPPDGEDSPDAKMFVLTPDCSTIQFVLEPDSL

SEQ ID NO: 4210 - protein, 522 aa, Unknown
  Description of Unknown: Integrase B4211 sequence
  PTHR30461:SF3,SM00857,G3DSA:1.10.10.2600,IPR036162,PF13408, PS51737,G3DSA:3.40.50.1390,IPR025827,IPR006119,IPR038109, PF07508,IPR011109,SSF53041,PF00239,PTHR30461, PS51736,Coil,cd00338
MSSIDKTAVIYARYSSHGQTEQSIDGQIAAAQKYAEGKGYTIIHIYADRAMTGRNDDREQFQKMLSDTATHQFGVILLWKIDRFGRNREEIAFNRYRCKKNGVRVERVAEDVPDGPEGVILDSVLEGMAEYYSLQLAQNVRRGQRESAKKSQSNGGTRMIGYKVNPDTKRYEVDPDTAPFITEVFRRYAGGQTMAEIAAWLNAQGLRATRGGMFTVNSLHRLLKNEKYTGVYIFRDIRNEGGMPALIDRATFDKVQEMLKVNRRAPSRVWSRAEYLLTDKLFCGHCGAPMAGVSGHGHTGVKHNYYTCLNRKRKKSCTKKSVRQDVLEPLVLKSIRNLLQDDATLKYIADKVWAEYERSDTSGDSIRALDRQIADVDRALSNVMKAIEMGIINETTKARMDELTEQKQALSAARADAGLARGFKLTRNMVLYFLRKMAATDISDRDSQKRLIKTFVNAIYLYDDHFDIAFNYTENGKVIVKMQEIDDASTEGAFGCCAQCPTKIKAPAVPRRVFLFWCSVSC

SEQ ID NO: 4211 - protein, 522 aa, Unknown
  Description of Unknown: Integrase B4212 sequence
  SM00857,G3DSA:1.10.10.2600,IPR036162,PF13408,PS51737, G3DSA:3.40.50.1390,IPR025827,IPR006119,IPR038109,PF07508, SSF53041,IPR011109,PTHR30461,Coil,PS51736, cd00338,PF00239
MVKNRAAIYARFSSHNQRSESIEIQVENSRAFCEREGLQVVHEYCDYAQTGRNIDRAEFQRMMNDARHGLFDYVVIYKVTRIMRNRDEMSLARIMLRKAGVEILYAGEDISSGSSGVLQLGMLEVLAEYESALDSERIRDGIQKNAERCMANGRTLYGWDIVEGRYVINEREASVLRRMKNMLFAGSSVADIVRAVSAERSKRGAKFNQDTVTKLLKRVQNAGVYKYAGHEVPDGMPAIWSQAEQDMIDNILGDRHKPRRKINSTLEFPLSGKLYCAKCGAPMAGTSGTSCTGATYHYYKCRKCRRTVRRDLVEDVVCDMTLQAVAREDVRQRIASGMVTFQAEQPKEQSRSYAIKKELKRIDRTFERIWQAIEDGIAPPGGRERTEELKQRKSELEAELRIAEREEAFNIGVDELMLWLDDAAENLTPEVILGTFVRFVEIDGKTLNVYFAFDHYGDDFRPKQKKAEPCPEGHSSANYPMVELMRKTANSTSTANRAAIQLDTCIVRVSKNWFVVVGTCQK

SEQ ID NO: 4212 - protein, 522 aa, Unknown
  Description of Unknown: Integrase B4213 sequence
  cd00338,SM00857,G3DSA:1.10.10.2600,IPR036162,PS51737, G3DSA:3.40.50.1390,IPR006119,IPR038109,PF07508,IPR011109, SSF53041,PTHR30461,PS51736,Coil,PF00239
MPRRRKVAAKDRGRCVIYARFSSSRQREESIEDQVRVCTAYARDNGMEVEGVYADHAASARSDDRPEFQRMVREARDGAWGVVLVYKLDRFARDRFDAANYRVRLRDAGVELVSAMEQIPDAPEGAILESVLEGVNEWYSRSLSQNVTRGMMGNARKCMANGVRVFGYRVDGEGRYVVDEREAAIVRRAFSMAALGSTRGEVMLWLNSTCRNVRGGQWRYPSVATLLSNEKYLGVYSFGDVRVEGGMPAIVDQEVFDAANRPRPHARVGAFPLTGRLFDAETGTPYRGDGGTSGTGRRYFYYTCPLERGVVRYPQAEVEDAVMGALRGFVARPGEAERLADAVLGAVGGMGDARRLDDARARLREAQRGKGRLVDAIVGGVDPSLVQERLDDLGAEVRRLEAEVARLERVTVPDRDWAVSWVRERMPESLTKQELRRTVGRCELADDGTLTVEIPWSTSCDSEAQKNSELPARGQFRVNKFGGQEDSESELFVTSSGLKIVCGQKLERSGQKIANRNHSAQK

SEQ ID NO: 4213 - protein, 522 aa, Unknown
  Description of Unknown: Integrase B4214 sequence
  SM00857,G3DSA:1.10.10.2600,IPR036162,PF13408, IPR025827,G3DSA:3.40.50.1390,PS51737,IPR006119, IPR038109,PF07508,IPR011109,SSF53041, PTHR30461,Coil,PS51736,cd00338,PF00239
MVKNRAAIYARFSSHNQRSESIEIQVENSRAYCEREGLQVVREYCDYAQTGRNIDRAEFQRMMSDARHGLFDYVVIYKVTRIMRNRDEMSLARIMLRKAGVEILYAGEDISSGSSGVLQLGMLEVLAEYESALDSERIRDGIQKNAERCMANGRTLYGWDIVEGRYVINEREASVLRRMKNMLFAGSSVADIVRAVSAERSKRGAKFNQDTVTKLLKRVQNAGVYKYAGHEVPDGMPAIWSQVEQDMIDNILGDRHKPRRKINSTLEFPLSGKLYCAKCGAPMAGTSGTSCTGATYHYYKCRKCRRTVRRDLVEDVVCDMTLQAVAREDVRQRIASGMVAFQAEQPKEQSRSYAIKKELKRIDRTFERIWQAIEDGIAPPGGRERTEELKQRKSELEAELRIAEREEAFNIGVDELMLWLDDAAENLTPEVILGTFVRFAEIDGKTLNVYFAFDHYGDDFRPKQKKAEPCPEGHSSTNSLLVELMRKTANSTSTANRAAIQLDTCIVRVSKNWFVVVGTCQK

SEQ ID NO: 4214 - protein, 522 aa, Unknown
  Description of Unknown: Integrase B4215 sequence
  PTHR30461:SF3,cd00338,SM00857,G3DSA:1.10.10.2600,IPR036162, PF13408,IPR025827,G3DSA:3.40.50.1390,PS51737,IPR006119, IPR038109,PF07508,SSF53041,IPR011109,PTHR30461, PS51736,Coil,PF00239
MTAVIYARYSSDNQREESIEGQIRECTAYAEKNDITIVKHYIDRAISAKTDNRPQFQQMIKDSDKKLFDIVLVWKLDRFARNRYDSARYKTQLKKNGVKLMSATEIISEGPEGIILESVLEGYAEYYSADLAEKVVRGQTENILKGRCNGGRGTFGYTLDSERKFHIDPLASPFVLESFTKYRDGLTMKEIRDWLNENGIKNPVGGEFTYNSVEHMLKNRRYIGELKFRDVVVPDAIPPIVPLELFDDVQEKIAKNKKAPARRKAEDDYLLTTKLHCGCCGALMFGESGTSRTGEVHRYYKCATAKKKKGCKKKTVRKQWLEDLVVNQTMQLVRDDAAMESIIAKVMELQDRENTNLPLYEKQLRDAESGIQNMLNAIQAGILTSSTKERLEQLEETKRELEARIAEEKLAKPKVTEEFIRFWLLRFRKLDMSLKDQRQALVDTFINAIYLYDDKVLITFNYKEGTQTVTFGEATEVASEGNGSDLDCFTAPRIPDTLSCAGDSFCATGRIRTATTTTAASG

SEQ ID NO: 4215 - protein, 522 aa, Unknown
  Description of Unknown: Integrase B4216 sequence
  PTHR30461:SF3,cd00338,SM00857,G3DSA:1.10.10.2600,IPR036162, PF13408,PS51737,IPR025827,G3DSA:3.40.50.1390,IPR006119, IPR038109,PF07508,IPR011109,SSF53041,PTHR30461, PS51736,Coil,PF00239
MANVTIIPARRKADKSTEEKSTALRVAAYCRVSTDSDEQATSYETQIEHYTNYIQMHPGWRFAGIYADEGISGTNTKNRSEFNRLIEDCMAGNIDMVVTKSVSRFARNTLDCLKYIRRLKERQIAVFFEKENINTLDAKGEVLLTIMASLAQQESQSLSQNVKLGVQYRFQQGQVRVNTNRFLGYDKDEDGKLVINPEEAEVVKRIFREFLEGWSYQSIGDHLAADGIKTAAGSTYWRGSTVRKMLQNEKYMGDALLQKTVTTDFLNKKRAINNGLAPQYYVEDDHEAIIPKDIFMNVQEEMQRRSRRRGTTGHFISGGKYALSNIVYCSHCGETYRRLTWSPKGKDRIVVWRCVSRVERKKKNLSIPCYSRTVEEELLKKVVVKAINRILPDKKNFIRIMKNNIREAISQRTQKPVQALDAKIKKLQGELLERVKQKQPYTDLTEQMDSLRAKKDALALTDADNREKQRRINVMMDFLEHQSGKIAAYDELLVRRLIEKIVVFDDHFIVVFKSGLETQIDL

SEQ ID NO: 4216 - protein, 522 aa, Unknown
  Description of Unknown: Integrase B4217 sequence
  cd00338,SM00857,G3DSA:1.10.10.2600,IPR036162,PS51737, G3DSA:3.40.50.1390,IPR006119,IPR038109,PF07508,SSF53041, IPR011109,PTHR30461,PS51736,Coil,PF00239
MNLENVCLYLRKSRADREAEARGEGETLARHERILLDLAKSRGYNVGAIYKEIVSGETISARPVMQQVLHEVEAGMWDGVLVVEVERLARGDTIDQGTVSRAFQYSDTKIITPSKTYDPNNEFDEEYFEFGLFMSRREYKTIKRRLNAGRISSVKEGKYCGNKPPYGYERVKLSGEKGYTLQPIPAQADIVRMIFSWYSGADGNQIGVAKIVRKLNDMGVKSALGKDWTPASVQSILVNPVYTGTIRWNGRKTVKSIQNGAVIRSRPRAKADDVLLFPGRHPAIISQDMYDTVQRIRKKNPPRPVQITNTIKNPLAGIVYCSKCGRAMVRRPYQKRGQEDSLLCPYTSCSTVSSKLSLVEKVLLDGIKNLVDEYKLSSDVPKLDIDNVITLKEKLIEEKEAELKKLDAQKLKQYDLLEQGVYTTDVFLERSKSTAASIEACIESIKGLREEIEHDKKLVEQQAVFIPKCENLLENYWEFDAQTRNKLLRELIEKVNYTKESKNYFLKGDEITFLLDIFPKIQ

SEQ ID NO: 4217 - protein, 522 aa, Unknown
  Description of Unknown: Integrase B4218 sequence
  SM00857,G3DSA:1.10.10.2600,IPR036162,PS51737, G3DSA:3.40.50.1390,IPR006119,IPR038109,PF07508, SSF53041,IPR011109,PTHR30461,Coil, PS51736,cd00338,PF00239
MREQYLIYLRKSRNDAQLEAMGVDVLERHEKTLLALAKSMNLQIGAIYREVVSGDSIAARPEMQRTLKEVEAGLWKGVLVMEVERLARGDTVDQGIVQRTFQYSETLIVTPAKIYDPNNEFDEEYFEFGLFMSRREYKTIRRRMRAGVTAAVREGKWPFNKAPYGWKRVKLEDARGWVLAPDPDEAPVVKLIFDMFTGPDRVGITSICKYLESHGIPPRNGDRWLECTILGILGNIANDQKVGIGHRKQITTVKDGVLTKSRESRLSNNYDLIATGLQPRLIDHDVFVEAQGYLGKGTPKPPESYGIKNPLASLVVCSCCGKKMQRRPKTTTPGCHGAPYDVLMCHTRGCPTIGAPLELVEKEVINVLSDWVAGYQLNPSQEVKNNVAEKQELLSATIVNRDSLLKQNEKLYDLLEREIYTTDIFLERSNNLHKRIEEAEASVSALEKDLEYEKQKFENSSRFIPECKELLSNYWDLSVPDRNKALKLLIDRVEYKKTVKNKWGTVDTPTFELTLKPRIPRI

SEQ ID NO: 4218 - protein, 522 aa, Unknown
  Description of Unknown: Integrase B4219 sequence
  SM00857,G3DSA:1.10.10.2600,IPR036162,PF13408,PS51737, G3DSA:3.40.50.1390,IPR025827,IPR006119,IPR038109,PF07508, IPR011109,SSF53041,PTHR30461,PS51736,cd00338, PF00239
MELLNVCIYLRKSRADREAEARGESETLARHERILLDLAKKRGYNVGAIYKEIVSGETISARPVMQQLLREVESGMWDGVLVVEVERLARGDTIDQGVVARSFQYSNTLIITPLKTYDPNNEYDEEYFEFGLFMSRREYKTIRRRLTAGRESSAKEGKYCGSKPPYGYSRVKLVGEKGWTLQPVPDQAEIVKLIFNLYVHGVSGERIGMAKICRKLNDSGIKTMDGGLWTISRVQAILRNPVYEGMIRWNSRKSVKHIKDGQITISRPFAQDYILVKGRHPAIVSRELFQQAQDIVNKNPARPLNSLHVLRNPLAGIVRCGKCDHVMTRKSPNGRQGDLIRCPYSSCSNISSKLPLVEKALLDGIQELVDGYRLNNSVSDQEYSLSISEREKMIQGKLKEIDILKKRKQRQYDLLEQGIYSTEEFLERSRATAAELSACDAVILSLKQEIEHEQELQFQRSSFIPKCEDLLANYWTWDTSTKNRFLRELIEKAVYTKNAKNTWKNGDDISFTLDIYPKIQQK

SEQ ID NO: 4219 - protein, 522 aa, Unknown
  Description of Unknown: Integrase B4220 sequence
  SM00857,G3DSA:1.10.10.2600,IPR036162,PS51737,G3DSA:3.40.50.1390, IPR006119,IPR038109,PF07508,SSF53041,IPR011109, PF00239,PTHR30461,PS51736,Coil,cd00338
MREQYLIYLRKSRNDAQLEAMGVDVLERHEKTLLALAKSMNLQIGAIYREVVSGDSIAARPEMQRTLKEVEAGLWKGVLVMEVERLARGDTVDQGIVQRTFQYSETLIVTPAKIYDPNNEFDEEYFEFGLFMSRREYKTIRRRMRAGVTAAVREGKWPFNKAPYGWKRVKLEDARGWVLAPDPDEAPVVKLIFDMFTGPDRVGITSICKYLESHGIPPRNGDRWLECTILGILGNIVNDQKVGIGHRKQITTVKDGVLTKSRESRLSNNYDLIATGLQPRLIDHDVFVEAQGYLGKGTPKPPESYGTKNPLASLIVCSCCGKKMQRRPKTTTPGCHGAPYDVLMCHTRGCPTIGAPLELVEKEVINALSDWVTGYQLDPSQEVKNNVTEKQALLSAAVANRDALLKQNEKLYDLLEREIYTTDVFLERSSTLHERIEEAELSISALEKDLEYEKQKFENSSRFIPECKELLSNYWDLSVPDRNKALKLLIDRVEYKKTARNKKGMADIPTFELVLKPRIPRI

SEQ ID NO: 4220 - protein, 522 aa, Unknown
  Description of Unknown: Integrase B4221 sequence
  SM00857,G3DSA:1.10.10.2600,IPR036162,PF13408, PS51737,G3DSA:3.40.50.1390,IPR025827,IPR006119, IPR038109,PF07508,IPR011109,SSF53041, PTHR30461,PS51736,cd00338,PF00239
MELLNVCIYLRKSRADREAEARGEGETLARHERILLDLAKKRGYNVGAIYKEIVSGETISARPVMQQLLREVESGMWDGVLVVEVERLARGDTIDQGVVARSFQYSNTLIITPLKTYDPNNEYDEEYFEFGLFMSRREYKTIRRRLTAGRESSAKEGKYCGSKPPYGYSRVKLVGEKGWTLQPVPDQAEIVKLIFNLYVHGVSGERIGMAKICRKLNDSGIKTMDGGLWTISRVQAILRNPVYEGMIRWNSRKAVKHIKDGQITISRPFAQDYILVKGRHPAIVSRELFQQAQDIVNKNPARPLNSLHVLRNPLAGIVRCGKCDHVMTRKSPNGRQGDLIRCPYSSCSNISSKLPLVEKALLDGIQELVDGYRLNNSVSDQEYSLSISEREKMIQGKLKEIDILKKRKQRQYDLLEQGIYSTEEFLERSRATAAELSACDAVILSLKQEIEHEQELQFQRSSFIPKCEDLLANYWTWDTSTKNRFLRELIEKAVYTKNAKNTWKNGDDISFTLDIYPKIQQK

SEQ ID NO: 4221 - protein, 522 aa, Unknown
  Description of Unknown: Integrase B4222 sequence
  PTHR30461:SF3,SM00857,G3DSA:1.10.10.2600,IPR036162,PF13408, PS51737,G3DSA:3.40.50.1390,IPR025827,IPR006119,IPR038109, PF07508,IPR011109,SSF53041,PTHR30461,Coil, PS51736,cd00338,PF00239
MGKVRIIPQTINPLTQVKIGTIKKKKVAAYARVSTDQEEQESSFDAQVQHFTEYIKSRDDWEFIKVYSDEGISGTSLKKRDGFNQMVADALDGKIDLILMKSISRFARNTLDLLTTVRKLTAKGVEVFFEEQNISTLDGGGELFLTIMSSIAQEESRTISENVKWGKKESYKKGNVSFAYSRFLGYKKEDGKIVIDKEQAVVVKQIYQWYLRDGLTLTAIAQRLNENSVKTPGGKNNWTVNNITSILTNEKYKGHAILQKTYCDNFLTHQMKKNTGQMPKYHVEDSHPAIIDEDTWNEVQLEIQRRREIGSCYSSTDVFSGKLICADCGSFYGAKLWHSTSKYARTVYQCNHKFKHKCRTPHLEVKFIKEKFIEAYNMVMIDKESLIEDTKEGITVLCDFVGLDGRLVELQNEMDIVSELSNKMIIENMHKLQSQEEYTKKYEELLKRYEKANVEYGRIQDEKLHKIGLSQKLESFIKDLENRPVSIDYFDETTFRFMVESVKVSRDKKLTFKFRNGKEIEV

SEQ ID NO: 4222 - protein, 522 aa, Unknown
  Description of Unknown: Integrase B4223 sequence
  PTHR30461:SF3,SM00857,G3DSA:1.10.10.2600,IPR036162,PF13408, PS51737,IPR025827,G3DSA:3.40.50.1390,IPR006119,IPR038109, PF07508,IPR011109,SSF53041,PTHR30461,Coil, PS51736,cd00338,PF00239
MPKVRVIQATKGSLANRLPVAAYCRVSSNSEDQRHSFVAQVREYTARIAENDKWELAGIYADKGITGTNARKRPEFQRLIEDCRQGKVKRILTKSISRFARNTQECLEYVRELKMLGVSVYFEKEGLDTADIAGELLISVFGSLAQEESSSIGGNMRKSYEYRMQSGKFIGNIAPYGYRWKNRSLEIYEPEAEIVRWIFNSYLNGTGRAQIARELNQRENGRNMWYVTTIQYILNNERYIGDALLQKKYTTEIYPKQEKRNRGDVPQYYLVESHPPIISRDTFERAQRLCQRRRNPQVTPSSPTDNNNTFFRKKAYCAECGRALRRKKQSSGYVSWVCSRHDESKMLCPAPPVAEAALLNSYKNMAGILLSSIDRILLPMAVQLRRLRERSIMGNEDINILNQQILSLTDQLHAVSKLHNLNILDVSAYREKTNALNALLDEAQRKRKLLISGTIEDDKLEKTEALISILQDTMQSPTALEDGEIFEQIVDKVLVDRNKKIMFRLINGLELTGSEGNSDGEK

SEQ ID NO: 4223 - protein, 522 aa, Unknown
  Description of Unknown: Integrase B4224 sequence
  PTHR30461:SF3,cd00338,SM00857,G3DSA:1.10.10.2600,IPR036162, PS51737,G3DSA:3.40.50.1390,IPR006119,IPR038109,PF07508, IPR011109,SSF53041,PTHR30461,PS51736,Coil, PF00239
MTALEQNSAVESALHPQMDKYAIYLRKSRADAEAEKLGEGETLARHKKILTELAARKGLYVEKIYHEIVSGETIEARPEIQKLMADCYAGKYRGIIIVEVTRLSRGSQGDAQKIMDCLKFANRNNGLLVITPTKVYDVAHNPDDEEYMEFELFMSRREYKMIKRRMDRGRTQAVVEGNYMGSYRPYGYDILKTRTSRTLVPNAEEAPIVKQIYEWSAEKGWSAGKIARTLTTMAVPTYTGDPEWSTATVKTILTNPTYSGKVRWNDRMTVKSMVNGELVSSRPRSCHTDHYMLYEGKHEALVSEETYRAASRRYYSDRTKANFKLKNPLAGLLRCQACGKMMMHQSYKGRSTPPRFNHRQSTVCKVKSATVEDVMKALIHALKLYIEDFELKIDNLPDVDENSILSQLNALEAEQRKVEKKLAKAFDDYEEGIYTANEFVARKAKHTARLDAIRAQMESLEVSIPEKEEYQEKIMLLSEALDSLLDDALDADVKNEYLKRIIDHIDFSRENNAEFILDVYLK

SEQ ID NO: 4224 - protein, 522 aa, Unknown
  Description of Unknown: Integrase B4225 sequence
  PTHR30461:SF3,SM00857,G3DSA:1.10.10.2600,IPR036162,PF13408, PS51737,G3DSA:3.40.50.1390,IPR025827,IPR006119,IPR038109, PF07508,IPR011109,SSF53041,PTHR30461,cd00338, PF00239
MPTSKNTARKYAAGGSSDNSCGVEPLRAVIYARYSSSGQREESIEGQLRDCYEFAKKHGIIVIGEYIDKAMTGRVDRRPDFQRMMKDSEKGRFNCVLLWKMDRFARNRYDSAMYKYKLKKNGIRIFYAKETIPDGPEGIILESVMEGYAEYYSENLAQNVKRGNYDSALELKTLGKTCLGLKTGPDGRYMIDQAEATIVRRIFEEYAEGERAKDIYERLNSEGYRTSRGGKFNKNSLRRILSNKKYIGVYEYEDIYVENGIPAIITDRDLFERVQKMLKINHDAPARGKAQNFLLTTKLFCGLCGSPMIGDGGTSHTGKAYAYYSCTKRKRGRSCKKESVPKDWIEDLVVGELVKIVHNDELIEQIADRVMEYQKREKDQSGLHALEIRQKENEKAISNMLAAIEAGIITPSTKTRLMELEADRADIEKGIAHELLAEPEFERDQIIYFLERFRSGDINDEAYRIMLVDTFLNSVYLYDDDHLVLVMNYSGENCKVDLKLVEGAVSGDGCKGSAFAPSSAYN

SEQ ID NO: 4225 - protein, 522 aa, Unknown
  Description of Unknown: Integrase B4226 sequence
  PTHR30461:SF3,cd00338,SM00857,G3DSA:1.10.10.2600,IPR036162, PS51737,G3DSA:3.40.50.1390,IPR006119,IPR038109,PF07508, IPR011109,SSF53041,PTHR30461,PS51736,Coil, PF00239
MTTFDMHNAADRALKIDVYAIYLRKSRADLEAEKLGEGETLARHRKILEELAARQGFYIGEIYTELESGDTIAGRPKIQKLIEDCYKGKYKGILVVEITRLSRGNQGDAQTIMDCLKYSNMNNGVLVITPTKTYDVAHSQEDEEYMEFELFMSRREYKMIHKRMDRGRKQAVVEGNYMGAFRLYGYNIIKTKTKRTLVPNEAEAPYIRKIFEWSAKENLSTFEIAKRLTAMGVPTYRGESQWHKDTVKAYLTNPVYMGKVRWNDRMRIKTMVDGELKITRPRFHSDQYMLYDGKHMKDALIDEETFRVVQKKFYKDRTRSGLKLRNPLASLVFCKKCGKAMHYQPYGKDRHDRIVHKNNAAGCKVKSAIASDMIAAVTHALKMYIEDFELKVDNSSDVDENAIERQIEELEKEIRKIEKKKAKLFDSWENDDITNNEFVERKNIHNTRIEVLEKQIEELEFTIPEKVEHEEKLLLLSDAFIAMQDDDIDAATKNEFLKRIISRIEFSRESDLEFILDIDLHQ

SEQ ID NO: 4226 - protein, 522 aa, Unknown
  Description of Unknown: Integrase B4227 sequence
  PTHR30461:SF3,SM00857,G3DSA:1.10.10.2600,IPR036162,PF13408, IPR025827,G3DSA:3.40.50.1390,PS51737,IPR006119,IPR038109, PF07508,SSF53041,IPR011109,PTHR30461,Coil, PS51736,cd00338,PF00239
MSAGKSAAGGPPDAAMRAYIYGRYSTHNQKDTSIEQQFREIYEYCERSGIKVMGEYADRAISGKTDKRPDFQRMMKDCAKGRVQLVVCWKIDRFARNRYDSAIYKARLKKYGVRVVYAKESIPDGPEGILLESVLEGSAEYYSANLSQNIRRGMEENALECKVNNGNLALGYCKGPDGRFAIEPVGAAIVRDVFTMYTSGMNITEICADLNARGCRTSRGARFNKNSLRVMLRNERYIGVYQYAKIRIEDGVPPIITREVFDLAQEIIAKNARTPAASWSQVDYLLTGKLFCGHCGSAMVGESGTSKTGSKHNYYICAAKKRKKTCNKKTVKKDWIESLVVSETVKNVLVDDVIKRIAAAVIELQRREREEGQIPLLEQQLSETERLLKNVMAAIEQGIITPTTKQRMDELEQQKAELGDAIEKASIELTTLTEDQVIFWLEKFRGGDVTDPAFQWKVIENFVNAVYLYDDRLRIVYNYAKQGAETVDFSFAEALEGCDGSPSEGFGLGASSSTKQFKIRTL

SEQ ID NO: 4227 - protein, 522 aa, Unknown
  Description of Unknown: Integrase B4228 sequence
  SM00857,G3DSA:1.10.10.2600,IPR036162,PS51737,G3DSA:3.40.50.1390, IPR006119,IPR038109,PF07508,IPR011109,SSF53041, PF00239,PTHR30461,PS51736,Coil,cd00338
MPRRRKFAAKDRGRCVIYARFSSSRQREESIEDQVRVCTAYARDNGMEVEGVYADHAASARSDDRPEFQRMVREARDGAWGVVLVYKLDRFARDRFDAANYRVRLRDAGVELVSAMEQIPDAPEGAILESVLEGVNEWYSRSLSQNVTRGMMGNARKCMANGVRVFGYRVDGEGRYVVDEREAAIVRRAFSMAALGSTRGEVMLWLNSTCRNVRGGQWRYPSVATLLSNEKYLGVYSFGDVRVEGGMPAIVDQEVFDAANRPRPHARVGAFPLTGRLFDAETGTPYRGDGGTSGTGRRYFYYTCPLAGGVVRYPQAEVEDAVMGALRGFVARPGEAERLADAVLGAVGGMGDARRLDDARTRLREAQRGKGRLVDAIVGGVDPSLVQERLDALGAEVRRLEAEVARLERVTVPDRDWAVSWVRERMPESLTKQELRRTVGRCELADDGTLTVEIPWSTSCDSEAQKNSELPARGQFRVNKFGGHEDSESELFVTSSGLKIVCGQKLERSGQKIANRNHSAQK

SEQ ID NO: 4228 - protein, 522 aa, Unknown
  Description of Unknown: Integrase B4229 sequence
  SM00857,G3DSA:1.10.10.2600,IPR036162,PS51737, G3DSA:3.40.50.1390,IPR006119,IPR038109,PF07508, SSF53041,IPR011109,PTHR30461,Coil, PS51736,cd00338,PF00239
MTTFDMNNATSKALDMDVYAIYLRKSRADLEAEKLGEGETLARHRKMLEELAARKGFYIGEIYTELESGESIAGRPKIQKLLEDCYKGKYKGILIVEVTRLSRGNQGDAQTIMDCLKYSNMNNGVLVVTPTKTYDVAHSQEDEEYMEFELFMSRREYKMIHKRMDRGRRQAVVEGNYMGAYRPYGYNIVKTKTKRTLVPNEIEAPYIKKIFEWSVKDGLSTHDIAKRLTAMGAPTYRGDTEWTKDSVKTYLTNPVYMGKVRWNNRMRIKTMVNGELKITRPRYHSDQYMLYDGKHMKDALIDEETFREAQKKFYKDRTRSGLRLKNPLAGLVYCKKCGKSMHLQPYDKTRSDRIVHKSNASGCRVKSAIASDVVAAVTHALRTYVDDFEVKIENSPDIDENDIQRQIDALAKEMRKIEKKKSKLFDSWENDDITNNEFVERKAIHNQRLETLEKQIEDLEYTIPEKEEYEEKLILVSEALMTIQDDQLDAATKNESLKQIISRIEFSRENDIEFILDIDLHQ

SEQ ID NO: 4229 - protein, 522 aa, Unknown
  Description of Unknown: Integrase B4230 sequence
  SM00857,G3DSA:1.10.10.2600,IPR036162,PS51737,G3DSA:3.40.50.1390, IPR006119,IPR038109,PF07508,IPR011109,SSF53041, PTHR30461,Coil,PS51736,cd00338,PF00239
MELLNVCIYLRKSRADREAEARGEGETLARHERILLDLAKARGYNVGAIYKEIVSGETISARPVMQQVLREVEAGMWDGVLVVEVERLARGDTIDQGVVARAFQYSSTLIITPLKTYDPNNEYDEEYFEFGLFMSRREYKTIRRRLTAGRESSAKEGKYCGSKPPYGYSRIKLIGEKGWTLQPVPDQAEIVKLIFNLYVHGVSGERIGMAKICRKLNDSGIKTMDGGLWTVPRVQAILRNPVYAGMIRWNSRKAVKHIQDGQITISRPFAQDHILAEGRHPAIVSKELFQQAQDIVNRNPARPLNSLHVLRNPLAGIVRCGKCGYVMTRKSPSDRQGALLRCPYSSCDNISSKLPLVEKALLDGLQELVDGYKLNSSFSDQEYSLSISEKEEMIRGKLKEIDILKKKKEKQYDLLEQGIYSTDEFLERSRATAAELSACDTVIYSLRQEIKHEQELQFQRSSFIPKCEDLLTHYWTWDTSTKNQFLRELIEKAVYTKSKRNTWKNGDDVSFTLDIYPKIQQK

SEQ ID NO: 4230 - protein, 522 aa, Unknown
  Description of Unknown: Integrase B4231 sequence
  PTHR30461:SF3,cd00338,SM00857,G3DSA:1.10.10.2600,IPR036162, PF13408,PS51737,G3DSA:3.40.50.1390,IPR025827,IPR006119, IPR038109,PF07508,IPR011109,SSF53041, PTHR30461,PS51736,Coil,PF00239
MSNAVIYARYSSGHQREESIEGQIRECTNFAKRNGLTIVEHYIDRAISAKTDDRPSFQQMVADSSKKTFDTIIVYTLDRFARNRYDSAVYKAKLKRNGVRVLSAKENITSDPSGIILESVLEGMAEYYSVELAQKVKRGMTENALACRWASGRIPFGYTIDADKHLHPDPALVPIVQEAFEMYAAGAKIVDIARKINSYHVVTGMGNKFGRSSFDRMIRSETYIGVFKWNDIRKENAIPPIITPELFYKCQARYNARNRKNVARPSAIYLLSGKLRCGCCGGSMCGMSGKSRNGTMHYYYSCYSTRRRTSHCDIGNIRRDEIEHIIAAHAASILKKPINLDIIANQALKTNNSVKNYRLESLIQQEKDLTQKLENCMKAIDQGLVSITLMDRIKQYEADLQSVKNDISLEKIKSNPIQVTKEHIIFFLEKFALLEGEKFKDRIISTMVRDIVIKKEKDGNYLVTVQYNYANSKELPNEESYSVPESIGSQDVELVDNSGVVTNRLRFYPYYFEETFIFTQAS

SEQ ID NO: 4231 - protein, 522 aa, Unknown
  Description of Unknown: Integrase B4232 sequence
  SM00857,G3DSA:1.10.10.2600,IPR036162,PF13408,IPR025827, PS51737,G3DSA:3.40.50.1390,IPR006119,IPR038109,PF07508, SSF53041,IPR011109,PTHR30461,Coil,PS51736, cd00338,PF00239
MELLNVCIYLRKSRADREAEARGEGETLARHERILLDLAKKRGYNVGAIYKEIVSGETISARPVMQQVLREVESGMWDGVLVVEVERLARGDTIDQGVVARAFRYSETLIITPLKTYDPNNEYDEEYFEFGLFMSRREYKTIRRRLTAGRESSAKEGKYCGSKPPYGYSRVKLVGEKGWTLQPVPDQAEIVKLIFNLYVHGVAGERIGMAKICRKLNDSGIKTMDGGLWTVPRVQAILRNPVYAGMIRWNSRKAVKHIQDGQITISRPFAKDYILVEGRHPAIVSKELFQQAQDIVNQNPARPLNSLHVLRNPLAGIIRCGKCGYVMTRKAPSGRQVDLLRCPYSSCNNVSSKLPLVEKALLDGIQELVDGYKLNSNFSDQEYSLSISEKEEMIRGKLKEIDVLRKKKEKQYDLLEQGIYSTEEFLERSRATAAELSACDTVIHSLRQEIKHEQELQFQRSSFIPKCEDLLAHYWTWDTSTKNQFLRELIEKAVYTKNTKNTWKNGDDVSFTLDIYPKIQHK

SEQ ID NO: 4232 - protein, 522 aa, Unknown
  Description of Unknown: Integrase B4233 sequence
  PTHR30461:SF3,SM00857,G3DSA:1.10.10.2600,IPR036162,PF13408, PS51737,IPR025827,G3DSA:3.40.50.1390,IPR006119,IPR038109, PF07508,IPR011109,SSF53041,PTHR30461,Coil, PS51736,cd00338,PF00239
MNGVIYARYSSHNQREESIEGQIRECKRYAEHHNITIVGEYADRAITGRTDDRAEFQKMIRDAEKGHFQVVLVYKLDRFARNRYDSATYRLKLKKCGVKVSSAMEAVQDGPEGIILEAVLEGMAEYYSANLSQNIKRGMTDNAMKCLATGGGRCLGYKTGPDKKYVIDPPAADTVRLIYEMYDQGHTYAHIVETLNNQGRTTFKGTPFNKNSLGKILHNRRYIGDYVWGDIVVAGGMPQIVDRDLWERVQAKLSRKEKASARARGDYNYILSGKLFCGKCGKGMIGDHGTSRNGTKFYYYTCSTRKHSGSCTKKSVRAEKIEAEVIRTTIQTVLQDDMIEYIADKVMEYQAKDTEGATLLSSYNNRLKETETAINGILKAIEDGLYTATMKERMGELEAQKEDLKASISREEINQRKVSRDELIFFLERFKGGNPEDPEYCRRLVDTFVNSIWLYDDKLVITYNFSGEKNKVTLEMVDAALDGCASGCSDKACATPPNETKANILLVSCSVFGFVQKIADRV

SEQ ID NO: 4233 - protein, 522 aa, Unknown
  Description of Unknown: Integrase B4234 sequence
  SM00857,G3DSA:1.10.10.2600,IPR036162,PF13408,IPR025827, G3DSA:3.40.50.1390,PS51737,IPR006119,IPR038109,PF07508, SSF53041,IPR011109,PTHR30461,PS51736,cd00338, PF00239
MELLNVCIYLRKSRADREAEARGEGETLARHERILLDLAKKRGYNVGAIYKEIVSGETISARPVMQQLLREVESGMWDGVLVVEVERLARGDTIDQGVVARSFQYSNTLIITPLKTYDPNNEYDEEYFEFGLFMSRREYKTIRRRLTAGRESSAKEGKYCGSKPPYGYSRVKLVGEKGWTLQPVPDQAEIVKLIFNLYVHGVSGERIGMAKICRKLNDSGIKTMDGGLWTISRVQAILRNPVYEGMIRWNSRKAVKHIKDGQITISRPFAQDYILVKGRHPAIVSKELFQQAQDIVNKNPARPLNSLHVLRNPLAGIVRCGKCDHVMTRKSPNGRQGDLIRCPYSSCSNISSKLPLVEKALLDGIQELVDGYRLNNSVSNQEYSLSISEREKMIQGKLKEIDILKKRKQRQYDLLEQGIYSTEEFLERSRATAAELSACDAVILSLKQEIEHEQELQFQRSSFIPKCEDLLANYWTWDTSTKNRFLRELIEKAVYTKNAKNTWKNGDDISFTLDIYPKIQQK

SEQ ID NO: 4234 - protein, 522 aa, Unknown
  Description of Unknown: Integrase B4235 sequence
  PTHR30461:SF3,cd00338,SM00857,G3DSA:1.10.10.2600,IPR036162, PF13408,PS51737,IPR025827,G3DSA:3.40.50.1390,IPR006119, IPR038109,PF07508,IPR011109,SSF53041,PTHR30461, PS51736,Coil,PF00239
MSSVDKTAVIYARYSSHGQTEQSIDGQIAAAQKYAEGKGYTIIHIYADRAMTGRNDDREQFQKMLSDTATHQFGVILLWKIDRFGRNREEIAFNRYRCKKNGVRVERVAEDVPDGPEGVILDSVLEGMAEYYSLQLAQNVRRGQRESAKKSQSNGGTRMIGYKVNPDTKRYEIDPDTAPFITEVFRRYAGGQTMAEIAAWLNAQGLRATRGGMFTVNSLHRLLKNEKYTGVYIFRDIRNEGGMPALIDRATFDKVQEMLKVNRRAPSRVWSRAEYLLTDKLFCGHCGAPMAGVSGHGHTGVKHNYYTCLNRKRKKSCTKKSVRQDVLEPLVLKSIRNLLQDDATLKYIADRVWAEYERSDTSGDTIRALDRQIADVDKALSNVMKAIEMGIINEMTKARMDELTEQKQALSAARADAGLARGFKLTRNMILYFLRKMAAMDISDRDSQKRLIKTFVNAIYLYDDHFDIAFNYTENGKVIVKMQEIDDASTGGAFGCCAQCPTKIKAPAVPRRVFLLWCSVSC

SEQ ID NO: 4235 - protein, 522 aa, Unknown
  Description of Unknown: Integrase B4236 sequence
  PTHR30461:SF3,SM00857,G3DSA:1.10.10.2600,IPR036162,PF13408, PS51737,IPR025827,G3DSA:3.40.50.1390,IPR006119,IPR038109, PF07508,IPR011109,SSF53041,PTHR30461,Coil, PS51736,cd00338,PF00239
MGKKQKTNGGDAVIYARYSSHNQRDVSIEQQVEACRKHAAELGLTVTATYEDRAISGKTDKRPSFQRMMRDAEQHKFAYVLAWKSNRIGRNMMQALVNESRLVDCGVKVFYAEEDFDDNAAGRFALRSMMNVNQFYIENMAEDVKRGLYDNAKKGLVNGSLPLGYKRGADGKPEIDEPKAAIVREIYTRVAAGELFASIADDLNARGIKTARGREWNKGSFHVLCHNDRYRGIYMYGDIRIPGGMPRIISDELFYDAQEAYSMKKDNRYGRARHGAENYLLTGKLYCGHCGGYMVGISGTSKTGEMHYYYACQKHRLEHTCEKKAIRRDVIENAVARAIMMYCLDDETIDFIVDSTIAYFKQKDHELHIEAMENELAAVQQAISNLMKAIEAGIITPTTRTRLLDLEEQQAKLSAKINTAKAERVEIDRDDLIAGLQLFRTGDIKNKKFLAKLFNTFLIAVYLYDDNRLKIVFSFTGNHNSVEIPLELDNDCPDSEIVSDETEVRMSHLECTSRDSNPGPTD

SEQ ID NO: 4236 - protein, 522 aa, Unknown
  Description of Unknown: Integrase B4237 sequence
  SM00857,G3DSA:1.10.10.2600,IPR036162,PS51737,G3DSA:3.40.50.1390, IPR006119,IPR038109,PF07508,IPR011109,SSF53041, PF00239,PTHR30461,PS51736,Coil,cd00338
MTTFDMNIATEHALKMDVYAIYLRKSRADLEAEKLGEGETLARHRKILEELAARKGFYIGEIYTELESGETIAGRPKIQKLIEDCYKGKYKGILIVEITRLSRGNQGDAQTIMDCLKYSNMNNGVLVVTPTKTYDVAHSQEDEEYMEFELFMSRREYKMIHKRMDRGRKQAVVEGNYMGTYRPYGYNIIKTKTKRTLVPNEYEAPYIRKIFEWSAKDNLSTFEIAKRLTAMGVPTYKGDSQWSKDSVKAYLTNPVYMGKVRWNDRMRIKTMVDGELKITRPRFHSDQYMLYDGKHMKDALVDEATFRKVQKKFYKDRTRSGLKLRNPLAGLVYCKKCGKAMHYQPYDKDRSDRIVHKANSGGCKVKSAIADDVISAVIHGLKLYVEDFELKVENASDTDASLIEKQIEDLEKEIRKIEKKKAKLFDSWENDDITNNEFVERKNIHNTRIEVLEKQIEELEYTIPEKVEHEEKLLLLSDAFIAMRDNEIDATTKNEFLKRIISRIEFSRENNGEFILDIDLHQ

SEQ ID NO: 4237 - protein, 522 aa, Unknown
  Description of Unknown: Integrase B4238 sequence
  PTHR30461:SF3,SM00857,G3DSA:1.10.10.2600,IPR036162,PF13408, PS51737,IPR025827,G3DSA:3.40.50.1390,IPR006119,IPR038109, PF07508,IPR011109,SSF53041,PF00239, PTHR30461,PS51736,Coil,cd00338
MSSVDKTAVIYARYSSHGQTEQSIDGQIAAAQKYAEGKGYTIIHIYADRAMTGRNDDREQFQKMLSDTATHQFGVILLWKIDRFGRNREEIAFNRYRCKKNGVRVERVAEDVPDGPEGVILDSVLEGMAEYYSLQLAQNVRRGQRESAKKSQSNGGTRMIGYKVNPDTKRYEIDPDTAPFITEVFRRYAGGQTMAEIAAWLNAQGLRATRGGMFTVNSLHRLLKNEKYTGVYIFRDIRNEGGMPALIDRATFDKVQEMLKVNRRAPSRVWSRAEYLLTDKLFCGHCGAPMAGVSGHGHTGVKHNYYTCLNRKRKKSCTKKSVRQDVLEPLVLKSIRNLLQDDATLKYIADRVWAEYERSDTSGDIIRALDRQIADVDRALSNVMKAIEMGIINEMTKARMDELTEQKQALSAARADAGLARGFKLTRNMILYFLRKMAAMDISDRDSQKRLIKTFVNAIYLYDDHFDIAFNYTENGKVIVKMQEIDDASTGGAFGCCAQCPTKIKAPAVPRRVFLFWCSVSC

SEQ ID NO: 4238 - protein, 522 aa, Unknown
  Description of Unknown: Integrase B4239 sequence
  PTHR30461:SF3,SM00857,G3DSA:1.10.10.2600,IPR036162,PF13408, IPR025827,G3DSA:3.40.50.1390,PS51737,IPR006119,IPR038109, PF07508,SSF53041,IPR011109,PTHR30461,Coil, PS51736,cd00338,PF00239
MAKTVRAIPATISRYTAAPINSRKKRRVAGYARVSTDHDDQISSYEAQVDYYTNYIRERDDWEFVGIYTDEGISATNTRHRDGFKRMVRDAMDGKIDLIVTKSVSRFARNTVDSLTTVRKLKDKGIEIYFEKENIWTLDAKGELLITIMSSLAQEESRSISENVTWGHRKRFADGKVCVPFGHFLGYDRGPDGNLVVNREQAKTVKLIYRLFLDGYTFHSIARELTSRGLETPARKKRWYPGTVESILTNEKYKGDALLQKRFTVNFLTKETKANEGEVPQYYVENNHEAIISPQVFDWVQEEIKRRREGRGRYSGVSIFSSKIKCGQCGGWYGAKVWHSTDKYRRTIYRCNDKFKSHCKTPHLTEDDIKEAFVRAVNQLIENKADVLDSITLLKERLTDTEDLEEERDRISTDLNLLADKIQQLIAENARVAQNQDDYDRNYNELVSRYEAAKTQYDKTCEAIQYRKARSRQMDSFIKELRNQDLIKEFDARLWGSLVDFITVYSKDDIRVTFKDGTEIRA

SEQ ID NO: 4239 - protein, 522 aa, Unknown
  Description of Unknown: Integrase B4240 sequence
  SM00857,G3DSA:1.10.10.2600,IPR036162,PS51737,G3DSA:3.40.50.1390, IPR006119,IPR038109,PF07508,IPR011109,SSF53041, PF00239,PTHR30461,PS51736,Coil,cd00338
MNEQYLIYLRKSRNDAQLEAMGVDVLERHEKTLLALAKSMNLQIGAIYREVVSGDSIAARPEMQRTLKEVEAGLWKGVLVMEVERLARGDTVDQGIVQRTFQYSETLIVTPAKIYDPNNEFDEEYFEFGLFMSRREYKTIRRRMRAGVTAAVREGKWPFNRSPYGWKRVKLEDARGWVLAPDPDEAPVVKLIFDMFTGPNRVGITSICKYLESHGIPPRNGDRWLECTILGILGNIVNDQKVGIGRRKQITTVKGGVLTKSRESRLSNNYDLIATGLQPRLIDHDVFVEAQGYLGKGTPKPPESYGIKNPLASLVVCSCCGKKMQRRPKTTTPGCHGAPYDVLMCHTRGCPTIGAPLELVEKEVINVLSDWVAGYQLNPSQEVKNNITEKQALLSAAIANRDALLKQNEKLYDLLEREIYTTDVFLERSSTLHERIEEAELSISALKKDLEYEEQKFENSSRFIPECKELLSSYWDLSVPDRNKALKLLIDRVEYKKTVKNKRGTVDTPTFELTLKPRIPRI

SEQ ID NO: 4240 - protein, 522 aa, Unknown
  Description of Unknown: Integrase B4241 sequence
  SM00857,IPR036162,PS51737,G3DSA:3.40.50.1390, IPR006119,PF07508,IPR011109,SSF53041, PTHR30461,Coil,PS51736,cd00338, PF00239
MREQYLIYLRKSRNDAQLEAMGVDVLERHEKTLLALAKSMNLQIGAIYREVVSGDSIAARPKMQRTLKEVEAGLWKGVLVMEVERLARGDTVDQGIVQRTFQYSETLIVTPAKIYDPNNEFDEEYFEFGLFMSRREYKTIRRRMRAGVTAAVREGKWPFNKAPYGWKRVKLEDARGWVLAPDPDEAPVVKLIYDMFTVPERVGITSKCKYLESHGIPPRNGDRWLECTILGILGNIVNDQKVGIGHRKQITTVKDGVLTKSRESRLSNNYDLIATGLQPRLIDHDLFVEAQGYLGKGTPKPPESYGTKNPLASLIVCSCCGKKMQRRPKTTTPGCHGAPYDVLMCHTRGCPTIGAPLELVEKEVINALSDWVTGYQLNPSQEVKNNVAEKQELLSAAIVNRDSLLKQNEKLYDLLEREIYTTDIFLERSNNLHERIEEAEASISALEKDLEYEKQKFKNSSRFIPECKELLSSYWDLSVPDRNKALKLLIDRVEYKKTVKNKRGTVDTPTFELTLKPRIPRI

SEQ ID NO: 4241 - protein, 522 aa, Unknown
  Description of Unknown: Integrase B4242 sequence
  PTHR30461:SF3,SM00857,G3DSA:1.10.10.2600,IPR036162,PS51737, G3DSA:3.40.50.1390,IPR006119,IPR038109,PF07508,IPR011109, SSF53041,PTHR30461,Coil,PS51736,cd00338, PF00239
MKKMKNNELLMGEYLLLYLRKSRQDNENETVEEVLSRHERQLQEYAAKTFGAVIPEDRIYREIVSGETIDDRPEMKKVLKRIEDPACKGVLVIEPQRLTRGDLLDCGTIVHAFRYSKTLVMTPTKIYDIEDKYDRKFFEMELTRGNDYLEYTKEILTRGREASVHEGNYIASIAPYGYKKVKNGKEQILVIDPVEAEYVRMAYHWYVYDGLGAANIGHKLNEMGAHPRKSKYFRPTAIRQMLTNEVYIGKIRWGHKKVIKVFEDGKVVKKRPRNPDYELIQGKHEPIISEELFNLAQEQKNKSTREHYDSTLKNYYAGLIKCKKCGYAIGMRIHRQKGVVYRRDRYYCRNGRYCDQKGSNAEIVNDAILKSLKGYLQDFKIKISGTNKELYETQMTVIENMENELGKLSKKEMDLYDYLEDGLYTKEVFKARMDLLKKEREELIEKIKKAKQTMPSVEKYQRQYYSLMQAIDAIENPNISAKDKNQLLKNIIEVIYYNKEQADIQTKDGIIRGDIEIEIILK

SEQ ID NO: 4242 - protein, 522 aa, Unknown
  Description of Unknown: Integrase B4243 sequence
  PTHR30461:SF3,SM00857,G3DSA:1.10.10.2600,IPR036162,PF13408, IPR025827,G3DSA:3.40.50.1390,PS51737,IPR006119,IPR038109, PF07508,SSF53041,IPR011109,PTHR30461,Coil, PS51736,cd00338,PF00239
MGKKQKTNGGDAVIYARYSSHNQRDVSIEQQVEACRKHAAELGLTVTATYEDRAISGKTDKRPSFQRMMRDAEQHKFAYVLAWKSNRIGRNMMQALVNESRLVDCGVKVFYAEEDFDDNAAGRFALRSMMNVNQFYIENMAEDVKRGLYDNAKKGLVNGSLPLGYKRGADGKPEIDEPKAAIVREIYTRVAAGELFASIADDLNARGIKTARGREWNKGSFHVLCHNDRYRGIYMYGDIRIPGGMPRIISDELFYDAQEAYGMKKDNRYGRARHGAENYLLTGKLYCGHCGGYMVGISGTSKTGEMHYYYACQKHRLEHTCEKKAIRRDVIENAVARAIMMYCLDDETIDFIVDSTIAYFKQKDHELHIEAMENELAAVQQAISNLMKAIEAGIITPTTRTRLLDLEEQQSKLSAKINTAKAERVEINRDDLIAGLQLFRTGDIKNKKFLAKLFNTFLIAVYLYDDNRLKIVFSFTGNHNSVEIPLELDNDCPDSEIVSDETEVRMSHLECTSRDSNPGPTD

SEQ ID NO: 4243 - protein, 522 aa, Unknown
  Description of Unknown: Integrase B4244 sequence
  PTHR30461:SF3,IPR036162,PS51737,IPR011109,PTHR30461, PF00239,G3DSA:1.10.10.2600,IPR006119,SSF53041,cd00338, SM00857,IPR025827,IPR038109,PS51736,cd18688, PF13408,G3DSA:3.40.50.1390,PF07508,Coil
MNGEIKNVVLYLRYSSAAQNEQSIEGQRHVCQEYCRRAGYQIIDEYVDRATSASHNVEKRLNFQRMLRDAERGRFDAVVVYKLDRFARNRYDSVNAKYRLKKAGVVLLSATENLSDSPESIILESVLEGMAEFYSAELSQKITRGMKETAQKHLSTGGTVPLGYHIENRRLVIDPTTAPIVKQAFEMYAAGHTATAIAKQFNASGYRTSKGTAFNRSSFKSMFHNERYIGIYKYGAYKAENAVPAIIDKQLWDAVQSRLSHPAPPSQGKAQVPFLLAGKLFCGHCGAKMNGDSGKGRSGEPYYYYTCYNRKREHTCHKKSVRKEWIEKVVVQDAMHLLTDDYIEELADIAVQENQRQIAATTKIPLLKEKIVETEKSINNIVTAIEKGVASDTLMHRITGLEQQKKDYENQLAAEETSAIQLDKYMVIYWLDQFKHGDVDDERFRRNLINLLVNSVTIWDDPDGGFRITTAYNLTDAPTKTFRVEALPGSDMGSSSPPLATNPNQILIIGLVLVQTRKHLMV

SEQ ID NO: 4244 - protein, 522 aa, Unknown
  Description of Unknown: Integrase B4245 sequence
  SM00857,G3DSA:1.10.10.2600,IPR036162,PS51737,G3DSA:3.40.50.1390, IPR006119,IPR038109,PF07508,SSF53041,IPR011109, PTHR30461,Coil,PS51736,cd00338,PF00239
MELLNVCIYLRKSRADREAEARGEGETLARHERILLDLAKKRGYNVGAIYKEIVSGETISARPVMQQVLREVEAGMWDGVLVVEVERLARGDTIDQGVVARAFQYSSTLIITPLKTYDPNNEYDEEYFEFGLFMSRREYKTIRRRLTAGRESSAKEGKYCGSKPPYGYSRIKLIGEKGWTLQPVPDQAEIVKLIFNLYVHGVSGERIGMAKICRKLNDSGIKTMDGGLWTVPRVQAILRNPVYAGMIRWNSRKAVKHIQDGQITISRPFAQDHILAEGRHPAIVSKELFQQAQDIVNRNPARPLNSLHVLRNPLAGIVRCGKCGYVMTRKSPSDRQGALLRCPYSSCDNISSKLPLVEKALLDGLQELVDGYKLNSSFSDQEYSLSISEKEEMIRGKLKEIDILKKKKEKQYDLLEQGIYSTDEFLERSRATAAELSACDTVIYSLRQEIKHEQELQFQRSSFIPKCEDLLTHYWTWDTSTKNQFLRELIEKAVYTKSKRNTWKNGDDVSFTLDIYPKIQQK

SEQ ID NO: 4245 - protein, 522 aa, Unknown
  Description of Unknown: Integrase B4246 sequence
  SM00857,G3DSA:1.10.10.2600,IPR036162,PF13408, PS51737,G3DSA:3.40.50.1390,IPR025827,IPR006119, IPR038109,PF07508,IPR011109,SSF53041, PTHR30461,Coil,PS51736,cd00338,PF00239
MVKNRAAIYARFSSHNQRSESIEIQVENSRAYCEREGLQVVHEYCDYAQTGRNIDRAEFQRMMNDARHGLFDYVVIYKVTRIMRNRDEMSLARIMLRKAGVEILYAGEDISSGSSGVLQLGMLEVLAEYESALDSERIRDGIQKNAERCMANGRTMYGWDIVEGRYVINEREASVLRRMKNMLFAGSSVADIVRAVSAERSKRGAKFNQDTVTKLLKRVQNAGVYKYAGHEVPDGMPAIWSQVEQDMIDNILGDRHKPRRKINSTLEFPLSGKLYCAKCGAPMAGTSGTSCTGATYHYYKCRKCRRTVRRDLVEDVVCDMTLQAVAREDVRRRIASGMIAFQAEQPKEQSRSYAIKKELKRIDRTFERIWQAIEDGIAPPGGRERTEELKQRKSELEAELRIAEREEAFNIGVDELMLWLDDAAENLTPEVILGTFVRFAEIDGKTLNVYFAFDHYGDDFRPKQKKAEPCPEGHSSTNYPMVELMRKTANSTSTATRAAIQLDTCIVRVSKNWFVVVGTCQK

SEQ ID NO: 4246 - protein, 522 aa, Unknown
  Description of Unknown: Integrase B4247 sequence
  PTHR30461:SF3,cd00338,SM00857,G3DSA:1.10.10.2600,IPR036162, PS51737,G3DSA:3.40.50.1390,IPR006119,IPR038109,PF07508, IPR011109,SSF53041,PTHR30461,PS51736,Coil, PF00239
MTVFEKNSAVESALHPQMDKYAIYLRKSRADAEAEKLGEGETLARHKKILTELAARKGLYVEKIYHEIVSGETIEARPEIQKLMADCYAGKYRGIIIVEVTRLSRGSQGDAQKIMDCLKFANRNNGLLVITPTKVYDVAHNPDDEEYMEFELFMSRREYKMIKRRMDRGRTQAVVEGNYMGSYRPYGYDILKTRTSRTLVPNAEEAPIVKQIYEWSAEKGWSAGKIARTLTTMAVPTYTGDPEWSTTTVKTILTNPTYSGKVRWNDRMTVKSMVNGELISSRPRSCHTDHYMLYEGKHEALVSEETYRAASRRYYSDRTKANFKLKNPLAGLLRCQACGKMMMHQSYKGRSTPPRFNHRQSTVCKVKSATVEDVMKALIHALKLYIEDFELKIDNLPDVDENSILSQLNALEAEQRKVEKKLAKAFDDYEEGIYTANEFVARKAKHTARLDAIKAQMESLEVSIPEKEEYQEKIMLLSEALDSLLDDALDADVKNEYLKRIIDHIDFSRENNAEFILDVYLK

SEQ ID NO: 4247 - protein, 522 aa, Unknown
  Description of Unknown: Integrase B4248 sequence
  PTHR30461:SF3,cd00338,SM00857,G3DSA:1.10.10.2600,IPR036162, PF13408,PS51737,IPR025827,G3DSA:3.40.50.1390,IPR006119, IPR038109,PF07508,IPR011109,SSF53041,PTHR30461, PS51736,Coil,PF00239
MCAKKKPAMLEPDMQDAVIYTRYSSHNQRDCSIEQQVADCEIFARQNNLRVVKVYADRHMSGTTDNRPQFQQMLKDAAHGHWAYVICWKIDRFARNRYDSATYKFRLKKAGVRVLYAKESIPDGPEGILLESVLEGSAEYYSAALAQNIRRGMKYNAEQCKVNSGSIPFGYCKGPDGRFAIHEANAEVVREIFRKAAAGMPFVDIANDLNSRGLKTSRGGRWNKGSFRLLMNEAYIGVYHFSDTRIEGGMPALIDQGTFWAANERLKANSSVRGRHQDGGDYLLTGKLKCAHCGSYMIGFSGTGKSGELHYYYGCQKRRRERACKKANVPREWIERVVVKAALDYVLRPDVMEWIADAVMEYQEREAASAQLAALTAELEENQKATDNVMKAIEAGIITSTTKQRLLDLEAKAQDLKRAIELEKLSHVRLERDQVLFWLDRFRGGSLQSQEFRRKVIDAFVSVVYLSDDHLRIAFNYSGGSNAEADFDLVMDAEAAAGELSKKFAQGHVASTKQFVLEPDSL

SEQ ID NO: 4248 - protein, 522 aa, Unknown
  Description of Unknown: Integrase B4249 sequence
  PTHR30461:SF3,SM00857,G3DSA:1.10.10.2600,IPR036162,PF13408, PS51737,G3DSA:3.40.50.1390,IPR025827,IPR006119,IPR038109, PF07508,IPR011109,SSF53041,PF00239,PTHR30461, PS51736,Coil,cd00338
MSSVDKTAVIYARYSSHGQTEQSIDGQIAAAQKYAEGKGYTIIHIYADRAMTGRNDDREQFQKMLSDTATHQFGVILLWKIDRFGRNREEIAFNRYRCKKNGVRVERVAEDVPDGPEGVILDSVLEGMAEYYSLQLAQNVRRGQRESAKKSQSNGGTRMIGYKVNPDTKRYEIDPDTAPFITEVFRRYAGGQTMAEIAAWLNAQGLRATRGGMFTVNSLHRLLKNEKYTGVYIFRDIRNEGGMPALIDRATFDKVQEMLKVNRRAPSRVWSRAEYLLTDKLFCGHCGAPMAGVSGHGHTGVKHNYYTCLNRKRKKSCTKKSVRQDVLEPLVLKSIRNLLQDDATLKYIADRVWAEYERSDTSGDTIRALDRQIADVDRALSNVMKAIEMGIINEMTKARMDELTEQKQALSAARADAGLARGFKLTRNMILYFLRKMAAMDISDRDSQKRLIKTFVNAIYLYDDHFDIAFNYTENGKVIVKMQEIDDASTGGAFGCCAQCPTKIKAPAVPRRVLLFWCSVSC

SEQ ID NO: 4249 - protein, 522 aa, Unknown
  Description of Unknown: Integrase B4250 sequence
  SM00857,G3DSA:1.10.10.2600,IPR036162,PF13408,IPR025827, G3DSA:3.40.50.1390,PS51737,IPR006119,IPR038109,PF07508, SSF53041,IPR011109,PTHR30461,Coil,PS51736, cd00338,PF00239
MNTLERDCIYLRKSRADREAEARGEEETLARHERILLDLAKRRGCHIGAIYREVVSGETISARPVMQRLLQEVESGMWDGVLVVEVERLARGDSIDQGVVARAFQYSDTKIITPTKTYDPNNEFDEEYFEFGLFMSRREYKTIKRRLNAGRVSSVQEGKYCGNKPPYGYRRVKLEHTKGYSLEPIPDQAEIVKLIYNWYTYGIDGERIGMCKITRKLIDMGVPSLSGKSWSTATVANILENPVYTGKIRWNRRKGLNKIENGNVVKSRPRCNDYILTDGLHEAIISQEIYDLAQYYRSMNPPRPIGASNTVKNPLSGIIKCGKCGHNMVRRPYNSRKQEDTLLCSYTGCNNVSSRLSLVEKALIAGLADLVQSYKINDSLNDTNGVDIIATKEKVLLDKRAELENLNTQKNRQYELLEQGIYTTEVFLERSGATAKQIDDCAAAIERIAADLAHDRELLEQKFNFIPKCEHLLSNYWDWDAPTRNSVLKELLERVDYFKDNKNDFKRGDEITFTLDIYPKIQ

SEQ ID NO: 4250 - protein, 522 aa, Unknown
  Description of Unknown: Integrase B4251 sequence
  PTHR30461:SF3,SM00857,G3DSA:1.10.10.2600,IPR036162,PF13408, PS51737,G3DSA:3.40.50.1390,IPR025827,IPR006119,IPR038109, PF07508,SSF53041,IPR011109,PF00239,PTHR30461, PS51736,Coil,cd00338
MRAFIYCRFSSHKQQELSIEGQRDICQEYADKHNITVVGQYADRARSGKTENRADFRRLMRDAATGVVDCVLVWRYDRFFRNRAESALYRKQLEAAGVHLISVTEYIPEGSAGIITQGMIETVAEYFSAKLSEDVSRGMNKAAQHCQIVGRAPLGYRAGPNKRWQIDPVGAELVRRIFEWYASGKAMGQLAAQLNEEGHRTTSGTLYTRSSFNSILRNEKYIGVYSYGGEVRIEGGCPRIIEDELFFTVQRRLSANRHRPGAYKAEVPYLLSGKLFCGLCGAPMTGTAGTSHTGARHYYYICNNRRAKTCKKKNVRLDLIEEAVLQSALDILTDENIAYISTEVERRCAENSDSAALLASLNAQLEEVQRRLKNIGNAIAQGIITETTKELLEEAEADRTALRQQIDRAKVQAALVVKAEAVACWLDGFRRGDRTDPDFRRQVFGALVHSVFVYDDYLKIIFNVDSAGAAVVPYEAAQAATPSEAPPGSYLDTLGAPYQANPNVLLFEGAFGFVFYFPIMKV

SEQ ID NO: 4251 - protein, 522 aa, Unknown
  Description of Unknown: Integrase B4252 sequence
  SM00857,IPR036162,PS51737,G3DSA:3.40.50.1390,IPR006119, PF07508,SSF53041,IPR011109,PTHR30461,Coil, PS51736,cd00338,PF00239
MREQYLIYLRKSRNDAQLEAMGVDVLERHEKTLLALAKSMNLQIGAIYREVVSGDSIAARPEMQRTLKEVEAGLWKGVLVMEVERLARGDTVDQGIVQRTFQYSETLIVTPAKIYDPNNEFDEEYFEFGLFMSRREYKTIRRRMRAGVTAAVREGKWPFNRSPYGWKRVKLEDARGWVLAPDPDEAPVVKLIFDMFTGPDRVGITSICKYLESHGIPPRNGDRWLECTILGILGNIVNDQKVGIGHRKQITTVKDGVLTKSRESRLSNNYDLIATGLQPRLIDHDVFVEAQGYLGKGTPKPPESYGIKNPLASLVVCSCCGQKMQRRPKTTTPGCHGAPYDVLMCHTRGCPTIGAPLELVEKEVINVLSGWVAGYQLNPSQEVKNNVTEKQALLSAAIANRDALLKQNEKLYDLLEREIYTTDVFLERSSTLHERIEEAELSISALEKDLEYEKQKFENSSRFVPKCKELLSSYWDLSVPDRNKALKLLIDRIEYKKTVKNKRGTVDTPTFELTLKPRIPRI

SEQ ID NO: 4252 - protein, 522 aa, Unknown
  Description of Unknown: Integrase B4253 sequence
  SM00857,G3DSA:1.10.10.2600,IPR036162,PS51737, G3DSA:3.40.50.1390,IPR006119,IPR038109,PF07508, SSF53041,IPR011109,PTHR30461,Coil, PS51736,cd00338,PF00239
MREQYLIYLRKSRNDAQLEAMGVDVLERHEKTLLALAKSMNLQIGAIYREVVSGDSIAARPEMQRTLKEVEAGLWKGVLVMEVERLARGDTVDQGIVQRTFQYSETLIVTPAKIYDPNNEFDEEYFEFGLFMSRREYKTIRRRMRAGVTAAVREGKWPFNKAPYGWKRVKLEDARGWVLAPDPDEAPVVKLIFDMFTGPDRVGITSICKYLESHGIPPRNGDRWLECTILGILGNIANDQKVGIGHCKQITTVKDGVLTKSRESRLSNNYDLIATGLQPRLIDHDVFVEAQGYLGKGTPKPPESYGTKNPLASLIVCSCCGKKMQRRPKTTTPGCHGAPYDVLMCHTRGCPTIGAPLELVEKEVINALSDWVTGYQLDPSQEVKNNVTEKQALLSAAVANRDALLKQNEKLYDLLEREIYTTDVFLERSNTLHERIEEAELSISALKKDLEYEKQKFENSSRFIPECKELLSSYWDLSVPDRNKALKLLIDRVEYKKTVKNKRGTVDTPTFELTLKPRIPRI

SEQ ID NO: 4253 - protein, 522 aa, Unknown
  Description of Unknown: Integrase B4254 sequence
  SM00857,G3DSA:1.10.10.2600,IPR036162,PF13408,IPR025827, G3DSA:3.40.50.1390,PS51737,IPR006119,IPR038109,PF07508, SSF53041,IPR011109,PTHR30461,PS51736,cd00338, PF00239
MELLNVCIYLRKSRADREAEARGEGETLARHERILLDLAKKRGYNVGAIYKEIVSGETISARPVMQQLLREVESGMWDGVLVVEVERLARGDTIDQGVVARSFQYSNTLIITPLKTYDPNNEYDEEYFEFGLFMSRREYKTIRRRLTAGRESSAKEGKYCGSKPPYGYSRIKLVGEKGWTLQPVPDQAEIVKLIFNLYVHGVSGERIGMAKICRKLNDSGIKTMDGGLWTISRVQAILRNPVYEGMIRWNSRKAVKHIKDGQITISRPFAQDYILVKGRHPAIVSRELFQQAQDIVNKNPARPLNSLHVLRNPLAGIVRCGKCDHVMTRKSPNGRQGDLIRCPYSSCSNISSKLPLVEKALLDGIQELVDGYRLNNSVSDQEYSLSISEREKMIQGKLKEIDILKKRKQRQYDLLEQGIYSTEEFLERSRATAAELSACDAVILSLKQEIEHEQELQFQRSSFIPKCEDLLANYWTWDTSIKNRFLRELIEKAVYTKNVKNTWKNGDDISFTLDIYPKIQQK

SEQ ID NO: 4254 - protein, 522 aa, Unknown
  Description of Unknown: Integrase B4255 sequence
  SM00857,G3DSA:1.10.10.2600,IPR036162,PS51737,G3DSA:3.40.50.1390, IPR006119,IPR038109,PF07508,SSF53041,IPR011109, PTHR30461,Coil,PS51736,cd00338,PF00239
MREQYLIYLRKSRNDAQLEAMGVDVLERHEKTLLALAKSMNLQIGAIYREVVSGDSIAARPEMQRTLKEVEAGLWKGVLVMEVERLARGDTVDQGIVQRTFQYSETLIVTPAKIYDPNNEFDEEYFEFGLFMSRREYKTIRRRMRAGVTAAVREGKWPFNKAPYGWKRVKLEDARGWVLAPDPDEAPVVKLIFDMFTGPDRVGITSICKYLESHGIPPRNGDRWLECTILGILGNIVNDQKVGIGHRKQITTVKDGVLTKSRESRLSNNYDLIATGLQPRLIDHDVFVEAQGYLGKGTPKPPESYGTKNPLASLIVCSCCGKKMQRRPKTTTPGCHGAPYDVLMCHTRGCPTIGAPLELVEKEVINALSDWVTGYQLDPSQEVKNNVTEKQALLSAAIANRDALLKQNEKLYDLLEREIYTTDVFLERSSTLHERIEEAELSISALEKDLEYEKQKFENSSRFIPECKELLSSYWDLSIPDRNKALKLLIDRVEYKKTVKNKRGTVDTPTFELTLKPRIPRI

SEQ ID NO: 4255 - protein, 522 aa, Unknown
  Description of Unknown: Integrase B4256 sequence
  PTHR30461:SF3,SM00857,G3DSA:1.10.10.2600,IPR036162,PF13408, PS51737,G3DSA:3.40.50.1390,IPR025827,IPR006119,IPR038109, PF07508,IPR011109,SSF53041,PF00239, PTHR30461,PS51736,Coil,cd00338
MSSVDKTAVIYARYSSHGQTEQSIDGQIAAAQKYAEGKGYTIIHIYADRAMTGRNDDREQFQKMLSDTATHQFGVILLWKIDRFGRNREEIAFNRYRCKKNGVRVERVAEDVPDGPEGVILDSVLEGMAEYYSLQLAQNVRRGQRESAKKSQSNGGTRMIGYKVNPDTKRYEIDPDTAPFITEVFRRYAGGQTMAEIAAWLNAQGLRATRGGMFTVNSLHRLLKNEKYTGVYIFRDIRNEGGMPALIDRATFDKVQEMLKVNRRAPSRVWSRAEYLLTDKLFCGHCGAPMAGVSGHGHTGVKHNYYTCLNRKRKKSCTKKSVRQDVLEPLVLKSIRNLLQDDATLKYIADRVWAEYERSDTSGDTIRALDRQIADVDRALSNVMKAIEMGIINEMTKARMDELTEQKQALSAARADAGLARGFKLTRNMILYFLRKMAAMDISDRDSQKRLIKTFVNAIYLYDDHFDIAFNYTENGKVIVKMQEIDDASTGGAFGCCAQCPTKIKAPAVPRRVFLFWCSVSC

SEQ ID NO: 4256 - protein, 522 aa, Unknown
  Description of Unknown: Integrase B4257 sequence
  cd00338,SM00857,G3DSA:1.10.10.2600,IPR036162,PF13408, PS51737,IPR025827,G3DSA:3.40.50.1390,IPR006119,IPR038109, PF07508,IPR011109,SSF53041,PTHR30461,PS51736, Coil,PF00239
MKKTKNSVQRAVIYARYSCSNQTEQSIEGQLADCEKFAEKYNYYIVDTYIDRAMSATTDRRPQFQQMIADSATGGFDVIIVWKLDRFARNRYDSAVNKQKLNSNGVKVVSVMEHIEDTPEGALMESVLEGFAEYFSKDLSQKVSRGMRETALKFKATGLIPYGYKKTSDNICVPDEHTAPVVKKIFEMYAGGMINKDICDWLNSHGYRTSNGNLFKNQYLRKILNRRRYTGTYTYGDLELHDENQRIISDELFDRVQIQLQAKKRTGRIAREQYILVGKLFCGYCRNPIRGESGRNHQNRIYTYYKCSVNKTGGKCPKTTVHRDIIENNTIKFILNNFLNDEIINSVVDTIQASETAENNSAELITLRTQIEDTDRKINNLLTAIENGVFTPSTKQRLNDLENVKEKLKYELIVKQSEKNNFNATAFKKFLKNIDVDDFKTIEQRQKLINLVLYREYLWNDKVLYIFNLTPSKPNDSVDVDSYVDAVLAGSTSPTDGVPLVAVFEPIKMYLIGRLLFCMKQI

SEQ ID NO: 4257 - protein, 522 aa, Unknown
  Description of Unknown: Integrase B4258 sequence
  PTHR30461:SF3,SM00857,G3DSA:1.10.10.2600,IPR036162,PF13408, IPR025827,G3DSA:3.40.50.1390,PS51737,IPR006119,IPR038109, PF07508,SSF53041,IPR011109,PTHR30461,PS51736, cd00338,PF00239
MGNVMLIPARRQVGNNARKQDEEKPKLRVAAYCRVSTDSDEQATSYEAQVEYYTEYIQKNPDWEFAGIYADDGISGTNTKKREEFNRMIDDCKAGNIDMIITKSISRFARNTLDCLKYIRQLKDMNIPVLFEKESINTMDAKGEVLITIMASLAQQESQSLSQNVKMGLQYRYQQGKVQINHNRFFGYTKDADGNLVIDPEQAETVKRIYREYLEGLSMDKIAAGLERDGILTGAGGKKWHTSTINKILRNEKYIGDALLQKTYTTDFLNKTRVKNNGLVPQYYVEGDHEAIIPKDIYLQVQEELVRRRVGKTSANGKKRNYSCNHCFSQIVICGECGEMFRRLHWNNRGVKSIVWRCISRLESTGLECHARTINELVLQDAVVKAINQMLGDKSNYQAQLQLNIAAVIRASQATAIDSIDEKLMSLQQELIQKANSKEDYDEIADEIFRLRELRQKTTVDTAARDEQIKRINDLQDYISQQTSYLTEFDEALVRRWIKQITIWDDRITVELKSGVSIDVDA

SEQ ID NO: 4258 - protein, 522 aa, Unknown
  Description of Unknown: Integrase B4259 sequence
  PTHR30461:SF3,SM00857,G3DSA:1.10.10.2600,IPR036162,PF13408, IPR025827,G3DSA:3.40.50.1390,PS51737,IPR006119,IPR038109, PF07508,SSF53041,IPR011109,PTHR30461,cd00338, PF00239
MSTNKNTARKYAAGGGSDNSCDVEPLRAVIYARYSSSGQREESIEGQLRDCYDFAKKHGIIVIGEYIDKAMTGRVDRRPDFQRMMKDSEKGRFNCVLLWKMDRFARNRYDSAMYKYKLKKNGIRIFYAKETIPDGPEGIILESVMEGYAEYYSENLAQNVKRGNYDSALELKTLGKTCLGLKTGPDGRYMIDQAEATIVRRIFEEYAEGERAKDIYERLNSEGYRTSRGGKFNKNSLRRILSNKKYIGVYEYEDIYVENGIPAIITDRDLFERVQKMLKINHDAPARGKAQNFLLTTKLFCGLCGSPMIGDGGTSHTGKAYAYYSCTKRKRGRGCKKESVPKDWIEDLVVGELVKIVHNDELIEQIADRVMEYQKREKDQSGLHALEIRQKENEKAISNMLAAIEAGIITPSTKTRLMELEADRADIEKGIARELLAEPEFERDQIIYFLERFRSGDIKDEAYRIMLVDTFLNSVYLYDDDHLVLVMNYSGENCKVDLKLVEGAVSGDGCKGSAFAPSSALK

SEQ ID NO: 4259 - protein, 522 aa, Unknown
  Description of Unknown: Integrase B4260 sequence
  PTHR30461:SF3,SM00857,G3DSA:1.10.10.2600,IPR036162,PF13408, IPR025827,G3DSA:3.40.50.1390,PS51737,IPR006119,IPR038109, PF07508,IPR011109,SSF53041,PTHR30461,PS51736, cd00338,PF00239
MNTVIYARYSAGPRQTDQSIEGQLRVCADFCKQRGLTVIDTYCDRHISGRTDERPEFQRLIADAKRKKFEAVVVYKTDRFARNKYDSAVYKRELKRNGIQIFYAAEAIPDGPEGIILESLMEGLAEYYSAELAQKIKRGMRENALKCQSTGSGRPLGYRVDEQKRFQIDPESAQTVQTIFEQYIKGESNAAICELLNSRGLRTAQGKPFNKNSINRIIKNRKYIGEYRYHDIVVEGGMPAIISKDTFNLAQAEMERRRTRKAPKSPKAEYLLAGRLFCGHCKGPMQGVSGTGKSGNKWYYYYCGNTRGKNKTCDKKQVSRDRLERAVVDFTVRYILQEELARKVHAAQERQNDTASEIAFYEKKLADNKKSIANVLRAIESGAATQTLPARLQELENEQAVILGEISFLKGKRLAFTEDQILFALMKHLEPYPGESEQDYRRRIISDFVSEVYLYDDRLLIYFNISSEDGKLKSADLSNIEGGEFDEGLTSSTNLIAGRTPEMTIVVLPYGFVLATQIKDRL

SEQ ID NO: 4260 - protein, 522 aa, Unknown
  Description of Unknown: Integrase B4261 sequence
  PTHR30461:SF3,cd00338,SM00857,G3DSA:1.10.10.2600,IPR036162, PF13408,PS51737,G3DSA:3.40.50.1390,IPR025827,IPR006119, IPR038109,PF07508,IPR011109,SSF53041,PTHR30461, PS51736,Coil,PF00239
MSNAVIYARYSSGHQREESIEGQIRECTNFAKRNGLTIVEHYIDRAISAKTDDRPSFQQMVADSSKKTFDTIIVYTLDRFARNRYDSAVYKAKLKRNGVRVLSAKENITSDPSGIILESVLEGMAEYYSVELAQKVKRGMTENALACRWASGRIPFGYTIDADKHLHPDPALVPIVQEAFEMYAAGAKIVDIARKINSYHVVTGMGNKFGRSSFDRMIRSETYIGVFKWNDIRKENAIPPIITPELFYKCQARYNARNRKNVARPSAIYLLSGKLRCGCCGGSMCGMSGKSRNGTMHYYYSCYSTRRRTSHCDIGNIRRDEIEHIIAAHAASILKKPINLDIIANQALKTNNSVKNYRLESLIQQEKDLTQKLENCMKAIDQGLVSITLMDRIKQYEADLQSVKNDISLEKIKSNPIQVTKEHIIFFLEKFALLEGEKFKDRIISTMVRDIVIKKEKDGNYLVTVQYNYANSKELPNEESYSVPESIGSQDVELVDHMGVVTNRLRFYPYYFEETFIFTQAS

SEQ ID NO: 4261 - protein, 522 aa, Unknown
  Description of Unknown: Integrase B4262 sequence
  PTHR30461:SF3,SM00857,G3DSA:1.10.10.2600,IPR036162,PS51737, G3DSA:3.40.50.1390,IPR006119,IPR038109,PF07508,IPR011109, SSF53041,PF00239,PTHR30461,PS51736,Coil, cd00338
MPRRRKFAAKDRGRCVIYARFSSSRQREESIEDQVRVCTAYARDNGMEVEGVYADHAASARSDDRPEFQRMVREARDGAWGVVLVYKLDRFARDRFDAANYRVRLRDAGVELVSAMEQIPDAPEGAILESVLEGVNEWYSRSLSQNVTRGMMGNARKCMANGVRVFGYRVDGEGRYVVDEREAAIVRRAFSMAALGSTRGEVMLWLNSTCRNVRGGQWRYPSVATLLSNEKYLGVYSFGDVRVEGGMPAIVDQELFDAANRPRPHARVGAFPLTGRLFDAETGTPYRGDGGTSGTGRRYFYYTCPLAGGVVRYPQTEVEDAVMGALRGFVARPGEAERLADAVLGAVGGMGDAHRLDDARTRLREAQRGKGRLVDAIVGGVDPSLVQERLDALGAEVRRLEAEVARLERVTVPDRDWAVSWVRERMPESLTKQELRRTVGRCELADDGTLTVEIPWSTSCDSEAQKNSELPARGQFRVNKFGGHEDSKSELFVTSSGLKIVCGQKLERSGQKIANRNHSAQK

SEQ ID NO: 4262 - protein, 522 aa, Unknown
  Description of Unknown: Integrase B4263 sequence
  SM00857,G3DSA:1.10.10.2600,IPR036162,PF13408,IPR025827, PS51737,G3DSA:3.40.50.1390,IPR006119,IPR038109,PF07508, SSF53041,IPR011109,PTHR30461,Coil,PS51736, cd00338,PF00239
MELLNVCIYLRKSRADREAEARGEGETLARHERILLDLAKKRGYNVGAIYKEIVSGETISARPVMQQVLREVESGMWDGVLVVEVERLARGDTIDQGVVARAFRYSETLIITPLKTYDPNNEYDEEYFEFGLFMSRREYKTIRRRLTAGRESSAKEGKYCGSKPPYGYSRVKLVSEKGWTLQPVPDQAEIVKLIFNLYVHGVAGERIGMAKICRKLNDSGIKTMDGGLWTVPRVQAILRNPVYAGMIRWNSRKAVKHIQDGQITISRPFAKDYILVEGRHPAIVSKELFQQAQDIVNQNPARPLNSLHVLRNPLAGIIRCGKCGYVMTRKAPSGRQVDLLRCPYSSCNNVSSKLPLVEKALLDGIQELVDGYKLNSNFSDQEYSLSISEKEEMIRGKLKEIDVLRKKKEKQYDLLEQGIYSTEEFLERSRATAAELSACDAVILSLKQEIEHEQELQFQRSSFIPKCEDLLANYWTWDTSTKNRFLRELIEKAVYTKNAKNTWKNGDDISFTLDIYPKIQQK

SEQ ID NO: 4263 - protein, 522 aa, Unknown
  Description of Unknown: Integrase B4264 sequence
  SM00857,G3DSA:1.10.10.2600,IPR036162,PF13408,IPR025827, G3DSA:3.40.50.1390,PS51737,IPR006119,IPR038109,PF07508, IPR011109,SSF53041,PTHR30461,PS51736,cd00338, PF00239
MELLNVCIYLRKSRADREAEARGEGETLARHERILLDLAKKRGYNVGAIYKEIVSGETISARPVMQQLLREVESGMWDGVLVVEVERLARGDTIDQGVVARSFQYSNTLIITPLKTYDPNNEYDEEYFEFGLFMSRREYKTIRRRLTAGRESSAKEGKYCGSKPPYGYSRVKLVGEKGWTLQPVPDQAEIVKLIFNLYVHGVSGERIGMAKICRKLNDSGIKTMDSGLWTISRVQAILRNPVYEGMIRWNSRKAVKHIKDGQITISRPFAQDYILVKGRHPAIVSRELFQQAQDIVNKNPARPLNSLHVLRNPLAGIVRCGKCDHVMTRKSPNGRQGDLIRCPYSSCSNISSKLPLVEKALLDGIQELVDGYRLNNSVSDQEYSLSISEREKMIQGKLKEIDILKKRKQRQYDLLEQGIYSTEEFLERSRATAAELSACDAVILSLKQEIEHEQELQFQRSSFIPKCEDLLANYWTWDTSTKNRFLRELIEKAVYTKNAKNTWKNGDDISFTLDIYPKIQQK

SEQ ID NO: 4264 - protein, 522 aa, Unknown
  Description of Unknown: Integrase B4265 sequence
  SM00857,G3DSA:1.10.10.2600,IPR036162,PF13408,PS51737, G3DSA:3.40.50.1390,IPR025827,IPR006119,IPR038109,PF07508, IPR011109,SSF53041,PTHR30461,Coil,PS51736, cd00338,PF00239
MVKNRAAIYARFSSHNQRSESIEIQVENSRAYCEREGLQVVREYCDYAQTGRNIDRAEFQRMMSDARHGLFDYVVIYKVTRIMRNRDEMSLARIMLRKAGVEILYAGEDISSGSSGVLQLGMLEVLAEYESALDSERIRDGIQKNAERCMANGRTLYGWDIVEGRYVINEREASVLRRMKNMLFAGSSVADIVRAVSAERSKRGAKFNQDTVTKLLKRVQNAGVYKYAGHEVPDGMPAIWSQAEQDMIDNILGDRHKPRRKINSTLEFPLSGKLYCAKCGAPMAGTSGTSCTGATYHYYKCRKCRRTVRRDLVEDVVCDMTLQAVAREDVRQRIASGMVTFQAEQPKEQSRSYAIKKELKRIDRTFERIWQAIEDGIAPPGGRERTEELKQRKSELEAELRIAEREEAFNIGVDELMLWLDDAAENLTPEVILGTFVRFVEIDGKTLNVYFAFDHYGDDFRPKQKKAEPCPEGHSSTNYPMVELMRKTANSTSTANRAAIQLDTCIVRVSKNWFVVVGTCQK

SEQ ID NO: 4265 - protein, 522 aa, Unknown
  Description of Unknown: Integrase B4266 sequence
  PTHR30461:SF3,cd00338,SM00857,G3DSA:1.10.10.2600,IPR036162, PF13408,PS51737,IPR025827,G3DSA:3.40.50.1390,IPR006119, IPR038109,PF07508,IPR011109,SSF53041,PTHR30461, mobidb-lite,Coil,PF00239
MPKKPTKHPAKPKRGKKLETEEPGVLYGRYSSHNQKDISVEQQFEKGYELAAEYGIKIIDTYADRAVSGRTDKRKDFQRMMSDAAKGKFRYVIAWKSNRMGRNMLEALINEARLQELGVRVLYVEEDFDDTAAGRFAARSMMNVNQFYSENMAEDIRRGLYDNASNCMVANGHLPYGYKRDDTLHYVIDEPKAAVIREIFTRVAAGEPFVDIMSSLNARGIKTSYNRPWGRSSFQKILSNERYRGIYIYGDVRKEDGIPRIISDELFFKVQEVITTKKNPQGRHRVNGDYLLTGKLFCGKCKSPMVGISGTGRSGKLHYYYVCQKHRTEKTCDKKNVRRDEIELQVAQAIKDYALKDDVIEWIADSTVAYNERKEAESKVGILEDQLAGTERGIKNIMSAIEQGIITETTKSRLVELESERATIKAKIAAARADIVTVSRDDIISGLEMFRDGDVHDKKYQARLFDTFLVAVYVYDDDLRLVFSFSGSKNTVQIPIESAVNAVENNEAKCSFKLCSAPPRTS

SEQ ID NO: 4266 - protein, 522 aa, Unknown
  Description of Unknown: Integrase B4267 sequence
  SM00857,G3DSA:1.10.10.2600,IPR036162,PS51737,G3DSA:3.40.50.1390, IPR006119,IPR038109,PF07508,SSF53041,IPR011109, PTHR30461,Coil,PS51736,cd00338,PF00239
MREQYLIYLRKSRNDAQLEAMGVDVLERHEKTLLALAKSMNLQIGAIYREVVSGDSIAARPEMQRTLKEVEAGLWKGVLVMEVERLARGDTVDQGIVQRTFQYSETLIVTPAKIYDPNNEFDEEYFEFGLFMSRREYKTIRRRMRAGVTAAVREGKWPFNKAPYGWKRVKLEDARGWVLAPDPDEAPVVKLIFDMFTGPDRVGITSICKYLESHGIPPRNGDRWLECTILGILGNIANDQKVGIGHRKQITTVKDGVLTKSRESRLSNNYDLIATGLQPRLIDHDVFVEAQGYLGKGTPKPPESYGTKNPLASLIVCSCCGKKMQRRPKTTTPGCHGAPYDVLMCHTRGCPTIGAPLELVEKEVINALSDWVTGYQLDPSQEVKNNVAEKQTLLSAAVANRDALLKQNEKLYDLLEREIYTTDVFLERSSTLHERIEEAELSISALEKDLEYEKKKFENSSRFIPECKELLSSYWDLSVPDRNKALKLLIDRVEYKKTVKNKRGTVDTPTFELTLKPRIPRI

SEQ ID NO: 4267 - protein, 522 aa, Unknown
  Description of Unknown: Integrase B4268 sequence
  PTHR30461:SF3,cd00338,SM00857,G3DSA:1.10.10.2600,IPR036162, PS51737,G3DSA:3.40.50.1390,IPR006119,IPR038109,PF07508, IPR011109,SSF53041,PTHR30461,PS51736, Coil,PF00239
MGGRAAIYARFSSHNQRGESIEIQVEKSRAYCAENDLRVVATYCDFAQTGTNTDRAEFQRMMADAKRGLFDFVVIYKVTRIMRNRDEMAMARIMLRRCRVEILYAGEDISDGSAGVLQLGMLEVLAEYESALDGERIRDGIQKNAERCMANGCVRYGWDIVDGRYVVNEEEAAAIRLGVRMVLSGKSVADVVRAWEPYRTKRGGKWRFQTVRRILMRRENGGEYRYAGVVVPGGMPAIVPMDDEERVIRMLEDSHRPRAKTEAWDFPLTGKLYDGRDGGLMTGTSGTGKSGRPYHYYRCRSCGRTVRRDVVEKRVADAVREALGSADSRERIARMLADAEEERADEKPLSETIKGELAKIETAFSNIWAAIESGIAPPGGKERIDALKQRQALLKDELRTAEALEAARLDYDRALFWLEGMAAAEVDDAQLLRTFVARVVLGGPDDDDGLRVAFTFDDSAGLGDNPSLPGAIGPGGEVFDRMNASSTISNRQVDTHIYLLFYFLSVPRRIELYAGRGRKENA

SEQ ID NO: 4268 - protein, 522 aa, Unknown
  Description of Unknown: Integrase B4269 sequence
  SM00857,IPR036162,PS51737,G3DSA:3.40.50.1390,IPR006119, PF07508,SSF53041,IPR011109,PTHR30461,Coil, PS51736,cd00338,PF00239
MREQYLIYLRKSRNDAQLEAMGVDVLERHEKTLLALAKSMNLQIGAIYREVVSGDSIAARPEMQRTLKEVEAGLWKGVLVMEVERLARGDTVDQGIVQRTFQYSETLIVTPAKIYDPNNEFDEEYFEFGLFMSRREYKTIRRRMRAGVTAAVREGKWPFNRSPYGWKRVKLEDARGWVLAPDPDEAPVVKLIFDMFTGPDRVGITSICKYLESHGIPPRNGDRWLECTILGILGNIVNDQKVGIGHRKQITTVKDGVLTKSRESRLSNNYDLIATGLQPRLIDHDVFVEAQGYLGKGTPKPPESYGIKNPLASLVVCSCCGQKMQRRPKTTTPGCHGAPYDVLMCHTRGCPTIGAPLELVEKEVINVLSDWVAGYQLNPSQEVKNNVTEKQALLSAAIANRDALLKQNEKLYDLLEREIYTTDVFLERSSTLHERIEEAELSISALEKDLEYEKQKFENSSRFIPECKELLSSYWDLSVPDRNKALKLLIDRIEYKKTVKNKRGTVDTPTFELTLKPRIPRI

SEQ ID NO: 4269 - protein, 522 aa, Unknown
  Description of Unknown: Integrase B4270 sequence
  PTHR30461:SF3,cd00338,SM00857,G3DSA:1.10.10.2600, IPR036162,PF13408,PS51737,G3DSA:3.40.50.1390, IPR025827,IPR006119,IPR038109,PF07508, IPR011109,SSF53041,PTHR30461,PS51736,Coil,PF00239
MSSVDKTAVIYARYSSHGQTEQSIDGQIAAAQKYAEGKGYTIIHIYADRAMTGRNDDREQFQKMLSDTATHQFGVILLWKIDRFGRNREEIAFNRYRCKKNGVRVERVAEDVPDGPEGVILDSVLEGMAEYYSLQLAQNVRRGQRESAKKSKSNGGTRMIGYKVNPDTKRYEIDPDTAPFITEVFRRYAGGQTMAEIAAWLNAQGLRATRGGMFTVNSLHRLLKNEKYTGVYIFRDIRNEGGMPALIDRATFDKVQEMLKVNRRAPSRVWSRAEYLLTDKLFCGHCGAPMDGVSGHGHTGVKHNYYTCLNRKRKKSCTKKSVRQDVLEPLVLKSIRNLLQDDATLKYIADRVWAEYERSDTSGDTIRALDRQIADVDRALSNVMKAIEMGIINEMTKARMDELTEQKQALSAARADAGLARGFKLTRNMILYFLRKMAAMDISDRDSQKRLIKTFVNAIYLYDDHFDIAFNYTENGKVIVKMQEIDDASTGGAFGCCAQCPTKIKAPAVPRRVFLFWCSVSC

SEQ ID NO: 4270 - protein, 522 aa, Unknown
  Description of Unknown: Integrase B4271 sequence
  SM00857,G3DSA:1.10.10.2600,IPR036162,PF13408,IPR025827, PS51737,G3DSA:3.40.50.1390,IPR006119,IPR038109,PF07508, IPR011109,SSF53041,PTHR30461,Coil,PS51736, cd00338,PF00239
MVKNRAAIYARFSSHNQRSESIEIQVENSRAYCEREGLQVVHEYCDYAQTGRNIDRAEFQRMMSDARHGLFDYVVIYKVTRIMRNRDEMSLARIMLRKAGVEILYAGEDISSGSSGVLQLGMLEVLAEYESALDSERIRDGIQKNAQRCMANGRTLYGWDIVEGRYVINEREASVLRKMKNMLFAGSSVADIVRAVSAERSKRGAKFNQDTVTKLLKRVQNAGVYKYAGHEVEDGMPAIWTQAEQDMISNILGDRHRPRRRVNSTLEFPLSGKLYCSKCGAPMAGTSGTSCTGATYHYYKCRKCRRTVRRDLIEDVVCDMTLQAVAREDVRRRIASGMVEFQKEQPKEQSRSYAIKKELKRIDRTFERIWQAIEDGIAPPGGRERTEELKQRKSELEAELRIAEREEAFNIGADELMLWLDDAAENLTPEVILNSFVRFAEIDGKTLNVYFAFDHYGNDFSPKKKKAEPCPEGHSSTNSCMVELMRKTANSTSTANRAAIQLDTCIVRVSKNWFVVVGTCQK

SEQ ID NO: 4271 - protein, 522 aa, Unknown
  Description of Unknown: Integrase B4272 sequence
  SM00857,G3DSA:1.10.10.2600,IPR036162,PF13408,PS51737, G3DSA:3.40.50.1390,IPR025827,IPR006119,IPR038109,PF07508, IPR011109,SSF53041,PTHR30461,Coil,PS51736, cd00338,PF00239
MNTLERDCIYLRKSRADREAEARGEEETLARHERILLDLAKRRSCHIGAIYREVVSGETISARPVMQRLLQEVESGMWDGVLVVEVERLARGDSIDQGVVARAFQYSDTKIITPTKTYDPNNEFDEEYFEFGLFMSRREYKTIKRRLNAGRVSSVQEGKYCGNKPPYGYRRVKLEHTKGYSLEPIPEQAEIVKLIYNWYTYGIDGERIGMCKITRKLIDMGVPSLSGKSWSTATVANILENPVYTGKIRWNRRKGMNKIENGNVVKSRPRCNDYILTDGLHEAIISQEIYDLAQNYRSMNPPRPIGASNTVKNPLSGIIKCGKCGHNMVRRPYNSRKQEDTLLCSYTGCNNVSSRLSLVEKALIAGLADLVQSYKINDSLNDTNGVDIIATKEKVLLDKRAELENLNTQKNRQYELLEQGIYTTEVFLERSGATAKQIDDCAAAIERIAADLAHDRELLEQKFNFIPKCEHLLSNYWDWDAPTRNSVLKELLERVDYFKDNKNDFKRGDEITFTLDIYPKIQ

SEQ ID NO: 4272 - protein, 522 aa, Unknown
  Description of Unknown: Integrase B4273 sequence
  PTHR30461:SF3,SM00857,G3DSA:1.10.10.2600,IPR036162,PF13408, IPR025827,G3DSA:3.40.50.1390,PS51737,IPR006119,IPR038109, PF07508,SSF53041,IPR011109,PF00239,PTHR30461, PS51736,Coil,cd00338
MLTSANVIIYLRKSRSDDPSMSVDEVLAKHESILQEYAINNYGSPIPEEQIYREVCSGETIADRPVMLQVMRLIEARIYGGVLVVEPQRLSRGDLEDCGKIINAFRYTETLVVTPPKTYDLLDDYDRKFFEMELMRGNDYLEYTKKILFRGRMASSKQGNFIGSIAPYGYRKVVVGSGKDAYHTLEIEPTESEAVKIMYHLYLDESYGFKKIANRLDELGFKPRKVDHWSAATIQNILENPVYCGKIQFNRRSTKKKIVDGELVKTRPLVTDPEKVVYVDGKHPALIDEARFQETMERRGKNPRVRKSKELTNPFAGLLFCGTCGHAMSHKKFYQHYKKSVCENMLCNDQARCHTKSVSYDAFVNRVTTSLEETIANFEMKLKNGTPSDAMMHQNQIRNLENELQHLKQRDTRQKDAYEDGIYTKEEYAQRNAKLQEQIASTTASLKAAKESSGNIIDYQEKLCRFRDALNALNDPDLPASKKNTLLKACIIKIVYYNDMPSLPGIGRYVENVFKLDIFYKL

SEQ ID NO: 4273 - protein, 522 aa, Unknown
  Description of Unknown: Integrase B4274 sequence
  SM00857,G3DSA:1.10.10.2600,IPR036162,PF13408,IPR025827, PS51737,G3DSA:3.40.50.1390,IPR006119,IPR038109,PF07508, IPR011109,SSF53041,PTHR30461,PS51736,cd00338, PF00239
MGNVMVIPARRQVGNTVKQSAQKKLRVAAYCRVSTDSEEQETSYEAQVTHYTEYIQKNPEWELAGIFADDGISGTNTKKRDEFNRMIDECMAGNIDMVITKSISRFARNTLDCLQYIRQLKDKNIPVYFEKEAINTLDAKGEVLITIMASLAQQESQSMSQNIKLGLQYRYQQGKVQVNHNRFLGYTKDDDGHLIIDPEQAEIVKRIYREYLEGSSMDKIADGLMADGILTGAGKTKWHTSTINKILRNEKYMGDALLQKTYTTDFLTKKRIKNNGTVPQYYVEGDHEAIIPKEFFMQVQAELVRRRVVHVSPTGKKRSFSCNHCFAQMVFCGDCGELYRRVHWNNHGCKSIVWRCISRLEPTAAEMNCTNRTVNELLLQEVTIKAFNQILTERDVFLKTLQQNIAKAVVNADTLSPDGIQSRLLELQKELIKKANNKQDYDAIADEIFRLRDQKEQSEVDSHHREEAMNRIKELQDFISGQETDITGFDETLVKKLIEKITVFADHFTVEFKSGITINIEA

SEQ ID NO: 4274 - protein, 522 aa, Unknown
  Description of Unknown: Integrase B4275 sequence
  PTHR30461:SF3,SM00857,G3DSA:1.10.10.2600,IPR036162,PF13408, IPR025827,G3DSA:3.40.50.1390,PS51737,IPR006119,IPR038109, PF07508,SSF53041,IPR011109,PTHR30461,cd00338, PF00239
MSTNKNTARKYAAGGGSDNSCDVEPLRAVIYARYSSSGQREESIEGQLRDCYDFAKKHGIIVIGEYIDKAMTGRVDRRPDFQRMMKDSEKGRFNCVLLWKMDRFARNRYDSAMYKYKLKKNGIRIFYAKETIPDGPEGIILESVMEGYAEYYSENLAQNVKRGNYDSALELKTLGKTCLGLKTGPDGRYMIDQAEAAIVRRIFEEYAEGERAKDIYERLNSEGYRTSRGGKFNKNSLRRILSNKKYIGVYEYEDIYVENGIPAIITDRDLFERVQKMLKINHDAPARGKAQNFLLTTKLFCGLCGSPMIGDGGTSHTGKAYAYYSCTKRKRGRSCKKESVPKDWIEDLVVGELVKIVHNDELIEQIADRVMEYQKREKDQSGLHALEIRQKENEKAISNMLAAIEAGIITPSTKTRLMELEADRADIEKGIAHELLAEPEFERDQIIYFLERFRSGDINDEAYRIMLVDTFLNSVYLYDDDHLVLVMNYSGENCKVDLKLVEGAVSGDGCKGSAFAPSSALK

SEQ ID NO: 4275 - protein, 522 aa, Unknown
  Description of Unknown: Integrase B4276 sequence
  SM00857,G3DSA:1.10.10.2600,IPR036162,PF13408,IPR025827, G3DSA:3.40.50.1390,PS51737,IPR006119,IPR038109,PF07508, IPR011109,SSF53041,PTHR30461,Coil,PS51736, cd00338,PF00239
MNTLERDCIYLRKSRADREAEARGEEETLARHERILLDLAKRRGCHIGAIYREVVSGETISARPVMQRLLQEVESGMWDGVLVVEVERLARGDSIDQGVVARAFQYSDTKIITPTKTYDPNNEFDEEYFEFGLFMSRREYKTIKRRLNAGRVSSVQEGKYCGNKPPYGYRRVKLEHTKGYSLEPIPEQAEIVKLIYNWYTYGIDGERIGMCKITRKLIDMGVPSLSGKSWSTATVANILENPVYTGKIRWNRRKGMNKIENGNVVKSRPRCDDYILTDGLHEAIISQEIYDLAQYYRSMNPPRPIGASNTVKNPLSGIIKCGKCGHNMVRRPYNSRKQEDTLLCSYTGCNNVSSRLSLVEKALIAGLADLVQSYKINDTLNDTNGVDIIAAKEKILLDKRAELENLNTQKNRQYELLEQGIYTTEVFLERSGATAKQIDDCAAAIERIAADLAHDRELLEQKFNFIPKCEHLLSNYWDWDAPTRNSVLKELLERVDYFKDNKNDFKRGDEITFTLDIYPKIQ

SEQ ID NO: 4276 - protein, 522 aa, Unknown
  Description of Unknown: Integrase B4277 sequence
  SM00857,G3DSA:1.10.10.2600,IPR036162,PF13408,PS51737, G3DSA:3.40.50.1390,IPR025827,IPR006119,IPR038109,PF07508, IPR011109,SSF53041,PTHR30461,PS51736,cd00338, PF00239
MELLNVCIYLRKSRADREAEARGEGETLARHERILLDLAKKRGYNVGAIYKEIVSGETISARPVMQQLLREVESGMWDGVLVVEVERLARGDTIDQGVVARSFQYSNTLIITPLKTYDPNNEYDEEYFEFGLFMSRREYKTIRRRLTAGRESSAKEGKYCGSKPPYGYSRVKLVGEKGWTLQPVPDQAEIVKLIFNLYVHGVSGERIGMAKICRKLNDSGIKTMDGGLWTISRVQAILRNPVYEGMIRWNSRKAVKHIKDGQITISRPFAQNYILVKGRHPAIVSRELFQQAQDIVNKNPARPLNSLHVLRNPLAGIVRCGKCDHVMTRKSPNGRQGDLIRCPYSSCSNISSKLPLVEKALLDGIQELVDGYRLNNSVSDQEYSLSISEREKMIQGKLKEIDILKKRKQRQYDLLEQGIYSTEEFLERSRATAAELSACDAVILSLKQEIEHEQELQFQRSSFIPKCEDLLANYWTWDTSTKNRFLRELIEKAVYTKNAKNTWKNGDDISFTLDIYPKIQQK

SEQ ID NO: 4277 - protein, 522 aa, Unknown
  Description of Unknown: Integrase B4278 sequence
  PTHR30461:SF3,cd00338,SM00857,G3DSA:1.10.10.2600,IPR036162, PF13408,PS51737,G3DSA:3.40.50.1390,IPR025827,IPR006119, IPR038109,PF07508,IPR011109,SSF53041,PTHR30461, PS51736,Coil,PF00239
MPKTEEKQTIKAVIYARYSSDRQREESIEGQLRICEDYARRNNMTILHTYADRAMTGRSDQRPEFQMMIRDAATMTFDIVLVYKLNRFARNRYDSAKYKHKLKKYGIKVVSAMENIADDPSGILLESVIEGMAEYYSAELAENVTRGMTENALEGKWPGGYVPLGYKLDDQHHLVIDEPKAEIVRMIFQMVLEGHNQKYIIDELSRHHYTTSSGRPFSYNTLRTILKNEKYIGRFDWGNVHKENALPSILDKKTFEAVQKQLHFRKKNHIKSCNESFLLTGKLFCGCCHSKMVGVSGTSKTGAIYYYYACAAHLKKKCKTRNVRKDALEDLVCEVTTRILSNPEAVEAIAQQAIEMQKSKKDSLELQAIKNQIADINQKLQNCVRAVESGLISETITNHINDYEKQLTRLKDDAARVKLLDGDVELTQQHIEFFFWSIAQKIKTADKYKSILLSSIVRNVIVDKDYIEIQYNYKNELPILQNPVRIESSYLNQMVNLPIPHANLTVMVSQDFFTVRIRRQAA

SEQ ID NO: 4278 - protein, 522 aa, Unknown
  Description of Unknown: Integrase B4279 sequence
  PTHR30461:SF3,cd00338,SM00857,G3DSA:1.10.10.2600,IPR036162, PF13408,IPR025827,G3DSA:3.40.50.1390,PS51737,IPR006119, IPR038109,PF07508,IPR011109,SSF53041,PTHR30461, PS51736,Coil,PF00239
MRAFIYCRFSSHKQQELSIEGQRDICQEYADKHNITVVGQYADRARSGKTENRADFRRLMRDAATGVVDCVLVWRYDRFFRNRAESALYRKQLEAAGVHLISVTEYIPEGSAGIITQGMIETVAEYFSAKLSEDVSRGMNKAAQHCQIVGRAPLGYRAGPNKRWQIDPVGAELVRRIFEWYASGKAMGQLAAQLNEEGHRTTNGTLYTRSSFNSILRNEKYIGVYSYGGEVRIEGGCPRIIEDELFFTVQRRLSANKHRPGAYKAEVPYLLSGKLFCGLCGAPMTGTAGTSHTGARHYYYICNNRRAKTCKKKNVRLDLIEEAVLQSALDILTDENIAYISTEVERRCAENSDSAALLASLNAQLEEVQRRLKNIGNAIAQGIITETTKELLEEAEADRTALRQQIDRAKVQAALVVKAEAVACWLDGFRRGDRTDPDFRRQVFGALVHSVFVYDDYLKIIFNVDSAGAAVVPYEAAQAATPSEAPPGSYLDTLGAPYQANPNVLLFEGAFGFVFYFPIMKV

SEQ ID NO: 4279 - protein, 522 aa, Unknown
  Description of Unknown: Integrase B4280 sequence
  PTHR30461:SF3,cd00338,SM00857,G3DSA:1.10.10.2600,IPR036162, PF13408,IPR025827,G3DSA:3.40.50.1390,PS51737,IPR006119, IPR038109,PF07508,IPR011109,SSF53041,PTHR30461, PS51736,Coil,PF00239
MARKKNIAAGLDAVIYARYSSHNQREVSIEQQIAECTKHAAALGLRIVGTYEDRAISGKTDNRPRFQQMMRDAEKGKFQAVVAWKSNRIGRNMLQAMVNEAKLDDYGVKVFYAEEDFDDTAAGRFALRNMMNVNQFYSENMAEDITRGLYDNANKCMANGRQPLGYKRGADGKVMLDEPAAAVVREIFTRVAAGDLFVDIARDLNAKGIKTSKGAAWNKGSFQSICQNERYKGIYIYGNVRIVDGIPRIVSDELWYKVQEAMRVKKNPVGTRHRVGAEDYLLTGKLRCGHCGSYMTGVSGTSRNGELHYYYTCQKRRTEHACNKKNVRRDVIEPAIAQAIKMYCLTDDVIEWMADQTVQYWEKHDNDLQIEALEQQLAENKKATSNMLKAIEMGIITEATRSRMVELETENSKLTAQLSAAKRDVVKINREDLIDELHILRSKDIHDREVQAELFKDFLVAAYIYDDNRLKLVFSFMGKDNSVEIPLETGEDPPDGEDSPDAKMFVLTPDCSTRTKALHGNV

SEQ ID NO: 4280 - protein, 522 aa, Unknown
  Description of Unknown: Integrase B4281 sequence
  SM00857,G3DSA:1.10.10.2600,IPR036162,PF13408,PS51737, G3DSA:3.40.50.1390,IPR025827,IPR006119,IPR038109,PF07508, IPR011109,SSF53041,PF00239,PTHR30461,PS51736, Coil,cd00338
MAVSKSVTVIPARKHVRKSGDEEKPKLRVTAYCRVSTDSDEQATSYETQIEHYTAYIQGHPDWVLAGIFADDGISGTNTKNREEFNRMIDECMAGNIDMIITKSISRFARNTLDCLKYIRQLKEKNIPVYFEKENINTMDSKGEVLLTIMASLAQQESQSLNQNVKLGLQYRYQQGEIQVNCARFLGYTKDENKRLVVVPEEAEIIKRIYREYLEGASMLKIARGLEADGILNGAGKERWHTSNINQILRNEKYIGDALLQKTYTVDFLTKKRVKNNGIVPQNYVENSHEAIIPREVFMQVQEELVRRRIVHTSPNGKTRTFSSNHCFAQIVICGNCGEVFRRVHWNNRGKKSIVWRCVSRLENTGLFCNARTVLESTIEQVLVTAINQTLCDKDTFLPTLRDNIATVINRESDNAYANIDKRLEELQTELLKLATSNADYDKVGDEIHRLREQKQKLQIESANRDELKKRIADMSTFLKKQSTALAEFDEQLVRRLIEKVTIYEDKFTVEFKSGLTVDVEE

SEQ ID NO: 4281 - protein, 522 aa, Unknown
  Description of Unknown: Integrase B4282 sequence
  PTHR30461:SF3,SM00857,G3DSA:1.10.10.2600,IPR036162,PS51737, G3DSA:3.40.50.1390,IPR006119,IPR038109,PF07508,SSF53041, IPR011109,PTHR30461,Coil,PS51736,cd00338, PF00239
MGGRAAIYARFSSHNQRGESIEIQVEKSRAYCAENDLRVVATYCDFAQTGTNTDRAEFQRMMADAKRGLFDFVVIYKVTRIMRNRDEMAMARIMLRRCRVEILYAGEDISDGSAGVLQLGMLEVLAEYESALDGERIRDGIQKNAERCMANGCVRYGWDIVDGRYVVNEEEAAAIRLGVRMVLSGKSVADVVRAWEPYRTKRGGKWRFQTVRRILMRRENGGEYRYAGVVVPGGMPAIVPMDDEERVIRMLEDSHRPRAKTEAWDFPLTGKLYDGRDGGLMTGTSGTGKSGRPYHYYRCRSCGRTVRRDVVEKRVADAVREALGSADSRERIARMLADAEEERADEKPLSETIKGELAKIETAFSNIWAAIESGIAPPGGKERIDALKQRQALLKDELRTAEALEAARLDYDRALFWLEGMAAAEVDDAQLLRTFVARVVLGGPDDDDGLRVAFTFDDSAGLGDNPSLPGAIGPGGEVFDRMNASSTNSYKQVEKCLYLLFYYLQIPRRIELYAGRGRKENA

SEQ ID NO: 4282 - protein, 522 aa, Unknown
  Description of Unknown: Integrase B4283 sequence
  SM00857,G3DSA:1.10.10.2600,IPR036162,PS51737,G3DSA:3.40.50.1390, IPR006119,IPR038109,PF07508,SSF53041,IPR011109, PTHR30461,Coil,PS51736,cd00338,PF00239
MNEQYLIYLRKSRNDAQLEAMGVDVLERHEKTLLALAKSMNLQIGAIYREVVSGDSIAARPEMQRTLKEVEAGLWKGVLVMEVERLARGDTVDQGIVQRTFQYSETLIVTPAKIYDPNNEFDEEYFEFGLFMSRREYKTIRRRMRAGVTAAVREGKWPFNKAPYGWKRVKLEDARGWVLAPDPDEAPVVKLIFDMFTGPDRVGITSICKYLESHGIPPRNGDRWLECTILGILGNIVNDQKVGIGHRKQITTVKDGVLTKSRESRLSNNYDLIATGLQPRLIDHDVFVEAQGYLGKGTPKPPESYGIKNPLASLVVCSCCGQKMQRRPKTTTPGCHGAPYDVLMCHTRGCPTIGAPLELVEKEVINVLSDWVAGYQLNPSQEVKNNVTEKQALLSAAIANRDALLKQNEKLYDLLECEIYTTDVFLERSSTLHERIEEAELSISALEKDLEYEKQKFENSSRFIPECKELLSSYWDLSVPDRNKALKLLIDRIEYKKTVKNKRGTVDIPTFELTLKPRIPRI

SEQ ID NO: 4283 - protein, 522 aa, Unknown
  Description of Unknown: Integrase B4284 sequence
  SM00857,G3DSA:1.10.10.2600,IPR036162,PF13408, IPR025827,G3DSA:3.40.50.1390,IPR006119,IPR038109, SSF53041,PTHR30461,Coil,PS51736, cd00338,PF00239
MVKNRAAIYARFSSHNQRSESIEIQVENSRAYCEREGLQVVREYCDYAQTGRNIDRAEFQRMMSDARHGLFDYVVIYKVTRIMRNRDEMSLARIMLRKAGVEILYAGEDISSGSSGVLQLGMLEVLAEYESALDSERIRDGIQKNAQRCMANGRTLYGWDIVEGRYVINEREASVLSRMKNMLFAGSSVADIVRAVSTERSKRGAKFNQDTVTKLLKRVQNAGVYKYAGHEVPDGMPAIWSQVEQDMIDNILGDRHKPRRKINSTLEFPLSGKLYCAKCGAPMAGTSGTSCTGATYHYYKCRKCRRTVRRDLVEDVVCDMTLQAVAREDVRQRIASGMVAFQAEQPKEQSRSYAIKKELKRIDRTFERIWQAIEDGIAPPGGKERTEELKQRKSELEAELRIAEREEAFNIGVDELMLWLDDAAENLTPEVILGTFVRFVEIDGKTLNVYFAFDRYGDDFRPKQKKAEPCPEGHSSTNSLVVELMRKTTNSTNTATRAAIQLDTCIVRVSKNWFVVVGTCQK

SEQ ID NO: 4284 - protein, 522 aa, Unknown
  Description of Unknown: Integrase B4285 sequence
  PTHR30461:SF3,SM00857,G3DSA:1.10.10.2600,IPR036162,PF13408, IPR025827,G3DSA:3.40.50.1390,PS51737,IPR006119,IPR038109, PF07508,IPR011109,SSF53041,PF00239,PTHR30461, PS51736,Coil,cd00338
MKAVIYARFSSHNQREESIEGQVRACQRFAKEHDMTVIEIYADRGLSGLHADNRPEFQRMIADSDRHKFQALIMWNLDRFSRDKYDTAVYKSRLKKNGVTLYYSDQNIPDTPEGIILESLLEGFAQYYSANLSRNAKRGLQENARKCLWNGGGLPLGYTIDETKHFVIDPAGAACVRLIFQMYADNHSIKEIVSTLNEKGYRTVKGNKFRLGSIQGVLRNRKYIGEYHASGITVPNGVPAIVDVELFNTVQEKIGVVSAAKARNKAEIPYLLTTKVFCGHCGSPMIGESGTGKGGSTYRYYKCSCRKNRKGQCDKRTEQKEWLEETVVAQTVEKFLHPDVIEDVSNACAAVLEQDCQNNALLKALNAQLADVEKSSRNIIKAIEAGVFTASMRERLAELEQQKEDITVQIDREQLRKPHLSAEQIAFFLRSFLDGDAHDPNFQERIIESLVRRVDVYDEGPGNRKLTVFYNLKKNNHSSVSVKCSDSESVGLPKRSVAKAADFFLLFAEGHFSNSNFFKMRN

SEQ ID NO: 4285 - protein, 522 aa, Unknown
  Description of Unknown: Integrase B4286 sequence
  PTHR30461:SF3,IPR036162,PS51737,IPR011109,PTHR30461, PF00239,G3DSA:1.10.10.2600,IPR006119,SSF53041,cd00338, SM00857,IPR025827,IPR038109,PS51736,cd18688, PF13408,G3DSA:3.40.50.1390,PF07508,Coil
MNGEIKNVVLYLRYSSAAQNEQSIEGQRHVCQEYCRRAGYQIIDEYVDRATSASHNVEKRFNFQRMLRDAERGRFDAVVVYKLDRFARNRYDSVNAKYRLKKAGVVLLSATENLSDSPESIILESVLEGMAEFYSAELSQKITRGMKETAQKHLSTGGAVPLGYRIKNRRLVIDPTTAPIVKQAFEMYAAGHTATAIAKQFNASGYRTSKGTAFNRSSFKSMFHNERYIGTYKYGAYKAENAVPAIIDKQLWDAVQSRLSLPVPPSQGKAQVPFLLAGKLFCGHCGAKMNGDSGKGRSGEPYYYYTCYNHKRGHTCNKKSVRKEWIEKVVVQDAMQLLTDDYIEELADIAVQENQRQIAATTKIPLLKEKIAETEKSINNIVTAIEKGVASDTLMHRITGLEQQKKDYENQLAAEETSAIQLDKYMVIYWLDQFKHGDVDDERFRRNLINLLVNSVTIWDDPDGGFRITTAYNLTDAPTKTFRVEALPGSDMGSSSPPLATNPNQILIIGLVLVQTRKHLMV

SEQ ID NO: 4286 - protein, 522 aa, Unknown
  Description of Unknown: Integrase B4287 sequence
  PTHR30461:SF3,IPR036162,PS51737,IPR011109,PTHR30461, PF00239,G3DSA:1.10.10.2600,IPR006119,SSF53041,cd00338, SM00857,IPR025827,IPR038109,mobidb-lite,PS51736, PF13408,G3DSA:3.40.50.1390,PF07508,Coil
MVMKDDRAYVRVSTLKDSQKDSPEHQEAFIRERASRENITISKVYEDRDTATSIVAREDVQKMIADAKRGEIRSIWFASLSRFSRDALDAISLKRILVNALKIRVVSIEDGYDSAVKDDELLFGIKSVVNQNTSGDISQSSRRGIRQSAAKGNYIGSIPPYGYRKVVVDGRKTLEVIPEQAEIVKKIFELYLNGNGEKNIVNYLNGDNEKNTPIPSYRGGVWGLTSVQRILQNENYTGYTVYGRHTTEVAYNDLSDLMDRGKKLVMKPKSEWQKTPFQTHEAIISKEVFDRAQEIRLLRGGGTRGGRRSFVNVFSKFIFCAECGTAMVSMGSKTKNKNGKDYRYLMCSRRRRTGEIGCSNGKWLPYYEFRDELIKDILERVRESIRVLEEEGASEINSQLPESNTEKDKRKLEKRIEENRKLLFEVRRQHMLGEIDDAQYEFEKGQYEKDISDSEHRLAIIEANERRSLDREKVIRETKQYLKELTEMKTYDDVEKTRMLLMQMVKRIEVNKDGEVDVQTYV

SEQ ID NO: 4287 - protein, 522 aa, Unknown
  Description of Unknown: Integrase B4288 sequence
  PTHR30461:SF3,SM00857,G3DSA:1.10.10.2600,IPR036162,PF13408, PS51737,IPR025827,G3DSA:3.40.50.1390,IPR006119,IPR038109, PF07508,IPR011109,SSF53041,PF00239,PTHR30461, Coil,cd00338
MKRVYCLYRVSTKGQVDKDDIPMQKTSCREFAERNGWTILKEFQEKGVSGFKVSASNRDAIQDLKAAAEKKEFDVLLVFMFDRIGRIDDETPFVVEWFIKHGIEIWSVNEGEQRMDNHVDKLMNYIRFWQANGESQKTSARVKTRLNQMTLDGKFTGGVAPFGYKLIKSGEINKKGKELMDIVIDDDEAPIVKKIFEMTVKEGYGSYRMADYLNSHGIRTHNNSKFQCNTVNRILKNRLYCGYLVSGGVESPYIERLHIIDENIFDQAQFILKQRSSKNEEKQQIARTTKGSTLLSGNIYCAHCGQKMVSTSYIDRYDRADGSQYRVSRQRYICTNKAMKRGACDGQSAYVAHRIDGAVLATLRDYLAKIKSTPKDIALEKRYKSEISEYRRKQTKLEKEIEKLKRQVVELSAEIGRSLLGESRFTPDILSTSIDNTNDLLHKKEIELSDIKYKLANQQNAMGRLDFYYSQFRTWADEFDNSTMEQKKMISCQLIREVKVARGYEIEIVFDLNYEQFLNTSK

SEQ ID NO: 4288 - protein, 522 aa, Unknown
  Description of Unknown: Integrase B4289 sequence
  PTHR30461:SF3,SM00857,G3DSA:1.10.10.2600,IPR036162,PF13408, IPR025827,G3DSA:3.40.50.1390,PS51737,IPR006119,IPR038109, PF07508,IPR011109,SSF53041,PF00239,PTHR30461, PS51736,Coil,cd00338
MNGVIYARYSSDRQTEQSIEGQLRECQEYADANNIKIVGTYIDRAKTGRNDNRAEFQKMLRDSKQKFFDAVIVWKIDRFGRNREDIAKNKAILRRNGVSVLYAKEHIPEGAEGIILEGLLESLAEYYSAELREKITRGMRESAYKCQFNGSGLSIGYSVDKEHKFHIDTDGAKIVHLLFDMYDDGNTVAEILRHIKARGIKTRRGKEFTHFGITRVLRNRQYIGEYRWHDIVIPGGIPRIISDEQFERVNREMDKNKKAPARARGEDVSFLLTGKIFCGLCKGTMIGDSGTGKSGNKFYYYSCRAKKTRHTCKKKSVKKEWLEREVVRLTASVVLQDDVIEYIADRVVDIQQKEREDKSIIDYLNNRLSETEDAIRNIMKAIEAGIITETTGARLRELEAEREDLKIEIEKEKIARPVISREQVIYFLERFKGGDVDDKEYQRQIIDMFVNKVFLYDDKFIITYNYSGDNNEITAEIVEEATEDARSDAVDGCSDKRPSGPPFFPRSYIWVWNFLFTVVQNA

SEQ ID NO: 4289 - protein, 522 aa, Unknown
  Description of Unknown: Integrase B4290 sequence
  PTHR30461:SF3,cd00338,SM00857,G3DSA:1.10.10.2600,IPR036162, PS51737,G3DSA:3.40.50.1390,IPR006119,IPR038109,PF07508, IPR011109,SSF53041,PTHR30461,PS51736,Coil, PF00239
MTALEQNSAGESALQPQMDKYAIYLRKSRADAEAEKLGEGETLARHKKILTELAARKGLYVEKIYHEIVSGETIEARPEIQKLMADCYAGKYRGIIIVEVTRLSRGSQGDAQKIMDCLKFSNRNNGLLVITPTKVYDVAHNPDDEEYMEFELFMSRREYKMIKRRMDRGRTQAVVEGNYMGSYRPYGYDILKTRTSRTLVPNAEEAPIVKQIYEWSAEKGWSAGKIARTLTTMAVPTYTGDPEWSTATVKTILTNPTYSGKVRWNDRMTVKSMVNGELISSRPRSCHTDHYMLYEGKHEALVSEETYRAASRRYYSDRTKANFKLKNPLAGLLRCQACGKMMMHQSYKGRSTPPRFNHRQSTVCKVKSATVEDVMKALIHALKLYIEDFELKIDNLPDVDENSILSQLNALEAEQRKVEKKLAKAFDDYEEGIYTANEFVARKAKHTARLDAIKAQMESLEVSIPEKEEYQEKIMLLSEALDSLLDDALDADVKNEYLKRIIDHIDFSRENNAEFILDVYLK

SEQ ID NO: 4290 - protein, 522 aa, Unknown
  Description of Unknown: Integrase B4291 sequence
  SM00857,IPR036162,PF13408,IPR025827,G3DSA:3.40.50.1390, IPR006119,SSF53041,PF00239,PTHR30461,PS51736, Coil,cd00338
MVKNRAAIYARFSSHNQRSESIEIQVENSRAYCEREGLQVVHEYCDYAQTGRNIDRAEFQRMMSDARHGLFDYVVIYKVTRIMRNRDEMSLARIMLRKAGVEILYAGEDISSGSSGVLQLGMLEVLAEYESALDSERIRDGIQKNAQRCMANGRTLYGWDIVEGRYVINEREASVLCRMKNMLFAGSSVADIVRAVSAERSKRGAKFNQDTVTKLLKRVQNAGVYKYAGHEVPDGMPAIWSQVEQDMIDNILGDRHKPRRKINSTLEFPLSGKLYCAKCGAPMAGTSGTSCTGATYHYYKCRKCRRTVRRDLVEDVVCDMTLQAVAREDVRQRIASGMVAFQAEQPKEQSRSYAIKKELKRIDRTFERIWQAIEDGIAPPGGRERTEELKQRKSELEAELRIAEREEAFNIGVDELMLWLDDAAENLTPEVILGTFVRFAEIDGKTLNVYFAFDHYGDDFRPKQKKAEPCPEGHSSTNSLLVELMRKTANSTSTANRASIQLDTCVVRVSKNWFVVVGTCQK

SEQ ID NO: 4291 - protein, 522 aa, Unknown
  Description of Unknown: Integrase B4292 sequence
  SM00857,G3DSA:1.10.10.2600,IPR036162,PS51737, G3DSA:3.40.50.1390,IPR006119,IPR038109,PF07508, SSF53041,IPR011109,PTHR30461,Coil, PS51736,cd00338,PF00239
MREQYLIYLRKSRNDAQLEAMGVDVLERHEKTLLALAKSMNLQIGAIYREVVSGDSIAARPEMQRTLKEVEAGLWKGVLVMEVERLARGDTVDQGIVQRTFQYSETLIVTPAKIYDPNNEFDEEYFEFGLFMSRREYKTIRRRMRAGVTAAVREGKWPFNKAPYGWKRVKLEDARGWVLAPDPDEAPVVKLIFDMFTGPDRVGITSICKYLESHGIPPRNGDRWLECTILGILGNIVNDQKVGIGHRKQITTVKDGVLTKSRESRLSNNYDLIATGLQPRLIDHDVFVEAQGYLGKGTPKPPESYGIKNPLASLVVCSCCGQKMQRRPKTTTPGCHGAPYDVLMCHTRGCPTIGAPLELVEKEVINVLSDWVAGYQLNPSQEVKNNVTEKQALLSAAIANRDALLKQNEKLYDLLEREIYTTDVFLERSSALHERIEEAELSISALEKDLEYEKQKFENSSRFIPECKELLSNYWDLSVPDRNKALKLLIDRVEYKKTVKNKWGTVDTPTFELTLKPRIPRI

SEQ ID NO: 4292 - protein, 522 aa, Unknown
  Description of Unknown: Integrase B4293 sequence
  PTHR30461:SF3,SM00857,G3DSA:1.10.10.2600,IPR036162,PF13408, IPR025827,G3DSA:3.40.50.1390,PS51737,IPR006119,IPR038109, PF07508,IPR011109,SSF53041,PF00239,PTHR30461, PS51736,Coil,cd00338
MSSVDKTAVIYARYSSHGQTEQSIDGQIAAAQKYAEGKGYTIIHIYADRAMTGRNDDREQFQKMLSDTATHQFGVILLWKIDRFGRNREEIAFNRYRCKKNGVRVERVAEDVPDGPEGVILDSVLEGMAEYYSLQLAQNVRRGQRESAKKSQSNGGTRMIGYKVNPDTKRYEIDPDTAPFITEVFRRYAGGQTMAEIAAWLNAQGLRATRGGMFTVNSLHRLLKNEKYTGVYIFRDIRNEGGMPTLIDRATFDKVQEMLKVNRRAPSRVWSRAEYLLTDKLFCGHCGAPMAGVSGHGHTGVKHNYYTCLNRKRKKSCTKKSVRQDVLEPLVLKSIRNLLQDDATLKYIADRVWAEYERSDTSGDTIRALDRQIADVDRALSNVMKAIEMGIINEMTKARMDELTEQKQALSAARADAGLARGFKLTRNMILYFLRKMAAMDISDRDSQKRLIKTFVNAIYLYDDHFDIAFNYTENGKVIVKMQEIDDASTGGAFGCCAQCPTKIKAPAVPRRVFLFWCSVSC

SEQ ID NO: 4293 - protein, 522 aa, Unknown
  Description of Unknown: Integrase B4294 sequence
  PTHR30461:SF3,SM00857,G3DSA:1.10.10.2600,IPR036162,PF13408, PS51737,IPR025827,G3DSA:3.40.50.1390,IPR006119,IPR038109, PF07508,SSF53041,IPR011109,PF00239,PTHR30461, PS51736,Coil,cd00338
MGNVMLIPARRQVGNNARKQEEEKPKLRVAAYCRVSTDSDEQATSYEAQVEHYTEYIQKNPDWEFAGIYADDGISGTNTKKREEFNHMIDDCKAGNIDMVITKSISRFARNTLDCLKYIRQLKDMNIPVLFEKESINTMDAKGEVLITIMASLAQQESQSLSQNVKLGLQYRYQQGKVQINHNRFLGYTKDADGNLIIDPEQAEIVKRIYREYLEGLSMDKIAAGLERDSILTGAGGKRWHTSTINKILRNEKYIGDALLQKTYTTDFLNKTRVKNNGLVPQYYVEGNHEAIIPKDIYLQVQEELVRRRVVKTSANGKKRSYSCNHCFSQIVICGECGEMFRRLHWNNRGVKSIVWRCISRLESTGLECHARTINELVLQDAVVKAINQMLGDKSSYQAQLQLNIASVIRASQATSVENIDEKLMALQQELIQKAQSKEAYDEIADEIFRLRELRQKTTVDTAARDEQIKRINDLQDYIAHQTTHLTEFDESLVRRWIKQITIWDDHITVELKSGVSIDVDA

SEQ ID NO: 4294 - protein, 522 aa, Unknown
  Description of Unknown: Integrase B4295 sequence
  SM00857,G3DSA:1.10.10.2600,IPR036162,PS51737,G3DSA:3.40.50.1390, IPR006119,IPR038109,PF07508,SSF53041,IPR011109, PF00239,PTHR30461,PS51736,Coil,cd00338
MREQYLIYLRKSRNDAQLEAMGVDVLERHEKTLLALAKSMNLQIGAIYREVVSGDSIAARPEMQRTLKEVEAGLWKGVLVMEVERLARGDTVDQGIVQRTFQYSETLIVTPAKIYDPNNEFDEEYFEFGLFMSRREYKTIRRRMRAGVTAAVREGKWPFNKAPYGWKRVKLEDARGWVLAPDPDEAPVVKLIFDMFTGPDRVGITSICKYLESHGIPPRNGDRWLECTILGILGNIVNDQKVGIGHRKQITTVKDGVLTKSRESRLSNNYDLIATGLQPRLIDHDVFIEAQGYLGKGTPKPPESYGTKNPLASLIVCSCCGKKMQRRPKTTTPGCHGAPYDVLMCHTRGCPTIGAPLELVEKEVINALSDWVTGYQLDPSQEVKNNVTEKQALLSAAVANRDALLKQNEKLYDLLEREIYTTDVFLERSSTLHERIEEAELSISALEKDLEYEKQKFENSSRFIPECKELLSSYWDLSVPDRNKALKLLIDRVEYKKTVKNKRGTVNTPTFELTLKPRIPRI

SEQ ID NO: 4295 - protein, 522 aa, Unknown
  Description of Unknown: Integrase B4296 sequence
  PTHR30461:SF3,cd00338,SM00857,G3DSA:1.10.10.2600,IPR036162, PF13408,PS51737,G3DSA:3.40.50.1390,IPR025827,IPR006119, IPR038109,PF07508,SSF53041,IPR011109, PTHR30461,PS51736,Coil,PF00239
MSNAVIYARYSSGHQREESIEGQIRECTNFAKRNGLTIVEHYIDRAISAKTDDRPSFQQMVADSSKKTFDTIIVYTLDRFARNRYDSAVYKAKLKRNGVRVLSAKENITSDPSGIILESGLEGMAEYYSVELAQKVKRGMTENALACRWASGRIPFGYTIDADKHLHPDPALVPIVQEAFEMYAAGAKIVDIARKINSYHVVTGMGNKFGRSSFDRMIRSETYIGVFKWNDIRKENAIPPIITPELFYKCQARYNARNRKNVARPSAIYLLSGKLRCGCCGGSMCGMSGKSRNGTMHYYYSCYSTRRRTSHCDIGNIRRDEIEHIIAAHAASILKKPINLDIIANQALKTNNSVKNYRLESLIQQEKDLTQKLENCMKAIDQGLVSITLMDRIKQYEADLQSVKNDISLEKIKSNPIQVTKEHIIFFLEKFALLEGEKFKDRIISTMVRDIVIKKEKDGNYLVTVQYNYANSKELPNEESYSVPESIGSQDVELVDNSGVVTNRLRFYPYYFEETFIFTQAS

SEQ ID NO: 4296 - protein, 522 aa, Unknown
  Description of Unknown: Integrase B4297 sequence
  PTHR30461:SF3,SM00857,G3DSA:1.10.10.2600,IPR036162,PF13408, IPR025827,G3DSA:3.40.50.1390,PS51737,IPR006119,IPR038109, PF07508,IPR011109,SSF53041,PF00239,PTHR30461, PS51736,Coil,cd00338
MNTVIYARYSAGPRQTDQSIEGQLRVCTDFCKQRGLTVIDTYCDRHISGRTDERPEFQRLIADAKRKKFEAVVVYKTDRFARNKYDSAVYKRELKRNGIQIFYAAEAIPDGPEGIILESLMEGLAEYYSAELAQKIKRGMHESALKCQSTGSGRPLGYRVDEQKHFQIDPESAQTVQTIFEQYIKGESNAAICELLNSRGLRTAQGKPFNKNSINRIIKNRKYIGEYRYHDIVVEGGMPRIISDELFNLAQAEMERRRTRKAPKSPKAEYLLAGRLFCGHCKGPMQGVSGTGKIGNKWYYYYCGNTRGKNKTCDKKQVSRDRLERAVVDFTVRYILQEDVLEELARKVHAAQERQNDTASEIAFYEKKLADNKKSIANVLRAIESGAATQTLPARLQELENEQAVILGEISFLKGKRLAFTEDQILFALMKHLEPYPGESEQDYRRRIISDFVSEVYLYDDRLLIYFNISSEDGKLKSADLSNIEGSEFDEGLISSTKTHRYEHLTAFAVWRNVFIIDIPVE

SEQ ID NO: 4297 - protein, 522 aa, Unknown
  Description of Unknown: Integrase B4298 sequence
  PTHR30461:SF3,cd00338,SM00857,G3DSA:1.10.10.2600,IPR036162, PF13408,PS51737,IPR025827,G3DSA:3.40.50.1390,IPR006119, IPR038109,PF07508,SSF53041,IPR011109,PTHR30461, mobidb-lite,Coil,PF00239
MYEEIKTACLYLRYSSSNQTEQSIEGQMHVCQDFCKRHNIRIVEMYIDRATSASKDIEKRVEFLKMIKDSEKGNFNAVIVYKLDRFARSRYDSATYKYRLKRNGVQLISATENITQDPEGIILESVLEGMAEFYSAELSQKINRGMRESAMKHNSIGGAIPLGYKTVDKKLVIDETTAPIVREAFQMYADGESVAEICRTFNNRGYKTSKGTRFGKSSFTKIFRNEKYIGVYKYHDYRAEDVIPPIIDKDLWDRVQVRVGKIKKAPARNKARHTYLLTGKLFCGHCGSAMNADGNSQGYLYYRCYGKKNLDKQCNKRNMEKNLIERLVAQDAMSFLTDEYIEKIATIACDRNKQEIESDSPIPVIRDRIRQVDVSLNNLLKAIETGSAPDMLVKRMGELETEKKDMEVQLKKEMAHQVYIDKEQVIFWLEKFREGDINDEEFCQTVIDLFVNSVTVWDEPDDKFKITIAYNLTSIPQKTYRLSKDGRLSDYASNTPAQKSQVPEPAAQSSGYRESQVPAPTG

SEQ ID NO: 4298 - protein, 522 aa, Unknown
  Description of Unknown: Integrase B4299 sequence
  PTHR30461:SF3,SM00857,G3DSA:1.10.10.2600,IPR036162,PF13408, PS51737,G3DSA:3.40.50.1390,IPR025827,IPR006119,IPR038109, PF07508,IPR011109,SSF53041,PF00239,PTHR30461, PS51736,Coil,cd00338
MSNAVIYARYSSGHQREESIEGQIRECTDFAKRNGLTIVEHYIDRAISAKTDDRPSFQKMVADSSKKTFDTIIVYTLDRFARNRYDSAVYKAKLKRNGVRVLSAKENITSDPSGIILESVLEGMAEYYSVELAQKVKRGMTENALACRWASGRIPFGYTIDADKHLHPDPALVPIVQEAFEMYAAGAKIVDIARKINSYHVVTGMGNKFGRSSFDRMIRSETYIGVFKWNDIRKENAVPPIITPELFYKCQARYNARNRKNVARPSAIYLLSGKLRCGCCGGSMCGMSGKSRNGTMHYYYSCYSTRRRTSHCDIGNIRRDEIEHIIAAHAASILKKPINLDIIANQAIKTNSNVKNYRLESLLQQEKDLTQKLENCMKAIDQGLVSITLMDRIKQYEADLQSVKNDISLEKIKSNPIQVTKEHIIFFLEKFALLEGEEFKDRIISTMVKDIVIKKEKDGNYLVTVQYNYANSKELPNEESYSVPESIGSQDVELVDHMGVVTNRLRFYPYYFEETFIFTQAS

SEQ ID NO: 4299 - protein, 522 aa, Unknown
  Description of Unknown: Integrase B4300 sequence
  PTHR30461:SF3,cd00338,SM00857,G3DSA:1.10.10.2600,IPR036162, PS51737,G3DSA:3.40.50.1390,IPR006119,IPR038109,PF07508, IPR011109,SSF53041,PTHR30461,PS51736,Coil, PF00239
MTALEQNSAGKSALQPQMDKYAIYLRKSRADAEAEKLGEGETLARHKKILTELAARKGLYVEKIYHEIVSGETIEARPEIQKLMADCYAGKYRGIIIVEVTRLSRGSQGDAQKIMDCLKFSNRNNGLLVITPTKVYDVAHNPDDEEYMEFELFMSRREYKMIKRRMDRGRTQAVVEGNYMGSYRPYGYDILKTRTSRTLVPNAEEAPIVKQIYEWSAEKGWSAGKIARTLTTMAVPTYTGDPEWSTATVKTILTNPTYSGKVRWNDRMTVKSMVNGELISSRPRSCHTDHYMLYEGKHEALVSEETYRAASRRYYSDRTKANFKLKNPLAGLLRCQACGKMMMHQSYKGRSTPPRFNHRQSTVCKVKSATVEDVMKALIHALKLYIEDFELKIDNLPDVDENSILSQLNALEAEQRKVEKKLAKAFDDYEEGIYTANEFVARKAKHTARLDAIKAQMESLEVSIPEKEEYQEKIMLLSEALDSLLDDALDADVKNEYLKRIIDHIDFSRENNAEFILDVYLK

SEQ ID NO: 4300 - protein, 522 aa, Unknown
  Description of Unknown: Integrase B4301 sequence
  PTHR30461:SF3,SM00857,IPR036162,PF13408,IPR025827, G3DSA:3.40.50.1390,PS51737,IPR006119,PF07508,IPR011109, SSF53041,PTHR30461,Coil,PS51736,cd00338, PF00239
MIAIYTRQSIEKKDSLSIDAQVKACADYCKAQGWEYEIYTQDHGFSGKSLDRPGFQAMMSAVRSGQVNKIVCYKLDRISRSVSDFAQLLQELEQYKCDFISVTENFDTSSPIGRAMVYICMVFAQMERENIQERVKSNYYYRSGLGFWGGGPAPYGYQLKRQQIAGKVHTVLEPDPNEAPWVKKMYEWYLEPGGSAMKILRLLTENQVPTKRGYKWTSRVLMDVLSKPLYTQNSMDVYNYLTQSGAVISNPPEDFDGTLSVDLYGKKDSSQSKHKRCRKGSDMYCNISLHEAIIDSDTWLQVQYKILARPKIGGRTGTSKNSWFTGLMICGVCGRHVSFTHSARTAGYYICSSRKNCGWNSCSSKPASKKKFDPIIVKFIRDHYDSPKTKAAIQQAKLAAKTPQVSIERNNLQMELATINNQIDNLLTSLASGNAVMSKYINDKITELDAKRTPLQAKLLQFDATSSVNDELKRLERIEWAMEQLPLVYTEDTFDLSVQVSQALVNNIVFNADGEVTISFAI

SEQ ID NO: 4301 - protein, 522 aa, Unknown
  Description of Unknown: Integrase B4302 sequence
  cd03768,PTHR30461:SF3,SM00857,G3DSA:1.10.10.2600,IPR036162, PF13408,IPR025827,G3DSA:3.40.50.1390,PS51737,IPR006119, IPR038109,PF07508,SSF53041,IPR011109,PTHR30461, PS51736,Coil,PF00239
MNTIAIYTRKSKFTGKGESIENQIEKCKKFIEFKFNIDSENVNIFIDEGFSGKNENRPQYQLMMEKIKKKEIDSIVIYQLNRLGRNARDIHNTMQLCDDLGVIIYSATEGFDSSTSFGRAVIGILASLAQLEREQLAERVKDNMYTLAKMGRWLGGQSPLGFDGSREYYIDETGKERSITKLKKNEEELKLVKLLYDKYLEEKSLSQVGKWALINHLTGKNGGNLNKNAINVILQNPVYVKSSKEVFDYLANEGYEVCGEPNGNGLLRYGKDDEQIVATAKHKGVIPSDKWIEVQKILKDNVSKAPRMGKTNTALLTGLLRCKCGSTMRISYGQKRKDGTKPFYYICNMKINSGGARCNLKNLNGNLFEKNFIQFLKNYSKETLFTELQKLLNNSKDLESTISSNKIDVEIEKSNKAIKQILNKLKLTDDDELSKILLQEIKVENNKLKVLSKQKEELLNDQSEVVITQSEVLAILDDLDNFQKTFDDLNLEDKQKALKSLIESITLTDDKFIVDFNIKKKN

SEQ ID NO: 4302 - protein, 522 aa, Unknown
  Description of Unknown: Integrase B4303 sequence
  cd03768,PTHR30461:SF3,SM00857,IPR036162,PF13408, PS51737,G3DSA:3.40.50.1390,IPR025827,IPR006119,PF07508, IPR011109,SSF53041,PTHR30461,PS51736,Coil, PF00239
MRFFSYGRKSVFSDKSDSIDNQFRMNREYCESKFSGQVDSWQQFSDEDFTGANTSRPDLQRMLSFIKGGFCDVLVVYQLDRLSRDVRDFANIYALLEEHGVMFISIKENIDTTTPIGRAMMYVTVVFAQMERETIAARVTDNMLGLAKKGYWTGGNPPVGYVRKHIVVNGKKHCSIEVDPDGARYVTQIFDTFLAYNCSLQGMETRFKNQGIRTQSGKFFSTTQLHKMLTMPYCVEATPEVYDFYAAKGCIMDPGSPREMWDGSVGVIIYGRSTEKKKHQAQPPEKWTVCLGKHKPFMPAEKWLAVQSRFTQNKCIKDAKWPVPLLKGVLRCKCGNLMQVSRKKKVDGTCSSWYYCRKRMRQGVDACDMGQIKCDLLDEKVLELFRGITADPALIQKFVKAEAPANVPDLKAAQARVSACERKIGRLAASLALAEDSAASKYIIAEMERLDVELGALKREASLAEMEGHRAAASAKDAKATAAEIAKLIHGLDGFDDKEKNAIARAVIQECTWDGERLFIKL

SEQ ID NO: 4303 - protein, 522 aa, Unknown
  Description of Unknown: Integrase B4304 sequence
  SM00857,G3DSA:1.10.10.2600,IPR036162,PF13408,IPR025827, PS51737,G3DSA:3.40.50.1390,IPR006119,IPR038109,PF07508, SSF53041,IPR011109,PTHR30461,Coil,PS51736, cd00338,PF00239
MNTLERDCIYLRKSRADREAEARGEEETLSRHERILLDLAKRRGCHIGAIYREVVSGETISARPVMQRLLQEVESGMWDGVLVVEVERLARGDSIDQGVVARAFQYSDTKIITPTKTYDPNNEFDEEYFEFGLFMSRREYKTIKRRLNAGRVSSVQEGKYCGNKPPYGYRRVKLEHTKGYSLEPIPEQAEIVKLIYNWYTYGIDGERIGMCKITRKLIDMGVPSLSGKSWSTATVANILENPVYTGKIRWNRRKGMNKIENGNVVKSRPRCDDYILTDGLHEAIISQEIYDLAQYYRSMNPPRPIGASNTVKNPLSGIIKCGKCGHNMVRRPYNSRKQEDTLLCSYTGCNNVSSRLSLVEKALIAGLADLVQSYKINDTLNDTNGVDIIATKEKVLLDKRAELENLNTQKNRQYELLEQGIYTTEVFLERSGATAKQIDDCAAAIERIAADLAHDRELLEQKFNFIPKCEHLLSNYWDWDAPTRNSVLKELLERVDYFKDNKNDFKRGDEITFTLDIYPKIQ

SEQ ID NO: 4304 - protein, 521 aa, Unknown
  Description of Unknown: Integrase B4305 sequence
  PTHR30461:SF3,SM00857,G3DSA:1.10.10.2600,IPR036162,PF13408, PS51737,G3DSA:3.40.50.1390,IPR025827,IPR006119,IPR038109, PF07508,IPR011109,SSF53041,PTHR30461,Coil, PS51736,cd00338,PF00239
MENIIIYLRKSRSDDPALSVTDVLARHEQQLQEYAINTYNRQISEDHIYREIVSGETIADRPVMKQVIKLLETGTVDGVLVIEPQRLSRGDLEDCGKIVNTFRYTGTLVITPPKTYNLNDEYDRKFFEMELMRGNDYLEYTKKILNRGRIASVKQGNYIGSVAPYGYKKIKSGSGKDSYHTLEIVPEEADAVRLMYQLFVKEHYGFTKIARYLDDIGVKPRKTDHWSPAAIKDMLENPVYIGKIRWNYSKVQKTIINGQISKTRPRQKDISQWIYVNGRHEAIIEEAIYNKALEMRGKNPCVRKNKELSNPFAGLLYCGTCGRAMSYKHFKQYRGKSENVCTSMLCNNQAICKTKSIKYDTFYKRVVESLEENVADFEIKLKQEESNGKQFQKDLICSLEAKLNKLKEKDFRQKDAYEDGLYTKEEYATRNAKLQEQISATMESLSKARSNTPPVIDYRERISRFTDCLTALKDNTLSASEKNVLLKTCIDKIVYYNNMESKPGIGRYVDNVFQLDIFLLL

SEQ ID NO: 4305 - protein, 521 aa, Unknown
  Description of Unknown: Integrase B4306 sequence
  SM00857,G3DSA:1.10.10.2600,IPR036162,PF13408,PS51737, G3DSA:3.40.50.1390,IPR025827,IPR006119,IPR038109,PF07508, IPR011109,SSF53041,PF00239,PTHR30461,PS51736, Coil,cd00338
MKNGNYAMYLRKSRADREAEARGEMETLARHEKLLFETAKRMQITVSAVYKEIVSGETISARPVMQKLLAEIEQGIWDGVLVVEVERLARGDTIDQGIVSQAFKLSDTKIITPVKVYDPNNEFDEEYFEFGLFMSRREYNTIKRRLQRGRLASVREGKYVGNRPPYGYERVKIPNDKGFTLSPLPEQAKIVKYVYDLYAYGLDGEEMGTAKIVRKLNDLQIPTQSGGKWIPPTIRDMLYNPVYIGKLRWNRRATTKKVCDGKITYSRPTSKEYEICDGLHPAIIDLETFKICQKKLSKNQSRPVSLNKTIKNPLGGLVICSKCGHRMVRRPYNKTGQRSTLICPYTHCDNVSSPLEDVETMVLEAIADIVKNERIEPTTSVIPSDTIDILKDTLKNQETSLETLQKQQNSLYDLLEQGIYTTDVFLERSNKLKDQITAAASSIQNLKKKISAEQNRLKVQADFIPKCEHLLDVYDTLDAPEKNRILKELIDHIDYLKEEKNVPFTKKDAKVFIHVYPKTPE

SEQ ID NO: 4306 - protein, 521 aa, Unknown
  Description of Unknown: Integrase B4307 sequence
  PTHR30461:SF3,SM00857,G3DSA:1.10.10.2600,IPR036162,PF13408, PS51737,G3DSA:3.40.50.1390,IPR025827,IPR006119,IPR038109, PF07508,SSF53041,IPR011109,PF00239,PTHR30461, PS51736,Coil,cd00338
MSTNRAVIYARYSSNKQTEQSIEGQLRDCYAYAEKHDITIVGEYIDRALSAKTDNRPEFQRMIKDSANGAFNIIIVWKLDRFSRNRYDSAAYKIKLKKNGVKIISAMENISDNPEGILVESLLEGIAEYYSADLSEKVNRGMRETALKCHSTGAPVPLGYKIENKKYIVNEIEAPVVKKIFTMYADGDSAKDICDYLNEHGFKTRRGGKFNKNSLRTMLTNRKYIGIYKYKDIEIPGGMPQIIDNELFEKVGKMMIKNKRNAAASKPKEKYLLSGKVICGLCGDKMNGECGKNKSGRIYRYYKCNKQKRNKNDCPKHTIDKYFLEDTVINAVRSIVSNDKIIDRIAKKAVEAQMYDDTPQIINSLEQKLSETEKQIENILKAIESGIFTISVKDRLLELEKTRDILKSEIIKEKNDNPFLDYDTIKLILSQYSNGNFKDEKFRQKLVDVLIYKVIVFDDKIYILYNFSKDDNTKERYEDIIKLIEKSTAAQNGSPNVKRMRQALCYYGVCLIFVYSLKCFL

SEQ ID NO: 4307 - protein, 521 aa, Unknown
  Description of Unknown: Integrase B4308 sequence
  PTHR30461:SF3,SM00857,G3DSA:1.10.10.2600,IPR036162,PF13408, PS51737,IPR025827,G3DSA:3.40.50.1390,IPR006119,IPR038109, PF07508,IPR011109,SSF53041,PF00239,PTHR30461, PS51736,Coil,cd00338
MTNNKDLQTGVIYARYSSDKQRDESIEGQIRECTEYAQREGILITKIYTDRALSARTDNRPEFLQMIRDSANQSFNYVIVYQLDRFSRSREDSAKYKGILRRNGVRVLSAKEHITNEPAGIILESMLEGMAEYYSVELSQKVKRGMTENALKGKMNGAAIPLGYDLTESHHLTVNAHEAKAVRLIYDLYLKQHSIAKISDILHSKGYLTKKGRKISPSVIKNILSNEKYIGVYSWGDVRIENAVPPIISQKMFDEVQTIMPTRIKNKGRRSEMYNLCGKLICGECGGHYAGSTATSRNKEKHHYYVCTNRRKYHTCTAPNIRRDELEDLVINRTLEILNQPSNIARIVDLVMSGYSNTTQEAKTAIQGINNKIKAIDTELDNCMSAIKQGFITERLKGEIENLENERNNLLEQKANHESAIMPIKFTADHIEYFLERMAKENPTTKAGRSRILDTFIKSVTIYSDRVEIVFNYKNELPAFNNQCATGSHFKVLVGNTYNKANHFYINATAYPITLIVPFGV

SEQ ID NO: 4308 - protein, 521 aa, Unknown
  Description of Unknown: Integrase B4309 sequence
  PTHR30461:SF3,cd00338,SM00857,G3DSA:1.10.10.2600,IPR036162, PF13408,IPR025827,PS51737,G3DSA:3.40.50.1390,IPR006119, IPR038109,PF07508,SSF53041,IPR011109,PTHR30461, PS51736,Coil,PF00239
MGNVMIIPAKRQVGNTSRRQEDKPKLRVAAYCRVSTDSDEQASSYETQVEHYTEYIKKNPEWEFAGIYADDGISGTNTKKREEFNRMIEACKAGEIDMIITKSISRFARNTLDCLKYIRMLKDKNIPVFFEKESINTMDAKGEVLLTIMASLAQQESQSLSQNVKMGLQFRYQNGQVQVNHNHFLVYTKDREGNLVIDPEQAEVVKRIYREYLEGSSMDKIAKGLEKDGILTGAGKKKWWTSTINKILRNEKYIGDALLQKTYTTDFLNKTRVKNNGIVPQYYVENNHEAIIPKDIFLRVQEELVRRRVVKTSANGKKRSYSCNHCFAQLVICGECGDMFRRIHWNNRGCKSIVWRCLSRLEATGLECHARTVNEKVLESVVLEAINRLLGDKAAYQAQLQQNIAQVIRDANKNTSEKIDEQLMALQKELLQKANNKEAYDEIAEQIFKLREQRRQNTVDTTARDAQIERITALQDFINQQNTMLTEFDETLVKRWLKQITVYNDHFTVELKSELKVDVER

SEQ ID NO: 4309 - protein, 521 aa, Unknown
  Description of Unknown: Integrase B4310 sequence
  PTHR30461:SF3,SM00857,G3DSA:1.10.10.2600,IPR036162,PF13408, PS51737,G3DSA:3.40.50.1390,IPR025827,IPR006119,IPR038109, PF07508,SSF53041,IPR011109,PTHR30461,Coil, PS51736,cd00338,PF00239
MENIIIYLRKSRSDDPALSVTDVLARHEQQLQEYAINTYNRQISEDHIYREIVSGETIADRPVMKQVIKLLETGTVDGVLVIEPQRLSRGDLEDCGKIVNTFRYTGTLVITPPKTYNLNDEYDRKFFEMELMRGNDYLEYTKKILNRGRIASVKQGNYIGSVAPYGYKKIKSGSGKDSYHTLEIVPEEADAIRLMYQLFVKEHYGFTKIARYLDDIGVKPRKTDHWSPAAIKDMLENPVYIGKIRWNYSKVQKTIINGQISKTRPRQKDTSQWIYVNGRHEAIIEEAIYNKALEMRGKNPCVRKNKELSNPFAGLLYCGTCGRAMSYKHFKQYRGKSENVCTSMLCNNQAICKTKSIKYDTFYKRVVESLEENVADFEIKLKQEESNGKQFQKDLICSLEAKLNKLKEKDFRQKDAYEDGLYTKEEYATRNAKLQEQISATMESLSKARSNTPPVIDYRERISRFTDCLTALKDNTLSASEKNVLLKTCIDKIVYYNNMESKPGIGRYVDNVFQLDIFLLL

SEQ ID NO: 4310 - protein, 521 aa, Unknown
  Description of Unknown: Integrase B4311 sequence
  PTHR30461:SF3,SM00857,G3DSA:1.10.10.2600,IPR036162,PS51737, G3DSA:3.40.50.1390,IPR006119,IPR038109,PF07508,SSF53041, IPR011109,PF00239,PTHR30461,PS51736,Coil, cd00338
MAEFENIIIYLRKSRSDDPMQTVEDVLAKHESILQDYSIKQWGKPVPENHIFREVVSGETIQDRPVMQQIMKLLETGFISGVLIIEPQRLSRGDLQDCGRIINSFRYTNTVVITPPKTYNLSDEYDRKFFEMELTRGNDYLEYTKKILNRGRIASIKAGNYIGNIAPYGYRKVVIGTGKDKYHTLDIEPKEAEAVRIMFNLYVNKDYGFTNIAHFLDNAGYKPRNSDNWSPAAISSMLNNEIYIGRVVWNRRQTVKKMQDGLIVRTRPRHNDYISVPGKHPAIISEELFYAAKRKRGMTPKVKKFKELTNPLAGLLFCGRCGFAISMKKYADKRSKTGHETITMLCNNQSNCHTKSVMYSLVIAKVKLSLQQAINDFEVHINSNDDSERILQQNIINNLTEELEHLKEKDIRQKDAYEDGIYSKEEFLKRNAKLTEQISITQEKLNNALLEEPRICDYEEKIVRFRDCLNALDDDNVSAAVKNTLLKACIDRILYYNDSPSLPGIGRYVDNPFRLEIFLKL

SEQ ID NO: 4311 - protein, 521 aa, Unknown
  Description of Unknown: Integrase B4312 sequence
  cd03768,PTHR30461:SF3,SM00857,IPR036162,PF13408, PS51737,IPR025827,G3DSA:3.40.50.1390,IPR006119,PF07508, IPR011109,SSF53041,PTHR30461,PS51736,Coil, PF00239
MIAIYARQSIEKKDSVSIEAQIEKCKYYCENQDYKIYKDAGYSGKNINRPQFSKLLEDIKSGLITKVIAYRLDRISRSIADFSQLLILFDEHNVDFVSATENFDTNTPMGRAMINIVMTFAQLERETIVERVTDNYYFRANNGYWAGGYAPYGYEIKHIIGNDGKRHSVLVENKDESKIVKEIYDMYINQNISMRKIAQQLNYQNIPTKKQSGNWGINAVNAILSRPIYTEATTKIYDYFNKRGTCITNNIEHFDGTKTANLYGNSKKNNNVKALRNYDEMFLSLINCVPLISNEDWFKVQNIKGTKKNLPPRTNSSKISFLCGLVKCGKCSSNMVTQGCKNRYGIQYYYLICSTKRNLGRIKCDNKMIDISKLEDIVINDIKKHFNSNEIETKIEKYMKNNKKENINLLKQKEEFENKIIKIDIQIQNLINSIAEGNITISKYINQKIEVLEKEKQNISSQLSTIIEKNNITQDNYLIEYVKNINEKINTKDFEQLKLLCHTIIDKIVITDKNIDIHYKI

SEQ ID NO: 4312 - protein, 521 aa, Unknown
  Description of Unknown: Integrase B4313 sequence
  PTHR30461:SF3,SM00857,G3DSA:1.10.10.2600,IPR036162,PF13408, IPR025827,G3DSA:3.40.50.1390,PS51737,IPR006119,IPR038109, PF07508,IPR011109,SSF53041,PF00239,PTHR30461, PS51736,Coil,cd00338
MKGVIYARYSPGPNQTDQSIEGQLRECKQFAEENNITIVNTYADKKQTGRNDNRVQFQKMLQDSKKKQFDYVIVWKIDRFGRNREEIAKNKAILRMSGVKVLFAKEHIPDGPEGIILESVLEGLAEYYSANLSQNIIRGMRESAMKCKCNGSGLPLGYNVDKEHNYIRNDEEATLIKMIFKMYDDGSKINDICKYLNAHNYKTKRNSKFTHTGVSRILHNRQYIGEYRWKDIITPNGMPRIIDDELFERVAKRLERTKRAPSASRGDVKFLLTGKLFCGYCKSTMIGDSGTGKSGRKFYYYNCRIKKNKHTCKKKTVRKDWLEYEVARITANIVLQDKIIDYVSDKVVEIQKKEHEDKSNLNYYTVKLKETNSAIKNIMKVIESGIFTESMRERLLKLEDERSTYETEIAKEEIMRPTITKEQVVFFLKQFKNGNIEDKDYQAKLIDIFVNKVILYDDKIIITYNYSGEHNETSAKIIEEAAEELINEQEKCSDKLLSSPPNRYWTNTYFFSGGFAVKVML

SEQ ID NO: 4313 - protein, 521 aa, Unknown
  Description of Unknown: Integrase B4314 sequence
  SM00857,G3DSA:1.10.10.2600,IPR036162,PF13408,IPR025827, G3DSA:3.40.50.1390,PS51737,IPR006119,IPR038109,PF07508, IPR011109,SSF53041,PTHR30461,Coil,PS51736, cd00338,PF00239
MPYCMYLRKSRKDFEAESAGQGETLARHKAALLETAQRLHLAVSEIYQEIVSGDSIAARPEMQRLLADVETGKWDGVLVMEVERLARGDTMDQGQVQRTFVYTGTKIITPTRTYDPSDPADAEYFEFGLFMSRREYQTINRRLLAGRERAVREGKWPQGHAPYGYRAVKVPKGKGYMLEIVPEEAEIVKSIFNWYVNGAEYNGAFLRVGARRISTMLNSMGLTTQAGNLWSAPAVRVILKNHAYIGKVTWYKQTLRKSMSNGAVVKKLERTPERTLICDGLHEAIISDELFEAAQARLSADSTGPATKGPLQSPLAGLLYCGLCGCVMARQHEKGKPSYYVCRNPLCRCRGSKLEVVEQRVVATLALWLAGYEITAKAQAQTVDIGALQSALDGAQRELLAYQQQQTRLYDLLERGIYTEQVFLQRQAAITGEVQRLQAAVADTEAAIAKAVRINASAREIVPAVHAVLDAYPTYTTAQEKNDALRMVLSRVEYTRTVGGFGSDPQDFEVKIFPRLPEPVE

SEQ ID NO: 4314 - protein, 521 aa, Unknown
  Description of Unknown: Integrase B4315 sequence
  PTHR30461:SF3,cd00338,SM00857,G3DSA:1.10.10.2600,IPR036162, PF13408,IPR025827,PS51737,G3DSA:3.40.50.1390,IPR006119, IPR038109,PF07508,IPR011109,SSF53041,PTHR30461, PS51736,Coil,PF00239
MPKITKIPASISRYTSAPIDAPVKRKVAAYARVSTDSEEQLTSYAAQISYYTEYIKGREDWEFVGVYTDEGISGCSTKRREGFQRMISDAMAGKIDLIITKSVSRFARNTVDSLTTIRLLKENNVECYFEKENIWTFDGKGELLLTIMSSISQEEARSISENVTWGHRKRFADGKVSVAYSRFLGYDKGSDGKMVVNPEQAEIVKLIYRLFLEGMTPHTIAIHLTEKGIKTPGGKDKWNATTIRRILTNEKYKGDALLQKEFTVDFLTKKTKKNCGEIPMYYIEDDHEAIIDPAVFDMVQQEMERRKTGTSRYSGVSIFSSKIKCGECGGWYGAKVWHSTDQYRKVIYRCNNKYNDERCTTPHIMEEEVKAVFLKSLNKLLANRDELIENVKLICDKLTDTSELEAEKEKYAEEMSLVADMVQAAMLENARIALDQEEYRQKNDVLSARFEAAKKKHDELAMRIEEIETRGQNLRHFQETLESLNGQVTEFDSDLWGSLVDYITVYENGEKTVTFRDGSVI

SEQ ID NO: 4315 - protein, 521 aa, Unknown
  Description of Unknown: Integrase B4316 sequence
  PTHR30461:SF3,cd00338,SM00857,G3DSA:1.10.10.2600,IPR036162, PF13408,IPR025827,G3DSA:3.40.50.1390,PS51737,IPR006119, IPR038109,PF07508,SSF53041,IPR011109,PTHR30461, PS51736,Coil,PF00239
MSIKAVSYCRYSTDNQTENSIMYQMAAAEEYCKKHGMVLIDVYSDEAKTGTNTNREGLQRLIKDCDTSKFDAIIIYDQSRLSRNISDWFELRQLFSSKGKQLYSCNEQLSSDYLNSNAFLSEGIHALFAQNHVIETRRKTLDGVKSKAKQAGFCGGTPPLGYDIVNGEYVINEKEAPAIRKMFEMYALGKSYDDIMQVLYREGFRSKRGNKISSNAIYYLLRNERYVGTYYWNKYQYTVMRKRITRKENPEIVRIENAIPPIIDKETWAMVQEQLSKNKGASTRTKRQYLLSGLIKCGYCGGTYTGFASKNRRSGEETVYYTCSTKERLKACKAKNVRGDEIESFVYYTLKDRIFNQDLAEQVADMIISQSKDIVTFDATSVKREISKKKQAINNLFQAIENGLNAEITTDRINALQDEIKALGLSLEQNMKQNDTVIDREKLIHSLLEDAKKIDLDFEHRRAIIRKYVVKIEITDDTVNLHCIGDSGTTGGATPQYGVLIFAVDRISLKDIVRQIPSPTK

SEQ ID NO: 4316 - protein, 521 aa, Unknown
  Description of Unknown: Integrase B4317 sequence
  PTHR30461:SF3,IPR036162,PS51737,IPR011109,PTHR30461, PF00239,G3DSA:1.10.10.2600,IPR026989,IPR006119,SSF53041, SM00857,IPR025827,cd03770,IPR038109,PS51736, PF14198,PF13408,G3DSA:3.40.50.1390,PF07508,Coil
MLRQTTQQLITALYPRLSHEDELSGESNSISNQKRILETYAKQNGFTNLRWYTDDGYSGANFQRPGFQAMLADIEAGKVGTVIVKDMSRLGRNYLQVGMYTEMIFPQKNVRFIAINDGVDSAQGENDFAPLRNIFNEWLVRDTSKKIKAVKRSKGMSGKPITSKPVYGYLMDKDENFIIDEEAAPVVRQIYSLCLAGNGPTKIARMLTEQQIPTPGTLEYQRTGSTRRYHPGYECKWATNTVVHLLENREYTGCLVNFKTEKPSYKMKHSIDNPIEKQAIFENHHEPIIDLQTWERVQELRKQRKRPNRYDDVGLFSGLLFCADCGHVMYQQRYQTDKRKQDCYICGSYKKRTADCTAHFIRTDLLTAGVLDNLRKVTAYAQKHEARFVKLLIQQNEMGGKRKLAAAAKQLEQVQSRIAELSRYIKRLYEDNVNGKISDERFMEMSADYEAEQRELKDRAAALQGELDKAQERLDTIMEQMKAADGVTEELKRTHQMEWVQRCNNIHNRAEEIILQEMIYS

SEQ ID NO: 4317 - protein, 521 aa, Unknown
  Description of Unknown: Integrase B4318 sequence
  cd00338,SM00857,G3DSA:1.10.10.2600,IPR036162,PF13408, IPR025827,G3DSA:3.40.50.1390,PS51737,IPR006119,IPR038109, PF07508,IPR011109,SSF53041,PTHR30461,PS51736, Coil,PF00239
MSLENVCIYLRKSRADREAEARGEGETLARHERILLDLAKSRNYNIGAIYKEIVSGETISARPVMQQVLHEVEAGMWDGVLVVEVERLARGDTIDQGVVSRAFQYSDTKIITPTKTYDPNNEFDEEYFEFGLFMSRREYKTIKRRLNAGRIASAREGKYGGNKPPYGYRRLKLQNEKGWTLEIEPDQAAVVKLVFEWYVNGVDGDRIGMSKIVRKLNDMGFKTMHGGSWVISTVQSIIRNPVYAGMIRWNSRKSIRSIRDGQVTVSRPMAEDYILAEGRHPAIVSRELFDQAQKIVDQNPARPISSLHVIKNPLAGIVRCGKCGHTMTRKAPSGRQEALLQCPYSSCSTVSSKLSLVENSLIDGIQKLVDGYRLNSDVSDQNFASSIETKKDLLLEKQAELKRLEKKKEKQYDLLEQGIYSTEIFIERSRSVSADINQCLASIHSLEQEIIKEQERLDQQNSFIPRCEDLLEHYWFWDVSTRNQFLQELIEKVVYNKEVKDSKKCDEITFTLDIYPRIQGK

SEQ ID NO: 4318 - protein, 521 aa, Unknown
  Description of Unknown: Integrase B4319 sequence
  SM00857,G3DSA:1.10.10.2600,IPR036162,PF13408,IPR025827, G3DSA:3.40.50.1390,PS51737,IPR006119,IPR038109,PF07508, SSF53041,IPR011109,PTHR30461,Coil,PS51736, cd00338,PF00239
MPYCMYLRKSRKDFEAESAGQGETLARHKAALLETAQRLHLAVSEIYQEIVSGDSIAARPEMQRLLADVEAGKWDGVLVMEVERLARGDTMDQGQVQRTFVYTGTKIITPTRTYDPSDPADAEYFEFGLFMSRREYQTINRRLLAGRERAVREGKWPQGHAPYGYKTVKVPKGKGYMLEVVPEEAEIVKSIFNWYVNGAEYNGAFLRVGARRISTMLNSMGLTTQAGNLWSAPAVRVILKNHAYIGKVTWYKQTLRKSMSNGAVVKKLERTPERTLICDGLHEAIISEELFEAAQARLSADSTGPATKGPLQSPLAGLLYCGLCGCVMARQHEKGKPAYYVCRNPLCRCRGSKLEVVEQRVVATLAHWLTGYEITAKAQAQTVDIGALQSALDGAQRELLAYQQQQTRLYDLLERGIYTEQVFLQRQSAITGEVQRLQAAVSDTEAAIAKAVRINASAREIVPAVHAVLDAYPTYTTAQEKNDALRMVLSRVEYTRTVGGFGSDPQDFEVKIFPRLPEPVE

SEQ ID NO: 4319 - protein, 521 aa, Unknown
  Description of Unknown: Integrase B4320 sequence
  PTHR30461:SF3,SM00857,G3DSA:1.10.10.2600,IPR036162,PF13408, IPR025827,G3DSA:3.40.50.1390,PS51737,IPR006119,IPR038109, PF07508,SSF53041,IPR011109,PTHR30461,Coil, PS51736,cd00338,PF00239
MKAAIYARYSSDNQREESIEAQIRAINEFAERENIQIVKTYIDEARSATTDDRPQFLKMIKESELGLFDTLIVHKLDRFSRNRYDSAFYKKKLKDNNVRLISVLEHLDNSPESIILESVLEGMAEYYSVNLSREVMKGMRETALQCKHNGGLPPLGYDVAKDKTYIINPNEAKAVKLIYELYSNGVGYNLILSRLNELGYKTKKGKFFGKNSLYSILTNEKYNGIYVFNKSSKKINGKRNSHKHKLDEEIIKIKDGMPKIIDDDLWNEVKKKMDNNKAHRGAAQAKKIYLLSGLIYCGKCGHAMTGNSRHSGRNKTLYETYECSNRKRTKQCDMRAINKSLAEKIVIDALYDNIFSKKAIENLTRKILTYAQEQNKTITEDIITYKKELKDVDSKIDNIVEAIADGLYSPVMKEKLTSLESKKNALLIRIDEAEREAILTSPSKEMIKKYLSKDSDIKEKTPQQQKKVVQNYIKKVTIYDDEVITDTIVTCLGIGEAYRTRVHKLQKTNINIKSRNPHRNL

SEQ ID NO: 4320 - protein, 521 aa, Unknown
  Description of Unknown: Integrase B4321 sequence
  SM00857,G3DSA:1.10.10.2600,IPR036162,PF13408,PS51737, G3DSA:3.40.50.1390,IPR025827,IPR006119,IPR038109,PF07508, IPR011109,SSF53041,PF00239,PTHR30461,PS51736, Coil,cd00338
MKNGNYAMYLRKSRADRENEARGEMETLARHEKLLFETAKRMQITVSAVYKEIVSGETISARPVMQKLLTEIEQGVWDGVLVVEVERLARGDTIDQGIVSQAFKLSDTKIITPVKVYDPNNEFDEEYFEFGLFMSRREYNTIKRRLQRGRLASVREGKYVGNRPPYGYERVKIPNDKGFTLSPLPEQAKIVKYVYDLYAYGLDGEEMGTAKIVRKLNDLQIPTQSGGKWISPTIRDMLYNPVYIGKLRWNRRAATKKVCDGKITYSRPTSKEYEICDGLHPAIIDPETFKICQKKLSKNQSRPVGLDKTIKNPLGGLVICSKCGRRMVRRPYNKTGQRSTLICPYTHCDNVSSPLEDVETMVLEAIADIVKNERIEPTTSVIPSDTLDILKDTLKNQETSLETLQKQQNSLYDLLEQGIYTTDVFLERSNTLKEQITAADSSIQNLKKKISAEQNSLKIQADFIPKCEHLLDIYDTLDTPEKNRIMKELIDHIDYLKEEKNVPFTKKYAKVFIHVYPRTPE

SEQ ID NO: 4321 - protein, 521 aa, Unknown
  Description of Unknown: Integrase B4322 sequence
  cd03768,PTHR30461:SF3,SM00857,G3DSA:1.10.10.2600,IPR036162, PF13408,PS51737,IPR025827,G3DSA:3.40.50.1390,IPR006119, IPR038109,PF07508,IPR011109,SSF53041,PTHR30461, PS51736,Coil,PF00239
MNVAIYARKSKATKKGESIATQIELCKKYFAGSDNINFLVYEDEGFSGKNTDRPQFKKLINDAKLKRFSCLICYRLDRIARNVADFSSTYRILEDNNIDFISITEQFDTNSVMGRAMINISATFAQMERETIAERIKDNMLELSKTGRWLGGTPPLGFKSVQIDYDSSGQKKKMFKLEIVPDEIEIVKLIYELYPQYKSTVPIARHLVSNHIKGKNGGDFSRNTVLQILNNPVYCCSDKEAIKYFESKGSIINCIEDNTLGLMVYNKRKGGKKENPIDEWIIATGKHPGVIPSSEWINCQNILEEIRKKSSPRQATGNKFLLSGMLKCKICGSSMCSWSRNSRGHYYRSYRCELKNRAANRCTCKAINADELEEFVIDMLKNLDINSLDIKSKTSSNSNLKQELNILNKTLSENNKLLQGLIKKLALIDDIDILSMIQSEIKKIKSENENIDKRINEINLSMFDVEDTLKKQKIFLECFDMYKKTIDFVDNVETKRKLIMNLVEYFIYDSENGTVEYKIRL

SEQ ID NO: 4322 - protein, 521 aa, Unknown
  Description of Unknown: Integrase B4323 sequence
  PTHR30461:SF3,SM00857,G3DSA:1.10.10.2600,IPR036162,PF13408, IPR025827,G3DSA:3.40.50.1390,PS51737,IPR006119,IPR038109, PF07508,SSF53041,IPR011109,PTHR30461,PS51736, cd00338,PF00239
MARITKIEATKSFIEKKKIRVAAYARVSTRSDEQLLSLETQKEHYDNFISANSEWEYAGLYYDEGVSGTKVEKRDGLLALLKDCEDGKIDRVITKSISRFSRNTADCLEMVRNLARLNIYMYFEKENIDTEHMSSEWMLSILSSIAESESRSISQNNKWSIKHRFEEGTFIISYPPYGYENEEGRMVIVPEEAAVVRDIFNMTINGMGTHVIARELNERGVQSRKGTKWHPSTVRGILQNEKYTGDVIFQKTYTDDNYNRHINYGEKNMYLCKNHHEPIISHEIFDKATAVIHQRAKEKSIETGIGKYHHLYAFSGKIICGECGSTFKRRQHYKPSGNYVAWCCNTHITDNDDCSMMYIRDEDIKTAFLRMIRKLQTVHAKVLKPFIEGLRGANNKERLHQVLALEEQIEKNVEQTTVLTNLLSSGYIEPEIFHAEKNQLTSEADRLAREKQLISKSINGDLTHLDEAQKLLRFVSKKAEITEFEDEMFLEYVDTMTVHSRDEITFNLKCGLNITERLVVV

SEQ ID NO: 4323 - protein, 521 aa, Unknown
  Description of Unknown: Integrase B4324 sequence
  cd03768,PTHR30461:SF3,SM00857,G3DSA:1.10.10.2600,IPR036162, PF13408,PS51737,G3DSA:3.40.50.1390,IPR025827,IPR006119, IPR038109,PF07508,IPR011109,SSF53041,PTHR30461, PS51736,Coil,PF00239
MRKVAIYSRKSRFTGKGESIENQIIKCKKFIQFKFDIDPENTEIFIDEGFSGKNENRPRYQDMINKIKNKEIDSIIIYQLNRLGRNARDIHNTMQMCEDLGAVIYSATEGFDSSTSFGRAVIGILASLAQLEREQIAERVKDNMYNLARKGRWLGGQSPLGFDGTREYYIDENGKERSITKLKKNNEELKLVKTIYEKYLVEQSLSQLEKWSLSNNIKGKNGCDLGKTSINSALQNPVYVKSDDKIFEYLNKHNYETYGEPNGNGLLRFGKNDNKIVAVSKHSGIIDSDTWIKVQEILKSNSEKAPRMGKTNTALLTGILKCGCGAPMIVSHGLKKKDGTKVFYYVCSMKVNSRGTRCKSGNMNGSLLEDKLITYLKNYNRNLLIKQLKESFQNTKQLESKLTVESIDNNINKIHKAIKQLLNKLKLVDDDEVSKIILSEITAEKNKIQELETQKDELLKNQSSLSITQSEILEIIALLDDFNETFDNLTFEQKKMKLKNLLESVTYKDDMFHISFKLKKN

SEQ ID NO: 4324 - protein, 521 aa, Unknown
  Description of Unknown: Integrase B4325 sequence
  PTHR30461:SF3,cd00338,SM00857,G3DSA:1.10.10.2600,IPR036162, PF13408,IPR025827,G3DSA:3.40.50.1390,PS51737,IPR006119, IPR038109,PF07508,SSF53041,IPR011109,PTHR30461, PS51736,Coil,PF00239
MMKAVIYARYSSEKQQEISIEGQLRVCQEFAAREGYEVVDTYTDRALSASRDVERREDFQRMIRDSGRRGFDVVIVYKFSRFARNRYDSAVYKARLRQNGVKVVSACEPISANPEGALIEGIFESLDEFYSKSLAQDVTRGMHENATKALSTGGTIPLGYVSVDKRLQIDPATAPAVRLAFERYAEGMSLARIADELNAQGYRTRAGKAFNRSSFNALLSNRKYIGTYHYNGEVELVGQVPPIVDPGTFRRVQERLRKNTTAPGRTKATINYLLSTKLYCGACGKPMAGESGHNHSGTRYYYYACSGRKRRLGCKMPTLRKDDLERLVVEHARTLLSPDNIKALAHAAAAEYQRQAEDDSAAVSLRRQLDEVTRSLDNLLRMVEQGAISATLVARINELEGRKASISAELADEQRGAPELTEVDILRWLSCFADGCLEDEDYMRNVIDMLVNKIVVQQNPNQKVSVLVAYNLAGRGDEISGSGLVDVVHQARHNPNLCTRATESCMTFLLYHGCAIFQLAA

SEQ ID NO: 4325 - protein, 521 aa, Unknown
  Description of Unknown: Integrase B4326 sequence
  cd03768,PTHR30461:SF3,SM00857,IPR036162,PF13408, IPR025827,G3DSA:3.40.50.1390,IPR006119,PF07508,IPR011109, SSF53041,PTHR30461,PS51736,Coil,PF00239
MRIAIYARKSVFAENSDSVKNQERMAREYAALHFEGDHTFLLYMDEDYTGANTNRPGLKDFMRDVKAGIIDFLIVYQLDRLSRNVRDFSNIYAFMEDHSVGFVSVKENIDTSTPLGKAMMYVSVVFAQMERETISNRVADNMMGLAAAGWWFGGSAPRGYRRIKVTEFGKIHTTLELIPEEANKIRHLYDKFLELNASVQSFETYCKHNGIKARRGGYFSATQIYTILSSPFYTFATPEVWDYYKSRGCIMTDKRERWDGKTGIVIYGRTTERKGKHSKQPPNKWRVSVGRHIPFIPAEIWLATQSQFTHNSFSKKMVHPTTLLKGTIRCKCGCLMGLARRHRKDGLSTWYICPKADRQGKTVCNTSQIKAEIIDEKALSVFRQIEHDPKQIKKYFSELAAPGDKSAQLAKLTREISHTEERIKNLSEILSNNNESRAAKYMISEIEALDADLADKNKQMASLQAQSLLQVDIERQAREKQKEIARLIKNFEELTIDEKNEIAHKVLKECVWNGETLFLRL

SEQ ID NO: 4326 - protein, 521 aa, Unknown
  Description of Unknown: Integrase B4327 sequence
  cd03768,PTHR30461:SF3,SM00857,IPR036162, PF13408,IPR025827,G3DSA:3.40.50.1390,IPR006119, PF07508,IPR011109,SSF53041,PTHR30461, PS51736,Coil,PF00239
MRIAIYARKSVFAENSDSVKNQERMAREYAALHFEGEHTFLLYMDEDYTGANTNRPGLKDFMRDVKAGIIDFLIVYQLDRLSRNVRDFSNIYAFMEDHSVGFVSVKENIDTSTPLGKAMMYVSVVFAQMERETISNRVADNMMGLAAAGWWFGGSAPRGYRRIKVTEFGKIHTTLELIPEEANEIRHLYDKFLELNASVQSFETYCKHNGIKARRGGYFSATQIYTILSSPFYTFATPEVWDYYKSRGCIMTDKRERWDGKTGIVIYGRTTERKGKHSKQPPNKWRVSVGRHIPFIPAEIWLATQSQFTHNSFSKKMVHPTTLLKGTIRCKCGCLMGLARRHRKDGLSTWYICPKADRQGKTVCNTSQIKAEIIDEKALSVFRQIEHDPKQIKKYFSKLADPEDKSAQLAKLTREISHTEERIKNLSEILSNNNESRAAKYMISEIEALDADLADKNKQMASLQAQSLLQVDIERQAREKQKEITRLIRNFEELTIDEKNEIAHKVLKECVWNGETLFLRL

SEQ ID NO: 4327 - protein, 521 aa, Unknown
  Description of Unknown: Integrase B4328 sequence
  PTHR30461:SF3,cd00338,SM00857,G3DSA:1.10.10.2600,IPR036162, PS51737,G3DSA:3.40.50.1390,IPR006119,IPR038109,PF07508, IPR011109,SSF53041,PTHR30461,PS51736,Coil, PF00239
MAEFENVIIYLRKSRSDDPMQTVEDVLAKHESILQDYSIKQWGKPVPENRIFREVVSGETIQDRPVMQQIMKLLETGFISGVLIIEPQRLSRGDLQDCGRIINSFRYTNTVVITPPKTYNLSDEYDRKFFEMELTRGNDYLEYTKKILNRGRIASIKAGNYIGNIAPYGYRKVVIGTGKDKYHTLDIEPKEAEAVRIMFDLYVNKDYGFTNIAHFLDNAGYKPRNSDNWSPAAISSMLNNEIYIGRVVWNRRQTVKKMQDGLIVRTRPRHNDYISVPGRHPAIISEELFYAAKRKRGKTPKVKKFKELTNPLAGLLFCGRCGFAISMKKYADKRSNTGHETITMLCNNQSNCHTKSVMYSLIIAKVKLSLQQAINDFEVHINSNDDSEQILQQNIINNLTEELEHLKEKDIRQKDAYEDGIYSKEEFLKRNAKLTEQISITQEKLNNALLEEPRVCDYKEKIVRFRDCLNALDDDNVSAAVKNTLLKACIDKILYYNDSPSLPGIGRYVDNPFRLEIFLKL

SEQ ID NO: 4328 - protein, 521 aa, Unknown
  Description of Unknown: Integrase B4329 sequence
  SM00857,G3DSA:1.10.10.2600,IPR036162,PF13408,PS51737, G3DSA:3.40.50.1390,IPR025827,IPR006119,IPR038109,PF07508, IPR011109,SSF53041,PTHR30461,Coil,PS51736, cd00338,PF00239
MPYCMYLRKSRKDFEAESAGQGETLARHKAALLETAQRLHLAVSEIYQEIVSGDSIAARPEMQRLLADVETGKWDGVLVMEVERLARGDTMDQGQVQRTFVYTGTKIITPTRTYDPSDPADAEYFEFGLFMSRREYQTINRRLLAGRERAVREGKWPQGHAPYGYRAVKVPKGKGYMLEIVPEEAEIVKSIFNWYVNGAEYNGAFLRVGARRISTMLNSMGLTTQAGNLWSAPAVRVILKNHAYIGKVTWYKQTLRKSMSNGAVVKKLERTPERTLICDGLHEAIISEELFEAAQARLSADSTGPATKGPLQSPLAGLLYCGLCGCVMARQHEKGKPSYYVCRNPLCRCRGSKLEVVEQRVVATLALWLAGYEITAKAQAQTVDIGALQSALDGAQRELLAYQQQQTRLYDLLERGIYTEQVFLQRQAAITGEVQRLQAAVADTEAAIAKAVRINASAREIVPAVHAVLDAYPTYTTAQEKNDALRMVLSRVEYTRTVGGFGSDSQDFEVKIFPRLPEPVE

SEQ ID NO: 4329 - protein, 521 aa, Unknown
  Description of Unknown: Integrase B4330 sequence
  PTHR30461:SF3,SM00857,G3DSA:1.10.10.2600,IPR036162,PS51737, G3DSA:3.40.50.1390,IPR006119,IPR038109,PF07508,SSF53041, IPR011109,PTHR30461,Coil,PS51736,cd00338, PF00239
MTEWEKTGSGVEPYAIYLRKSRADEKAEAMGEGETLARHKKILTDFAARKGLFVAEIYQEIVSGETIAARPEIQRLIRDCYAGKYRGIIIVEVTRLSRGNQGDAQTILDCLRYANRNQGLLVYTPTKVYDVAHSAEDEEFMEFELFMSRREYNMIKKRMERGRRQAIVEGNYMGAYRPYGYNIIKTRTARTLEPNPDEAPIVKMIFNLAVKEHCSTGQIARQLTSMGIPTYTENREWNSGSVKAILQNPIYIGRVRWNERMRVKTMVDGKLISSRPRANGEADYYMEYDGKHEPLVDKKAFTAANNKFHNNKTREGYALLNPLAGLLRCKNCGRMMVYHPYKKQNTAPRYSHASSQLCKVKSAARPEVIAAVAQSLRMYIADFEVRINASDAEAAKESAAQADAMRKQIQDAERKLDKLFDAWESGNISDSEFVSRKAVHNERIALVQAQLRKIESRAPEKELYKEKIQKLTDALRVLEDESLPAETQNQYLKAILDRIEFSREDPDSFILDVFLKDDIID

SEQ ID NO: 4330 - protein, 521 aa, Unknown
  Description of Unknown: Integrase B4331 sequence
  cd03768,PTHR30461:SF3,SM00857,IPR036162,PF13408, IPR025827,G3DSA:3.40.50.1390,IPR006119,PF07508,IPR011109, SSF53041,PTHR30461,PS51736,Coil,PF00239
MRIAIYARKSVFAENSDSVKNQERMAREYAALHFEGDHTFLLYMDEDYTGANTNRPGLKDFMRDVKAGIIDFLIVYQLDRLSRNVRDFSNIYAFMEDHSVGFVSVKENIDTSTPLGKAMMYVSVVFAQMERETISNRVADNMMGLAAAGWWFGGSAPRGYRRIKVTEFGKIHTTLELIPEEANEIRHLYDKFLELNASVQSFETYCKHNGIKARRGGYFSATQIYTILSSPFYTFATPEVWDYYKSRGCIMTDKRERWDGKTGIVIYGRTTERKGKHSKQPPNKWRVSVGRHIPFIPAEIWLATQSQFTHNSFSKKMVHPTTLLKGTIRCKCGCLMGLARRHRKDGLSTWYICPKADRQGKTVCNTSQIKAEIIDEKALSVFRQIEHDPKQIKKYFSELAAPEDKSAQLAKLTREISHTEERIKNLSEILSNNNESRAAKYMISEIEALDADLADKNKQMASLQAQSILQVDIERQAREKQKEITRLIRNFEELTIDEKNEIAHKVLKECVWNGETLFLRL

SEQ ID NO: 4331 - protein, 521 aa, Unknown
  Description of Unknown: Integrase B4332 sequence
  PTHR30461:SF3,cd09865,IPR036162,PS51737,IPR011109, PTHR30461,PF00239,G3DSA:1.10.10.2600,IPR006119,SSF53041, cd00338,SM00857,IPR025827,IPR038109, PS51736,PF13408,G3DSA:3.40.50.1390,PF07508,Coil
MPVVTKIPARLHPATFVPLESTAKRKVAGYARVSTDSEEQQTSYAAQVSYYTDYIQKRLDWDFVGVYTDEGISATNTRHRDGFNRMIADALDGKIDLIVTKSVSRFARNTVDSLTTVRKLKEKGVEVYFEKENIYTLDSKGELLITIMSSLAQEESRSISENVTWGQRKRMADGKVSLPYGRFLGYRKGENGLPEIVPEEAEIVRFIYRSFMHGSTPHHIAETLTFKNILTPGGKEVWTTSTIESILTNEKYKGSALLQKKFTVDFLTKKTKINEGEVPQYYVEESHPAIIPPEEFELVQAEYLRRKRLGRKYNSKSIFTARLICECCGGYYGSKVWHSTSKYRRVIWQCNHKFQNGEKCTTPHLYEEHIKDKFILAMNQILENKDEIIENCLMLSEHFTVSDDTAIEAVTQEMDVVAELTRNLIQQNSVKPMKQELYKSEYEKLVQRYESLKAKRDALVSKKEAMESKLKFILHYAETLRGQDVIKEFSEDLWLKAIDHVTICKDGGMVFLFKDGTEIGV

SEQ ID NO: 4332 - protein, 521 aa, Unknown
  Description of Unknown: Integrase B4333 sequence
  PTHR30461:SF3,SM00857,G3DSA:1.10.10.2600,IPR036162,PF13408, PS51737,G3DSA:3.40.50.1390,IPR025827,IPR006119,IPR038109, PF07508,IPR011109,SSF53041,PTHR30461,Coil, PS51736,cd00338,PF00239
MENIIIYLRKSRSDDPALSVTDVLARHEQQLQEYAINTYNRQISEDHIFREVVSGETIADRPVMKQVIKLLETGTVDGVLVIEPQRLSRGDLEDCGKIVNTFRYTGTLVITPPKTYNLNDEYDRKFFEMELMRGNDYLEYTKKILNRGRIASVKQGNYIGSVAPYGYKKIKSGSGKDSYHTLEIVPEEADAIRLMYQLFVKEHYGFTKIARYLDDIGVKPRKTDHWSPAAIKDMLENPVYIGKIRWNYSKVQKTIINGQISKTRPRQKDTSQWIYVNGRHEAIIEEAIYNKALEMRGKNPCVRKNKELSNPFAGLLYCGTCGRAMSYKHFKQYRGKSENVCTSMLCNNQAICKTKSIKYDTFYKRVVESLEENVADFEIKLKQEESNGKQFQKDLICSLEAKLNKLKEKDFRQKDAYEDGLYTKEEYATRNAKLQEQISATMESLSKAKSNTPPVIDYRERISRFTDCLTALKDNTLSASEKNVLLKTCIDKIVYYNNMESKPGIGRYVDNVFQLDIFLLL

SEQ ID NO: 4333 - protein, 521 aa, Unknown
  Description of Unknown: Integrase B4334 sequence
  cd03768,PTHR30461:SF3,SM00857,IPR036162,PF13408, IPR025827,G3DSA:3.40.50.1390,IPR006119,PF07508,IPR011109, SSF53041,PTHR30461,PS51736,Coil,PF00239
MRIAIYARKSVFAENSDSVKNQERMAREYAALHFEGDHTFLLYMDEDYTGANTNRPGLKDFMRDVKAGIIDFLIVYQLDRLSRNVRDFSNIYAFMEDHSVGFVSVKENIDTSTPLGKAMMYVSVVFAQMERETISNRVADNMMGLAAAGWWFGGSAPRGYRRIKVTEFGKIHTTLELIPEEANEIRHLYDKFLELNASVQSFETYCKHNGIKALRGGYFSATQIYTILSSPFYTFATPEVWDYYKSRGCIMTDKRERWDGKTGIVIYGRTTERKGKHSKQPPNKWRVSVGRHIPFIPAEIWLATQSQFTHNSFSKKMVHPTTLLKGTIRCKCGCLMGLARRHRKDGLSTWYICPKADRQGKTVCNTSQIKAEIIDEKALSVFRQIEHDPKQIKKYFSELAAPEDKSAQLAKLTREISHTEERIKNLSEILSNNNESRAAKYMISEIEALDADLADKNKQMASLQAQSLLQVDIERQAREKQKEITRLIRNFEELTIDEKNEIAHKVLKECVWNGETLFLRL

SEQ ID NO: 4334 - protein, 521 aa, Unknown
  Description of Unknown: Integrase B4335 sequence
  cd00338,SM00857,G3DSA:1.10.10.2600,IPR036162, PS51737,G3DSA:3.40.50.1390,IPR006119,IPR038109, PF07508,IPR011109,SSF53041,PTHR30461, PS51736,Coil,PF00239
MPRQTKKLQTKATKGVIWARVSSREQEDGYSLDAQIENSKKYAERIGIEIIKTFEVTESSTHGDRKQFHDMINWVKRQKQSIAIICDKIDRLQRRVSEVPILEELRKEGKIELHFSRENRVIKKDTNGSDLACYRMIVVMAENYTDCIADNVKRSFNQMRKEGKWAHKAPVGYKNVKDSKGNSDIIVDPDRGFLITALFKEYASGIYTLEQITKKAREIGFTMPKCKKLYKQTIRNILTNRFYAGEMYGKGDYYAHQYKTLIDWKTFNRCQEILEGRINHKEQKHEHLFKGIMKCQKCGAMISPYISIHPAKKKGGEKIAYKYLFCPKCKGTHVNEAKGVEKIIQALNVLKTLPRGVLEKMVACLDDLIYEDHKIEIERKKALERKLASFNDKEARWHELYAEASITRDFHSKKLTELSKEKRAIEEELLNYQHIAKQDFVTLKYLASLFLHADQIWNFPKIEQKQKILKLLCSEILLDGKNIVISIRKPISALAEIGSCQIWQGRQDSNPRHSVLETENQ

SEQ ID NO: 4335 - protein, 521 aa, Unknown
  Description of Unknown: Integrase B4336 sequence
  SM00857,G3DSA:1.10.10.2600,IPR036162,PF13408,PS51737, G3DSA:3.40.50.1390,IPR025827,IPR006119,IPR038109,PF07508, IPR011109,SSF53041,PF00239,PTHR30461,PS51736, Coil,cd00338
MNTLERDCIYLRKSRADREAEARGEEETLARHERILLDLAKRRGCHIGAIYREVVSGETISARPVMQRLLQEVESGMWDGVLVVEVERLARGDSIDQGVVARAFQYSDTKIITPAKTYDPNNEFDEEYFEFGLFMSRREYKTIKRRLNAGRLSSVQEGKYCGNKPPYGYERVKLQGKGFSLRPVPAQAQIVRLMYNWYAYGVSGERLGMQKIARKLNEMGIPTLSGKPWSPATVVNILDNPVYTGKIRWNRRKAVNKIEDGAVVKTRPRSNDYIISDGLHEPIISQELYDLAQCYRQQNPPRPIGVMNAVKNPLSGLVHCGKCGHSMVRRPYANRKQEDTLLCPYTSCDNVSSRLSLVEKAVIAGLAELVQSYKVNDTLNDNNGVDIIAAKEKILVEKRAELDNLTAQKTRQYDLLEQGVYTTEIFLERSGATAKQIRDCSAAIERISSELDHDRELLAQKFNFIPKCEHLLSNYWDWDIPTRNSVLKELIERIDYTKDSKNGFKHGDEITFTLDIYPKIQ

SEQ ID NO: 4336 - protein, 521 aa, Unknown
  Description of Unknown: Integrase B4337 sequence
  PTHR30461:SF3,SM00857,G3DSA:1.10.10.2600,IPR036162,PF13408, PS51737,G3DSA:3.40.50.1390,IPR025827,IPR006119,IPR038109, PF07508,SSF53041,IPR011109,PTHR30461,Coil, PS51736,cd00338,PF00239
MGNVMVIPAKRKIGNTNRKKDTKPKLRVAAYCRVSTDSDEQATSYEAQVEHYTEYIKRNPDWEFAGIYADDGISGTNTKNREEFNRLIKDCETGTIDMIITKSISRFARNTLDCLKYIRRLKEKNIPVFFEKESINTMDAKGEVLITIMASLAQQESQSLSQNVKLGLQFRYQNGQVQINHNRFLGYTKDENGNLVIDPEQAEVVKRIYREYLNGYSMDKIASGLEADGILTGAGKKKWWTSTINKILRNEKYIGDALLQKTYTTDFLNKTRVKNNGIVPQYYVEDDHEAIIPKEIFMMVQEELARRKVVKTSANGKKRSYSSNHCLSQKIICGECDEMYRRIHWYSHGRKTVVWRCISRLESTGVECHARTIHEKDLQEIVVIALNELLGNKSKYQKLLQQNIATVIRASAEETTKEIDKKLIELQKELVKKANDKDSYDKIAEQIFELRDKRQQFTMDTAQRDEQLKRITELQDFIKSQTTDLKEFDETLVVRWLKQITIYPDHCTVELKSGLKVDVEK

SEQ ID NO: 4337 - protein, 521 aa, Unknown
  Description of Unknown: Integrase B4338 sequence
  cd03768,PTHR30461:SF3,SM00857,IPR036162,G3DSA:3.40.50.1390, IPR006119,PF07508,IPR011109,SSF53041,PTHR30461, PS51736,Coil,PF00239
MRIAIYARKSVFAENSDSVKNQERMAREYAALHFEGEHTFLLYMDEDYTGANTNRPGLKDFMRDVKAGIIDFLIVYQLDRLSRNVRDFSNIYAFMEDHSVGFVSVKENIDTSTPLGKAMMYVSVVFAQMERETISNRVADNMMGLAAAGWWFGGSAPRGYRRIKVTEFGKIHTTLELIPEEANEIRHLYDKFLELNASVQSFETYCKHNGIKALRGGYFSASQIYTILSSPFYTFATPEVWDYYKSRGCIMTDKRERWDGKTGIVIYGRTTERKGKHSKQPPNKWRVSVGRHIPFIPAEIWLATQSQFTHNSFSKKMVHPTTLLKGTIRCKCGCLMGLARRPRKDGLSTWYICPKSDRQGKTVCNTSQIKAEIIDEKALSVFRQIEHDPKQIKKYFSELAAPSDKSAQLAKLTREISHTEERIKNLSEILSNNNESRAAKYMISEIEALDADLADKNKQMASLQAQSLLQVDIERQAREKQKEITRLIRNFEELTIDEKNEIAHKVLKECVWNGETLFLRL

SEQ ID NO: 4338 - protein, 521 aa, Unknown
  Description of Unknown: Integrase B4339 sequence
  PTHR30461:SF3,SM00857,G3DSA:1.10.10.2600,IPR036162, PF13408,IPR025827,PS51737,G3DSA:3.40.50.1390, IPR006119,IPR038109,PF07508,SSF53041, IPR011109,PTHR30461,cd00338,PF00239
MPASKNTARKYAAGGGSDNSCGVEPLRAVIYARYSSSGQREESIEGQLRDCYEFAKKHGIIVIGEYIDKAMTGRVDRRPDFQRMMKDSEKGRFNCVLLWKMDRFARNRYDSAMYKYKLKKNGIRIFYAKETIPDGPEGIILESVMEGYAEYYSENLAQNVKRGNYDSALELKTLGKTCLGLKTGPDGRYMIDQAEAAIVRRIFEEYAEGERAKDIYERLNSEGYRTSRGGKFNKNSLRRILSNKKYIGVYEYEDIYVENGIPAIITDRDLFERVQKMLKINHDAPARGKAQNFLLTTKLFCGLCGSPMIGDGGTSHTGKAYAYYSCTKRKRGRSCKKESVPKDWIEDLVVGELVKIVHNDELIEQIADRVMEYQKREKDQSGLHALEIRQKENEKAISNMLAAIEAGIITPSTKTRLMELEADRADIEKGIAHELLAEPEFERDQIIYFLERFRSGDINDEAYRIMLVDTFLNSVYLYDDDHLVLVMNYSGENCKVDLKLVEGAVSGDGCKGSAFAPSSAL

SEQ ID NO: 4339 - protein, 521 aa, Unknown
  Description of Unknown: Integrase B4340 sequence
  cd03768,PTHR30461:SF3,SM00857,IPR036162,PF13408, IPR025827,G3DSA:3.40.50.1390,IPR006119,PF07508,IPR011109, SSF53041,PTHR30461,PS51736,Coil,PF00239
MRIAIYARKSVFAENSDSVKNQERMAREYAALHFEGDHTFLLYMDEDYTGANTNRPGLKDFMRDVKAGIIDFLIVYQLDRLSRNVRDFSNIYAFMEDHSVGFVSVKENIDTSTPLGKAMMYVSVVFAQMERETISNRVADNMMGLAAAGWWFGGSAPRGYRRVKVTEFGKIHTTLELIPEEANEIRHLYDKFLELNASVQSFETYCKHNGIKARRGGYFSATQIYTILSSPFYTFATPEVWDYYKSRGCIMTDKRERWDGKTGIVIYGRTTERKGKHSKQPPNKWRVSVGRHIPFIPAEIWLATQSQFTHNSFSKKMVHPTTLLKGTIRCKCGCLMGLARRHRKDGLSTWYICPKADRQGKTVCNTSQIKAEIIDEKALSVFRQIEHDPKQIKKYFSELAAPEDKSAQLAKLTREIFHTEERIKNLSEILSNNNESRAAKYMISEIEALDADLADKNKQMASLQAQSLLQVDIERQAREKQKEITRLIRNFEELTIDEKNEIAHKVLKECVWNGETLFLRL

SEQ ID NO: 4340 - protein, 521 aa, Unknown
  Description of Unknown: Integrase B4341 sequence
  PTHR30461:SF3,cd00338,SM00857,G3DSA:1.10.10.2600,IPR036162, PF13408,PS51737,IPR025827,G3DSA:3.40.50.1390,IPR006119, IPR038109,PF07508,SSF53041,IPR011109, PTHR30461,PS51736,Coil,PF00239
MSTNRAVIYARYSSNKQTEQSIEGQLRDCYSYAEKHDITIIGEYIDRALSAKTDNRPEFQRMIKDSANGAFNIIIVWKLDRFSRNRYDSAAYKVKLKKNGVKIISAMENISDNPEGILVESLLEGIAEYYSADLSEKVNRGMRETALKCHSTGAPVPLGYKIEDKKYIVNEIESPVVKKIFTMYADGFSAKDICDYLNEHGFKTRRGGQFNKNSLRTMLTNRKYIGIYKYKDIEIPGGIPQIIDNELFEKVGKMMIKNKRNAAASKPKEKYLLSGKVICGLCGDKMNGESGKNKSGRVYRYYKCGKQKRNKNDCPKHTIDKYYLEDTVINAVRSIVCNDKIIDRIAKKAVEAQMYDDTPQIINSLEQKLSETEKQIENILKAIESGIFTISVKDRLLELEKTKDILKSEIIKEKNDNPFLDYDTIKFILSQYSNGDFKDEKFRQKLVDVLIYKVIVFDDKIYILYNFSKDDNTKDRYEDIIKLIEKSTAAQNGSPNQLTFEQLFFIDTRLFCQIICMLKNN

SEQ ID NO: 4341 - protein, 521 aa, Unknown
  Description of Unknown: Integrase B4342 sequence
  PTHR30461:SF3,SM00857,G3DSA:1.10.10.2600,IPR036162,PF13408, IPR025827,PS51737,G3DSA:3.40.50.1390,IPR006119,IPR038109, PF07508,SSF53041,IPR011109,PTHR30461,Coil, PS51736,cd00338,PF00239
MGNVMVIPAKRQIGNTGRKQDAKPKLRVAAYCRVSTDSDEQATSYEAQVEHYTEYIKKNPEWEFAGIYADDGISGTNTKNREEFNRMIEDCEAGTIDMIITKSISRFARNTLDCLKYIRQLKEKNIPVFFEKEAINTMDAKGEVLLTIMASLAQQESQSLSQNVKLGLQFRYQNGQVQVNHNRFLGYTKDEDGNLVIDPEQAEVVKRIYREYLEGYSMDKIAAGLEADGILTGAGKPRWHTSTINKILRNEKYIGDALLQKTYTTDFLNKTRVKNTGIVPQYYVEGNHEAIIPREIYMRVQEELVRRRVVKTSANGKKRSYSCNHCFSQIIICGDCGEMFRRIHWNNRGCKSIVWRCISKLEPTGLECHARTINELDLQEIVLTALNELLGDKSKYQKQLQQNIASVIRASAAITTDGIDEKLMELQQELVKKANNKEAYDEIADQIFALREKRQQASMDTVQRDEQLQRITELQDFIKEQPSDLTTFDEALVKRWLKQITIWDDHCTVELKSGLMVDVER

SEQ ID NO: 4342 - protein, 521 aa, Unknown
  Description of Unknown: Integrase B4343 sequence
  IPR036162,PS51737,IPR011109,PTHR30461,PF00239, G3DSA:1.10.10.2600,IPR006119,SSF53041,cd00338,SM00857, IPR025827,IPR038109,mobidb-lite,PS51736,PF13408, PS50007,G3DSA:3.40.50.1390,PF07508,Coil
MSNITIIPARPQRANSQQNETEKPKLRVAAYCRVSTDSDEQATSYEAQVSHYTEQITRNPEWAFAGIYADDGISGTNTKKREEFNRMIADCMDGKIDMIITKSISRFARNTLDCLKYIRQLKDRNIPVFFEKENINTLDAKGEVLLTIMASLAQQESQSLSQNVKLGLQFRYQRGEVQVNHSRFLGYTKDENGRLVIDPEQAEVVRRIYREYLDGYSTDKIAAGLERDGILTGAGNPRWHTSTVAKILRNEKYMGDALLQKTYTVDYLSKKRIKNNGIMPQYYVENDHEAIIPKDIFMRVQDELVRRRLVKVSPNGRKHGFSSNHVFSQMIVCGECGELFRRVHWNNHGCRSIVWRCLSRLQPTGVICHARTVSEEVLKNVVVQAFNELLGSRSTYQKRLRDNLAVVLRGYEDEQALEIDKRLAELQQELINYASRKEDYNDIADEIFRLREMKQKNFTDTAVRDEQVKRINELNEFIEQQDSEMTEFDESLARRWLKEIVVWDDRFSVELKSGIVVEIEL

SEQ ID NO: 4343 - protein, 521 aa, Unknown
  Description of Unknown: Integrase B4344 sequence
  PTHR30461:SF3,SM00857,G3DSA:1.10.10.2600,IPR036162,PF13408, IPR025827,G3DSA:3.40.50.1390,PS51737,IPR006119,IPR038109, PF07508,IPR011109,SSF53041,PTHR30461,PS51736, cd00338,PF00239
MKTVTKIEANQRTTGSEKKLRVAAYCRVSTDSDDQLESLAEQKKHYETYIQAHENWNFAGLYYDEGISGTKKEKRSELMRLLSDCEAGQIDFIITKSISRFARNTTDCLEMVRQLLAVNVAIYFEKENINTTSMESELVLAVLSSLAENESVSISGNEKWSIRQRFQSGTYKMNPPPYGYRWNGEQLEVNNDQAEIVKRIFAEFLSGKGVMHIARGLDSDKIAPAHGKQWCQSSILRILKNENYTGNAVFQKTFTDESFRRCVNYGQLDKYLVADHHEGIISKEDFDVVAALIDRHSVEKNITKGSHKYQLRYCFSGKIVCGECGATLKHRTHRLGGETYEAWCCSTHIYNKESCSMKFIRDDDIKLAFVTMMNKLVFGHKLILKPYLLTLRSSPTDSSIQRIQQLRLLIEQNTGQQETLTRLMANGFIDRALFGRELNAIMAQTDEYRAEIDTLSSSVTGDGAKLKETERLIKLVERGRMFMEFDADLFSKLVDRICAFSRNEIGFVLKCGLTLRERIGE

SEQ ID NO: 4344 - protein, 521 aa, Unknown
  Description of Unknown: Integrase B4345 sequence
  cd03768,PTHR30461:SF3,SM00857,G3DSA:1.10.10.2600,IPR036162, PF13408,IPR025827,G3DSA:3.40.50.1390,PS51737,IPR006119, IPR038109,PF07508,IPR011109,SSF53041,PTHR30461, PS51736,Coil,PF00239
MIAIYARQSIEKKDSVSIETQIEKCKYYCENQDYKIYKDAGYSGKNINRPQFSKLLEDIKSGIITRVIAYRLDRISRSIADFSQLLIMFDKYNVDFISATENFDTNTPMGRAMINIVMTFAQLERETIVERVTDNYYFRANNGYWAGGYAPYGYSIEHVIGSDGKRHSILIENKNESEIVKKIYDMYTKQNISMRKIAQQLNLKNIPTKKGDSNWGINAVNSILSRPIYTEATTKIYDYFNKCGTCITNNIDAFDGKKTANLYGNAKKNTNVKALRNYDEMFLSLINCVPVISNEDWFRAQNIKGTKKNLAPRSNSSKISFLCGLVKCGKCSSNMVTQGCKNKHGIQYYYLICSTKKNLGRIKCDNKMIDISKLEDIVINDIKKHFNSNEIETKIEKHMKNNKKENINLLKQKEEFENQIIKIDIQIQNLINSIAEGNITISKYINQKIENLEKEKQNISSQLSTIIEKNNITDDNYLIEYVKNINEKINTTDFEQLKLLCHTIIDKIVITDKNIDIHYKI

SEQ ID NO: 4345 - protein, 521 aa, Unknown
  Description of Unknown: Integrase B4346 sequence
  SM00857,IPR036162,PF13408,IPR025827,G3DSA:3.40.50.1390, IPR006119,SSF53041,PTHR30461,cd00338,PF00239
MKVPVWCYARISTLKQIDGFGIQRQINTINQFLQCVELDHRLPFTLDVDNVTQMVAEGKSAFRDKNWNEKTKLGQYRKMVMDGVISDSVLIVENIDRLTRLDPYMAIEIISGLVNRGTTILEIETGMTYSRYIPESITVLVMQCNRANGESKRKSIMMQKSHANRYGKVSKVRPRWFDVVEIDGIKQYRPNETAKAIQRMYNDYINGIGAAHIVRTYGNTDNGKAWTLVTVLRALSDKRVADDARYPPIIDKELYDSVQALKAATNKKGNTHQKNMLNIFSGMSRCPVCNQSIIVKRNSHGNLFTVCLGKRTNKTCEARSISYFALERPLLTAIRGLDFSEVYKHEDKNVLTLRDQWIQNERDIAAFRERLSKASRYEKFVILDELETMNREQEELTIRLKSVDVPKDIQLTFDDDKLDLDTNYRIELNNRIKKLIQHINIVREDVTKSSYTIYCTIKYWTDVISHLVIIDVNIKRTGTGGTNTLTTTLRSVSSLNMDGTVSGNPDSDAWEYWKSFLDNLK

SEQ ID NO: 4346 - protein, 521 aa, Unknown
  Description of Unknown: Integrase B4347 sequence
  cd00338,SM00857,G3DSA:1.10.10.2600,IPR036162, PF13408,IPR025827,PS51737,G3DSA:3.40.50.1390, IPR006119,IPR038109,PF07508,IPR011109, SSF53041,PTHR30461,PS51736,Coil,PF00239
MNSDNQMSERTNAVIYARYSSHSQGEQSIEGQLEKAYSYASSKGYRIVHEYIDRAQSGRTDKRDEFQQMLKDTAKKQFQVIIIWKVDRFGRNREEIALNKIKCKRNGVRVEYVAENIPDSPEGVILESVLEGIAEYYSLQLSQNVRRGQAISVQKCQSVGGVRPLGYITDENKRYAIDPKTSPTVKLIFELYSKGGTVTEIIKRLNKEGLTTAKGKPFTKNSLYSVLNNEKYTGIYIHNGVRIDGGMPQIIEPELFQKVQELMKVNRRAPSHKWSRADYILTDKLFCGKCGSPMVGECGTGKSGMTYNYYICSKRKRFRACDKKAVRQDWIEGIVLREIKAILENDELLKYIAANTYRYYMQQNAAEEELQIIRGKLEEVDSAINNIVKAIEAGMFNPALKKRMDELEDQRENLLTASADIEITQVFKLTEEHILFFLRQFKKADFENIDCQKRLIATFVNSIYLYDDKIVITFNYSGNNHTVSLAEVDNATEGDLFGCCASLSAKKCRYPFGYLHFLLQS

SEQ ID NO: 4347 - protein, 521 aa, Unknown
  Description of Unknown: Integrase B4348 sequence
  SM00857,G3DSA:1.10.10.2600,IPR036162,PF13408,PS51737, G3DSA:3.40.50.1390,IPR025827,IPR006119,IPR038109,PF07508, IPR011109,SSF53041,PF00239,PTHR30461,PS51736, Coil,cd00338
MKNGNYAMYLRKSRADREAEARGEMETLARHEKLLFETAKRMQITVSAVYKEIVSGETISARPVMQKLLAEIEQGIWDGVLVVEVERLARGDTIDQGIVSQAFKLSDTKIITPVKVYDPNNEFDEEYFEFGLFMSRREYNTIKRRLQRGRLASVREGKYVGNRPPYGYERVKIPNDKGFTLSPLPEQAKIVKYVYDLYAYGLDGEEMGTAKIVRKLNDLQIPTQSGGKWIPPTIRDMLYNPVYIGKLRWNRRAATKKVCDGKITYSRPTSKEYEICDGLHPAIIDLETFKICQKKLSKNQSRPVSLNKTIKNPLGGLVICSKCGHRMVRRPYSKTGQRSTLICPYTHCDNVSSPLEDVETMVLEAIADIVKNERIEPTTSVIPSDTIDILKDALKNQETSLETLQKQQNSLYDLLEQGIYTTDVFLERSNTLKDQINTASASIQDLKRKISAEQNRLKVQADFIPKCEYLLDVYDTLDAPEKNRILKELIDHIDYLKEEKNVPFTKKDAKVFIHVYPKTPE

SEQ ID NO: 4348 - protein, 521 aa, Unknown
  Description of Unknown: Integrase B4349 sequence
  PTHR30461:SF3,cd00338,SM00857,G3DSA:1.10.10.2600,IPR036162, PF13408,PS51737,G3DSA:3.40.50.1390,IPR025827,IPR006119, IPR038109,PF07508,SSF53041,IPR011109,PTHR30461, PS51736,Coil,PF00239
MPKNKIMTPNRNGKIAVVYARYSSHNQGEQSIEGQLEAAHAAALSRGYTIVHEYIDRAVSGRTDNREQFQQMLADTAKRQFDVILVWKVDRFGRNREEIAQNKYRCRKNGVRVEYVAETIPDSPEGVILESVLEGFAEYYSLQLSQNVLRGMRVSAEKCQAVGGGCPLGYKVGPDKKYIIDPDTAPTVKLIFKLYAEGQTAPEIVRVLNGKGLRTKRGTAFSKNSLFSVLRNEKYRGIYIFKDIRIEGGMPRMIDDVTFFKVQDLLKVNKRAPAHKWSKAEYLLTDKLFCGKCGSPMAGESGTGRSGRKYNYYLCSKKKQYKTCDKRAVRKDEIENIVINHALALLGDDELLNYIADAVYNYYLAKDESDADLKALESKLKRTETAIANLIRALEAGIFNADTKQRMDELQADKEQLTAAIAETKIMCDYKITREQILYFLRSLRDKDYTDRECQKRLIKTFINSVFVYDDKIVINFNYSGERSAVTVDDVDSVFASLAGTAEDSEQVFVRCARWTTILVQ

SEQ ID NO: 4349 - protein, 521 aa, Unknown
  Description of Unknown: Integrase B4350 sequence
  PTHR30461:SF3,cd00338,SM00857,G3DSA:1.10.10.2600,IPR036162, PS51737,G3DSA:3.40.50.1390,IPR006119,IPR038109,PF07508, IPR011109,SSF53041,PTHR30461,PS51736,Coil, PF00239
MAEFENVIIYLRKSRSDDPMQTVEDVLAKHESILQDYSIKQWGKPVPENRIFREVVSGETIQDRPVMQQIMKLLETGFISGVLIIEPQRLSRGDLQDCGRIINSFRYTNTVVITPPKTYNLSDEYDRKFFEMELTRGNDYLEYTKKILNRGRIASIKAGNYIGNIAPYGYRKVVIGTGKDKYHTLDIEPKEAEAVRIMFNLYVNKDYGFTNIAHFLDNAGYKPRNSDNWSPAAISSMLNNEIYIGRVVWNRRQTVKKMQDGMIVRTRPRHNDYISVPGKHPAIISEELFYAAKKKRGRTPKVKKFTELTNPLAGLLFCGRCGFAISMKKYTDKRSKTGHETITMLCNNQSNCHTKSVMYSLIIAKVKLSLQQAINDFEVHINNNDDSEQILQQNIINNLTEELEHLKEKDIRQKDAYEDGIYSKEEFLKRNAKLTEQISIAQEKLNNALLEEPRVCDYEEKIVRFRDCLNTLDDDNVSATVKNTLLKACIDKILYYNDSPSLPGIGRYVDNPFRLEIFLKL

SEQ ID NO: 4350 - protein, 521 aa, Unknown
  Description of Unknown: Integrase B4351 sequence
  SM00857,G3DSA:1.10.10.2600,IPR036162,PF13408,IPR025827, G3DSA:3.40.50.1390,PS51737,IPR006119,IPR038109,PF07508, SSF53041,IPR011109,PTHR30461,Coil,PS51736, cd00338,PF00239
MPYCMYLRKSRKDFEAESAGQGETLARHKAALLETAQRLHLAVSEIYQEIVSGDSIAARPEMQRLLADVETGKWDGVLVMEVERLARGDTMDQGQVQRTFVYTGTKIITPTRTYDPSDPADAEYFEFGLFMSRREYQTINRRLLAGRERAVREGKWPQGHAPYGYRAVKVPKGKGYMLEVVPKEAEIVKSIFNWYVNGAEYNGAFLRVGARRISTMLNSMGLTTQAGNLWSAPAVRVILKNHAYIGKVTWYKQTLRKSMSNGAVVKKLERTPERTLICDGLHEAIISEELFEAAQARLSADSTGPATKGPLQSPLAGLLYCGLCGCVMARQHEKGKPAYYVCRNPLCRCRGSKLEVVEQRVVATLAHWLAGYEITAKAQAQTVDIGALQSALDGAQRELLAYQQQQTRLYDLLERGIYTEQVFLQRQAAITGEVQRLQTAVADTEAAIAKAVRINASARDIVPAVHAVLDAYPTYTTAQEKNDALRMVLSRVEYTRTVGGFGSDPQDFEVKIFPRLPEPVE

SEQ ID NO: 4351 - protein, 521 aa, Unknown
  Description of Unknown: Integrase B4352 sequence
  SM00857,G3DSA:1.10.10.2600,IPR036162,PF13408,PS51737, IPR025827,G3DSA:3.40.50.1390,IPR006119,IPR038109,PF07508, IPR011109,SSF53041,PTHR30461,Coil,PS51736, cd00338,PF00239
MPYCMYLRKSRKDFEAESAGRGETLARHKAALLETAQRLRLAVSEIYQEIVSGDSIAARPEMQRLLADVETGKWDGVLVMEVERLARGDTMDQGQVQRTFVYTGTKIITPTRTYDPSDPADAEYFEFGLFMSRREYQTINRRLLAGRERAVREGKWPQGHAPYGYRAVKMPKGKGYMLEVVPEEAEIVKSIFNWYVNGAEYNGAFMRVGARRISTMLNSMGLTTQAGNLWSAPAVRVILKNHAYIGKVTWYKQTLRKSMSNGAVVKKLERTPERTLICDGLHEAIISEELFEAAQARLSADSTGPATKGPLQSPLAGLLYCGLCGHVMARQHEKGKPAYYVCRNPLCRCRGSKLEVVEQRVVATLARWLAGYEITAKAQAQTVDIGALQSALDGAQRELLAYQQQQTRLYDLLERGIYTEQVFLQRQSAITGEVQRLQAAVADTEAAIAKAVRINASAREIVPAVHAVLDAYPTYTTAQEKNDALRMVLSRVEYTRTVGGFGSDPQDFEVKIFPRLPEPVE

SEQ ID NO: 4352 - protein, 521 aa, Unknown
  Description of Unknown: Integrase B4353 sequence
  SM00857,G3DSA:1.10.10.2600,IPR036162,PF13408,PS51737, G3DSA:3.40.50.1390,IPR025827,IPR006119,IPR038109,PF07508, SSF53041,IPR011109,PTHR30461,Coil,PS51736, cd00338,PF00239
MSKHKLAVVYARYSSHRQGEQSIEGQLAAARDYATANGLTIIREYVDRAATGRNDNRTAFQEMLKDTSKNQFGTIILWKIDRFGRNREEIAFNKYRCKKNGVKVVYVAESIPDSPEGVILESVLEGMAEYYSLQLSQNILRGQRASAEKCQSTGGNRPLGYLTGADKKFIIDPDTAPTVRLIFDMYAKGNTCTEITKFLNEKGLRTLRGGKFNKNSLRSILKNEKYIGVYKYKNEIRIENGVPAIVDKDTFYKVQDMLKINKRAPAHKWSKSDYILTDKIFCGKCGSKMVGESGTSKTGKKHNYYVCTKKKRQQTCNKKTVKQQYIEDVVISHVHMILQDDELLSFIADSVYAYYIEQNKENNYLESLNKKLSQVNQAISNVMKAIESGIINDITKQRLDELDIQRTEISTEIADLEHAKSLQLTRDQILFFLCCFRNEDIEDRECCKRLIDTFVNAIFVYDDKIIGTFNYSGDKNTVTLAEINDAETLGKVFVHCAQCSTTIKNPNPMPVGHGFGFIILC

SEQ ID NO: 4353 - protein, 521 aa, Unknown
  Description of Unknown: Integrase B4354 sequence
  cd00338,SM00857,G3DSA:1.10.10.2600,IPR036162,PF13408, PS51737,G3DSA:3.40.50.1390,IPR025827,IPR006119,IPR038109, PF07508,IPR011109,SSF53041,PTHR30461,PS51736, Coil,PF00239
MKNGNYAMYLRKSRADREAEARGEMETLARHEKLLFETAKRMQITVSAVYKEIVSGETISARPVMQKLLVEIEQGIWDGVLVVEVERLARGDTIDQGIVSQAFKLSDTKIITPVKVYDPNNEFDEEYFEFGLFMSRREYNTIKRRLQRGRLASVREGKYVGNRPPYGYERVKIPNDKGFTLSPLPEQAKIVKYVYDLYAYGLDGEEMGTAKIVRKLNDLQIPTQSGGKWIPPTIRDMLYNPVYIGKLRWNRRAATKKVCDGKITYSRPTSKEYEICDGLHPAIIDLETFKICQKKLSKNQSRPISLNKTIKNPLGGLVICSKCGHRMVRRPYSKTGQRSTLICPYTHCDNVSSPLEDVETMVLEAIADIVKNERIEPTTSVIPSDTIDILKDALKNQETSLETLQKQQNSLYDLLEQGIYTTDVFLERSNTLKDQINTASASIQDLKRKISAEQNRLKVQADFIPKCEYLLDVYDTLDAPEKNRILKELIDHIDYLKEEKNVPFTKKDAKVFIHVYPKTPE

SEQ ID NO: 4354 - protein, 521 aa, Unknown
  Description of Unknown: Integrase B4355 sequence
  cd00338,SM00857,G3DSA:1.10.10.2600,IPR036162,PF13408, IPR025827,PS51737,G3DSA:3.40.50.1390,IPR006119,IPR038109, PF07508,SSF53041,IPR011109,PTHR30461,PS51736, Coil,PF00239
MPYCMYLRKSRKDFEAESAGQGETLARHKAALLETAQRLHLAVSEIYQEIVSGDSIAARPEMQRLLADVETGKWDGVLVMEVERLARGDTMDQGQVQRTFVYTGTKIITPTRTYDPSDPADAEYFEFGLFMSRREYQTINRRLLAGRERAVREGKWPQGHAPYGYRAVKVPKGKGYMLEIVPEEAEIVKSIFNWYVNGAEYNGAFLRVGARRISTMLNSMGLTTQAGNLWSAPAVRVILKNHAYIGKVTWYKQTLRKSMSNGVVVKKLERTPERTLICDGLHEAIISDELFEAAQARLSADSTGPATKGPLQSPLAGLLYCGLCGCVMARQHEKGKPAYYVCRNPLCRCRGSKLEVVEQRVVATLAHWLTGYEITAKAQAQTVDIGALQSALDGAQRELLAYQQQQTRLYDLLERGIYTEQVFLQRQAAITGEVQRLQAAVADTEAAIAKAVRINASAREIVPAVHAVLDAYPAYTTAQEKNDALRMVLSRVEYTRTVGGFGSDPQDFEVKIFPRLPEPVE

SEQ ID NO: 4355 - protein, 521 aa, Unknown
  Description of Unknown: Integrase B4356 sequence
  SM00857,G3DSA:1.10.10.2600,IPR036162,PF13408,PS51737, G3DSA:3.40.50.1390,IPR025827,IPR006119,IPR038109,PF07508, IPR011109,SSF53041,PTHR30461,Coil,PS51736, cd00338,PF00239
MPYCMYLRKSRKDFEAESAGQGETLARHKAALLETAQRLHLAVSEIYQEIVSGDSIAARPEMQRLLADVETGKWDGVLVMEVERLARGDTMDQGQVQRTFVYTGTKIITPTRTYDPSDPADAEYFEFGLFMSRREYQTINRRLLAGRERAVREGKWPQGHAPYGYRAVKVPKGKGYMLEIVPEEAEIVKSIFNWYVNGAEYNGAFLRVGARRISTMLNSMGLTTQAGNLWSAPAVRVILKNHAYIGKVTWYKQTLRKSMSNGAVVKKLERTPERTLICDGLHEAIISEELFEAAQARLSADSTGPATKGPLQSPLAGLLYCGLCGCVMARQHEKGKPAYYVCRNPLCRCRGSKLEVVEQRVVATLAHWLTGYEITAKAQAQTVDIGALQSALDGAQRELLAYQQQQTRLYDLLERGIYTEQLFLQRQAAITGEVQRLQAAVADTEAAIAKAVRINASAREIVPAVHAVLDAYPTYTTAQEKNDALRMVLSRVEYTRIVGGFGSDPQDFEVKIFPRLPEPVE

SEQ ID NO: 4356 - protein, 521 aa, Unknown
  Description of Unknown: Integrase B4357 sequence
  PTHR30461:SF3,SM00857,G3DSA:1.10.10.2600,IPR036162,PF13408, IPR025827,PS51737,G3DSA:3.40.50.1390,IPR006119,IPR038109, PF07508,IPR011109,SSF53041,PTHR30461,PS51736, cd00338,PF00239
MKTVTKIESNQRTAGSEKKLRVAAYCRVSTGSDDQLESLAEQKKHYETYIQAHENWDFAGLYYDEGISGTKKEKRSELMRLLSDCEAGQIDFIITKSISRFARNTTDCLEMVRKLLAINVAIYFEKENINTTSMESELVLAVLSSLAENESVSISGNEKWSIRQRFQSGTYKMNPPPYGYRWNGKRLEVNNEQAEIVKRIFAEFLSGKGVMHIARGLDSDKIAPARGKHWCQSSILRILKNENYTGNAVFQKTFTDESFRRCVNYGQLDKYLVADHHEGIISKEDFDVVAALIERHAVEKNVTKGSHKYQLRYCFSGKIVCGECGATLKHRTHRLGGETYEAWCCSTHIYNKESCSMKFIRDDDIKLAFVTMMNKLVFGHKLILKPYLLTLRSSSTDSSIQQIQQLRLLIEQNTGQQETLTRLMANGFIDRALFARELNAIMAQTDEYRTEIDTLSSSVTGDGAKLKETERLIRIVERGRMFTEFDADLFSKLVDRICAFSRNEIGFALKCGLTLRERIGE

SEQ ID NO: 4357 - protein, 521 aa, Unknown
  Description of Unknown: Integrase B4358 sequence
  IPR036162,PS51737,IPR011109,PTHR30461,PF00239, G3DSA:1.10.10.2600,IPR006119,SSF53041,cd00338,SM00857, IPR025827,IPR038109,PS51736,mobidb-lite,PF13408, PS50007,G3DSA:3.40.50.1390,PF07508,Coil
MSNITIIPARPQRANSQQNETEKPKLRVAAYCRVSTDSDEQATSYEAQVSHYTEQITRNPEWAFAGIYADDGISGTNTKKREEFNRMIADCMDGKIDMIITKSISRFARNTLDCLKYIRQLKERNIPVFFEKENINTLDAKGEVLLTIMASLAQQESQSLSQNVKLGLQFRYQRGEVQVNHSRFLGYTKDENGRLVIDPEQAEVVRRIYREYLDGYSTDKIATGLERDGILTGAGNPRWHTSTVAKILRNEKYMGDALLQKTYTVDYLSKKRIKNNGIMPQYYVENDHEAIIPKEIFMRVQDELVRRRLVKVSPNGRKHGFRSNHVFSQMIVCGECGELFRRVHWNNHGCRSIVWRCLSRLQPTCVICHARTVNEEVLKNVVVQAFNEMLGSRSTYQKRLRDNLATVLRGYEDEQALEIDKRLAELQQELINHASRKENYNDIADEIFRLREMKQKNFTDTAVRDEQVKRINELNEFIEQQDSELTEFDESLARRWLKEIVVWEDNCTVELKSGIKVEVER

SEQ ID NO: 4358 - protein, 521 aa, Unknown
  Description of Unknown: Integrase B4359 sequence
  PTHR30461:SF3,SM00857,G3DSA:1.10.10.2600,IPR036162,PF13408, IPR025827,PS51737,G3DSA:3.40.50.1390,IPR006119,IPR038109, PF07508,SSF53041,IPR011109,PTHR30461,Coil, PS51736,cd00338,PF00239
MHGAYILARYSTDRQNEDSIEVQVSACRKWCDERSLPVLDVFADEATSGMKGTRPEYARMMWQLEHGGADTVVIYDQSRMFRKLTAWFDFRDQLARLGVDVVSVTQPMIGGDLRDPANFLTEGSMALFNQMWVLQTRQKVVAKMRYMAEQGLYTGGTPPLGYKVVDGRLVIDAAEAETVRLIFGLYVSGMTYREIIRRLNAEGRHTKRGGNFGVNSLHDLLKNPKYVGDLIFGKVAKRPDGSRNSHAAAEDAIVVKGVLPAIVDRETWEKVQLKMQDNKRSTAGRPASAREYPLKGKVFCRECKSAMLVTASNRGAKRYYYYACAAKHRKGLCGNTPIPAGTLEALVADAVRQRLGQPESVDGLIRILREERSKLSGSAVRRLRELQKRDCEIAKQLDAAVNAVLGGLHSPTLAAKVNALEAERAKISHDMQQLRAQVSGAEIDEPRLRELLALAMQDEAAVLSIVVRVEVGKDEIAIWTLLDADPNGNFDFSEDGVQIASPDATLNYNNSGCRSTGTKPI

SEQ ID NO: 4359 - protein, 521 aa, Unknown
  Description of Unknown: Integrase B4360 sequence
  PTHR30461:SF3,SM00857,G3DSA:1.10.10.2600,IPR036162,PF13408, PS51737,G3DSA:3.40.50.1390,IPR025827,IPR006119,IPR038109, PF07508,IPR011109,SSF53041,PF00239,PTHR30461, PS51736,Coil,cd00338
MKKITKIDGVQNNSTVNKELRVAAYCRVSTGSDAQLESLEAQKTHYERYINSREDWKFAGLYFDEGITGTKAEKRPELLRLIADCEARKIDFVITKSISRFSRNTTDCLALVRKLQNLNIPIFFEKENINTGSMESELFLAILSSMAEGESASISENSKWSIKRRFQNGTYKLSYTPYGYDWDGENMIINPAQAAVVKRIFADILSGKSTNAIADELNAEKIPSKKNTNWTSSTIRGILANEKYTGDVIFQKTYTDENFNRHTNYGEVDQYMAQDHHEAIISHADFEAANALVSQRALEKGVKKGSDKYQKRYAFSGKIICGECGDTFKRRVHTCTTYKYVAWACNTHLKDKSTCHMKYVRDDDIKAAFVTMLNKLIYGHRLVLVPYLKTLENSSGDEALQRIQHLELLLDQNSEQRETLTKLMAQGYIDQILYNQEINALLLQAETYRSDIEAITICMTGDSAKVTETNLLLHFVSHANMLTNYSEELFESYADHIEITGRNEIKFVMKCGLTFTERIGD

SEQ ID NO: 4360 - protein, 521 aa, Unknown
  Description of Unknown: Integrase B4361 sequence
  PTHR30461:SF3,cd00338,SM00857,G3DSA:1.10.10.2600,IPR036162, PF13408,IPR025827,PS51737,G3DSA:3.40.50.1390,IPR006119, IPR038109,PF07508,SSF53041,IPR011109,PTHR30461, PS51736,Coil,PF00239
MNKSITVIPARRRVGNTVNKEVKPKLRVAAYCRVSTDSDEQATSYDAQVEHYSNFIQKNEEWEFAGIFADDGISGTNTKKREEFNRMISECMEGHIDMIITKSISRFARNTLDCLRYIRQLKEKNIPVFFEKENINTMDSKGEVLLTIMASLAQQESESLSKNVKMGMQFRFQKGEVQVNHNRFMGYTKDEDGHLIIEPAEAEIVKRIYREYLQGASLKQIGDGLMEDGILTGARKPKWRPESVKKILRNEKYIGDALLQKTYTVDVLTKKRVKNNGIVPQYYVENSHEPIIPRDLYMQVQEEMLRRSNLHSGANRKKRVYSSKYALSSIVYCSKCGEIYRRVAWNNHGKRSTVWRCVNRVEHGPDCCDAPTVKEEELQSVVVKAINMALGGKEDMLADLEENIAMVLALEDETSIESLDAKLEDLQQELLKRANARQDYEYLADEIDHLRERKQKVMADNAERDGTKQRIAEMQQFLAGQTEQIEEYDENLVRRMVEKITVYEEKFMVEFKSGTSVNVER

SEQ ID NO: 4361 - protein, 521 aa, Unknown
  Description of Unknown: Integrase B4362 sequence
  cd03768,PTHR30461:SF3,SM00857,IPR036162,PF13408, IPR025827,G3DSA:3.40.50.1390,IPR006119,PF07508,IPR011109, SSF53041,PTHR30461,PS51736,Coil,PF00239
MRIAIYARKSVFAENSDSVKNQERMAREYAALHFEGDHTFLLYMDEDYTGANTNRPGLKDFMRDVKAGIIDFLIVYQLDRLSRNVRDFSNIYAFMEDHSVGFVSVKENIDTSTPLGKAMMYVSVVFAQMERETISNRVADNMMGLAAAGWWFGGSAPRGYRRIKVTEFGKIHTTLELIPEEANEIRHLYDKFLELNASVQSFETYCKHNGIKARRGGYFSATQIYTILSSPFYTFATPEVWDYYKSRGCIMTDKRERWDGKTGIVIYGRTTERKGKHSKQPPNKWRVSVGRHIPFIPAEIWLATQSQFTHNSFSKKMVHPTTLLKGTIRCKCGCLMGLARRHRKDGLSTWYICPKADRQGKTVCNTSQIKAEIIDEKALSVFRQIEHDPKQIKKYFSELAAPEDKSAQLAKLTREISHTEERIKNLSEILSNNNESRAAKYMISEIEALDADLADKNKQMASLQAQSLLQVDIERQAREKQKEITRLIRNFEELTIDEKNEIAHKVLKECVWNGETLFLRL

SEQ ID NO: 4362 - protein, 521 aa, Unknown
  Description of Unknown: Integrase B4363 sequence
  PTHR30461:SF3,cd00338,SM00857,G3DSA:1.10.10.2600,IPR036162, PF13408,IPR025827,G3DSA:3.40.50.1390,PS51737,IPR006119, IPR038109,PF07508,SSF53041,IPR011109, PTHR30461,PS51736,Coil,PF00239
MKKVTKIEGAQNNITIKKKLRVAAYCRVSTGSDAQLESLEAQKTHYERYINSREDWQFAGLYFDEGITGTKAEKRPELLRLISDCEAKKIDFVITKSISRFSRNTTDCLALVRKLQSLDIPLFFEKENINTGSMESELFLAILSSMAEGESTSISENAKWSIKRRFQNGTFKLSYTPYGYDWNGENIVVNLEQAKIVKRIFADVLSGKGTQAIADELNADGIASKKNSKWTATTIRAILANEKYTGDVIFQKTYTDENFNRHINYGEVDQYMAPDHHEAIISHEDFDAANALVAQRASEKGIEKGNGKYQQRYAFSGKIICGECGDTFKRRIHPCTTYKYVAWTCNTHLKDTTACSMKYIRDDEIKAAFVTMLNKLIYGHRLILAPYLKALENSSGDEAIQRIQHLELLLAQNSEQRETLTKLMAQGYIDQILYNQETNALLLQAETYRSDIEAITICMTGDSAKVTETNLLLHFVSHADMLTAYSEELFESYADHIEVASRHEIRFVMKCGLTFTERIGD

SEQ ID NO: 4363 - protein, 521 aa, Unknown
  Description of Unknown: Integrase B4364 sequence
  PTHR30461:SF3,cd00338,SM00857,G3DSA:1.10.10.2600,IPR036162, PF13408,IPR025827,G3DSA:3.40.50.1390,PS51737,IPR006119, IPR038109,PF07508,IPR011109,SSF53041,PTHR30461, PS51736,Coil,PF00239
MYEDIKTACLYVRFSSHNQTEQSIEGQTRVCRDFCKRHNIRIVEIYADRATSASKDIEKRVQFLKMIKDSEKGLFDAVIVYKLDRFARSRYDSATYKYRLKRNGVQLISATENISNDPEGIILESVLEGMAEFYSAELSQKINRGMRESAYKHNSIGGAVPLGYKIEDKKLVIDPKTAPIVKEAFEKYADGETVAEICRQFNARGYKTSKGTAFGKSSFTKIFRNERYIGVYTFHDYRAEDAIPAIIDKDLWDRVQLRVGKIKNAPARNKAKVVYLLSGKIFCGHCGSKMNGNCNAGNYCYYQCYGKKNGNVDCKKKNIRKEFIEKLVAQDALSLLTDEYIEQIATIACEKNQHEIELDSALPTIRDRIHQVDLSLNHLLKAIESGSAPDMLVKRMGELEKEKKDLQAQAKKESEDIVELDKAQVIYWLEQFRGGSIEDEEFCRMLIDLFVNSVTVWDEDDNTYKVTVAYNLTSLPTKTYRLNKGGTLSDFASNAPAREYATLPSMTMWTPSTEKASLHRS

SEQ ID NO: 4364 - protein, 521 aa, Unknown
  Description of Unknown: Integrase B4365 sequence
  SM00857,G3DSA:1.10.10.2600,IPR036162,PF13408,IPR025827, G3DSA:3.40.50.1390,PS51737,IPR006119,IPR038109,PF07508, SSF53041,IPR011109,PTHR30461,Coil,PS51736, cd00338,PF00239
MPYCMYLRKSRKDFEAESAGQGETLARHKAALLETAQRLHLAVSEIYQEIVSGDSIAARPEMQRLLADVETGKWDGVLVMEVERLARGDTMDQGQVQRTFVYTGTKIITPTRTYDPSDPADAEYFEFGLFMSRREYQTINRRLLAGRERAVREGKWPQGHAPYGYKAVKVPKGKGYMLEVVPEEAEIVKSIFNWYVNGAEYNGAFLRVGARRISTMLNSMGLTTQAGNLWSAPAVRVILKNHAYIGKVTWYKQTLRKSMSNGAVVKKLERTPERTLICDGLHEAIISEELFEAAQARLSADSTGPATKGPLQSPLAGLLYCGLCGCVMARQHEKGKPSYYVCRNPLCRCRGSKLEVVEQRVVATLALWLAGYEITAKAQAQTVDIGALQSALDGAQRELLAYQQQQTRLYDLLERGIYTEQVFLQRQAAITGEVQRLQAAVADTEAAIAKAVRINASAREIVPAVHAVLDAYPAYTTAQEKNDALRMVLSRVEYTRTVGGFGSDPQDFEVKIFPRLPEPVE

SEQ ID NO: 4365 - protein, 520 aa, Unknown
  Description of Unknown: Integrase B4366 sequence
  PTHR30461:SF3,cd00338,SM00857,G3DSA:1.10.10.2600,IPR036162, PF13408,IPR025827,G3DSA:3.40.50.1390,PS51737,IPR006119, IPR038109,PF07508,IPR011109,SSF53041,PTHR30461, PS51736,Coil,PF00239
MARKKNIAAGQNAVIYARYSSHNQREVSIEQQVRECMKHAAELGLHVVGTYEDRAISGKTDKRPNFQRMMRDAEKGKFQAVVAWKSNRIGRNMLQAMVNEAKLEDCGVKVFYAEEDFDDTAAGRFALRNMMNVNQFYSENMAEDITRGLYDNASKCMANGRQPLGYKRGEDGRVVLDEANAAVVREIFTRVAAGDLFVDIARDLNAQGIRTSKGANWNKGSFQSICQNERYRGIYIYGDVRVADGIPRIVSDDLWYRVQEAMRMKKNPVGTRHRVGAEDYLLTGKLRCGHCGSYMTGVSGTSRNGELHYYYTCQKRRTEHACDKKNIRRDVIEPAVAQAIKMYCLTDDVIAWIADRTVEYWEKHDNDLQIEALEQQLEENKKATSNMLKAIEMGIITEATRTRMVELETEQSRLSVQLNAAKEDVVKIDREQIISYLELLQQGDIHDRDFQMELFKNFLVAVYVYDDNRMKLVFSCMGDQNSVEIPLETGEDPPDGGLSPDAKMFVLTPDSSTKKALYFA

SEQ ID NO: 4366 - protein, 520 aa, Unknown
  Description of Unknown: Integrase B4367 sequence
  PTHR30461:SF3,SM00857,G3DSA:1.10.10.2600,IPR036162,PF13408, PS51737,IPR025827,G3DSA:3.40.50.1390,IPR006119,IPR038109, PF07508,SSF53041,IPR011109,PF00239,PTHR30461, PS51736,Coil,cd00338
MKAVIYARYSSEKQQEISIEGQLRVCQEFAAREGYEVVDTYTDRALSASRDVERREDFQRMIRDSARRSFDVVIVYKFSRFARNRYDSAVYKARLRQNGVKVVSACEPISANPEGALIEGIFESLDEFYSKSLAQDVTRGMHENASKALSTGGTIPLGYVSVDKRLQIDPATAPAVRLAFERYAEGMSLARIADELNAQGYRTRAGKAFNRSSFNALLSNRKYIGTYHYNGEVELVGQIPPIVDPGTFRRVQERLRKNTTAPGRTKATINYLLSTKLYCGACGKPMAGESGHNHSGTRYYYYACSGRKRRLGCKMPTLRKDDLERLVVEHARTLLSPDNIKALAHAAAAEYQRQAEDDSAAVSLRRQLDEVTRSLDNLLRMVEQGATSATLVGRINELEGRKASIAAELAEEQRGAPELTEVDILRWLSCFADGCLEDEDYMRNVIDMLVNKIVVQQSPNQKVSVLVAYNLAGRGDEISGSGLVDVVHQARHKPNLCTRATESCMTFLLYHGCAIFQLAA

SEQ ID NO: 4367 - protein, 520 aa, Unknown
  Description of Unknown: Integrase B4368 sequence
  cd03768,PTHR30461:SF3,SM00857,G3DSA:1.10.10.2600,IPR036162, PF13408,PS51737,G3DSA:3.40.50.1390,IPR025827,IPR006119, IPR038109,PF07508,SSF53041,IPR011109,PTHR30461, PS51736,Coil,PF00239
MNVAIYARKSKATKKGESISNQIELCKKYFLNTTNEDVNFLIYEDEGWSGGNINRPQFTKLMNDAKLKRFTALICYRLDRIARNVADFSSTYKILEENNIAFISITEQFDTSTIMGRAMINISATFAQIERETIAERIKDNMLELSKTGRWLGGTPPLGFKSVQIAENNKKMYKLEVVEEEMEIVRLIYKLYPQYKSTVPIARYLVSNHIKGKNGGDFSRNTVLQILKNPVYCCSDSEAIKYFENKGSILNCINNKELGLMVYNKRKGGKKENPIDEWIIATGRHPGIIPSTQWINCQNILEEIKNRTSPRQATGNKFLLSGLLKCAKCGSSMCSWSRTNKGIYYRSYRCELKNRAANRCDSKMINAEELENFIIELLKNLNMEEIISVKKNKTNNTSLKNELTSLNKSLNENEKLLKGLIKKLALIDDIEILAMIQTEIKKIKSENENINKKINEINLSMFDIEDEFRKEQILLESHKLFKDTIDLVQDVETKRNLIMNFIDYFTYDSETNEVGYKIRL

SEQ ID NO: 4368 - protein, 520 aa, Unknown
  Description of Unknown: Integrase B4369 sequence
  PTHR30461:SF3,cd00338,SM00857,G3DSA:1.10.10.2600,IPR036162, PF13408,PS51737,IPR025827,G3DSA:3.40.50.1390,IPR006119, IPR038109,PF07508,IPR011109,SSF53041,PTHR30461, PS51736,Coil,PF00239
MARKKNIAAGLDAVIYARYSSHNQREVSIEQQIAECTKHAAALGLRIVGTYEDRAISGKTDNRPRFQQMMRDAEKGKFQAVVAWKSNRIGRNMLQAMVNEAKLDDYGVKVFYAEEDFDDTAAGRFALRNMMNVNQFYSENMAEDITRGLYDNANKCMANGRQPLGYKRGADGKVMLDEPAAAVVREIFTRVAAGDLFVDIARDLNAKGIKTSKGAAWNKGSFQSICQNERYKGIYIYGNVRIVDGIPRIVSDELWYKVQEAMRMKKNPVGTRHRVGAEDYLLTGKLRCGHCGSYMTGISGTSRNGELHYYYTCQKRRTEHACNKKNVRRDVIEPAIAQAIKMYCLTDDVIEWMADQTVQYWEKHDNDLQIEALEQQLAENKKATSNMLKAIEMGIITEATRSRMVELETENSKLTAQLSAARRDVVKINREDLIDELHILRSKDIHDREVQAELFKDFLVAAYIYDDNRLKLVFSFMGKDNSVEIPLETGEDPPDGEDSPDAKMFVLTPDCSTKKALYFV

SEQ ID NO: 4369 - protein, 520 aa, Unknown
  Description of Unknown: Integrase B4370 sequence
  PTHR30461:SF3,SM00857,G3DSA:1.10.10.2600,IPR036162,PF13408, IPR025827,G3DSA:3.40.50.1390,PS51737,IPR006119,IPR038109, PF07508,IPR011109,SSF53041,PTHR30461,PS51736, cd00338,PF00239
MNKLRAAAYCRVSTDRAEQSGSLASQRSFFDDYIRNSDSMTLVGVFYDEGTSGTTTINRYGFNKMISLAVSGGIDIILTKEVSRFARNTVDTLNITRMLRAKGVGIIFINDNIDTRDSDGELRLSIMATIAQEESRKISERVKWGQQRKMEQGVVFGRSCLGYDVKDGKITVNADSAEIVKRIFTEYTVLLKGAESIADGLNAEQIRTVNGGRWSGAFIRKVLRNVKYVGDLEQKKTCTPDFLTHKKRLNSSEHIYIRNHHEPIISRELWEQTQAEISRRKPTDTSRHSDRYVFSGKVYCGVCGSVMVSRVKTLKNGKIYHALRCSGRIGGKSCNNETLNVTALKACVKRIFTDIPIDKTAVINAVIKGLSRTDKPDIPALRRKIETLNAKKRRAVDLMLDGLITQQELIEQKSYYDSIIEKLSQEISSDRSVFETDKIRKNAEKFLDFTSDPIWLLVIRADYIHGTLTVYLNGIEKGFTTCFTATGRGDSYRVITGNTVRSQGIIPGTMQVPKNYPISK

SEQ ID NO: 4370 - protein, 520 aa, Unknown
  Description of Unknown: Integrase B4371 sequence
  PTHR30461:SF3,cd00338,SM00857,G3DSA:1.10.10.2600,IPR036162, PF13408,PS51737,G3DSA:3.40.50.1390,IPR025827,IPR006119, IPR038109,PF07508,SSF53041,IPR011109,PTHR30461, PS51736,Coil,PF00239
MNNTDLQTGVIYARYSSDKQRDESIEGQIRECTEYAQREGILITKIYTDRALSARTDNRPEFLQMIRDSANQTFNYVIVYQLDRFSRSREDSAKYKGILRRNGVKVLSAKEHITNEPAGIILESMLEGMAEYYSVELSQKVKRGMTENALKGKMNGSAIPLGYDLTESHHLAVNAHEAKAVRLIYDLYLKQHSLAKIADILHSKGYTTKRGGKISYSVIRNILSNEKYIGVYQWGDIRIEDSIPPIIARDVFDEVQQVLPTRIKNKGRRSEMYNLCGRLICGECGGHYMGSTATSRNGEKHHYYVCTNRRKHHTCNAPNIRRDELEDLVINRTLEILKQPQIIARIVDLVMNGYNHTTQEAKTAIQGIQGKIKAIDIELNNCMTAIKQGFINDRLKAEIESLEKERQDLLEQKANHESVISPIKFTAEHIEYFLERMANENPTTKAGRSRILDTFIKNVTIHSDRVEIVFNYKSELPEFSEQSASGSHFSILVGNSYNKANHFYINSTAYPITLIVPFGV

SEQ ID NO: 4371 - protein, 520 aa, Unknown
  Description of Unknown: Integrase B4372 sequence
  SM00857,G3DSA:1.10.10.2600,IPR036162,PS51737,G3DSA:3.40.50.1390, IPR006119,IPR038109,PF07508,IPR011109,SSF53041, PTHR30461,Coil,PS51736,cd00338,PF00239
MQYEEYLIYLRKSRSDASLEAMGVDVLERHEQILLDLAKRMNLSIGGIYREVVSGESISARPEMQKLLSEVESGRWEGVLVMEVERLARGDTVDQGIVQRAFQYSGTKIITPTKTYNPNNEFDEEYFEFGLFMSRREYKTIRRRMRAGVTAAVKEGKWPFNQAPYGWQRVKLEHGRGWILAPDPDEAPVVKLIFRLYTGPDRIGITHICRYLDTRGIKPRNGDTWLECSVMGILRNIVNDQRVGIGRRKVIKQVQNGSVSKVRPHSDYDFTAPGLQPRLIDHDVFLEAQEYLAKNSHKLPESYGIKNPLAGILVCSCCGKKMQRRPASRDGSSGRCPYDVLMCNTRGCPTIGSTLELVERELIQALSDWVAGYQLDPTLEVENKVPEKEQLLSSAVSNHDLLLKQNGNLYDLLEQGVYTTETFLERSHELQKRIKESEVHIEILKKDLEYEKEKIANIENFIPSCKELLSCYWDLSVQDRNKALKMLLESVEYTKTKRNRKGDKDKPTFTLNLKPRIPRI

SEQ ID NO: 4372 - protein, 520 aa, Unknown
  Description of Unknown: Integrase B4373 sequence
  cd03768,PTHR30461:SF3,SM00857,IPR036162, PF13408,IPR025827,G3DSA:3.40.50.1390,PS51737, IPR006119,PF07508,SSF53041,IPR011109, PTHR30461,PS51736,Coil,PF00239
MNFAIYGRKSVYSDHSDSVDNQFRMCQEYIDFRFPKEVKNVEQYSDEDHTGANTDRPDLQRLLSDIRAGAVDVLVVYQLDRLSRNVRDFSNIYSLLEEKHVMFVSIKENIDTATPIGKAMMYVTVVFAQMERETTAARVTDNMRGLAKKGYWTGGNPPIGYRRERITVDGKKHVMIVPDPEGVEYVTKLFDLFLDSKRSLQGMETYFRKEGIRTLSGAFFSTTQIHQILTGPFYVEATPEVYDYFENKGCQMATPREEWDGKHGVMVYGRTTQPKSGKHQKQPPEKWIVCVGIHEPFLPAEKWLAVQSQMGKNKIDKTMKYDVPLLKGVLRCSCGSAMLVSRKKKTDGVSSWYYCLKRMRQGKEVCGRSQIKTDLLDEKVLGIFREIEADPTQIRKYIKISAAAPQDVKAIAAKIKAVEERISRLTVSLSLAQNGAAAKYIVAEMERLDLELQALKRERNMALSAGRERHDAEKDVKETIAEISRLIKGLKDFSATEKNEIVKDVVKECVWDGVELKITL

SEQ ID NO: 4373 - protein, 520 aa, Unknown
  Description of Unknown: Integrase B4374 sequence
  PTHR30461:SF3,cd00338,SM00857,G3DSA:1.10.10.2600,IPR036162, PF13408,PS51737,IPR025827,G3DSA:3.40.50.1390,IPR006119, IPR038109,PF07508,SSF53041,IPR011109,PTHR30461, PS51736,Coil,PF00239
MKAVIYARYSSEKQQEISIEGQLRVCQEFAAREGYEVVDTYTDRALSASRDVERREDFQRMIRDSSRRGFEVVIVYKFSRFARNRYDSAVYKARLRQNGVKVVSACEPISANPEGALIEGIFESLDEFYSKSLAQDVTRGMHENATKALSTGGTIPLGYVSVDKRLQIDPATAPAVRLAFERYAEGMSLARIADELNAQGYRTRAGKAFNRSSFNALLSNRKYIGTYHYNGEVELVGQVPPIVDPGTFRRVQERLRKNTTAPGRTKATINYLLSTKLYCGACGKPMAGESGHNHSGTRYYYYACSGRKRRLGCKMPTLRKDDLERLVVEHARTLLSPDNIKALAHAAAAEYQRQAEDDSAAVSLRRQLDEVTRSLDNLLRMVEQGAVSATLVARINELEGRKASIAAELADEQRGAPELTEVDILRWLSCFADGCLEDEDYMRNVIDMLVNKIVVQQNPNQKVSVLVAYNLSGRGDEISGSGLVDVVHQARHNPNFCTNATESCMTFLLYHGCAIFQLAA

SEQ ID NO: 4374 - protein, 520 aa, Unknown
  Description of Unknown: Integrase B4375 sequence
  PTHR30461:SF3,SM00857,G3DSA:1.10.10.2600,IPR036162,PF13408, IPR025827,G3DSA:3.40.50.1390,PS51737,IPR006119,IPR038109, PF07508,IPR011109,SSF53041,PF00239,PTHR30461, PS51736,Coil,cd00338
MKAVIYARYSSEKQQEISIEGQLRVCQEFAAREGYEVVDTYTDRALSASRDVERREDFQRMIRDSARRGFEVVIVYKFSRFARNRYDSAVYKARLRQNGVKVVSACEPISANPEGALIEGIFESLDEFYSKSLAQDVTRGMHENATKALSTGGTIPLGYVSVDKRLQIDPATAPAVRLAFERYAEGMSLARIADELNAQGYRTRAGKAFNRSSFNALLSNRKYIGTYHYNGEVELVGQVPPIVDPGTFRRVQERLRKNTTAPGRTKATINYLLSTKLYCGACGKPMAGESGHNHSGTRYYYYACSGRKRRLGCKMPTLRKDDLERLVVEHARALLSPGNIKALAHAAAAEYQRQAEDDSAAVSLRRQLDEVTRSLDNLLRMVEQGAISATLVARINELEGRKASIAAELADEQRGAPELTEVDILRWLSCFADGCLEDEDYMRNVIDMLVNKIVVQQNPNQKVSILVAYNLAGRGDEISGSGLVDVVHQARHNPNLCTRATESCMTFLLYHGCAIFQLAA

SEQ ID NO: 4375 - protein, 520 aa, Unknown
  Description of Unknown: Integrase B4376 sequence
  PTHR30461:SF3,SM00857,G3DSA:1.10.10.2600,IPR036162,PF13408, PS51737,IPR025827,G3DSA:3.40.50.1390,IPR006119,IPR038109, PF07508,IPR011109,SSF53041,PF00239,PTHR30461, PS51736,Coil,cd00338
MLAYGYCRYSSDLQNEKSIEQQKMELEEYAKKNNIKIIKYYIDEAQSGRNDTRANFQSMISDACKLKEVQAILVWKTDRFARKAMDNLYYRAKLEKNGVKLISITQPFDSETAEGKLMTTLLAGMDEYFSQNLASNVKRALKNNAQNLQFNGGIPPLGYDIIDKKYVINEREAKIVQEIFDMYITGMSYIDIALKLNMKGYKTKRNKSFAKTSVMSILENEKYTGKYIFNKGTKHSHRGMREDAIVYEDAIPVIISKEVFKKVMERKKTKPHAENSAKNVYLLSGLIKCSCGGSYVGTKSTKKKDGKTYVTGYYICNNRNKLGNCKMPLLYQEKLEEKIVSILTEELLDKNTMQNLVDEVTRQYKVLQSEATEDLSVLENRLKEIQSQMDNIVDAVAKGLANDTLLKRLDKLENVNNNLQEELKFKSNVSDTEINADDIIKILKRDIDGLEDNSKNELKKLIKKWVKKIEVTNDFIAVHFYSEDFLPPKMVARTHYCFCLRLNINDFISRNIQQMRELTD

SEQ ID NO: 4376 - protein, 520 aa, Unknown
  Description of Unknown: Integrase B4377 sequence
  cd03768,PTHR30461:SF3,SM00857,G3DSA:1.10.10.2600,IPR036162, PF13408,PS51737,G3DSA:3.40.50.1390,IPR025827,IPR006119, IPR038109,PF07508,SSF53041,IPR011109,PTHR30461, PS51736,Coil,PF00239
MNVAIYARKSKATKKGESISNQIELCKKYFLNTTNEDVNFLIYEDEGWSGGNINRPQFTKMMNDAKLKRFSALICYRLDRIARNVADFSSTYKILEESNIAFISITEQFDTSTIMGRAMINISATFAQIERETIAERIKDNMLELSRTGRWLGGTPPLGFKSVQITENNKRMYKLEVVEEEIEIVRLIYKLYPEYKSTVPIARYLVSNYIKGKNGGDFSRNTVLQILKNPVYCCSDENAIKYFESKGSTLNCSENNKYGLMVYNKRKGGKKENPIEEWIIATGKHPGIIPGAEWVECQNILSEISSKTSPRKATGNKFLLSGMLKCSRCGSSMCSWSRTSKGIYYRSYRCELKNRSSNRCDSKMVNADELEQFVIDLCKNINIEDIINIKRTKNNNASLKRELTSLNKNLNENDKLLQGLIKKLALIDDIDVLSMIQTEIKKIKTENDNINKRINEINISMFDVEDEENKKQLLLESHKLFINTIDLIEDVEAKRNLIMNFIEYFTYDSETNEVGYKLRL

SEQ ID NO: 4377 - protein, 520 aa, Unknown
  Description of Unknown: Integrase B4378 sequence
  PTHR30461:SF3,SM00857,G3DSA:1.10.10.2600,IPR036162,PF13408, IPR025827,PS51737,G3DSA:3.40.50.1390,IPR006119,IPR038109, PF07508,SSF53041,IPR011109,PF00239,PTHR30461, PS51736,Coil,cd00338
MKAVIYARYSSEKQQEISIEGQLRVCQEFAAREGYEVVDTYTDRALSASRDVERREDFQRMIRDSSRRGFEVVIVYKFSRFARNRYDSAVYKARLRQNGVKVVSACEPISANPEGALIEGIFESLDEFYSKSLAQDVTRGMHENATKALSTGGTIPLGYVSVDKRLQIDPATAPAVRLAFERYADGMSLARIADELNAQGYRTRAGKAFNRSSFNALLSNRKYIGTYHYNGEVELVGQVPPIVDPGTFRRVQERLRKNTTAPGRTKATINYLLSTKLYCDACGKPMAGESGHNHSGTRYYYYACSGRKRRLGCKMPTLRKDDLERLVVEHARTLLSPDNIKALAHAAAAEYQRQAEDDSAAVSLRRQLDEVTRSLDNLLRMVEQGAVSATLVGRINELEGRKASIAAELAEEQRGAPELTEVDILRWLSCFADGCLEDEDYMRNVIDMLVNKIIVQQNPNQKVSVLVAYNLAGRGDEISGSGLVDVVHQARHNPNLCTNATESCMTFLLYHGCAIFQLAA

SEQ ID NO: 4378 - protein, 520 aa, Unknown
  Description of Unknown: Integrase B4379 sequence
  PTHR30461:SF3,SM00857,G3DSA:1.10.10.2600,IPR036162,PF13408, IPR025827,G3DSA:3.40.50.1390,PS51737,IPR006119,IPR038109, PF07508,SSF53041,IPR011109,PTHR30461,PS51736, cd00338,PF00239
MNKLRAAAYCRVSTDRAEQSGSLASQRSFFDDYIRNSDSMTLVGVFYDEGTSGTTTLNRYGFNKMISLAVSGGIDIILTKEVSRFARNTVDTLNITRMLRAKGVGIIFINDNIDTRDSDGELRLSIMATIAQEESRKISERVKWGQQRKMEQGVVFGRSCLGYDVKDGKITVNADSAEIVKRIFTEYTVLLKGAESIADGLNAEQIRTVNGGRWSGAFIRKVLRNVKYVGDLEQKKTCTPDFLTHKKRLNSSEHIYIRNHHEPIISRELWEQTQAEISRRKPTDTSRHSDRYVFSGKVYCGVCGSVMVSRVKKLKNGKIYHALRCSGKIGGKSCNNETLNVTALKACIKRIFTDMPIDKTAVINAVIKGLSRTDKPDIPALRRKIETLNAKKRRAVDLMLDGLITQQELIEQKSYYDSIIEKLSQEISSDRSVFETDKIRKNAERFLDFTSDPLWLLVIRANYIHGTLTVYLKGIEKGFTTCFTATGRGDSYRVITGNTVRSQGIIPGTMQVQKNYPISK

SEQ ID NO: 4379 - protein, 520 aa, Unknown
  Description of Unknown: Integrase B4380 sequence
  PTHR30461:SF3,cd00338,SM00857,G3DSA:1.10.10.2600,IPR036162, PF13408,PS51737,G3DSA:3.40.50.1390,IPR025827,IPR006119, IPR038109,PF07508,IPR011109,SSF53041,PTHR30461, PS51736,Coil,PF00239
MARKKNIAAGQNAVIYARYSSHNQREVSIEQQVRECMKHAAELGLHVVGTYEDRAISGKTDKRPNFQRMMRDAEKGKFQAVVAWKSNRIGRNMLQAMVNEAKLEDCGVKVFYAEEDFGDTAAGRFALRNMMNVNQFYSENMAEDITRGLYDNASKCMANGRQPLGYKRGEDGRVVLDEANAAVVREIFTRVAAGDLFVDIARDLNAQGIKTSKGANWNKGSFQSICQNERYRGIYIYGDVRVVDGIPRIVSDDLWYRVQEAMRMKKNPVGTRHRVGAEDYLLTGKLRCGHCGSYMTGVSGTSRNGELHYYYTCQKRRTEHACDKKNIRRDVIEPAVAQAIKMYCLTDDVIEWMADRTVEYWEKHDNDLQIEALEQQLEENKKATSNMLKAIEMGIITEATRTRMVELETEQSRLSVQLNAAKEDVVKIDREQIISYLELLQQGDIHDRDFQMELFKNFLVAVYVYDDNRMKLVFSCMGDQNSVEIPLETGEDPPDGGLSPDAKMFVLTPDSSTKKALYFV

SEQ ID NO: 4380 - protein, 520 aa, Unknown
  Description of Unknown: Integrase B4381 sequence
  PTHR30461:SF3,cd00338,SM00857,G3DSA:1.10.10.2600,IPR036162, PF13408,IPR025827,G3DSA:3.40.50.1390,PS51737,IPR006119, IPR038109,PF07508,SSF53041,IPR011109,PTHR30461, PS51736,Coil,PF00239
MKAVIYARYSSEKQQEISIEGQLRVCQEFAAREGYEVVDTYTDRALSASRDVERREDFQRMIRDSSRRGFDVVIVYKFSRFARNRYDSAVYKARLRQNGVKVVSACEPISANPEGALIEGIFESLDEFYSKSLAQDVTRGMHENATKALSTGGTIPLGYVSVDKRLQIDPATAPAVRLAFERYADGMSLARIADELNAQGYRTRAGKAFNRSSFNALLSNRKYIGTYHYNGEVELVGQVPPIVDPGTFRRVQERLRKNTTAPGRTKATINYLLSTKLYCGACGKPMAGESGHNHSGTRYYYYACSGRKRRLGCKMPTLRKDDLERLVVEHARALLSPGNIKALAHAAAAEYQRQAEDDSAAVSLRRQLDEVTRSLDNLLRMVEQGAVSATLVGRINELEGRKASIAAELADEQRGAPELTEVDILRWLSCFADGCLEDEDYMRNVIDMLVNKIVVQQNPNQKVSILVAYNLAGRGDEISGSGLVDVVHQARHNPNLCTRATESCMTFLLYHGCAIFQLAS

SEQ ID NO: 4381 - protein, 520 aa, Unknown
  Description of Unknown: Integrase B4382 sequence
  cd00338,SM00857,G3DSA:1.10.10.2600,IPR036162,PS51737, G3DSA:3.40.50.1390,IPR006119,IPR038109,PF07508,SSF53041, IPR011109,PTHR30461,PS51736,Coil,PF00239
MQYEEYLIYLRKSRSDASLEAMGVDVLERHEQILLDLAKRMNLSIGGIYREVVSGESISARPEMQKLLSEVESGRWEGILVMEVERLARGDTVDQGIVQRAFQYSGTKIITPTKTYNPNNEFDEEYFEFGLFMSRREYKTIRRRMRAGVTAAVKEGKWPFNQAPYGWQRVKLEHGRGWVLAPDPDEAPVVKLIFRLYTGPDRIGITHICRYLDNRGIKPRNGDTWLECSVMGILRNIVNDQRVGIGRRKVVKQVQNGSVSKVRPHSDYDFTAPGLQPRLIDHDVFLEAQEYLAKNSHKLPESYGIKNPLAGILVCSCCGKKMQRRPASRDGSSGRCPYDVLMCNTRGCPTIGSTLELVERELIQALSDWVAGYQLDPTLEVENKVPEKEQLLSSAVSNHDLLLKQNGNLYDLLEQGVYTTEIFLERSHELQKRIKESEEHIEILKKDLEYEKEKIANIENFIPSCKELLSCYWDLSAQDRNKALKMLLESVEYTKTKRNRKGDKDNPTFTLNLKPRIPRI

SEQ ID NO: 4382 - protein, 520 aa, Unknown
  Description of Unknown: Integrase B4383 sequence
  cd00338,SM00857,G3DSA:1.10.10.2600,IPR036162, PF13408,PS51737,IPR025827,G3DSA:3.40.50.1390, IPR006119,IPR038109,PF07508,IPR011109, SSF53041,PTHR30461,PS51736,Coil,PF00239
MAKGNRAAIYARFSSHNQRDESIEIQVDKSREFCDESGLSVVRVYSDYAKTGKNTNRAEFQAMLKDAQKGLFDYVVIYKVTRIMRNRDEMALARIMLRKAGVEILYAGETLGEGSTKVLHLGMLEVLAEYESAVDSERIRDGIQKNAQRGMASGQRLYGWDVVNDRFVVNEREAAVMHKMKNMLFSGSTIADIQRAIKTERTRRGKAFSQSTIKRLLSREQNCGVYKYAGVRTTNGMPALWSRQEQDEIASILNGRGHKHRVVDGEQPYALSGKMYCRECGRWFVGTSGTGKSGKTYYYYRCPKCRRTFRRDLIEDAVADTILESIHDPKVRERIIATLEMMIAETAEDDAPKESERITAEIRRIDAAFERIWHAIEDGIAPPGGKDRVEELKARQAALKEELEKALEAESAEDLSLDDYLAWLDTLGAESDPFEIIDTFIRFIQIDGDEVQLFFSFDNWDDDFMPTKKDEPLMNKGSSNFHVVEQKPLAANTIYANSVEIKVTRNWFAIVTFCESNNKK

SEQ ID NO: 4383 - protein, 520 aa, Unknown
  Description of Unknown: Integrase B4384 sequence
  PTHR30461:SF3,cd00338,SM00857,G3DSA:1.10.10.2600,IPR036162, PF13408,IPR025827,PS51737,G3DSA:3.40.50.1390,IPR006119, IPR038109,PF07508,IPR011109,SSF53041,PTHR30461, PS51736,Coil,PF00239
MRAKKKPAMLEPDMQDAVIYTRYSSHNQRDCSIEQQVADCEIFARQNNLRVVKVYADRHLSGTTDNRPQFQQMLKDAAHGHWAYVICWKIDRFARNRYDSATYKFRLKKAGVRVLYAKESIPDGPEGILLESVLEGSAEYYSAALAQNIRRGMKYNAEQCKVNSGSIPFGYCKGPDGRFAIHEANAEVVREIFRKAAAGMPFVDIANDLNSRGLKTSRGGRWNKGSFRLLMNEAYIGVYHFSDTRIEGGMPALIDQGTFWAANERLKANSSVRGRHQDGGDYLLTGKLKCAHCGSYMIGFSGTGKSGELHYYYGCQKRRRERACKKANVPREWIERVVVKAALDYVLRPDVMEWIADAVMEYQEREAASAQLAALTAELEENQKATDNVMKAIEAGIITSTTKQRLLDLEAKAQDLKRAIELEKLSHVRLERDQVLFWLDRFRGGSLQSQEFRRKVIDAFVSVVYLSDDHLRIAFNYSGGSNAEADFDLVMDAEAAAGELSKKFAQGHVASTSKKSHLKT

SEQ ID NO: 4384 - protein, 520 aa, Unknown
  Description of Unknown: Integrase B4385 sequence
  SM00857,G3DSA:1.10.10.2600,IPR036162,PS51737,G3DSA:3.40.50.1390, IPR006119,IPR038109,PF07508,IPR011109,SSF53041, PF00239,PTHR30461,PS51736,Coil,cd00338
MQYEEYLIYLRKSRSDASLEAMGVDVLERHEQILLDLAKRMNLSIGGIYREVVSGESISARPEMQKLLSEVESGRWEGVLVMEVERLARGDTVDQGIVQRAFQYSGTKIITPTKTYNPNNEFDEEYFEFGLFMSRREYKTIRRRMRAGVTAAVKEGKWPFNQAPYGWQRVKLEHGRGWVLAPDPDEAPVVKLIFRLYTGPDRIGITHICRYLDNRGIKPRNGDTWLECSVMGILRNVVNDQRVGIGRRKVIKQVQNGSVSKVRPHSDYDFTAPGLQPRLIDHNIFLEAQEYLAKNSHKLSESYGIKNPLAGILVCSCCGKKMQRRPASRDGSSGRCPYDVLMCNTRGCPTIGSTLELVERELIQALSDWVAGYQLDPTLEVENKVPEKEQLLSSAVSNHDLLLKQNGNLYDLLEQGVYTTEIFLERSHELQKRIKESEAHIEILKKDLEYEKEKIANIENFIPSCKELLSCYWDLSVQDRNKALKMLLESVEYTKTKRNRKGDKDNPTFTLNLKPRIPRI

SEQ ID NO: 4385 - protein, 520 aa, Unknown
  Description of Unknown: Integrase B4386 sequence
  PTHR30461:SF3,SM00857,G3DSA:1.10.10.2600,IPR036162,PF13408, PS51737,IPR025827,G3DSA:3.40.50.1390,IPR006119,IPR038109, PF07508,IPR011109,SSF53041,PTHR30461, PS51736,cd00338,PF00239
MPRKKAPAAEAPRLVAYYRYSGGSRQTEQSIEGQRRDCEAYARAHGMTILREYVDRHISGKTDDRPAFQQLVADSAAHAFDAVICWKTDRLARNRYDSAVYKKKLRDNGVEILYAAESNISGAEGIIIEGLMEALAEYYSAELAEKARRGMRESALKGKALGSSRPLGLTVDADKHYIIEPTGAEAVRYIFEQYAAGLSSSSIVERLNAMGLRTSHGGPFNKSSINRIIQNEMYRGVYVSKKFDVRIEGAIPAIIDNDLWKRAQKMFERNRQSRTPHASRADYILSGKLYCGECGCLMKGVCGRSSGNGQMYHYYACPGRSIGRACTRKNIPQDELEAMVVNSVADLLLEPELLEQIADAIVELQQAEAARPDPEKQALEKSLSDVRSKIQNILTAIENGTSSAALSARLADLEQQESTLSYQLSSLTAKKPLTFTRDQILFLLQQFRVSSSERTKAYCRRLVDTFVDHIELTNTELILYFNISDETIDKNKKAPRSNPSKESSTEKRLVRVARIELTAS

SEQ ID NO: 4386 - protein, 520 aa, Unknown
  Description of Unknown: Integrase B4387 sequence
  PTHR30461:SF3,SM00857,G3DSA:1.10.10.2600,IPR036162,PF13408, IPR025827,G3DSA:3.40.50.1390,PS51737,IPR006119,IPR038109, PF07508,SSF53041,IPR011109,PF00239,PTHR30461, PS51736,Coil,cd00338
MNKIAIYTRKSKFTGKGESIENQIEKCKKFIEFKFNIDSKSVNIFIDEGFSGKNEDRPEYQRMMNQIKSKQINSIVIYQLNRLGRNARDIHNTMQLCDDLGTIIYSATEGFDSSTSFGRAVIGILASLAQLEREQLAERVKDNMYTLAKMGRWLGGQSPLGFDGTREYYIDENGKERSVTELKPNKEELNIVKLIYQKYIEEKSLSQVAKWSLTNHLKGKNGGNITKSAINVILKNPVYVKSTDKVLEYLEKENYEVCGSANGNGLLRYGKDNEQIIAVSKHKGIINADDWMKVQNILKENTDKAPRRGKTNTALLTGILKCNCGSSMNIAHGKLKNGTKTFYYQCAMKVASGGTRCKSKNLNGPLLEEKLIDYLKNYSEIQIIADLENILNKSNELNLKLTAESIDNAIEQCDKSIKVLVNKLKVIEDLEVSKIIIDELTKEKDKKKDLEKQKENLLEDEASKSLSEAEILEVLNLVEHFKNNIDSLDFESKKKLLNEMIESIVIDTDEFIINFNIKKN

SEQ ID NO: 4387 - protein, 520 aa, Unknown
  Description of Unknown: Integrase B4388 sequence
  PTHR30461:SF3,SM00857,G3DSA:1.10.10.2600,IPR036162,PF13408, PS51737,G3DSA:3.40.50.1390,IPR025827,IPR006119,IPR038109, PF07508,IPR011109,SSF53041,PTHR30461,Coil, cd00338,PF00239
MARTATKHPAKPKRGKKLEAEEPGVLYGRYSSHNQKDISVEQQFEKGYGLAGEYGIRIVETYADRAVSGRTDKRKDFQRMMADAAKGKFRYVIAWKSNRMGRNMLEALVNEAKLQELGVRVLYVEEDFDDTAAGRFAARSMMNVNQFYSENMAEDIKRGLYDNASNCMVANGHLPYGYKRDDTLHYVIDEAKAAVIREIFVRVSCGEPLVDIYDSLNARGIKTSYGRPWGRSSFQKILSNERYRGIYIYGDVRKEGGIPRIVSDELYFKVQEVLKTKKNPQGRHRVNGDYLLTGKLFCGNCKSPMIGISGTGRTGKLHYYYVCQKKRSEKTCDKKNVRRDEVEYQIAKAIFDNALQDQVIEWIADSTIAYNDRKEAEGHIGILEDQFADVQRSLKNIMSAIEQGIVTETTKSRLLELESERSEIEGKIAAAKADIVPVNREQLIEWLLSLREGDIHDKKYQARLFDTFLIAAYLYDDGTAKLVFSFAGDKNTVTVPLAEAVDSVEENTAEGSFKLCLAPP

SEQ ID NO: 4388 - protein, 520 aa, Unknown
  Description of Unknown: Integrase B4389 sequence
  PTHR30461:SF3,SM00857,G3DSA:1.10.10.2600,IPR036162,PF13408, IPR025827,G3DSA:3.40.50.1390,PS51737,IPR006119,IPR038109, PF07508,IPR011109,SSF53041,PTHR30461,PS51736, cd00338,PF00239
MPRKKTTAADAPRLVAYYRYSGGSRQTEQSIEGQRRDCEAYARAHGMTILREYVDRHISGKTDDRPAFQQLVADSAAHIFDAVICWKTDRLARNRYDSAVYKKKLRDNGVEILYAAESNISGAEGIIIEGLMEALAEYYSAELAEKARRGMRESALKGKALGSSRPLGLTVDADKHYIIEPTGAEAVRYIFEQYAAGLSSSSIVERLNAMGLRTSHGGPFNKSSINRIIQNEMYRGVYVSKKFDVRIEGAIPAIIDNDLWERAQKMFERNRQSRTPHASRADYILSGKLYCGECGCLMKGVCGRSSGNGQMYHYYACPGRSIGRACTRKNIPQDELEAMVVNAVADLLLEPALLEQIADAIVELQQAEAARPDPEKQALEKSLSDVRSKIQNILTAIENGTSSAALSARLADLEQQESMLSYQLSSLTAKKPLTFTRDQILFLLQQFRVSPSERTKAYCRRLVDTFVDHIELTNTELILYFNLSDETVDKNKKAPRSNPSKESSTEKRLVRVARIELTAS

SEQ ID NO: 4389 - protein, 520 aa, Unknown
  Description of Unknown: Integrase B4390 sequence
  PTHR30461:SF3,cd00338,SM00857,G3DSA:1.10.10.2600,IPR036162, PF13408,PS51737,IPR025827,G3DSA:3.40.50.1390,IPR006119, IPR038109,PF07508,IPR011109,SSF53041,PTHR30461, PS51736,Coil,PF00239
MENAVIYARYSSDKQTEQSIEGQLRICTAYAEQNNFNIVHHYIDRAMSGTNDRRPEFQQMISDSSGKQFRYIIVYKFDRFARNMYDSAIYEHKLEQNGVKVLSATEQVGDGNESLIIKAVLRAMAEMYSRQLSDNVKRGMKESALKANSTGGTIPFGYRLEDKKLVLDDRTAPFAKYIFEEYAAGKAKMDIVRDLKDKGCRKNNGKVLTIQNITYILSNIKYTGVFKFKDIEVEDGCPALVSKEIFGRCKERAERERRKYGKSAQEVDYLLVGKLYCGYCKKPMIGDSGTSRNGDKHHYYTCYTRKSRRRTGETCKKKSEQKEFLEWYVVQQVKEYILDNRRIEIITDAIIKKFKEMFDSSGEEAFLRRLRSIDHEVDDAVEALLKTKNPAALDKINARLEDLQMERNNVEAELSKFRITKDVIPDREDLLEWLKSFQGDALDPEYQKKMIDTFINAIYLYDDKVVICFNLKGGKQVSGIEELEHSDELDECSSSLLNGSPCWTRTNDPAVNSRMLYRLS

SEQ ID NO: 4390 - protein, 520 aa, Unknown
  Description of Unknown: Integrase B4391 sequence
  PTHR30461:SF3,cd00338,SM00857,G3DSA:1.10.10.2600,IPR036162, PF13408,PS51737,G3DSA:3.40.50.1390,IPR025827,IPR006119, IPR038109,PF07508,IPR011109,SSF53041,PTHR30461, PS51736,Coil,PF00239
MARKKNIAAGQNAVIYARYSSHNQREVSIEQQVRECMKHAAELGLHVVGTYEDRAISGKTDKRPNFQRMMRDAEKGKFQAVVAWKSNRIGRNMLQAMVNEAKLEDCGVKVFYAEEDFDDTAAGRFALRNMMNVNQFYSENMAEDITRGLYDNASKCMANGRQPLGYKRGEDGRVVLDEANAAVVREIFTRVAAGDLFVDIARDLNAQGIKTSKGANWNKGSFQSICQNERYRGIYIYGDVRVVDGIPRIVSDDLWYRVQEAMRMKKNPVGTRHRVGAEDYLLTGKLRCGHCGSYMTGVSGTSRNGELHYYYTCQKRRTEHACDKKNIRRDVIEPAVAQAIKMYCLTDDVIEWMADRTVEYWEKHDNDLQIEALEQQLEENKKATSNMLKAIEMGIITEATRTRMVELETEQSRLSVQLNAAKEDVVKIDREQIISYLELLQQGDIHDRDFQMELFKNFLVAVYVYDDNRMKLVFSCMGDQNSVEIPLETGEDPPDGGLSPDAKMFVLTPDSSTKKALYFV

SEQ ID NO: 4391 - protein, 520 aa, Unknown
  Description of Unknown: Integrase B4392 sequence
  SM00857,G3DSA:1.10.10.2600,IPR036162,PS51737,G3DSA:3.40.50.1390, IPR006119,IPR038109,PF07508,IPR011109,SSF53041, PF00239,PTHR30461,PS51736,Coil,cd00338
MQYEEYLIYLRKSRSDASLEAMGVDVLERHEQILLDLAKRMNLSIGGIYREVVSGESISARPEMQKLLSEVESGRWEGVLVMEVERLARGDTVDQGIVQRAFQYSGTKIITPTKTYNPNNEFDEEYFEFGLFMSRREYKTIRRRMRAGVTAAVKEGKWPFNQAPYGWQRVKLEHGRGWVLAPDPDEAPVVKLIFRLYTGPDRIGITHICRYLDNRGIKPRNGDTWLECSVMGILRNVVNDQRVGIGRRKVVKQVQNGSVSKVRPHSDYDFTAPGLQPRLIDHDVFLEAQEYLAKNSHKLPESYGIKNPLAGILVCSCCGKKMQRRPASRDGSSGRCPYDVLMCNTRGCPTIGSTLELVERELIQALSDWVAGYQLDPTLEVENKVPEKEQLLSSAVNNHDLLLKQNGNLYDLLEQGVYTTEIFLERSHELQKRIKESEAHIEILKKDLKYEKEKIANIENFIPSCKELLSCYWDLSAQDRNKALKMLLESVEYTKTKRNRKGDKDNPTFTLNLKPRIPRI

SEQ ID NO: 4392 - protein, 520 aa, Unknown
  Description of Unknown: Integrase B4393 sequence
  SM00857,G3DSA:1.10.10.2600,IPR036162,PF13408, PS51737,IPR025827,G3DSA:3.40.50.1390,IPR006119, IPR038109,PF07508,IPR011109,SSF53041, PTHR30461,Coil,PS51736,cd00338,PF00239
MNESVCIYLRKSRADREAEARGEGETLARHEHILLELAKKNEYHIGAIYKEVVSGETISARPVMQQLLREVESGMWDGVLVVEVERLARGDTIDQGVVSRAFQYSDTKIITPTKIYDPNNEFDEEYFEFGLFMSRREYKTIKRRLNAGRVSSVKEGKYCGSVPPFGYERVKLENDKGFTLKPVPEEAEIVKLIYNWYVYGIDGERLGMFKIVKKLNDMNITTQKGSTWTLSTISTILHNPVYAGKLRWNSRKTIKRIENGSVIRTRPMASEYLLSDGLHEPIISPELFSMAEKLIKENPPHPIGLTNTVKNPLSGLVYCKKCGRTMVRRPHQKDRMKDSLMCPNLACNNISSLLLPVEKAVIDGISDLIQNYKLNNTLQDSSGMDVIAAKEKLLSINQEQLRKLNSQKLKQYELLEQGIYTSEVFLERSEATSKQIKECMNVISGLKEELEHDQQLLEQKNTYIPKCENLLSHYWEWDIKTRNDVLKDLIEKIEYNKDTKNTYGHGDVINFTLDIYPKLQ

SEQ ID NO: 4393 - protein, 520 aa, Unknown
  Description of Unknown: Integrase B4394 sequence
  PTHR30461:SF3,cd00338,SM00857,G3DSA:1.10.10.2600,IPR036162, PF13408,IPR025827,G3DSA:3.40.50.1390,PS51737,IPR006119, IPR038109,PF07508,IPR011109,SSF53041,PTHR30461, Coil,PF00239
MLTNYLIYLRKSRADNPDMTVDEVLAKHETILQDFARSEFGEEIPERFIFREVVSGETIAARPIMQRLMQLLESSNVKGVLVVDPQRLSRGDLEDCGKIVNVFRYTGTQVLTPQRSYNLADEYDRKFFELELTRGNDYLEYTKKILYRGRTASVKRGNYIGSVAPYGYKKITVGSGKDVQHTLEVIPEEAEALRLMCHLYLDEGMGFQAIAHQLDALGFRPRKAPQWSPAAIKGMIENPVYIGKIRWNWRKSEKKMVNGEIILSRPKNKDPHDYIYVDGLHDPIISEDVHRAILAKRGTNPCVRKGAELKNPFAGLLCCGRCGHAMSLKRSTYKRQPGRMTESFLCDNQSNCHTKSVLYAALYDRVVQTLEASISDFEILLKNDDDGFQRSNLAIIQTLESEIEKLHAKDMRQKDAFDDGIYSKDEYLSRNAKVQEQLEKAHQALQEARLATSPIVDYREKIARFTDCLAALRDPDVSAAEKNKFLKTCIKKITYHNHMESKAGIGRYVENVFDLDIELL

SEQ ID NO: 4394 - protein, 520 aa, Unknown
  Description of Unknown: Integrase B4395 sequence
  cd03768,PTHR30461:SF3,SM00857,G3DSA:1.10.10.2600,IPR036162, PF13408,PS51737,G3DSA:3.40.50.1390,IPR025827,IPR006119, IPR038109,PF07508,IPR011109,SSF53041,PTHR30461, PS51736,Coil,PF00239
MNVAIYARKSKATKKGESISNQIELCKKYFLNTTNEDVNFLIYEDEGWSGGNINRPQFTKMINDAKLNRFSTLICYRLDRIARNVADFSSTYKILEENNIAFISITEQFDTSTIMGRAMINISATFAQIERETIAERIKDNMLELSRTGRWLGGISPLGFKSVQITENNKKLYKLEVVNDELEIVKLIFNLYPQYKSTVPVARYLVSNHIKGKNGGDFSKNTVLQILKNPVYCCSDTEAIKYFKGKDSTLNCIDNKELGLMVYNKKKSGKKENPIDEWVVATGKHQGIIPGAEWVNCQKILEEISRKASPRKATGNKFLLSGMLKCAKCGSSMCSWSRTSRGIYYRSYRCELKNRAATRCDSKMVNADDLESFVIELCKNINLEEIINIKKTKNNNSTLKRELTSLNKTLVENDKLLQGLVKKLALIDDIDILTIIQAEIKKIKSENENINKRINEINLSMFDSEDEYKNQQILLESHKLFKDTIDLVKDVEAKRNLIMSFIEYFTYDSQTNEIGYKLRL

SEQ ID NO: 4395 - protein, 520 aa, Unknown
  Description of Unknown: Integrase B4396 sequence
  PTHR30461:SF3,cd00338,SM00857,G3DSA:1.10.10.2600,IPR036162, PF13408,PS51737,G3DSA:3.40.50.1390,IPR025827,IPR006119, IPR038109,PF07508,IPR011109,SSF53041,PTHR30461, PS51736,Coil,PF00239
MARKKNIAAGQDAVIYARYSSHNQREVSIEQQIAECTKYAAALGLRIVGTYEDRAISGKTDNRPRFQQMMRDAGKGKFQAVVAWKSNRIGRNMLQAMVNEAKLDDYDVKVFYAEEDFDDTAAGRFALRNMMNVNQFYSENMAEDITRGLYDNASKCMANGRQPLGYKRGEDGRVVLDDANAAVVREIFTRVAAGDLFVDIARDLNAQGIKTSKGANWNKGSFQSICQNERYRGIYIYGDVRVVDGIPRIVSDDLWYRVQEAMRMKKNPVGTRHRVGAEDYLLTGKLRCGHCGSYMTGVSGTSRNGELHYYYTCQKRRTEHACDKKNIRRDVIEPAVAQAIKMYCLTDDVIAWIADRTVEYWEKHDNDLQIEALEQQLEENKKATSNMLKAIEMGIITEATRTRMVELETEQSRLSVQLNAAKEDVVKIDREQIISYLELLQQGDIHDRDFQMELFKNFLVAVYVYDDNRMKLVFSCMGDQNSVEIPLETGEDPPDGGLSPDAKMFVLTPDSSTKKALYFV

SEQ ID NO: 4396 - protein, 520 aa, Unknown
  Description of Unknown: Integrase B4397 sequence
  SM00857,G3DSA:1.10.10.2600,IPR036162,PS51737,G3DSA:3.40.50.1390, IPR006119,IPR038109,PF07508,IPR011109,SSF53041, PF00239,PTHR30461,PS51736,Coil,cd00338
MNESVCIYLRKSRADREAEEHGEGETLARHERILLDLAKKKEYTVGAIYREVVSGETISARPVMQQLLREVESCMWDGVLVVEVERLARGDTIDQGIVSRAFQYSDTKIITPTKVYDPNNEFDEEYFEFGLFMSRREYKTIKRRLNAGRVSSVKEGKYCGNHPPYGYERIKLEHEKGWSLRPLPEEAEIVRLIFNWYVYGIDGERIGMFKIAKRLNDMNIPTQKGFEWNLSTISTILSNPVYAGKLRWNSRKVVKRIENGNIIRSRPVAKEYILSEGLHEPIISPELFEKAQLLKKENPPRPIGSLNTVKNPLSGLVYCKKCGKIMVRKPYPNNYIKDALICPNISCNNISSRLIPVEKAVVAGIADLVKNYKLNETVQNVPKLDSLTAKEKIIFCKQEELKKLNSQKNKQYELLEQGVYSSDIFLERSAATSKQIEECYQSIAKLKKELEHDRQLLEQKNTFIPKCENLLSHYWDWDIKTRNDVLKELIEKIEYRKDKKNTYGHSDDINFTLDIYPKLQ

SEQ ID NO: 4397 - protein, 520 aa, Unknown
  Description of Unknown: Integrase B4398 sequence
  PTHR30461:SF3,cd00338,SM00857,G3DSA:1.10.10.2600,IPR036162, PF13408,IPR025827,G3DSA:3.40.50.1390,PS51737,IPR006119, IPR038109,PF07508,IPR011109,SSF53041, PTHR30461,Coil,PF00239
MKRVYCLYRVSTKCQVDKDDIPMQKTSCREFAERNGWTILKEFQEKGVSGFKVSASDRDAIQDLKAAAEKKEFDVLLVFMFDRIGRIDDETPFVVEWFIKHGIEVWSVNEGEQRMDNHVDKLMNYIRFWQANGESQKTSARVKTRLNQMTLDGKFTGGVAPFGYKLIKSGEINKKGKELMDIVVDDDEAPIVKKIFEMTVKEGYGSYRMADYLNSHGIRTHNNSKFQCNTVNRILKNRLYCGYLVSGGVESPYIERLHIIYENVYEQAQFILSQRSNKNEEKKQIARTTKGSTLLSGNIYCAHCGQKMVSTSYIDRYDRADGSQYRVRRQRYICTDKTMKRGACDGQSAYVAHRIDGAVLATLRDYLAKIKSTPKDIALEKRYKSEISEYRRKQTKLEKEIKKLKRQVVELSAEIGRSLLGESRFTPDILSTSIDNTNDLLHKKEIELNDIKFKLANQQNAMGKLDFYYSQFRTWADEFDNSTMEQKKMIACQLIREVKVSRGYELEIIFDLNYEQFLSL

SEQ ID NO: 4398 - protein, 520 aa, Unknown
  Description of Unknown: Integrase B4399 sequence
  cd03768,PTHR30461:SF3,SM00857,G3DSA:1.10.10.2600,IPR036162, PF13408,PS51737,G3DSA:3.40.50.1390,IPR025827,IPR006119, IPR038109,PF07508,SSF53041,IPR011109,PTHR30461, PS51736,Coil,PF00239
MNVAIYARKSKATKKGESISNQIELCKKYFLNTTNEDVNFLIYEDEGWSGGNINRPQFTKMMNDAKLKRFSALICYRLDRIARNVADFSSTYKILEESNIAFISITEQFDTSTIMGRAMINISATFAQIERETIAERIKDNMLELSRTGRWLGGTPPLGFKSVQITENNKKMYKLEVIEEEIEIVRLIYKLYPEYKSTVPIARYLVSNYIKGKNGGDFSRNTVLQILKNPVYCLSDEDAIKYFKSKGSTLNCSESNEYGLMVYNKRKGGKKENHIDEWIIATGKHPGIIPGADWVNCQNILEEIKSKSSPRKATGNKFLLSGLLKCSRCGSSMCSWSRTNRGIYYRSYRCELKNRSTNRCDSKMVNADELEQFVIDLCKNINIEDIINIKRTKNNNAALKRELTSLNKNLNENDKLLQGLIKKLALIDDIDVLSMIQTEIKKIKTENDNIDKRINEINISMFDVEDEENKKQLLLESHKLFKNTIDLIEDVEAKRNLIMNFIEYFTYDSETNEVGYKLRL

SEQ ID NO: 4399 - protein, 520 aa, Unknown
  Description of Unknown: Integrase B4400 sequence
  PTHR30461:SF3,SM00857,G3DSA:1.10.10.2600,IPR036162,PF13408, PS51737,G3DSA:3.40.50.1390,IPR025827,IPR006119,IPR038109, PF07508,IPR011109,SSF53041,PF00239,PTHR30461, PS51736,Coil,cd00338
MNAVIYARFSSHNQQEQSIEGQIRYCTEYAKKNDMTIINSYIDRAISGTSDNRPEFLQMIKDSNNHQFNVVLVWKLDRFARNRYDSAIYKNALKKNNVKVVSVTEYLGEGSESVLLEAMLEAMAETYSRQLSENVRRGMRESALKCQVVGGSVPLGFDTVDKKYVINEKEAEIVRFIFDEYVSGTSKKEIVNKLNAKGWRTKNGSTFVFNSLNKILSNRKYIGEYKYEDIVIEHGIPAIINERTFILAQKQLSKNKQNRGTKSAKHEYLLATKIFCGYCGGSMIGETATGKGGGKFGYYVCRNRKKHINDCKKRREKQKELETFIVERTLYMYKNKDFVNEVAQKVVDLYNKECGQNHLKTLELNKKELEKKLEELSDGLLKTTNARVLKKFNEQINDLDNQLAELEIEIAREKAIANATMRCSDVIDFISDIMDGDINDKQFQKKIIDTFINAIYVFDDKLIVYYNGSSTSDKVTFDDLLNDLENKGVKGSTFNTLTPPNKYWMNTYFFSGGFAVRCVL

SEQ ID NO: 4400 - protein, 520 aa, Unknown
  Description of Unknown: Integrase B4401 sequence
  cd03768,PTHR30461:SF3,SM00857,G3DSA:1.10.10.2600,IPR036162, PF13408,PS51737,G3DSA:3.40.50.1390,IPR025827,IPR006119, IPR038109,PF07508,IPR011109,SSF53041,PTHR30461, PS51736,Coil,PF00239
MNVAIYARKSKATKKGESISNQIELCKKYFLNTTNENVNFFIYEDEGWSGGNINRPQFTKMMNDAKLKRFSALICYRLDRIARNVADFSSTYKILEESNIAFISITEQFDTSTIMGRAMINISATFAQIERETIAERIKDNMLELSRTGRWLGGTPPLGFKSVQITENNKRMYKLEVVEEEIEIVRLIYKLYPEYKSTVPIARYLVSNYIKGKNGGDFSRNTVLQILKNPVYCCSDENAIKYFESKGSTLNCSENNKYGLMVYNKRKGGKKENPIEEWIIATGKHPGIIPGAEWVECQNILSEISSKTSPRKATGNKFLLSGMLKCSRCGSSMCSWSRTSKGIYYRSYRCELKNRSSNRCDSKMVNADELEQFVIDLCKNINIEDIINIKITKNNNASLKRELTSLNKNLNENDKLLQGLIKKLALIDDIDVLSMIQTEIKKIKTENDNINKRINEINISMFDVEDEENKKQLLLESHKLFINTIDLIEDVEAKRNLIMNFIEYFTYDSETNEVGYKLRL

SEQ ID NO: 4401 - protein, 520 aa, Unknown
  Description of Unknown: Integrase B4402 sequence
  PTHR30461:SF3,SM00857,G3DSA:1.10.10.2600,IPR036162,PF13408, IPR025827,G3DSA:3.40.50.1390,PS51737,IPR006119,IPR038109, PF07508,IPR011109,SSF53041,PTHR30461,Coil, PS51736,cd00338,PF00239
MNTVIYARYSAGPRQTDQSIEGQLRVCTDFCKQRGLTVIDTYCDRHISGRTDERPEFQRLIADAKRKKFEAVVVYKTDRFARNKYDSAVYKRELKRNGIQIFYAAEAIPDGPEGIILESLMEGLAEYYSAELAQKIKRGMHESALKCQSTGSGRPLGYRVDEQKHFQIDPESAQTVQTIFEQYIKGESNAAICELLNSRGLRTAQGKPFNKNSINRIIKNRKYIGEYRYHDIVVEGGMPAIISKDTFNLAQAEMERRRTRKAPKSPKAEYLLAGRLFCGHCKGPMQGVSGTGKSGNKWYYYYCGNTRGKNKTCDKKQVSRDRLERAVVDFTVRYILQEEVLEELARKVHAAQERQKDTASEIAFYEKKLADNKKSIANVLRAIESGAATQTLPARLQELENEQAVILGEISFLKGKRLAFTEDQILFALMKHLEPYPGESEQDYRRRIISDFVSEVYLYDDRLLIYFNISSENGKLKSADLSNIEGGEFDEGLVRSTKTHRYELFWFKNVFGLTRKLPQR

SEQ ID NO: 4402 - protein, 520 aa, Unknown
  Description of Unknown: Integrase B4403 sequence
  PTHR30461:SF3,cd00338,SM00857,G3DSA:1.10.10.2600,IPR036162, PF13408,IPR025827,PS51737,G3DSA:3.40.50.1390,IPR006119, IPR038109,PF07508,SSF53041,IPR011109,PTHR30461, PS51736,Coil,PF00239
MKAVIYARYSSEKQQEISIEGQLRVCQEFAAREGYEVVDTYTDRALSASRDVERREDFQRMIRDSSRRGFEVVIVYKFSRFARNRYDSAVYKARLRQNGVKVVSACEPISANPEGALIEGIFESLDEFYSKSLAQDVTRGMHENATKALSTGGTIPLGYVSVDKRLQIDPATAPAVRLAFERYADGMSLARIADELNAQGYRTRAGKAFNRSSFNALLSNRKYIGTYHYNGEVELVGQVPPIVDPGTFRRVQERLRKNTTAPGRTKATINYLLSTKLYCGACGKPMAGESGHNHSGTRYYYYACSGRKRRLGCKMPTLRKDDLERLVVEHARTLLSPDNIKVLAHAAAAEYQRQAEDDSAAVSLRRQLDEVTRSLDNLLRMVEQGATSATLVGRINELEGRKAIIAAELADEQRGAPELTEVDILRWLSCFADGCLEDEDYMRNVIDMLVNKIVVQQSPNQKVSVLVAYNLAGRGEEISGSGLVDVVHQARHNPNLCTRATESCMTFLLYHGCAIFQLAA

SEQ ID NO: 4403 - protein, 520 aa, Unknown
  Description of Unknown: Integrase B4404 sequence
  cd00338,SM00857,G3DSA:1.10.10.2600,IPR036162,PF13408, PS51737,IPR025827,mobidb-lite,G3DSA:3.40.50.1390,IPR006119, IPR038109,PF07508,IPR011109,SSF53041,PTHR30461, PS51736,Coil,PF00239
MTADILARYSTDHQNPVTIDVQVAACKAWCKQHGYQVGRVFADEAVSGMKDTRAGYQACIRHLSMGGADLVVIYDQSRMFREFTEWFEFRRLVASFGAGVASVTQPQLGGDLQDPAVFIGEAATAMMNHAQVLVTRQKTIEALRYRARNGKTTGGRPALGYDIGPDKHYIINEGEAETVRLIYRMAADGEGYGHIVDELNRRGLHTKRGRAFTKNSLLEILRNEKYIGVLTYGRAQKGGRGGWNAHTNPRPDAIRLEGGVPPIVERDVWEIVQRRRESRRGCGGRASAKQTYLLTGKVYCGACGAAMVVHSSNDGSLYQYYECGAKHRSHTCTMRNVRVDVLDRSVARAVKQALQDATNRDALIDTVQRAEREAVSLADTVTATATARLQAINEKIERLTDAILDGMYSQALKQKMMNLEEEKRAVETKLREAGRKQQALSAEEIRHIVQQVAAADISTEGGLRQVLSIVTRVTVYPDRFRVTTFSDEFVGDDPAGENPEQFRTGPGSRTGHQEALLHLR

SEQ ID NO: 4404 - protein, 520 aa, Unknown
  Description of Unknown: Integrase B4405 sequence
  cd00338,SM00857,G3DSA:1.10.10.2600,IPR036162,PS51737, G3DSA:3.40.50.1390,IPR006119,IPR038109,PF07508,IPR011109, SSF53041,PTHR30461,PS51736,Coil,PF00239
MQYEEYLIYLRKSRSDASLEAMGVDVLERHEQILLDLAKRMNLSIGGIYREVVSGESISARPEMQKLLSEVESGRWEGVLVMEVERLARGDTVDQGIVQRAFQYSGTKIITPTKTYNPNNEFDEEYFEFGLFMSRREYKTIRRRMRAGVAAAVKEGKWPFNQAPYGWQRVKLEHGRGWVLAPDPDEAPVVKLIFRLYTGPDRIGITHICRYLDNRGIKPRNGDTWLECSVMGILRNVVNDQRVGIGRRKVIKQVQNGSVSKVRPHSDYDFTAPGLQPRLIDHDAFLEAQEYLAKNSHKLPESYGIKNPLAGILVCSCCGKKMQRRPASRDGSSGRCPYDVLMCNTRGCPTIGSTLELVERELIQALSDWVAGYQLDPTLEVENKVPEKEQLLSSAVSNHDLLLKQNGNLYDLLEQGVYTTEIFLERSHELQKRIKESEAHIEILKKDLEYEKEKIANIENFIPSCKELLSCYWDLSVQDRNKALKMLLESVEYTKTKRNRKGDKDNPTFTLNLKPRIPRI

SEQ ID NO: 4405 - protein, 520 aa, Unknown
  Description of Unknown: Integrase B4406 sequence
  SM00857,G3DSA:1.10.10.2600,IPR036162,PF13408, PS51737,IPR025827,G3DSA:3.40.50.1390,IPR006119, IPR038109,PF07508,IPR011109,SSF53041, PTHR30461,Coil,PS51736,cd00338,PF00239
MNESVCIYLRKSRADREAEAHGEGETLARHERILLDLAKKKEYIVGAIYREVVSGETIADRPVMQQLLREVESGMWDGVLVVEVERLARGDTIDQGVVSRAFQYSDTKIITPTKIYDPNNEFDEEYFEFGLFMSRREYKTIKRRLNAGRVSSVKEGKYCGSVPPFGYERVKLENDKGFTLKPVPEEAEIVKLIYNWYVYGIDGERLGMFKIVKKLNDMNITTQKGSTWTLSTISTILHNPVYAGKLRWNSRKTIKRIENGSVIRTRPMASEYLLSDGLHEPIISPELFSMAEKLIKENPPHPIGLTNTVKNPLSGLVYCKKCGRTMVRRPHQKDRMKDSLMCPNLACNNISSLLLPVEKAVIDGISDLIQNYKLNNTLQDSSGMDVIAAKEKLLSINQEQLRKLNSQKVKQYELLEQGIYTSEVFLERSEATSKQIKECMNVISGLKEELEHDQQLLEQKNTYIPKCENLLSHYWEWDIKTRNDVLKDLIEKIEYNKDTKNTYGHGDVINFTLDIYPKLQ

SEQ ID NO: 4406 - protein, 520 aa, Unknown
  Description of Unknown: Integrase B4407 sequence
  cd03768,PTHR30461:SF3,SM00857,G3DSA:1.10.10.2600,IPR036162, PF13408,PS51737,G3DSA:3.40.50.1390,IPR025827,IPR006119, IPR038109,PF07508,IPR011109,SSF53041,PTHR30461, PS51736,Coil,PF00239
MNVAIYARKSKATKKGESISNQIELCKKYFLNTTNENVNFFIYEDEGWSGGNINRPQFTKMMNDAKLKRFSALICYRLDRIARNVADFSSTYKILEESNIAFISITEQFDTSTIMGRAMINISATFAQIERETIAERIKDNMLELSRTGRWLGGTPPLGFKSVQITENNKRMYKLEVVEEEIEIVRLIYKLYPEYKSTVPIARYLVSNYIKGKNGGDFSRNTVLQILKNPVYCCSDENAIKYFESKGSTLNCSENNKYGLMVYNKRKGGKKENPIEEWIIATGKHPGIIPGAEWVECQNILSEISSKTSPRKATGNKFLLSGMLKCSRCGSSMCSWSRTSKGIYYRSYRCELKNRSSNRCDSKMVNADELEQFVIDLCKNINIEDIINIKRTKNNNASLKRELTSLNKNLNENDKLLQGLIKKLALIDDIDVLSMIQTEIKKIKTENDNINKRINEINISMFDVEDEENKKQLLLESHKLFINTIDLIEDVEAKRNLIMNFIEYFTYDSETNEVGYKLRL

SEQ ID NO: 4407 - protein, 520 aa, Unknown
  Description of Unknown: Integrase B4408 sequence
  PTHR30461:SF3,SM00857,G3DSA:1.10.10.2600,IPR036162,PF13408, IPR025827,G3DSA:3.40.50.1390,PS51737,IPR006119,IPR038109, PF07508,IPR011109,SSF53041,PF00239,PTHR30461, PS51736,Coil,cd00338
MNKIAIYTRKSKFTGKGESIENQIEKCKKFIEFKFNIDSKSVNIFIDEGFSGKNEDRPEYQRMMNQIKSKQINSIVIYQLNRLGRNARDIHNTMQLCDDLGTIIYSATEGFDSSTIFGRAVIGILASLAQLEREQLAERVKDNMYTLAKMGRWLGGQSPLGFDGTREYYIDENGKERSVTELKPNKEELNIVKLIYQKYIEEKSLSQVAKWSLTNHLKGKNGGNITKSAINVILKNPVYVKSTDKVLEYLEKENYEVCGSANGNGLLRYGKDNEQIIAVSKHKGIINADDWMKVQNILKENTDKAPRRGKTNTALLTGILKCNCGSSMNIAHGKLKNGTKTFYYQCAMKVASGGTRCKSKNLNGPLLEEKLIDYLKNYSEIQIIADLENILNKSNELNLKLTAESIDNAIEQCDKSIKVLVNKLKVIEDLEVSKIIIDELTKEKDKKKDLEKQKENLLEDEASKSLSEAEILEVLNLVEHFKNNIDSLDFESKKKLLNEMIESIVIDTDEFIINFNIKKN

SEQ ID NO: 4408 - protein, 520 aa, Unknown
  Description of Unknown: Integrase B4409 sequence
  cd00338,SM00857,G3DSA:1.10.10.2600,IPR036162,PS51737, G3DSA:3.40.50.1390,IPR006119,IPR038109,PF07508,IPR011109, SSF53041,PTHR30461,PS51736,Coil,PF00239
MQYEEYLIYLRKSRSDASLEAMGVDVLERHEQILLDLAKRMNLSIGGIYREVVSGESISARPEMQKLLSEVESGRWEGVLVMEVERLARGDTVDQGIVQRAFQYSGTKIITPTKTYNPNNEFDEEYFEFGLFMSRREYKTIRRRMRAGVTAAVKEGKWPFNQAPYGWQRVKLEHGRGWVLAPDPDEAPVVKLIFRLYTGPDRIGITHICRYLDNRGIKPRNGDTWLECSVMGILRNIVNDQRVGIGRRKVVKQVQNGSVSKVRPHSDYDFTAPGLQPRLIDHDVFLEAQEYLARNSHKLPESYGIKNPLAGILVCSCCGKKMQRRPASRDGSSGRCPYDVLMCNTRGCPTIGSTLELVERELIQALSDWVAGYQLDPTLEVENKVPEKEQLLSSAVSNHDLLLKQNGNLYDLLEQGVYTTEIFLERSHELQKRIKESEEHIEILKKDLEYEKEKIANIENFIPSCKELLSCYWDLSVQDRNKALKMLLESVEYTKTKRNRKGDKDNPTFTLNLKPRIPRI

SEQ ID NO: 4409 - protein, 520 aa, Unknown
  Description of Unknown: Integrase B4410 sequence
  cd03768,PTHR30461:SF3,SM00857,G3DSA:1.10.10.2600, IPR036162,PF13408,IPR025827,G3DSA:3.40.50.1390, PS51737,IPR006119,IPR038109,PF07508, SSF53041,IPR011109,PTHR30461,PS51736,Coil,PF00239
MNVAIYARKSKATKKGESISNQIELCKKYFLNTTNEDVNFLIYEDEGWSGGNINRPQFTKLMNDAKLKRFTALICYRLDRIARNVADFSSTYKILEENNIAFISITEQFDTSTIMGRAMINISATFAQIERETIAERIKDNMLELSKTGRWLGGTPPLGFKSVQITENNKKMYKLEVVEEEMELVRLIYKLYPQYKSTVPIARYLVSNHIKGKNGGDFSRNTVLQILKNPVYCCSDSEAIKYFENKGSILNCINNKELGLMVYNKRKAGKKENPIDEWIIATGRHPGIIPSDQWINCQNILEEIKNRTSPRQATGNKFLLSGLLKCARCGSSMCSWSRTNKGIYYRSYRCELKNRAANRCDSKMINAEELENFIIELCKNINIEEIINVKKNKNNNTSLKKELSSLNKSLNDNEKLLQGLIKKLALIDDIDILSMIQTEIKKIKAENENINKRINEINLSMFDIEDEYKNQQILLESHKLFKDTIDLVKDIEAKRNLIMSFIEYFTYDSETNEVGYKIRL

SEQ ID NO: 4410 - protein, 520 aa, Unknown
  Description of Unknown: Integrase B4411 sequence
  PTHR30461:SF3,cd00338,SM00857,G3DSA:1.10.10.2600,IPR036162, PF13408,PS51737,G3DSA:3.40.50.1390,IPR025827,IPR006119, IPR038109,PF07508,IPR011109,SSF53041,PTHR30461, PS51736,Coil,PF00239
MARKKNIAAGLDAVIYARYSSHNQREVSIEQQIAECTKHAAALGLRIVGTYEDRAISGKTDNRPRFQQMMRDAEKGKFQAVVAWKSNRIGRNMLQAMVNEAKLDDYGVKVFYAEEDFDDTAAGRFALRNMMNVNQFYSENMAEDITRGLYDNASKCMANGRQPLGYKRGEDGRVVLDEANAAVVREIFTRVAAGDLFVDIARDLNAQGIKTSKGANWNKGSFQSICQNERYRGIYIYGDVRVADGIPRIVSDDLWYRVQEAMRMKKNPVGTRHRVGAEDYLLTGKLRCGHCGSYMTGVSGTSRNGELHYYYTCQKRRTEHACDKKNIRRDVIEPAVAQAIKMYCLTDDVIAWIADRTVEYWEKHDNDLQIEALEQQLEENKKATSNMLKAIEMGIITEATRTRMVELETEQSRLSVQLNVAKEDVVKIDREQIISYLELLQQGDIHDRDFQMELFKNFLVAVYVYDDNRMKLVFSCMGDQNSVEIPLETGEDPPDGGLSPDAKMFVLTPDSSTKKAPYFM

SEQ ID NO: 4411 - protein, 520 aa, Unknown
  Description of Unknown: Integrase B4412 sequence
  cd03768,PTHR30461:SF3,SM00857,G3DSA:1.10.10.2600,IPR036162, PF13408,PS51737,G3DSA:3.40.50.1390,IPR025827,IPR006119, IPR038109,PF07508,IPR011109,SSF53041,PTHR30461, PS51736,Coil,PF00239
MNVAIYARKSKATKKGESISNQIELCKKYFLNTTNEDVNFLIYEDEGWSGGNINRPQFTKMMNDAKLKRFSTLICYRLDRIARNVADFSSTYKILEENNIAFISITEQFDTSTIMGRAMINISATFAQIERETIAERIKDNMLELSRTGRWLGGISPLGFKSVQITENNKKLYKLEVVNDELEIVKLIFNLYPQYKSTVPVARYLVSNHIKGKNGGDFSKNTVLQILKNPVYCCSDTEAIKYFKGKDSTLNCIDNKELGLMVYNKKKSGKKENPIDEWVVATGKHQGIIPGAEWVNCQNILEEISRKASPRKATGNKFLLSGMLKCARCGSSMCSWSRTSRGIYYRSYRCELKNRAATRCDSKMVNADDLESFVIELCKNINLEEIINIKKTKNNNSTLKRELTSLNKTLVENDKLLQGLVKKLALIDDIDILTIIQAEIKKIKSENENINKRINEINLSMFDSEDEYKNQQILLESHKLFKDTIDLVKDVEAKRNLIMSFIEYFTYDSQTNEIGYKLRL

SEQ ID NO: 4412 - protein, 520 aa, Unknown
  Description of Unknown: Integrase B4413 sequence
  PTHR30461:SF3,cd00338,SM00857,G3DSA:1.10.10.2600,IPR036162, PF13408,IPR025827,G3DSA:3.40.50.1390,PS51737,IPR006119, IPR038109,PF07508,IPR011109,SSF53041,PTHR30461, PS51736,Coil,PF00239
MPRKKAPAAEAPRLVAYYRYSGGSRQTEQSIEGQRRDCEAYARAHGMTILREYVDRHISGKTDDRPAFQQLVADSAAHTFDAVICWKTDRLARNRYDSAVYKKKLRDNGVEILYAAESNISGAEGIIIEGLMEALAEYYSAELAEKARRGMRESALKGKALGSSRPLGLTVDADKHYIIEPTGAEAVRYIFEQYAAGLSSSSIVERLNAMGLRTSHGGPFNKSSINRIIRNEMYRGVYVSKKFDVRIEGAIPAIIDNDLWKRAQNMFERNRQSRTPHASRADYILSGKLYCGECGCLMKGVCGRSSGNGQMYHYYACPGRSIGRACTRKNIPQDELEAMVVNSVADLLLEPELLEQIADAIVELQQAEAARPDPEKQALEKSLSDVRNKIQNILSAIENGTSSAALSARLADLEQQESTLSYQLSSLTAKKPLTFTRDQILFLLQQFRVSPSERTKAYCRRLVDTFVDHIELTNTELILYFNISDETIDKNKKAPRSNPSKESSTEKRLVRVARIELTAS

SEQ ID NO: 4413 - protein, 520 aa, Unknown
  Description of Unknown: Integrase B4414 sequence
  PTHR30461:SF3,SM00857,G3DSA:1.10.10.2600,IPR036162,PS51737, G3DSA:3.40.50.1390,IPR006119,IPR038109,PF07508,IPR011109, SSF53041,PF00239,PTHR30461,PS51736,Coil, cd00338
MSTFDMNESEGSTKIDKYAIYLRKSRADEEAEKYGDEETLSRHKAILTEFAARKGYYIDKIYQEVVSGETIKDRPEIQKLINDCYVGKYKGILVVEITRLSRGNQGDAQTIMDCLKYSNMNNGILVVTPTKVYDVAHSTEDEEFMEFELFMSRKEYKMIKKRMDRGRKQMVVEGNYMGSRRPYGYTIKKTHRSRYLVPHPDEAKIVKQIFHWAANEKMTAGKIMRKLTAMGVPTYTGSSEWNIATIKDILRNPTYIGKVRWNHRMTVKTMRDGELIANRPRTNHTDHYMLYNGKHDALIDEETFKKAGGEFYSDKTKHRHKLINPFATLITCAKCGKVMGYKADYTKPNVAPRIQHAYSQICKVKSALYEDVQNAIIHGLKMYIEDFTMKLDNLSDTNEDSVHAQLEILRKENKKIETKLDDLFDAWEDKIISDNDFVKRKAKHKARQESILEEMIKLEDSIPEKDEYREKIITLTEALEVIKDETIDANAKNKYLKTVIDSIVFSRENNTEFILDITLR

SEQ ID NO: 4414 - protein, 520 aa, Unknown
  Description of Unknown: Integrase B4415 sequence
  cd03768,PTHR30461:SF3,SM00857,G3DSA:1.10.10.2600,IPR036162, PF13408,PS51737,G3DSA:3.40.50.1390,IPR025827,IPR006119, IPR038109,PF07508,IPR011109,SSF53041,PTHR30461, PS51736,Coil,PF00239
MNVAIYARKSKATKKGESISNQIELCKKYFLNTTNEDVNFLIYEDEGWSGGNINRPQFTKMINDAKLNRFSTLICYRLDRIARNVADFSSTYKILEENNIAFISITEQFDTSTIMGRAMINISATFAQIERETIAERIKDNMLELSRTGRWLGGISPLGFKSVQITENNKKLYKLEVVNDELEIVKLIFNLYPQYKSTVPVARYLVSNHIKGKNGGDFSKNTVLQILKNPVYCCSDTEAIKYFKDKDSTLNCIDNKELGLMVYNKKKSGKKENPIDEWVVATGKHQGIIPGAEWVNCQKILEEISRKASPRKATGNKFLLSGMLKCARCGSSMCSWSRTSRGIYYRSYRCELKNRAATRCDSKMVNADDLESFVIELCKNINLEEIINIKKTKNNNSTLKRELTSLNKTLVENDKLLQGLVKKLALIDDIDILTIIQAEIKKIKSENENINKRINEINLSMFDSEDEYKNQQILLESHKLFKDTIDLVKDVEAKRNLIMSFIEYFTYDSQANEIGYKLRL

SEQ ID NO: 4415 - protein, 520 aa, Unknown
  Description of Unknown: Integrase B4416 sequence
  cd03768,PTHR30461:SF3,SM00857,G3DSA:1.10.10.2600,IPR036162, PF13408,PS51737,G3DSA:3.40.50.1390,IPR025827,IPR006119, IPR038109,PF07508,IPR011109,SSF53041,PTHR30461, PS51736,Coil,PF00239
MNVAIYARKSKATKKGESISNQIELCKKYFLNTTNEDVNFLIYEDEGWSGGNINRPQFTKMINDAKLNRFSTLICYRLDRIARNVADFSSTYKILEENNIAFISITEQFDTSTIMGRAMINISATFAQIERETIAERIKDNMLELSRTGRWLGGISPLGFKSVQITENNKKLYKLEVVNDELEIVKLIFNLYPQYKSTVPVARYLVSNHIKGKNGGDFSKNTVLQILKNPVYCCSDTEAIKYFKDKDSTLNCIDNKELGLMVYNKKKSGKKENPIDEWIVATGKHQGIIPGAEWVNCQKILEEISRKASPRKATGNKFLLSGMLKCARCGSSMCSWSRTSRGIYYRSYRCELKNRAATRCDSKMVNADDLESFVIELCKNINLEEIINIKKTKNNNSTLKRELTSLNKTLVENDKLLQGLVKKLALIDDIDILTIIQAEIKKIKSENENINKRINEINLSMFDSEDEYKNQQILLESHKLFKDTIDLVKDVEAKRNLIMSFIEYFTYDSQTNEIGYKLRL

SEQ ID NO: 4416 - protein, 520 aa, Unknown
  Description of Unknown: Integrase B4417 sequence
  PTHR30461:SF3,SM00857,G3DSA:1.10.10.2600,IPR036162,PF13408, PS51737,IPR025827,G3DSA:3.40.50.1390,IPR006119,IPR038109, PF07508,IPR011109,SSF53041,PF00239,PTHR30461, Coil,cd00338
MKRVYCLYRVSTKGQVDKDDIPMQKTSCREFAERNGWTILKEFQEKGVSGFKVSARERDAIQDLKTAAENKEFDVLLVFMFDRIGRIDDETPFVVEWFIKHGIEVWSVNEGEQRMDSHVDKLMNYIRFWQANGESQKTSARVKTRLNQMTMDGKFTGGVAPFGYKLIKSGEINKKGKELMDIVVDDDEAVIVKKIFDMTVKEGYGSYRMADYLNSHGIRTHNNSKFQCNTVNRILKNRLYCGYFVSGGVESPYIEKLQIIDENVFDQAQFILKQRSSKNEEKKQIARTTKGSTLLSGNIYCAHCGQKMVSTSYIDRYDRADGSQYRVRRQRYICTNKAMKRGACDGQSAYVAHKIDGAVLATLKDYLAKIKSTPKDIALEKRYKSEISEYKRKQTKLEKEIDKLKRQVVELSAEIGRSLLGESRFTPDMLSTSIDNTNDILHKKEIELSDIKYKLTNQQNAMGKLDFYYSQFRTWADEFDNSTMEQKKMIVCQLIKEVRVARGYELEIVFDLNYEQFLSK

SEQ ID NO: 4417 - protein, 520 aa, Unknown
  Description of Unknown: Integrase B4418 sequence
  PTHR30461:SF3,SM00857,G3DSA:1.10.10.2600,IPR036162,PF13408, IPR025827,G3DSA:3.40.50.1390,PS51737,IPR006119,IPR038109, PF07508,IPR011109,SSF53041,PTHR30461,Coil, PS51736,cd00338,PF00239
MAVFAQAVRPDFNDDVADVVIYSRYSSLGQNDQSIDGQIEACMRYAAQRGFRVVGQYIDRAMSGTHADSRPEFQRLIRDGKKGIYKYVLVWKLDRFARNRYDSAIYKNELKKHGVKVLSVTEGIDAGSDSIILEAVLEAMAEEYSRQLSQNVRRGMRQNAEKQLTLGGNTPLGYRVEDKRLVVDKDEAEIVRFAFRSYADGMTKTEIAKECNRRGWRTRSGRPFTLSSFSVMLKNQTYIGTYTFKDELAVEDAVPAIVDRATFEKVGAMLERNRRAPGRVKAKEEYQLQGKVFCGYCGAPMVGESGRGRRGATYHYYACATRKKAHTCQKKNEKKDFLEWYVVEQITTHILTDRRIHEIAAGVVAEYNRSFDAAGVRDLERKIRAMDKEMDALVDALIRTTAAPAVAKINERVELLAAQKEEAEVDLAKLKVASRITLSEDEIVAWLRQFIHGDPTDPVFRQRVIDIFVNSIYLYDDKVVMYFNIKDASQVSYIEMQEDLEGLDGSDLNCCGVPKVLEIV

SEQ ID NO: 4418 - protein, 520 aa, Unknown
  Description of Unknown: Integrase B4419 sequence
  PTHR30461:SF3,cd00338,SM00857,G3DSA:1.10.10.2600,IPR036162, PF13408,IPR025827,PS51737,G3DSA:3.40.50.1390,IPR006119, IPR038109,PF07508,IPR011109,SSF53041,PTHR30461, PS51736,Coil,PF00239
MQKRRTKYANSQGDNAVIYARYSSHNQKDTSIEQQIEVCTKYARDNGYRITNIYADRAISGKTDARPQFRLMMQDAREHKFDVVISWKSSRLGRDMLDAMTNDIILRNLGIKCFYTEENFDDTAAGRFALRNMMNVNQFYIENMAEDILRGMRDNAKKCRVNNGSPPLGYRRGDDGKYEIVPEEAETVREIFTKVLAGMAFVDIANELNARGIKTKKGAPWGRSSFSRLLSNERYIGTYKWSDIVIENGMPAIIDREVFEMAQKKIKGERPLRRRHNENGDYLLTGKLFCGKCDSPMTGMSGTSKSGAKHHYYACYSARKDGSCDKKAVKRDWVEKTVALFIKEHVLRDEVIEWMVDQYMVYQKATFESQRIMEMRNQLKDVQSQLDNLVDAIARGMYTDSTKDKLLKLEADKKEIEQDIRLATYNLKEYDREHVRCYFLSFKEGSVESKDYLKRLFDQFVTKIYLYDDEIRIAFSGTKDDSPVSFKIIDEAEELAVSSVRLSSASSHQKRKRRTLLLQE

SEQ ID NO: 4419 - protein, 520 aa, Unknown
  Description of Unknown: Integrase B4420 sequence
  PTHR30461:SF3,SM00857,G3DSA:1.10.10.2600,IPR036162,PF13408, PS51737,IPR025827,G3DSA:3.40.50.1390,IPR006119,IPR038109, PF07508,IPR011109,SSF53041,PF00239,PTHR30461, Coil,cd00338
MKRVYCLYRVSTKGQVDKDDIPMQKTSCREFAERNGWTILKEFQEKGVSGFKVSASDRDAIQDLKSAAEKKEFDVLLVFMFDRIGRIDDETPFVVEWFIKHGIEVWSVNEGEQRMDNHVDKLMNYIRFWQANGESQKTSARVKTRLNQMTLDGKFTGGVAPFGYKLIKSGEINKKGKELMDIVIDDDEAPIVKKIFEMTVKEGYGSYRMADFLNSHGIRTHNNSKFQCNTVNRILKNRLYCGYLVSGGVESPYIERLHIIDENIFDQAQFILKQRSSKNEEKQQIARTTKGSTLLSGNIYCAHCGQKMVSTSYIDRYDRADGSQYRVRRQRYICTNKAMKRGACDGQSAYVAHRIDSAVLATLRDYLAKIKSTPKDIALEKRYKSEISEYRRKQTKLEKEIEKLKRQVVELSAEIGRSLLGESRFTPDILSTSIDNTNDLLHKKEIELSDIKFKLANQQNAMGRLDFYYSQFRTWADEFDNSTMEQKKMIACQLIREVKVSRGYELEIIFDLNYEQFLSL

SEQ ID NO: 4420 - protein, 520 aa, Unknown
  Description of Unknown: Integrase B4421 sequence
  cd03768,PTHR30461:SF3,SM00857,G3DSA:1.10.10.2600,IPR036162, PF13408,IPR025827,PS51737,G3DSA:3.40.50.1390,IPR006119, IPR038109,PF07508,IPR011109,SSF53041,PTHR30461, PS51736,Coil,PF00239
MNVAIYARKSKATKKGESISNQIDLCKKYFTNTTNEDVNFLIYEDEGWSGGNINRPNFTKMINDAKLKRFSTLICYRLDRIARNVADFSSTYRILEENNIAFISITEQFDTSSIMGRGMLNIAATFAQIERETIAERIRDNMLELSRTGRWLGGTPPLGFKSVQITENDKKMYKLEVIEEEMEIVRLIYRLYPKYKSTVPIARYLVSNYIKGKNGGDFSRNTVLQILKNPVYCCSDNESIKYFKNKGSFVNATISSEYGLMVYNKRKGGKKENPIDEWIIATAKHPGIISGSEWVKCQNILEEIKSKSSPRKATGNKFLLSGLLKCARCGSSMCSWSRTSKGIYYRSYRCELKNRAANRCDSKMINADDLESFVIDLCKNIDLRKIINAKDTEKNNLALKKELTALNKNLNENNKLLQGLIKKLALIDDIEILAMIQAEIKNLKSQNNNINKRINEINFSMFDIEDESKTKQLLLESHEHFKKTIDLIDDVEGKRNLITNFIEYFTYDSKTNKIEYKIKL

SEQ ID NO: 4421 - protein, 520 aa, Unknown
  Description of Unknown: Integrase B4422 sequence
  PTHR30461:SF3,SM00857,G3DSA:1.10.10.2600,IPR036162,PF13408, PS51737,IPR025827,G3DSA:3.40.50.1390,IPR006119,IPR038109, PF07508,IPR011109,SSF53041,PF00239,PTHR30461, PS51736,Coil,cd00338
MARKKNIAAGQDAVIYARYSSHNQREVSIEQQIAECTKYAAALGLRIVGTYEDRAISGKTDNRPRFQQMMRDAGKGKFQAVVAWKSNRIGRNMLQAMVNEAKLDDYGVKVFYAEEDFDDTAAGRFALRNMMNVNQFYSENMAEDITRGLYDNASKCMANGRQPLGYKRGEDGRVVLDDANAAVVREIFTRVAAGDLFVDIARDLNAQGIKTSKGANWNKGSFQSICQNERYRGIYIYGDVRVVDGIPRIVSDDLWYRVQEAMRMKKNPVGTRHRVGAEDYLLTGKLHCGHCGSYMTGVSGTSRNGELHYYYTCQKRRTEHACDKKNIRRDVIEPAVAQAIKMYCLTDDVIEWMADRTVEYWEKHDNDLQIEALEQQLEENKKATSNMLKAIEMGIITEATRTRMVELETEQSRLSVQLNAAKEDVVKIDREQIISYLELLQQGDIHDRDFQMELFKNFLVAVYVYDDNRMKLVFSCMGDQNSVEIPLETGEDPPDGGLSPDAKMFVLTPDSSTKKALYFV

SEQ ID NO: 4422 - protein, 520 aa, Unknown
  Description of Unknown: Integrase B4423 sequence
  SM00857,G3DSA:1.10.10.2600,IPR036162,PS51737,G3DSA:3.40.50.1390, IPR006119,IPR038109,PF07508,SSF53041,IPR011109, PF00239,PTHR30461,PS51736,Coil,cd00338
MQYEEYLIYLRKSRSDASLEAMGVDVLERHEQILLDLAKRMNLSIGGIYREVVSGESISARPEMQKLLSEVESGRWEGVLVMEVERLARGDTVDQGIVQRAFQYSGTKIITPTKTYNPNNEFDEEYFEFGLFMSRREYKTIRRRMRAGVTAAVKEGKWPFNQAPYGWQRVKLEHGRGWVLAPDPDEAPVVKLIFRLYTGPDRIGITHICRYLDNRGIKPRNGDTWLECSVMGILRNVVNDQRVGIGRRKVVKQVQNGSVSKVRPHSDYDFTAPGLQPRLIDHDVFLEAQEYLARNSHKLPESYGIKNPLAGILVCSCCGKKMQRRPASRDGSSGRCPYDVLMCNTRGCPTIGSTLELVERELIQALSDWVAGYQLDPTLEVENKVPEKEQLLSSAVSNHDLLLKQNGNLYDLLEQGVYTTEIFLERSHELQKRIKESEAHIEILKKDLEYEKEKIANIENFIPSCKELLSCYWDLSAQDRNKALKMLLESVEYTKTKRNRKGDKDNPTFTLNLKPRIPRI

SEQ ID NO: 4423 - protein, 520 aa, Unknown
  Description of Unknown: Integrase B4424 sequence
  PTHR30461:SF3,cd00338,SM00857,G3DSA:1.10.10.2600,IPR036162, PF13408,PS51737,G3DSA:3.40.50.1390,IPR025827,IPR006119, IPR038109,PF07508,IPR011109,SSF53041, PTHR30461,Coil,PF00239
MLTNYLIYLRKSRADNPDMTVDEVLAKHETILQDFARSEFGEEIPERFIFREVVSGETIAARPIMQRLMQLLESSNVKGVLVVDPQRLSRGDLEDCGKIVNVFRYTGTQVLTPQRSYNLADEYDRKFFEMELTRGNDYLEYTKKILYRGRTASVKRGNYIGSVAPYGYKKITVGSGKDVQHTLEVIPEEAEALRLMCRLYLDDGMGFRAIAHQLDALGFRPRKAPQWSPAAIKDMLENPVYIGKIRWNWRKSEKKMVNGEITLSRPKNKDQHDYIYVDGLHEPIISEDVHRAILAKRGTNPCVRKGSELKNPFAGLLCCGSCGHAMSLKRSTYKRQPGRMTESFLCDNQSNCHTKSVLYAALYDRVVQTLEASISDFEILLKNDDDGFQRSNLAIIQTLESEIEKLHAKDMRQKDAFDDGIYSKDEYLSRNAKVQEQLEKAHQALQEARLATSPIIDYQEKIARFTDCLSALRDPDVSAAEKNKFLKTCIKKITYHNHMESKAGIGRYVENVFDLDIELL

SEQ ID NO: 4424 - protein, 520 aa, Unknown
  Description of Unknown: Integrase B4425 sequence
  PTHR30461:SF3,SM00857,G3DSA:1.10.10.2600,IPR036162,PF13408, IPR025827,G3DSA:3.40.50.1390,PS51737,IPR006119,IPR038109, PF07508,IPR011109,SSF53041,PTHR30461,cd00338, PF00239
MPTSKNTARKYAAGGSSDNSCGVEPLRAVIYARYSSSGQREESIEGQLRDCYDFAKKHGIIVIGEYIDKAMTGRVDRRPDFQRMMKDSEKGRFNCVLLWKMDRFARNRYDSAMYKYKLKKNGIRIFYAKETIPDGPEGIILESVMEGYAEYYSENLAQNVKRGNYDSALELKTLGKTCLGLKTGPDGRYMVDQAEAAIVRRIFEEYAEGERAKDIYERLNSEGYRTSRGGKFNKNSLRRILSNKKYIGVYEYEDIYVENGIPAIITDRDLFERVQKMLKINHDAPARGKAQNFLLTTKLFCGLCGSPMIGDGGTSHTGKAYAYYSCTKRKRGRSCKKESVPKDWIEDLVVGELVKIVHNDELIEQIADRVMEYQKREKDQSGLHALEIRQKENEKAISNMLAAIEAGIITPSTKTRLMELEADRADIEKGIAHELLAEPEFERDQIIYFLERFRSGDINDEAYRIMLVDTFLNSVYLYDDDHLVLVMNYSGENCKVDLKLVEGAVSGDGCKGSAFAPSSA

SEQ ID NO: 4425 - protein, 520 aa, Unknown
  Description of Unknown: Integrase B4426 sequence
  PTHR30461:SF3,cd00338,SM00857,G3DSA:1.10.10.2600,IPR036162, PF13408,IPR025827,G3DSA:3.40.50.1390,PS51737,IPR006119, IPR038109,PF07508,SSF53041,IPR011109,PTHR30461, Coil,PF00239
MLTNYLIYLRKSRADNPDMTVDEVLAKHETILQDFARSEFGEEIPERFIFREVVSGETIAARPIMQRLMQLLESSNVKGVLVVDPQRLSRGDLEDCGKIVNVFRYTGTQVLTPQRSYNLADEYDRKFFELELTRGNDYLEYTKKILYRGRTASVKRGNYIGSVAPYGYKKITVGSGKDVQHTLEVIPEEAEALRLMCRLYLDEGMGFQAIAHQLDALGFRPRKAPQWSPAAIKGMIENPVYIGKIRWNWRKSEKKMVNGEIILSRPKNKDPHDYIYVDGLHEPIISEDVHRAILAKRGTNPCVRKGAELKNPFAGLLCCGRCGHAMSLKRSTYKRQPGRMTESFLCDNQSNCHTKSVLYAALYDRVVQTLEASISDFEILLKNDDDGFQRSNLAIIQTLESEIEKLHAKDMRQKDAFDDGIYSKDEYLSRNAKVQEQLEKAHQALQEARLATSPIVDYREKIARFTDCLAALRDPDVSAAEKNKFLKTCIKKITYHNHMESKAGIGRYVENVFDLDIELL

SEQ ID NO: 4426 - protein, 520 aa, Unknown
  Description of Unknown: Integrase B4427 sequence
  PTHR30461:SF3,cd00338,SM00857,G3DSA:1.10.10.2600,IPR036162, PF13408,PS51737,G3DSA:3.40.50.1390,IPR025827,IPR006119, IPR038109,PF07508,IPR011109,SSF53041,PTHR30461, PS51736,Coil,PF00239
MAKKVRKIPATLNQFTSEPVAVRRKKKVAGYARVSTDREEQATSYEAQMTYYKTYIEGHEDWEFVGMYSDEGITATNTKKRDGFNQMVEDALDGKIDLIITKSVSRFARNTVDSLTTIRKLKEKGIEVYFEKENIWTLDAKGELMITIMSSLAQEESRSISENTTWGKRKQFADGKGSVAYSWFLGYDKDFKINEEQAATVRLIYRLFISGLSLYAITKELESRGIKSPSGKDRWHISTVKSILTNEKYRGDALLQKQYTTDFLQKKRKTNNGEIPQYYVEEHHEAIIPPAQFDFVQAELARREQNGRYSGVSIFSNKIKCGCCGGWYGSKVWHSTDKYRKVIYRCNRKYGKDTPPCNTPHLTEEEIKQLFLKALNALVDAKEETIENLQGLIETVCQTESLDAEQERLEQELRIIAENLANLIQKNASVALNQTEQAEQEEKLRNLYGEKHSRFQELEALIQEKNDTKEILTNFITKLEDLTGEQTEFREELWGGLVDYIRIDEKSSTVVFRGGIEITI

SEQ ID NO: 4427 - protein, 520 aa, Unknown
  Description of Unknown: Integrase B4428 sequence
  PTHR30461:SF3,cd00338,SM00857,G3DSA:1.10.10.2600,IPR036162, PF13408,PS51737,IPR025827,G3DSA:3.40.50.1390,IPR006119, IPR038109,PF07508,IPR011109,SSF53041,PTHR30461, PS51736,Coil,PF00239
MAPKKKQASADAGAYNRAVIYARYSPGPNQREESIEGQIRECKEVAKKHGLMVIHEYADRRLTGTNDERPEFQRMLRDADRGLFDVVITWKNDRFARNRYDSAIYKQRLKRNGVKIIYAKEHIPDGPEGIILESLLEGMAEYYSANLSQNIRRGIRENALEGKHFGGTVPLGYKLDHEKRYILDPEKAPLVREIFERYIAGESIVDMCDDLNRRGYTTAGGKKFVRSSLHRMLANEKYIGVMRYEDIVLKDATPRIITDEQFAAAAKRSERNKISKRAPIYAPVEFLLTGKVYCGHCGQPMGGTGGTGRHGSRFYYYQCNGRKYKKGSCNKKPIKKDILEKSVCDCVVNNIINNDTVINSIIDRCMEIQLQEVDTSPADGLRRELADAEKSLANIMRAIEAGIITASTKARLVELEERCASLRQGIAAAEIVPPKLSRDQMLFLFEKYRGRDVGDTEYMRDVIDTFVDKIYVYDDKIVITFNFSDDNEKEITIKDVEAATSAAPAHGEGVLLLPHHLHQN

SEQ ID NO: 4428 - protein, 520 aa, Unknown
  Description of Unknown: Integrase B4429 sequence
  SM00857,G3DSA:1.10.10.2600,IPR036162,PF13408,PS51737, IPR025827,G3DSA:3.40.50.1390,IPR006119,IPR038109,IPR011109, SSF53041,PF00239,PTHR30461,PS51736,Coil, cd00338
MQSVPCDNPRPGRRVASYARFSSHNQRSESIEIQEDNNLAYCAINDLDVVAMYADEAKTGRTTSRADFQRMVADAKAGLFDYVVIYKVARIMRNRDEMALLRITLRKYGVEILYSGEDIGKGSDGILQLGLKEVLAEWESAQLGERIVDGIQKNAEKCMANGNAMYGWDIVNGYYEVNELEAAVLRRAKSMLSNGKTVAEIVRALDGHKTKRGGPITHNILTKMLKRKQNAGVYSYAGHEKEGGMPALWTMEEQRMIWKMLGDETRPRRKALSADFLLTGKLWCGKCGTPMTGTSGTGKSGATYYYYKDKKGCGRQVRKDVIEDNVADAVRAALSDEATREKIADLFCEYEEGEDATLQSDVIAAELKEIRAAYANILKAIEQGVVPPGAKERIAELQGQEATLNEEMRIAEAIEAVALDRDRVLFWLEQIAAAPDAKTLIDVFVAKVVLMGDDDLHIVMHFDDGEGDEPPASAVLDRGGGVLPDCTRLHHGNISRTPWFGYYVAWRTVVIVTKYRKTPC

SEQ ID NO: 4429 - protein, 520 aa, Unknown
  Description of Unknown: Integrase B4430 sequence
  PTHR30461:SF3,cd00338,SM00857,G3DSA:1.10.10.2600,IPR036162, PF13408,PS51737,IPR025827,G3DSA:3.40.50.1390,IPR006119, IPR038109,PF07508,IPR011109,SSF53041,PTHR30461, PS51736,Coil,PF00239
MARKKNIAAGLDAVIYARYSSHNQREVSIEQQIAECTKHAAALGLRIVGTYEDRAISGKTDNRPRFQQMMRDAEKGKFQAVVAWKSNRIGRNMLQAMVNEAKLDDYGVKVFYAEEDFDDTAAGRFALRNMMNVNQFYSENMAEDITRGLYDNANKCMANGRQPLGYKRGADGKVMLDEPAAAVVREIFTRVAAGDLFVDIARDLNAKGIKTSKGAEWNKGSFQSICQNERYKGIYIYGDVRIVDGIPRIVSDELWYRVQEAMRMKKNPVGTRHRVGAEDYLLTGKLRCGHCGSYMTGVSGTSRNGELHYYYTCQKRRTEHACNKKNVRRDVIEPAIAQAIKMYCLTDDVIEWMADQTVQYWEKHDNDLQIEALEQQLAENKKATSNMLKAIEMGIITEATRSRMVELETENSKLTAQLSAAKRDVVKINRDDLIDELHILRSKDIHDREVQAELFKDFLVAAYIYDDNRLKLVFSFMGKDNSVEIPLETGEDPPDGEDSPDAKMFVLTPDCSTKKALYFV

SEQ ID NO: 4430 - protein, 520 aa, Unknown
  Description of Unknown: Integrase B4431 sequence
  PTHR30461:SF3,SM00857,G3DSA:1.10.10.2600,IPR036162,PS51737, G3DSA:3.40.50.1390,IPR006119,IPR038109,PF07508,SSF53041, IPR011109,PTHR30461,Coil,PS51736,cd00338, PF00239
MLEKNIIIYLRKSRSDDPGMSVEDVLAKHELQLQEYAVSEYGEQIPEDHIFREVVSGETIADRPVMKQVMRLLEAGNITAVLVIEPQRLSRGDLEDCGRIINIFRYTHTLVATPPKTYDLTNEYDRKFFEMELMRGNDYLEYTKKILNRGRIASVKKGNFIGSVAAYGYKKVKIGTGKDACHTLEIIPEQADAVKLMFKLYLEGNGFTNIAKTLDELKIKPLRSETWSPAAISDMLENPVYVGKIRWNYFKTVKKIEDGQIVKSRPINQDPSDWFLVQGKHPAIIDQATFDAVQERRGRTPKIKRFNELKNPFAGLLYCQCGKAMSLKIYNQKKGKCEPTKLMLCNKQSWCKTKSVKYDTFLERIVETLESTIADFEIKLKKDNGDAAQLHKNIVYNLETNLKKLKDKDIRQKDAYEDGIYTKEEYASRNAKLQEQISETTKALCQAKDSVPPTINYKEKIARFTDCLNALNDVSVPAAEKNMLLKACFEKIIYHNDMPSISGHGRWIENKFKLEIFLRL

SEQ ID NO: 4431 - protein, 520 aa, Unknown
  Description of Unknown: Integrase B4432 sequence
  PTHR30461:SF3,SM00857,G3DSA:1.10.10.2600,IPR036162,PF13408, IPR025827,G3DSA:3.40.50.1390,PS51737,IPR006119,IPR038109, PF07508,IPR011109,SSF53041,PTHR30461,PS51736, cd00338,PF00239
MNKLRAAAYCRVSTDRAEQSGSLASQRSFFDDYIRNSDSMTLVGVFYDEGTSGTTTLNRYGFNKMISLAVSGGIDIILTKEVSRFARNTVDTLNITRMLRAKGVGIIFINDNIDTRDSDGELRLSIMATIAQEESRKISERVKWGQQRKMEQGVVFGRSCLGYDVKDGKITVNADSAEIVKRIFTEYTVLLKGAESIADELNAEQIRTVNGGRWSGAFIRKVLRNVKYVGDLEQKKTCTPDFLTHKKRLNSSEHIYIRNHHEPIISRELWEQTQAEISRRKPTDTSRHSDRYVFSGKVYCGVCGSVMVSRVKTLKNGKIYHALRCSGRIGGKSCNNETLNVTALKACVKRIFTDIPIDKTAVINAVIKGLSRTDKPDIPALRRKIETLNAKKRRAVDLMLDGLITQQELIEQKSYYDSIIEKLSQEISSDRSIFETDKIRKNAEKFLDFTSDPIWLLVIRADYIHGTLTVYLNGIEKGFTTCFTATGRGDSYRVITGNTVRSQGIIPGTMQVPKNYPISK

SEQ ID NO: 4432 - protein, 520 aa, Unknown
  Description of Unknown: Integrase B4433 sequence
  SM00857,G3DSA:1.10.10.2600,IPR036162,PS51737,G3DSA:3.40.50.1390, IPR006119,IPR038109,PF07508,IPR011109,SSF53041, PF00239,PTHR30461,PS51736,Coil,cd00338
MQYEEYLIYLRKSRSDASLEAMGVDVLERHEQILLDLAKRMNLSIGGIYREVVSGESISARPEMQKLLSEVESGRWEGVLVMEVERLARGDTVDQGIVQRAFQYSGTKIITPTKTYNPNNEFDEEYFEFGLFMSRREYKTIRRRMRAGVTAAVKEGKWPFNQAPYGWQRVKLEHGRGWVLAPDPDEAPVVKLIFRLYTGPDRIGITHICRYLDNRGIKPRNGDTWLECSVMGILRNVVNDQRVGIGRRKVIKQVQNGSVSKVRPHSDYDFTAPGLQPRLIDHDVFLEAQEYLAKNSHKLPESYGIKNPLAGILVCSCCGKKMQRRPASRDGSSGRCPYDVLMCNTRGCPTIGSTLELVERELIQALSDWVAGYQLDPTLEVENKVPEKEQLLSSAVSNHDLLLKQNGNLYDLLEQGVYTTEIFLERSHELQKRIKESEAHIEILKKDLEYEKEKIANIENFIPSCKELLSCYWDLSAQDRNKALKMLLESVEYTKTKRNRKGDKDNPTFTLNLKPRIPRI

SEQ ID NO: 4433 - protein, 520 aa, Unknown
  Description of Unknown: Integrase B4434 sequence
  PTHR30461:SF3,cd00338,SM00857,G3DSA:1.10.10.2600,IPR036162, PF13408,PS51737,IPR025827,G3DSA:3.40.50.1390,IPR006119, IPR038109,PF07508,IPR011109,SSF53041, PTHR30461,PS51736,Coil,PF00239
MPRKKAPAAEAPRLVAYYRYSGGSRQTEQSIEGQRRDCEAYARAHGMTILREYVDRHISGKTDDRPAFQQLVADSAAHTFDAVICWKTDRLARNRYDSAVYKKKLRDNGVEILYAAESNISGAEGIIIEGLMEALAEYYSAELAEKARRGMRESALKGKALGSSRPLGLTVDADKHYIIEPTGAEAVRYIFEQYAAGLSSSSIVERLNVMGLRTSHGGPFNKSSINRIIQNEMYRGIYVSKKFDVRIEGAIPAIIDNDLWKRAQNMFERNRQSRTPHASRADYILSGKLYCGECGCLMKGVCGRSSGNGQMYHYYACPGRSIGRACTRKNIPQDELEAMVVNSVADLLLEPDLLEQIADAIVELQQAEAARPDPEKQALEKSLSDVRNKIQNILSAIENGTSSAALSARLADLEQQESTLSYQLSSLTAKKPLTFTRDQILFLLQQFRVSPSERTKAYCRRLVDTFVDHIELTNTELILYFNISDETIDKNKKAPRSNPSKESSTEKRLVRVARIELTAS

SEQ ID NO: 4434 - protein, 520 aa, Unknown
  Description of Unknown: Integrase B4435 sequence
  PTHR30461:SF3,cd00338,SM00857,G3DSA:1.10.10.2600,IPR036162, PF13408,IPR025827,G3DSA:3.40.50.1390,PS51737,IPR006119, IPR038109,PF07508,SSF53041,IPR011109,PTHR30461, Coil,PF00239
MKRVYCLYRVSTKGQVDKDDIPMQKTSCREFAERNGWTILKEFQEKGVSGFKVSASDRDAIQDLKAAAEKKEFDVLLVFMFDRIGRIDDETPFVVEWFIKHGIEVWSVNEGEQRLDNHVDKLMNYIRFWQANGESQKTSARVKTRLNQMTLDGKFTGGVAPFGYKLIKSGEINKKGKELMDIVIDDDEAPIVKKIFEMTVKEGYGSYRMADYLNSHGIRTHNNSKFQCNTVNRILKNRLYCGYLVSGGIESPYIKRLHIIDENIFDRAQFILRQRSSKNEEKQQIARTTKGSTLLSGNIYCAHCGQKMVSTSYIDRYDRADGSQSRVRRQRYICTNKAMKRGACDGQSAYVAHKIDGAVLATLKDYLAKIKSTPKDIALEKRYKSEISEYRRKQTKLEKEIEKLKRQVVELSAEIGRSLLGESRFTPDILSASIDNTNDLLHKKEFELSDIKFKLANQQNAMGKLDFYYSQFRTWADEFDNSTMEQKKMIACQLIREVKVSRGYELEIIFDLNYEQFLSL

SEQ ID NO: 4435 - protein, 520 aa, Unknown
  Description of Unknown: Integrase B4436 sequence
  PTHR30461:SF3,IPR036162,PS51737,IPR011109,PTHR30461, PF00239,G3DSA:1.10.10.2600,IPR006119,SSF53041,cd00338, SM00857,IPR025827,IPR038109,mobidb-lite,PS51736, PF13408,G3DSA:3.40.50.1390,PF07508,Coil
MAKRMPAAASDCDGMIGVIYARYSSHSQREESIEDQLRECHEFAARNNIKIIAEYTDSALTGRTDSRPDFQKMIRDSARGKFQVVVTYKVDRFARDRYDSAIYKAKLRKNGVRVLYAKETIPDGPEGIILESVLEGYAEYYSAALSQNILRGLEGNAMKCKTNGVQVLGYYTGEDGCYEIDPDYASVVLSIFQKYDAGVPQKEIIDDLNARGFRTTRGFAFNKNSVTRILRNRKYIGEYSWGDVTVSGGMPQIVPLPLFDSVQRKLDRGSRAPAHKWKVADYILTSKLFCGHCGELMVGRAGTGKSGKKYDYYACVNRTRRHGCDKKPVKKEWIEDIVVKYTKEVVLAEDMIEQIADGVMDFLEREKKSNGELDALEASLKNVESSIRNMMQAIEQGIITKSTKQRLMELEEQRDQISAAIAREKIATPDIERDQIVYFLEKFKEGSLDDPDYRTKLVEAFVSSVYLWDDGRIVINYNYTGENNQLTLRQIEQELVDMDGAEGSPLDSSAPLKLNQSNSV

SEQ ID NO: 4436 - protein, 520 aa, Unknown
  Description of Unknown: Integrase B4437 sequence
  PTHR30461:SF3,cd00338,SM00857,G3DSA:1.10.10.2600,IPR036162, PF13408,IPR025827,G3DSA:3.40.50.1390,PS51737,IPR006119, IPR038109,PF07508,SSF53041,IPR011109,PTHR30461, PS51736,Coil,PF00239
MNVVIYARFSSHNQQEQSIEGQIRYCTEYAKKNDMTIINSYIDRAISGTSDNRPEFLQMIKDSNNHQFNVVLVWKLDRFARNRYDSAIYKNALKKNNVKVVSVTEYLGEGSESVLLEAMLEAMAETYSRQLSENVRRGMRESALKCQVVGGSVPLGFDTVDKKYVINEKEAEIVRFIFDEYVSSTSKKEIVNKLNAKGWRTKNGSTFVFNSLNKILSNRKYIGEYKYEDIVIEHGIPAIIDERTFNLAQKQLSKNKQNRGTKSAKHEYLLATKIFCGYCGGSMIGETATGKGGGKFGYYVCRNRKKHINDCKKRREKQKELETFIVERTLYMYKNKDFVNEVAQKVVDLYNKECGQNHLKTLELNKKELEKKLEELSDGLLKTTNARVLKKFNEQINVIDNQLAELEIEIAREKAIANATMRCSDVIDFISDIMNGDINDKQFQKKIIDTFINAIYVFDDKFIVYYNGSNTSDKVTFDDLLHDLKNKGVEGSTFNTLTPPNKYWMNTYFFSGGFAVRCVL

SEQ ID NO: 4437 - protein, 520 aa, Unknown
  Description of Unknown: Integrase B4438 sequence
  cd00338,SM00857,G3DSA:1.10.10.2600,IPR036162,PF13408, IPR025827,G3DSA:3.40.50.1390,PS51737,IPR006119,IPR038109, PF07508,SSF53041,IPR011109,PTHR30461,PS51736, Coil,PF00239
MKTAVIYARFSSDRQTEQSIEGQVRVCNDYAERNDILIVSQYIDRATTGTNDNREAFQKMMKDSDKKAWDYVLVYKLDRFSRNKFEMAIHRKHLKDNGIKILSAMENIPDSPEGILLESLLEGMNQYYSEELAQKTRRGQRETRLKGLHCAGRLNYGYYTKNKKVFIHEEESPIVKEIFERYAAGERGNEIAISFAERGILYRGKPFSAANIYVILHGEKYTGRYELHGEVYDNIYPRIIEPALYEKCKQKIDANRYGNHIPDYSYLLRRRVYCGECGTRMTSYSGTSKSGRVSKYYKCWNSIGKKNCKAKFIKKDMLDNIVVKTLQETLTGKNLSVIVDEIYRQHNAKLMGENTVKLLEKELTQINKSISNIMRAIEQGIITDTTKERLQELEKSRQELQEKLIFERMQEQTVLDKETIAEYLQEGIKHEPEMMIELLVEKVFVHSDHIEIILHYVDEPIKPKPRIDGKEESLEGNDLRGSLIFTAMTWIDEYSFQGLKKKDLEPKFKGTRNTLVYIEI

SEQ ID NO: 4438 - protein, 520 aa, Unknown
  Description of Unknown: Integrase B4439 sequence
  SM00857,G3DSA:1.10.10.2600,IPR036162,PF13408,IPR025827, G3DSA:3.40.50.1390,PS51737,IPR006119,IPR038109,PF07508, IPR011109,SSF53041,PTHR30461,Coil,PS51736, cd00338,PF00239
MAKKKKPAGGNAIIYARYSSHNQRDVSIEQQIEACRKHAAELGLTITDTYEDRAISGRTDNRPAFQRMMHDAENGRFSYVLAWKSNRMGRNMMQAMVNESRLMDCGVKVYYAEEDFDDSAAGRFALRSMMNVNQFYSDNLAEDVRRGLMDNANKCMANGRQPLGYKRGEDGKVVVDEPAAAIVREVYARVASGELFTDIARDLNRRGIKTADKGEWNKNSFHRLCSNEKYRGIYIYGDVRIEGGIPSIIDDTLWYKVQEALRVKKLKRNGRHRPGEDDYLLTGKLRCGKCGGYMIGMSGRSKTGDIHYYYACQNRRVGHTCDKKNIRRDIIEPAVAQAIKEYCLTDDAIEWIADKTIEYWEEADRNLQLDSIEGDLAAVQSSISNVMKAIEMGVVTETTRDRLIELEKQRTDLKSKLALAKEEVIHVDRKKLISSLLLFRNGDIHDRQYQEDLFNTFLISVYVYDDDDNGHLKLIFNAFGENNTVDLPINFGETGDVPVFSDREKVRASSPSVNQNKAIR

SEQ ID NO: 4439 - protein, 520 aa, Unknown
  Description of Unknown: Integrase B4440 sequence
  PTHR30461:SF3,SM00857,G3DSA:1.10.10.2600,IPR036162,PF13408, PS51737,IPR025827,G3DSA:3.40.50.1390,IPR006119,IPR038109, PF07508,IPR011109,SSF53041,PF00239,PTHR30461, PS51736,Coil,cd00338
MKAVIYARYSSEKQQEISIEGQLRVCQEFAAREGYEVVDTYTDRALSASRDVERREDFQRMIRDSSRRGFEVVIVYKFSRFARNRYDSAVYKARLRQNGVKVVSACEPISANPEGALIEGIFESLDEFYSKSLAQDVTRGMHENAAKALSTGGTIPLGYVSVYKRLQIDPSTAPAVRLAFERYAEGMSLARIADELNAQGYRTRAGKAFNRSSFNALLSNRKYIGTYHYNGEVELVGQVPPIVDPGTFRRVQERLRKNTTAPGRTKATINYLLSTKLYCGACGKPMAGESGHNHSGTRYYYYACSGRKRRLGCKMPTLRKDDLERLVVEHARTLLSPDNIKALAHAAAAEYQRQAEDDSAVVSLRRQLDEVTRSLDNLLRMVEQGATSATLVGRINELEGRKASIAAELAEEQRGAPELTEVDILRWLSCFADGCLEDEDYMRNVIDMLVNKIVVQQNPNQKVSILVAYNLAGRGDEISGSGLVDVVHQARHNPNLCTNATESCMTFLLYHGCAIFQLAA

SEQ ID NO: 4440 - protein, 520 aa, Unknown
  Description of Unknown: Integrase B4441 sequence
  PTHR30461:SF3,SM00857,G3DSA:1.10.10.2600,IPR036162,PF13408, PS51737,IPR025827,G3DSA:3.40.50.1390,IPR006119,IPR038109, PF07508,IPR011109,SSF53041,PTHR30461,Coil, PS51736,cd00338,PF00239
MTNAVIYARYSPGPNQTDQSIEGQIHECTRFCEDNNLRIVGTYIDRKQTGRNDNRADFQKMLRDSSRHGFSTVVVWKIDRFGRNREEIAKNKAVLRMNGVRVLSAKEHIPDGPEGIILESVLEGLAEYYSANLSQNIKRGMRESALKCQFNGSGLSTGYTVDADHKYRIDPDGAAVVRTIFEMYDGGKKIADILRYLQQSNIKTMRGKEYTHYGISRILRNRVYIGEYHWHDIVVPGGVPQIIDNDLFDRVQKRLEANKHAPAARRGDVDFLLTSKLICGNCKSTMIGDCGTGKNGARWYYYTCRAKKTKSSKCRKKSVPKEALEREVTALTAAYVLRDDVIDYIADKVVEIQKSEHDDKSMLRYFESQLKDTNKAIANIMRAIEAGIITETTRSRLEELEDTKRDLETEIIKEKVARPTIEREQVIFFLEKFRGGNVDDKEYQRKIIDTFVHKVILYDDKITITYNYSTDSTKNAENTVESIESAASAAECKCSDKYSSSPPVTRILLLRCSCYFYTHA

SEQ ID NO: 4441 - protein, 520 aa, Unknown
  Description of Unknown: Integrase B4442 sequence
  cd03768,PTHR30461:SF3,SM00857,G3DSA:1.10.10.2600,IPR036162, PF13408,PS51737,G3DSA:3.40.50.1390,IPR025827,IPR006119, IPR038109,PF07508,IPR011109,SSF53041,PTHR30461, PS51736,Coil,PF00239
MNVAIYARKSKATKKGESISNQIELCKKYFLNTTNEDVNFLIYEDEGWSGGNINRPQFTKMINDAKLNRFSTLICYRLDRIARNVADFSSTYKILEENNIAFISITEQFDTSTIMGRAMINISATFAQIERETIAERIKDNMLELSRTGRWLGGISPLGFKSVQITENNKKLYKLEVVNDELEIVKLIFNLYPQYKSTVPVARYLVSNHIKGKNGGDFSKNTVLQILKNPVYCCSDTEAIKYFKGKDSTLNCIDNKELGLMVYNKKKSGKKENPIDEWVVATGKHQGIIPGAEWVNCQKILEEISRKASPRKATGNKFLLSGMLKCARCGSSMCSWSRTSRGIYYRSYRCELKNRAATRCDSKMVNADDLESFVIELCKNINLEEIINIKKTKNNNSTLKRELTSLNKTLVENDKLLQGLVKKLALIDDIDILTIIQAEIKKIKSENENINKRINEINLSMFDSEDEYKNQQILLESHKLFKDTIDLVKDVEAKRNLIMSFIEYFTYDSQANEIGYKLRL

SEQ ID NO: 4442 - protein, 520 aa, Unknown
  Description of Unknown: Integrase B4443 sequence
  PTHR30461:SF3,SM00857,G3DSA:1.10.10.2600,IPR036162,PS51737, G3DSA:3.40.50.1390,IPR006119,IPR038109,PF07508,IPR011109, SSF53041,PTHR30461,Coil,PS51736,cd00338, PF00239
MLEKNIIIYLRKSRSDDPGMSVEDVLAKHELQLQEYAVSEYGEQIPEDHIFREVVSGETIADRPVMKQVMRLLEAGNITAVLVIEPQRLSRGDLEDCGRIINIFRYTHTLVATPPKTYDLTNEYDRKFFEMELMRGNDYLEYTKKILNRGRIASVKKGNFIGSVAAYGYKKVKIGTGKDACHTLEIIPEQADAVKLMFKLYLEGNGFTNIAKTLDELKIKPLRSETWSPAAISDMLENPVYVGKIRWNYFKTVKKIEDGQIVKSRPINQDPSDWFLVQGKHPAIIDQATFDAAQERRGRTPKIKRFNELKNPFAGLLYCQCGKAMSLKIYNQKKGKCEPTKLMLCNKQSWCKTKSVKYDTFLERIVETLESTIANFEIKLKKDNGDAAQLHKNIVYNLETNLKKLKDKDIRQKDAYEDGIYTKEEYASRNAKLQEQISETTKALCQAKDSVPPTINYKEKIARFTDCLNALNDVSVPAAEKNMLLKACFEKIIYHNDMPSISGHGRWIENKFKLEIFLRL

SEQ ID NO: 4443 - protein, 520 aa, Unknown
  Description of Unknown: Integrase B4444 sequence
  PTHR30461:SF3,IPR036162,PS51737,IPR011109,PTHR30461, PF00239,G3DSA:1.10.10.2600,IPR006119,SSF53041,cd00338, SM00857,IPR025827,IPR038109,PS51736,mobidb-lite, PF13408,G3DSA:3.40.50.1390,PF07508,Coil
MAKRIPAAASDCDGMIGVIYARYSSHSQREESIEDQLRECHEFAARNNIKIIAEYTDSALTGRTDSRPDFQKMIRDSARGKFQVVVTYKVDRFARDRYDSAIYKAKLRKNGVRVLYAKETIPDGPEGIILESVLEGYAEYYSAALSQNILRGLEGNAMKCKTNGVQVLGYYTGEDGCYEIDPDYASVVLSIFQKYDAGVPQKEIIDDLNARGFRTTRGFAFNKNSVTRILRNRKYIGEYSWGDVTVSGGMPQIVPLPLFDSVQRKLDRGSRAPAHKWKVADYILTSKLFCGHCGELMVGRAGTGKSGKKYDYYACVNRTRRHGCDKKPVKKEWIEDIVVKYTKEVVLAEDMIEQIADGVMDFLEREKKSNGELDALEASLKNVESSIRNMMQAIEQGIITKSTKQRLMELEEQRDQISAAIAREKIATPDIERDQIVYFLEKFKEGSLDDPDYRTKLVEAFVSSVYLWDDGRIVINYNYTGENNQLTLRQIEQELVDMGGAEGSPLDSSAPLKLNQSNSV

SEQ ID NO: 4444 - protein, 520 aa, Unknown
  Description of Unknown: Integrase B4445 sequence
  cd03768,PTHR30461:SF3,SM00857,G3DSA:1.10.10.2600,IPR036162, PF13408,PS51737,G3DSA:3.40.50.1390,IPR025827,IPR006119, IPR038109,PF07508,IPR011109,SSF53041,PTHR30461, PS51736,Coil,PF00239
MNVAIYARKSKATKKGESISNQIELCKKYFLNTTNEDVNFLIYEDEGWSGGNINRPQFTKMINDAKLNRFSTLICYRLDRIARNVADFSSTYKILEENNIAFISITEQFDTSTIMGRAMINISATFAQIERETIAERIKDNMLELSRTGRWLGGISPLGFKSVQITENNKKLYKLEVVNDELEIVKLIFNLYPQYKSTVPVARYLVSNHIKGKNGGDFSKNTVLQILKNPVYCCSDTEAIKYFKGKDSTLNCIDNKELGLMVYNKKKSGKKENPIDEWIVATGKHQGIIPGAEWVNCQKILEEISRKASPRKATGNKFLLSGMLKCARCGSSMCSWSRTSRGIYYRSYRCELKNRAATRCDSKMVNADDLESFVIELCKNINLEEIINIKKTKNNNSTLKRELTSLNKTLVENDKLLQGLVKKLALIDDIDILTIIQAEIKKIKSENENINKRINEINLSMFDSEDEYKNQQILLESHKLFKDTIDLVKDVEAKRNLIMSFIEYFTYDSQTNEIGYKLRL

SEQ ID NO: 4445 - protein, 520 aa, Unknown
  Description of Unknown: Integrase B4446 sequence
  PTHR30461:SF3,SM00857,G3DSA:1.10.10.2600,IPR036162,PF13408, IPR025827,G3DSA:3.40.50.1390,PS51737,IPR006119,IPR038109, PF07508,SSF53041,IPR011109,PTHR30461,PS51736, cd00338,PF00239
MKRITKIEENRALSIKKKTRVVAYCRVSTASDEQLISLDTQKAHYEDYIKSNAEWEFAGIFYDEGITGTKKECRDGLNSLVAACEKGLVNMIITKSISRFSRNTTDCLELVRKLISLNVTVIFEKENINTGSMESELMLSILSSLAESESVSISENSKWSIQKRFQNGTYIISYPPYGYENVGGEMIVVPEQAEIVKKIFEDTLAGKSTHAIAKELNDCGVTSKKGGKWTPGAINAIIRNEKFTGDVIFQKTYTDSQFSRHTNDGELNQYLCENHHEPIVSHEIFDKANEVLNQRGREKGNGERTERYQNRYGFSGRIKCGECGGVFKRRIHYKPSGSYIAWCCTHHIEDRHSCSMKYITDDGIKTAFLTMMNKLVFAHQSVLKPLLHSLQGFDDKDRLLQIQEYETKLEKNMEKRQVLTSLMAGGLLEPALFSKENNALILEEKHLQEEKKQMINSVSGDRTKIEALETLIKFASGSEMLTEYSDEIFLSYVEGITVLSRKEIVFELKCGLKLKERLVG

SEQ ID NO: 4446 - protein, 520 aa, Unknown
  Description of Unknown: Integrase B4447 sequence
  PTHR30461:SF3,SM00857,G3DSA:1.10.10.2600,IPR036162,PF13408, PS51737,IPR025827,G3DSA:3.40.50.1390,IPR006119,IPR038109, PF07508,IPR011109,SSF53041,PF00239,PTHR30461, PS51736,Coil,cd00338
MARKKNIAAGQDAVIYARYSSHNQREVSIEQQIAECTKYAAALGLRIVGTYEDRAISGKTDNRPRFQQMMRDAGKGKFQAVVAWKSNRIGRNMLQAMVNEAKLDDYGVKVFYAEEDFDDTAAGRFALRNMMNVNQFYSENMAEDITRGLYDNASKCMANGRQPLGYKRGEDGRVVLDDANAAVVREIFTRVAAGDLFVDIARDLNAQGIKTSKGANWNKGSFQSICQNERYRGIYIYGDVRVVDGIPRIVSDDLWYRVQEAMRMKKNPVGTRHRVGAEDYLLTGKLHCGHCGSYMTGVSGTSRNGELHYYYTCQKRRTEHACDKKNIRRDVIEPAVAQAIKMYCLTDDVIEWMADRTVEYWEKHDNDLQIEALEQQLEENKKATSNMLKAIEMGIITEATRTRMVELETEQSRLSVQLNAAKEDVVKIDREQIISYLELLQQGDIHDRDFQMELFKNFLVAVYVYDDNRMKLVFSCMGDQNSVEIPLETGEDPPDGGLSPDAKMFVLTPDSSTKKAPYFV

SEQ ID NO: 4447 - protein, 520 aa, Unknown
  Description of Unknown: Integrase B4448 sequence
  PTHR30461:SF3,SM00857,G3DSA:1.10.10.2600,IPR036162,PF13408, PS51737,G3DSA:3.40.50.1390,IPR025827,IPR006119,IPR038109, PF07508,IPR011109,SSF53041,PTHR30461,PS51736, cd00338,PF00239
MKKITKIGTNEPLAEKKKLKVAAYCRVSTASDEQLISLEAQKAHYDSYIRSNDEWEYVGLYYDEGITGTKKDIRAGLLSMIADCEDGKIEFIITKSISRFARNTTDCLEMVRKLTDLGISIFFEKENINTGSMESELMLSILSSLAESESVSISENSKWSVQKRFQNGTFIISYPPYGYENDNGTMVIVPEQAEIVKEIFAACLAGKGTHAIARELNDRGIKTKKNGKWSAGTVKAILTNEKYTGDVIFQKTYSDSSFNRHINYGERDRFLCENHHEPIISHEDFEKVRAVLDQRAMEKGNGTDTYRYQNRYCFSGKIKCGECGTTFKRRQHYKPSGNYVAWTCGKHLENKKECSMLYISDESIKLAFLTMMNKLTYGHQVILKPLLRTLRGMDDKDRLLRIQELDICIEGNTDRKQILTSLMATGVLEPAVFNKENAALVMEEQKLRAEKEKLVNFVGGDKTRIKELQKLMAFTTKGVMLTAFEDETFLAYVESITVESRTKIVFHLKCGLNLTERLVN

SEQ ID NO: 4448 - protein, 520 aa, Unknown
  Description of Unknown: Integrase B4449 sequence
  PTHR30461:SF3,SM00857,G3DSA:1.10.10.2600,IPR036162,PF13408, PS51737,G3DSA:3.40.50.1390,IPR025827,IPR006119,IPR038109, PF07508,SSF53041,IPR011109,PTHR30461,Coil, PS51736,cd00338,PF00239
MAVFAQAVRPDFNNDVADVVIYSRYSSIGQNDQSIDGQIDACMQYAAQRGFRVVGQYIDRAMSGTHADSRPEFQRLIRDGKKGIFKYVLVWKLDRFARNRYDSAIYKNELKKHGVKVLSVTEGIDAGSDSIILEAVLEAMAEEYSRQLSQNVRRGMRQNAEKQLTLGGNTPLGYRVEDKRLVVDKDEAEIVRFAFRSYADGMTKTEIAKECNRRGWRTRSGRPFTLSSFSVMLKNQTYIGTYTFKDEMAVEDAVPAIVDRATFDKVGTMLERNRRAPGRVKAKEDYQLQGKVFCGYCGSPMVGESGRGKCGNTYHYYACATRKKVHTCQKKNEKKGFLEWYIVEQITTSILTDQRIHEIAAGVVAEYNRSFDAGKVRELEKKIRAMDKEMDTLVDTLIRTTAAPAVAKINERIDLLAVQKEEAEVDLAKLKVASRITLSEDEIIAWLQQFVHGDPMDPDFRQRVIDIFVNSIYLYDDKVVMYFNIKDASQVSYIEMQENLKDLEGSDLNGCGVPKVLEIV

SEQ ID NO: 4449 - protein, 520 aa, Unknown
  Description of Unknown: Integrase B4450 sequence
  SM00857,IPR036162,G3DSA:3.40.50.1390,IPR006119,SSF53041, PTHR30461,Coil,PS51736,cd00338,PF00239
MAKRRAAIYARFSSHNQRSESIEIQVENSTRYCRENGLDVVRVYTDYAKTGRNTDRVEFQRMMDDARLGLFDFVVIYKVTRIMRNRDEMALARIMLRKAGVEILYAGEEIASGSSGVLQLGMLEVLAEWESAIDSERIRDGIQKNAQRCMANGRTLYGWDIVDGFYQVNEREAAVLRKMKNMLFSGSNIAEIVRAVANVRSRNGKPIIHDRARKLLMRPQNGGTYSYAGVVVEGGMPALWPKEEQDMIIAMLSKKRPRRRVDHEEEWPLTGKLWCDKCGKTLAGTSGTSKGGSVYSYYKCRHCGRTFRRDILEDAIVDMTISAVERPEVRKRIASGMAAYNAEIDDAPFESELLRKEIRRIEQAFERVWQAIEDGIAPPGGKERIAELTARKEALEVDYEIAKANEGIEPDMSDLMDWLDNMAQELTPQEILKMFVRAVEITEAEVRLFFAFDYYGDGFTPPKYKDEHPVEGCSSNPTMVELMRKTANSTSTATRAAIQLDTCIVRVSKNWFVVVGTCQK

SEQ ID NO: 4450 - protein, 520 aa, Unknown
  Description of Unknown: Integrase B4451 sequence
  PTHR30461:SF3,IPR036162,PS51737,IPR011109,PTHR30461, PF00239,G3DSA:1.10.10.2600,IPR006119,PS50157,SSF53041, IPR013087,cd00338,SM00857,IPR025827, IPR038109,PS51736,PF13408,G3DSA:3.40.50.1390,PF07508,Coil
MKNVTKINQVDFSVFKKTRVAAYCRVSTDSDEQELSLDTQKNHYESYIKANNEWEYAGVYYDDGVSGTKTAKRDGLLRLVEDCEKGLIDLVITKSISRFSRNTTDCLALVRKLLNYEVYVIFEKENINTGSMESELMLAVLASMAESESRSISENEKWSIKKRFQNGTYVISYPPYGYANVEGEMVIVPEQAEVVKEIFAGCLAGKSTHIIAKELNEKGVPTKKGAKWTGATINGILTNEKYIGDALFQKTITDAFFKRKRNYGEEEQYYCENHHEPIIDKDTFEKAKEAIRQRGLEKGNCSEDTAKYQNRYAMSGKIKCGECGRSFKRRYHYTSHGKSYNAWCCGGHIEDSSSCSMKFIRDDDLKRVFLTMMNKLRFGNDLVLKPLLIFITTSNSKKNIHSMEDIEKDMQSNEEQRKQLNTLLTRGYLERPVFAEAHNKLVMEYEQLSAKRDLLCRMDNSGYTMEQALSDLVSFLNGAEPFTEWDDSLFERFVEKVKVLSRREVEFELKFGLKLKERID

SEQ ID NO: 4451 - protein, 520 aa, Unknown
  Description of Unknown: Integrase B4452 sequence
  SM00857,G3DSA:1.10.10.2600,IPR036162,PF13408,PS51737, G3DSA:3.40.50.1390,IPR025827,IPR006119,IPR038109,PF07508, IPR011109,SSF53041,PTHR30461,Coil,PS51736, cd00338,PF00239
MLEEGQKLKCALYVRTSTTEQKDSLELQARYKNNNFDIDKIYSEEVSGRDILKRPEQIKLLNDCGIEVTSVQKQAVFITNDKKPLYDCIIVSNTSRWGRNVVQVKQIVEALHKKGVKLWFDDLGKFSDSKDLSLTLDMLFVLDENYSQTISHKVKSAMDKRKKEGYILANSRLIGYDRTEEGTLVKNKDSNMVKSIFEDYAYKNLAIRKIAEKYQLSTSTITTLLKNIKYAGFMAYGIKEHGWDFSKLEIVKSDKIEPIISEELFWKVQEVRRSRSRIAEGSRVTRNKIGVNNNTYSLSSKIVCTNCGKNFHRKDRGYWICGTHSKYPKKCTMPTVRENKILRYLKSPYGLKAIRNGLETTLEGELKKLQLESIEPIKNELAELKGKSSKLLDLYMDSLIDKTTFEKRNKLLKDGIEKLENELKIHSNKENYRVKLLELQKEAKSLLDEYEKILESSEPEKIFDRVSKIEVGKIKDVKKRKEVSYIKSVRFKDFKVLEDHQLFDELIREEDTIRVEKQTI

SEQ ID NO: 4452 - protein, 520 aa, Unknown
  Description of Unknown: Integrase B4453 sequence
  PTHR30461:SF3,SM00857,G3DSA:1.10.10.2600,IPR036162,PF13408, PS51737,G3DSA:3.40.50.1390,IPR025827,IPR006119,IPR038109, PF07508,IPR011109,SSF53041,PF00239,PTHR30461, PS51736,Coil,cd00338
MNAVIYARFSSHNQQEQSIEGQIRYCTEYAKKNDMTIINSYIDRAISGTSDNRPEFLQMIKDSNNHQFNVVLVWKLDRFARNRYDSAIYKNALKKNNVKVVSVTEYLGEGSESVLLEAMLEAMAETYSRQLSENVRRGMRESALKCQVVGGSVPLGFDTVDKKYVINEKEAEIVRFIFDEYVSGTSKKEIVNKLNAKGWRTKNGSTFVFNSLNKILSNRKYIGEYKYEDIVIEHGIPAIIDEQTFEQAQKQLAKNKQNRGTKSATHEYLLATKIFCGYCGGSMIGETATGKGGGKFGYYVCRNRKKHINDCKKRREKQKELEAFIVERTLYMYKNKDFVNEVAQKVVDLYNKECGQNHLKTLELNKKELEKKLEELSDGLLKTTNARVLKKFNEQINNLDNQLAELEIEIAREKAIANATMKRSDVIDFISDIMDGNINDKQFQKKIIDTFINAIYVFDDKFIVYYNGSSTSDKVTFDDLIHDLENNGVEGSTFNTLTPPNKYWMNTYFFSGGFAVRCVL

SEQ ID NO: 4453 - protein, 520 aa, Unknown
  Description of Unknown: Integrase B4454 sequence
  PTHR30461:SF3,SM00857,G3DSA:1.10.10.2600,IPR036162,PF13408, IPR025827,PS51737,G3DSA:3.40.50.1390,IPR006119,IPR038109, PF07508,SSF53041,IPR011109,PTHR30461,Coil, PS51736,cd00338,PF00239
MRKNKKEIKKAVIYARFSCDKQRDESIEDQLRVCTEYADSHGILIVDHYCDFAISGRTDHRPQFQNMIEDAAEGTFDAVLVYKTDRFARNRYDSAIYKKKLIDYGVKVISATEEIPDGGGGIIMESMYESLAELYSIQISQNVRRAAKGNALKSHSNGGHRLLGYKTNPVTRRYEICEEEAKIVREIFSKASAGKPLRSIIDYLHTAHGLEMSYCRLTGMLQNERYTGVYIYDGIKNDGGMPAIISRDTFDDVQRFFKIRYHNTNSFSRYPNQKYLFSRRAFCGKCGSSITGETTKKSNGKEYKYYACMGHKMHQTDCDMKRIKADIVERAAINALLVLITQPDIMHAIISKAEKYQDKKPQNNKAENLQQQLAETQHKKENILNALEEGVFSSSIKARLKDLETQELKLKSEIIKEDKKIKFTNISPNQFQFFLEKLKTGEVKSETFVNSLFYELISKVFMFPDRIVLVYKLTNEPQEEINSNDLKNAEFVEMQSESGFRQQKNSERISVRSCSSWLPE

SEQ ID NO: 4454 - protein, 520 aa, Unknown
  Description of Unknown: Integrase B4455 sequence
  PTHR30461:SF3,cd00338,SM00857,G3DSA:1.10.10.2600,IPR036162, PF13408,IPR025827,PS51737,G3DSA:3.40.50.1390,IPR006119, IPR038109,PF07508,IPR011109,SSF53041,PTHR30461, PS51736,Coil,PF00239
MCAKKKPAMLEPDMQDAVIYTRYSSHNQRDCSIEQQVADCEIFARQNNLRVVKVYADRHMSGTTDNRPQFQQMLKDAAHGHWAYVICWKIDRFARNRYDSATYKFRLKKAGVRVLYAKESIPDGPEGILLESVLEGSAEYYSAALAQNIRRGMKYNAEQCKVNSGSIPFGYCKGPDGRFAIHEANAEVVREIFRKAAAGMPFVDIANDLNSRGLKTSRGGRWNKGSFRLLMNEAYIGVYHFSDTRIEGGMPALIDHGTFWAANERLKANSSIRGRHQDGGDYLLTGKLKCAHCGSYMIGFSGTGKSGELHYYYGCQKRRRERACKKANVPREWIERVVVKAALDYVLRPDVMEWIADAVMEYQEREAASAQLAALTAELEENQKATDNVMKAIEAGIITSTTKQRLLDLEAKAQDLKRAIELEKLSHVRLERDQVLFWLDRFRGGSLQSQEFRRKVIDAFVSVVYLSDDHLRIAFNYSGGSNAEADFDLVMDAEAAAGELSKKFAQGHVTSTSKKSHLKT

SEQ ID NO: 4455 - protein, 519 aa, Unknown
  Description of Unknown: Integrase B4456 sequence
  PTHR30461:SF3,SM00857,G3DSA:1.10.10.2600,IPR036162,PF13408, PS51737,G3DSA:3.40.50.1390,IPR025827,IPR006119,IPR038109, PF07508,SSF53041,IPR011109,PTHR30461,Coil, PS51736,cd00338,PF00239
MADFEHVIIYLRKSRSDDPATTVEEVLFRHENILQEYAVREWGARIPEDRIYREVVSGETIKDRPVMQHVMKILETGLVSGVLVVEPQRLSRGDLQDCGHIINSLRYTNTAVITPPKTYDLSDEYDRKFFEMELTRGNDYLEYTKKILNRGRIASVKAGNFIGNSAPYGYRKICVGTGKEKYYTLEIVPEEAEAVRLMFDLYVNKDYGFRNIAHALDMAGYKPRRSAEWSPAAISCMIANETYIGRVVWNRRKTIKKWENDTIVRTRPRQSEYISVPGKHPAIISDELFYAAKAKRNRTPRIKRYVQLLNPLAGLLYCGTCGHAMSRKRTVDKKYGSVSVSFLCNNQSNCHTKSVMYDAVIDRVKETLRQSIEDFEVKVNNKDETDIAYHRAMIANLKSELKKLKEKDMRQKDAYEDGIYTKEEFVVRNAKLAEQISIAQMKLDDAESSTSQLVDYQERLVRFRECLEALDDDAISAADKNTLLKSCIDKIMYYNDSPSLPGIGRYVDNPFRLEIFLKL

SEQ ID NO: 4456 - protein, 519 aa, Unknown
  Description of Unknown: Integrase B4457 sequence
  SM00857,G3DSA:1.10.10.2600,IPR036162,PS51737,G3DSA:3.40.50.1390, IPR006119,IPR038109,PF07508,IPR011109,SSF53041, PF00239,PTHR30461,PS51736,Coil,cd00338
MNIGNQLGKLKKSDQFCIYLRKSRADAEAEKLGEGETLARHERILTELAVKLGLPIGKIYRELVSGETISARKEIQSMINDCYAGMWKGILVVEVTRLSRGNQGDAQTIMDCLRYSNNNNGILVVTPTKTYDIVRSPDDEEYMEFELFMSRREYKMIRKRMMRGKLQAVIEGNYMGSYRPYGYDILKTKTGRTLVPNQEEAPIVKNIFEWTVKEHLTPGKICKRLNTIGVPTYSGDPEWSVSSIKTILTNPTYTGKVRWNDRMQVKTMVDGKLVKSRPRSNHTNQYMLYDGKHEAIIDEITFHAAASHFHSDKTKANLKLMNPFAGILICAKCKKTMIYQGYNKRPNTPPRILHKSSQICNVKSAVLKDVMDAVAHALELYIDDFEMKIDNLPVVDENNILSQLEALQKELIKQEKKLPKLFDAWENGILTDDEFTRRKLINKERIESIKKQMDHLEDSVPTKDEYEEKIMLLSDALKSLLDPTLDADIKNTYLKSIISSIEYSRDNNTEFILDVFLKD

SEQ ID NO: 4457 - protein, 519 aa, Unknown
  Description of Unknown: Integrase B4458 sequence
  PTHR30461:SF3,cd00338,SM00857,G3DSA:1.10.10.2600,IPR036162, PF13408,IPR025827,G3DSA:3.40.50.1390,PS51737,IPR006119, IPR038109,PF07508,IPR011109,SSF53041, PTHR30461,PS51736,Coil,PF00239
MLRAALYARFSSENQREESILAQFRDSTEYCKKHNYAIVAKYADEAKSGTTTIGREQYKLMLKDAQKGKFDVVVFHKIDRNARNELDYYITKHKLEEAGVKYAYSRQDIDSTSPEGQMMESMLVGMAAYYSRNLSNEIKKGLRENAIQGKCTGGRPPYGFSVDADKKLIINEDEAPAVRMIFDLYAAGVHYGVIRKRLFNAGYRNRAGKEFTLASIYEILRNRKYVGDLYLGKTLFRKGKRNTHQVSDNVQYFENVIPAIVSREIFEEVQVKLDQNKRRSGAGNAKAIYALSGLIHCGQCGSAMVAHSTKNSRGIKNYYYRCPKGRLIGEEKCPQKFINRDDIENTVYQLIRKLFTAPDAHSQIKRIIAKNNMSVKVPDYIDQVKRLKKQESDASKRLDKLYDLYMTDRGDEFTSAKMAQIKEEILRLRTQIKEAENRQAIAQSTTFDIDKIIDTFQKQLKQKQSPEFIKTLFELAVKNVIVYPDKIKVVLLVTIPIEHTNMRLFMYSDYFSVRIRRIA

SEQ ID NO: 4458 - protein, 519 aa, Unknown
  Description of Unknown: Integrase B4459 sequence
  SM00857,G3DSA:1.10.10.2600,IPR036162,PF13408,IPR025827, G3DSA:3.40.50.1390,PS51737,IPR006119,IPR038109,PF07508, IPR011109,SSF53041,PF00239,PTHR30461,PS51736, Coil,cd00338
MKASNMNQIDIMYLRKSREDAELEKYGEGETLTRHYNILCELAKRNNIVVSDEYIFREVVSGESIDARPEIQKVLRLVESGIVRNVLVVEIERLARGDTSDQGRIAKTFKYSHTKIITPMKIYDPDNEYDNEYFEFGLFMSRREYLTINRRLNNGKYSSTKEGKFIGSAAPYGYDRLKVENGKGYTLVPNENAKYIKMIYEWVLQGNGAIHIAKMLQDIGAPTTTGANWSSATVRNILQNKTYCGYVSWQRRKTTKSLEDGITKKTRIRNDKAAEYFKGLHEPIIDEETWLKVQEMRERRALPSCNDNKNGLTNPLAGIVKCGYCGRTMQINTHKNKRIRMRCPNLQCACGSIYIDSVEIELISQLKDWLNGYSATVGKETRTTSRTNSVKDMIANLTSELDKISVQMNKACDMLELGVYDKDMFISRSQTLKNRQAEIKEKLSELKTELETINATDSQIQSLPKVQKILDNYFSYDTKTKNMLLKEILDHAVFTKEKGTSLVKDDSFDLEIFPILPRK

SEQ ID NO: 4459 - protein, 519 aa, Unknown
  Description of Unknown: Integrase B4460 sequence
  PTHR30461:SF3,SM00857,G3DSA:1.10.10.2600,IPR036162,PF13408, PS51737,G3DSA:3.40.50.1390,IPR025827,IPR006119,IPR038109, PF07508,IPR011109,SSF53041,PTHR30461,Coil, PS51736,cd00338,PF00239
MADFEHVIIYLRKSRSDDPATTVEEVLSRHENILQEYAVREWGARIPEDRIYREVVSGETIKDRPVMQHVMKILETGLVSGVLVVEPQRLSRGDLQDCGHIINSLRYTNTAVITPPKTYDLSDEYDRKFFEMELTRGNDYLEYTKKILNRGRIVSVKAGNFIGNSAPYGYRKICVGTGKEKYYTLEIVPEEAEAIRLMFDLYVNKDYGFRNIAHALDMAGYKPRRSVEWSPAAISCMIANETYIGRVVWNRRKTIKKWENDTIVRTRPRQSEYISVPGKHPAIISDELFYAAKAKRNRTPRIKRYVQLLNPLAGLLYCGTCGHAMSRKRTVDKKYGSVSVSFLCNNQSNCHTKSVMYDAVIDRVKETLRQSIEDFEVKVNNKDETDIAYHRAMIANLKSELRKLKEKDMRQKDAYEDGIYTKEEFVVRNAKLAEQISIAQLKLDEAESSTTQLVDYQERLVRFRECLEALDDDTISAADKNTLLKSCIDKIMYYNDSPSLPGIGRYVDNPFRLEIFLKL

SEQ ID NO: 4460 - protein, 519 aa, Unknown
  Description of Unknown: Integrase B4461 sequence
  PTHR30461:SF3,cd00338,SM00857,G3DSA:1.10.10.2600,IPR036162, PF13408,PS51737,G3DSA:3.40.50.1390,IPR025827,IPR006119, IPR038109,PF07508,IPR011109,SSF53041,PTHR30461, PS51736,Coil,PF00239
MAQRCVIYARYSSDRQREESIEGQIRVCEDFAQRNDLEVIQTYVDRALTARTDRRPAFQQMISDCKKRQFEYILVYKLNRFSRNRYDSAVYKHKIAQYGVKVLSAMERITDDPSGILLESLIEGIAEYYSAELAENVHRGMTENALEGKANGRAPLGYKKGPDGKLVIDERSAKAVRFIFQSVLEGRTLKKIAGDLNAMGYKNSFGRPFASSNFGNLLRNKKYIGIYHWGNEDVEGVVPPIIERAVFDKVQELIESRKHKSTRKRVENYLLTGRMTCGLCGAAYIGKSGTSHTGAPYAYYCCSNRVHRKGCKGKNYRQDKLEEWIAMETLKALNRPETIRQLAKQIIRIQEAAAGEPDPVVDNLEAELKDYKKRVANSIKAIEAGVISETISRNITEYEEKIKALEKELSRAKLKRQPFTLTQDHIEFFLTSLLAGDPADAKYRSQLIDTLIAGVVIYPDKIEVYYKYQKELPSLRNPLTISEEGSSNGKKLVGKVHLSANLEIRIGKGWFSIVYPIAA

SEQ ID NO: 4461 - protein, 519 aa, Unknown
  Description of Unknown: Integrase B4462 sequence
  PTHR30461:SF3,SM00857,G3DSA:1.10.10.2600,IPR036162,PF13408, PS51737,G3DSA:3.40.50.1390,IPR025827,IPR006119,IPR038109, PF07508,IPR011109,SSF53041,PTHR30461,Coil, PS51736,cd00338,PF00239
MADFEHVIIYLRKSRSDDPATTVEEVLSRHENILQEFAVREWGARIPEDRIYREVVSGETIKDRPVMQHVMKILETGLVSGVLVVEPQRLSRGDLQDCGHIINSLRYTNTAVITPPKTYDLSDEYDRKFFEMELTRGNDYLEYTKKILNRGRIASVKAGNFIGNSAPYGYRKICVGTGKEKYYTLEIVPEEAEAIRLMFDLYVNKDYGFRNIAHALDMAGYKPRRSAEWSPAAISCMIANETYIGRVVWNRRKTIKKWENDTIVRTRPRQSEYISVPGKHPAIISDELFYAAKAKRNRTPRIKRYVQLLNPLAGLLYCGTCGHAMSRKRTVDKKYGSVSVSFLCNNQSNCHTKSVMYDAVIDRVKETLRQSIEDFEVKVNNKDETDIAYHRAMIANLKSELRKLKEKDMRQKDAYEDGIYTKEEFVVRNAKLAEQISIAQLKLDEAESSTTQLVDYQERLVRFRECLEALDDDTISAADKNTLLKSCIDKIMYYNDSPSLPGIGRYVDNPFRLEIFLKL

SEQ ID NO: 4462 - protein, 519 aa, Unknown
  Description of Unknown: Integrase B4463 sequence
  PTHR30461:SF3,cd00338,SM00857,G3DSA:1.10.10.2600,IPR036162, PF13408,PS51737,IPR025827,G3DSA:3.40.50.1390,IPR006119, IPR038109,PF07508,SSF53041,IPR011109,PTHR30461, PS51736,Coil,PF00239
MNEKINAVIYARFSSHNQQEQSVDGQVRYCTQYAEVHNMRIIGTYVDRAMSGTNDNRPDFQKMIKDSENKQFQVVLVWKFDRFARNRYDSAFYRRALKNNGVTVTSATESVGEGSEAIILEAILDAMADAYSKQLAENVKRGMRESALKCQTIGGCTPLGYDVVNKMYVVNKEEAEIVRYIYREYVDGKGKKEIITELNNRGYKTKRGKKFTITSLSQLLKNKRYIGIYVYKDIEIKDGIPAIIDEELFYKVQKVALKNKRDASRKKAKVEYLLSGKLFCGHCGEAMLGESAVNHSGYRYYYYVCGSKKKRLRTCDKKRERKEGIEEYCVRQALGFFSDKKNLHLIAKKVVDLYNSEIDNGQVEILEENKIKLEKQLDELTNALVKTSNVRVLSKLNEQINAIDEQLSTIDIEIAREKSLATAKMSVDDVVGFVEGLIQGGDIKDDKFKKQIINVLINRIYLYDDKIVIYFNGSDNASTVDYTTVCKDLKKFEAEQKVRIRNAMACHRALIFISAHFLF

SEQ ID NO: 4463 - protein, 519 aa, Unknown
  Description of Unknown: Integrase B4464 sequence
  PTHR30461:SF3,cd00338,SM00857,G3DSA:1.10.10.2600,IPR036162, PF13408,IPR025827,G3DSA:3.40.50.1390,PS51737,IPR006119, IPR038109,PF07508,SSF53041,IPR011109,PTHR30461, PS51736,Coil,PF00239
MKKVTKIDKIQPAKNAENKLRVAAYCRVSTATDAQLESLEAQKNHYENYINSRDDWCFAGVYYDGGITGTKASKRPELMRLLADCKAKKIDFVITKSISRFSRNTMDCLKIVRTLLNLNIPVYFEKENINTGSMESELFLSVLSTMAEGESASISSNNRWSIKKRFGNGTYRLSSAPYGYKLESGGLQVVSEQADIVKRIFRELLSGKGMYSIAKELNAEQVPTQKGGRWTSTSVHNILTNEKYTGDCIFQKTYADSNFNRHTNNGELNRYLIQNHHEAIISHEDFNATAALIEQRAAEKGIESGNDKYQQRYAFSEKLICGECGNTFRRRIHKGKYNSYVAWVCNTHLSDTNRCSMLFVRDDALKLAFATMLNKLIFSYRLLLKPYLAAMQSNTADEALLRIQYLENQLDQNAEQRSTLHKLMAQGYIDQIIYTQESNELLLQARDFRSEIEALNNTVAGDTTKVYETERLINYCKRGEMLTDFNESLFELFVDHILIYSRQKIGFVLRCGLTFEEMI

SEQ ID NO: 4464 - protein, 519 aa, Unknown
  Description of Unknown: Integrase B4465 sequence
  SM00857,G3DSA:1.10.10.2600,IPR036162,PS51737,G3DSA:3.40.50.1390, IPR006119,IPR038109,PF07508,SSF53041,IPR011109, PTHR30461,PS51736,cd00338,PF00239
MSYCIYLRKSRADKELCSEEEVLKRHETTLLELAKNRSYNITKIFREVVSGETLAARPQMQQLLSEVENGLWEGVLVMEVERLARGNSVDQGIVSQAFKYSNTLIITPTKTYNPANEFDEEYFEFGLFMSRREYKTINRRLNAGRIAACKEGKYAGGNPPYGFDKEKLKGERGWKLVPVPEEVEIVKLIYKLYLSDEDGTGFSGIANRLNDSKAPTRSGVFWTSTQVKKILTNDVYIGKIHWQKVPEKKIVENGVLVKRRYINSNPLVFEGLHGAVIDEDIFNRVQEIVKSRKKPPNTPERPMQNPFAGVLVCDICGKPLKRRPPDKRRPGHSPSFDCTTPYCPTISSPVNIVENRILEGMKMWLEDYKLKENNNNIVATEYSYNTTRITNCKKELENIQKQLGKTYTLLEQGIYDNETFLERQIFLKNEMSNILSTITKLEEEDNATKARAEYNKTLIPELENLLEVYDTLPDAKSKNVLIKKIFHQIRYSKKTRGNRWAPDKVDDFELEFISKLPSK

SEQ ID NO: 4465 - protein, 519 aa, Unknown
  Description of Unknown: Integrase B4466 sequence
  PTHR30461:SF3,SM00857,G3DSA:1.10.10.2600,IPR036162, PF13408,IPR025827,G3DSA:3.40.50.1390,PS51737, IPR006119,IPR038109,PF07508,SSF53041, IPR011109,PF00239,PTHR30461,PS51736,Coil,cd00338
MYEDIKTACLYVRFSSHNQTEQSIEGQTRVCRDFCKRHNIKIVEIYADRATSASKDIEKRVQFLKMIKDSEKGLFDAVIVYKLDRFARSRYDSATYKYRLKRNGVQLISATENISNDPEGIILESVLEGMAEFYSAELSQKINRGMRESAYKHNSIGGAIPLGYKIEDKKLVIDPKTAPIVKEAFEKYADGETVAEICRQFNARGYKTSKGTAFGKSSFTKIFRNERYIGVYSFHDYRAEDAIPAIIDKDLWDRVQLRVGKIKNAPARNKAKVVYLLSGKIFCGHCGSKMNGNCNAGNYYYYQCYGKKNGNVDCKKKNIRKEFIERLVAQDALSLLTDEYIEQIATIACEKNQHEIELDSALPTIRDRIHQVDLSLNNLLKAIESGSAPDMLVKRMGELEKEKKDLQVQAKKESEDIVELDKAQVIYWLEQFRGGSIEDEEFCRMLIDLFVNSVTVWDEDDNTYKVTVAYNLTSLPTKTYRLNKGGTLSDFASNAPDREAHKDYIVVLHVVPFHGNFRS

SEQ ID NO: 4466 - protein, 519 aa, Unknown
  Description of Unknown: Integrase B4467 sequence
  PTHR30461:SF3,SM00857,G3DSA:1.10.10.2600,IPR036162,PF13408, IPR025827,PS51737,G3DSA:3.40.50.1390,IPR006119,IPR038109, PF07508,SSF53041,IPR011109,PF00239,PTHR30461, PS51736,Coil,cd00338
MNTNQIPVVSYSRFSSDMQHETSIEAQQDAINKYAAANGYTIIEDYVDRAKSATTTAKRDEFNRMIEDSKSGKFKFVIVHKFDRFARNRIDSTIAKAILEKSGVRVLSVLEPTSDTPEGELMEGMFELLAQYYSSNLGREVMKGFKVRAGKCLHNGGKPPIGYDVDPVTEKLVINESEAQTVKTIFQMYIDGHGYEDIINTLNKRGSRTKNGNEFGKNSLHDILRNKKYAGYYIYNRWDGKHNRHKEKSPEEVICIENGCPAIISEEMFNKAEKVMEQRKMSPGAKSAVKTYLLTGLIRCGECGNLMSGTQRKNGKGYMYRSYRCKHKNMVHHCSNKEIRADKIEEFVLLQLQKYIFDDKNITAIVDEVKKQLIQHNAYVVEELRENERALKRLQNRRQNIINAIADGLMQDDFKEVLAQLKNDEKILLERQQELTIRNPDAAFTEDDLRSMISEFSGYVLNRDIPECKKFIAQFVKQVTVYNTKIEVTLRVASILLYGADYTITKSIGRTFLPTPELQ

SEQ ID NO: 4467 - protein, 519 aa, Unknown
  Description of Unknown: Integrase B4468 sequence
  PTHR30461:SF3,SM00857,G3DSA:1.10.10.2600,IPR036162,PF13408, PS51737,G3DSA:3.40.50.1390,IPR025827,IPR006119,IPR038109, PF07508,SSF53041,IPR011109,PTHR30461,Coil, PS51736,cd00338,PF00239
MADFEHVIIYLRKSRSDDPATTVEEVLFKHENILQEFAVREWGARIPEDRIYREVVSGETIKDRPVMQHVMKILETGLVSGVLVVEPQRLSRGDLQDCGHIINSLRYTNTAVITPPKTYDLSDEYDRKFFEMELTRGNDYLEYTKKILNRGRIASVKAGNFIGNSAPYGYRKICVGTGKEKYYTLEIVPEEAEAVRLMFDLYVNKDYGFRSIAHALDMAGYKPRRSAEWSPAAISCMIANETYIGRVVWNRRKTIKKWENDTIVRTRPRQSEYISVPGKHPAIISDELFYAAKAKRNRTPRIKRYVQLLNPLAGLLYCGTCGHAMSRKRTVDKKYGSVSVSFLCNNQSNCHTKSVMYDAVIDRVKETLRQSIEDFEVKVNNKDETDIAYHRAMIANLKSELRKLKEKDMRQKDAYEDGIYTKEEFVVRNAKLAEQISIAQMKLDEAESSTTQLVDYQERLVRFRECLEALDDDTISAADKNTLLKSCIDKIMYYNDSPSLPGIGRYVDNPFRLEIFLKL

SEQ ID NO: 4468 - protein, 519 aa, Unknown
  Description of Unknown: Integrase B4469 sequence
  PTHR30461:SF3,IPR036162,PS51737,IPR011109,PTHR30461, PS00397,PF00239,G3DSA:1.10.10.2600,IPR006119,SSF53041, cd00338,SM00857,IPR025827,IPR038109,SSF161270, PS51736,IPR006118,PF13408,G3DSA:3.40.50.1390,PF07508,Coil
MRNVAIYVRVSTMHQAEQGYSIDSQLVDCRKKAHDLGAITINEYVDKGKSGAFLDRPELQRMLNDIKTEKESYDALIIYKLDRLSRDSMGLAYIIKILQQKNIKIISTDGAQYGANPQDVLTMQIMGSIAQFDNALRKERSIRGKIEKRKQGKLDKITKYGYIFNDEKQNLDIKEDEAIVIRKIFKWFTEDNLSAFRISKKLNTEKIPAPQPKINRKIINKDNIWFESTIRTMLKDETYAGIRHTMIYKFEKISLNNMKKTKRPPEEWISVPVPSIISRETWDKANNIMNRKSTNPRRTQRTWILQGLVYCEKCGQIMNIKQTPKIGKIKENEEKYNFYFKCRTNILNWFGSDKKCPNRQVPIYALEDSVWETLLNIFYSKETLEKYLKETQLKDNVYNLLDKLIEDRNKLSKNKNKIVEWFADGKIDQEIADNKINDLNNKINDLDKKISNLQSTNRSKKSFSINNLYDIFHKIKNPNREQKKEIIHSVVEKIFVERLDNKRSNAYTKPVLKIRIILR

SEQ ID NO: 4469 - protein, 519 aa, Unknown
  Description of Unknown: Integrase B4470 sequence
  PTHR30461:SF3,IPR036162,PS51737,IPR011109,PTHR30461, PS00397,PF00239,G3DSA:1.10.10.2600,IPR006119,SSF53041, cd00338,SM00857,IPR025827,IPR038109,SSF161270, PS51736,IPR006118,PF13408,G3DSA:3.40.50.1390,PF07508,Coil
MRNVAIYVRVSTMHQAEQGYSIDSQLVDCRKKAHDLGAITINEYVDKGKSGAFLDRPELQRMLNDIKTEKESYDALIIYKLDRLSRDSMGLAYIIKILQQKNIKIISTDGAQYGANPQDVLTMQIMGSIAQFDNALRKERSIRGKIEKRKQGKLDKITKYGYIFNDEKQNLDIKEDEAIVIRKIFKWFTEDNLSAFRISKKLNTEKIPAPQPKINRKIINKDNIWFESTIRTMLKDETYAGIRHTMIYKFEKISLNNMKKTKRPPEEWISVPVPSIISREMWDKANNIMNRKSTNPRRTQRTWILQGLVYCEKCGQIMNIKQTPKIGKIKENEEKYNFYFKCRTNILNWFGSDKKCPNRQVPIYTLEDSVWETLLNIFYSKETLEKYLKETQLKDNVYNLLDKLIEDRNKLSKNKNKIVEWFADGKIDQEIADNKINDLNNKINDLDKKISNLQSTNRSKKSFSINNLYDIFHKIKNPNREQKKEIIHSVVEKIFVERLDNKRSNAYTKPVLKIRIILR

SEQ ID NO: 4470 - protein, 519 aa, Unknown
  Description of Unknown: Integrase B4471 sequence
  PTHR30461:SF3,cd00338,SM00857,G3DSA:1.10.10.2600,IPR036162, PF13408,IPR025827,PS51737,G3DSA:3.40.50.1390,IPR006119, IPR038109,PF07508,IPR011109,SSF53041,PTHR30461, Coil,PF00239
MKRVYCLYRVSTVGQVDHDDIPLQRISCRQYAQQKGWTILRELYECGVSGYKVSSEARDAIQELKDEALLQRFDILLVFMFDRLGRRDDETPFVVEWFVKHGIAVWSVNEGEQRFDTHVDKLMNYIRYWQASGESEKTSIRVRLRQEQMIQDGHFRGGMIPYGYRLEYTGRANKKNQPVHDLVIDPFTSENVKLIFSLVSSQGYGANRIAMYLNERNILPRTANAHWHASSIRAILRNPIYIGIMRMGACCSERSFAQYRIISDEQYEAVQKIMLERSLSHTLTRSIPYRTDNAYLLTGLLRCGSCGSRLCGATMSSKGASTQCHRRYYRCYTSSVHRGVCNGQRCYAANRIERMVEQRVVDVLNEILSTPVGVLAEQMDALAYCDDQSALQAAQFEITAIEREVEKLEQQLVKSVIKNDRTLTDAINDAVVKKRQAYIEAEREYRKLADAIAQSAERRENMMLEIRNIRSWAVNYKLLKPEEKRMILPQMIERIVVLKGYGVEIVFRSVIKELCQMKV

SEQ ID NO: 4471 - protein, 519 aa, Unknown
  Description of Unknown: Integrase B4472 sequence
  PTHR30461:SF3,IPR036162,PS51737,IPR011109,PTHR30461, PS00397,PF00239,G3DSA:1.10.10.2600,IPR006119,SSF53041, cd00338,SM00857,IPR025827,IPR038109,SSF161270, PS51736,IPR006118,PF13408,G3DSA:3.40.50.1390,PF07508,Coil
MRNVAIYVRVSTMHQAEQGYSIDSQLVDCRKKAHDLGAITINEYVDKGKSGAFLDRPELQRMLNDIKTEKEYYDALIIYKLDRLSRDSMGLAYIIKILQQKNIKIISTDGAQYGTNPQDVLTMQIMGSIAQFDNALRKERSIRGKIEKRKQGKLDKITKYGYTFNDEKQNLDIKEDEAIVIRKIFKWFTEDNLSAFRISKKLNSEKIPAPQPKINRKIINKDNIWFESTIRTMLKDETYAGIRHTMIYKFEKISLNNMKKTKRPPEEWISVPVPSIISRETWDKANNIMNRKNTNPRRTQRTWILQGLVYCEKCGQIMNIKQTPKIGKIKENEEKYNFYFKCRTNILNWFGSDKKCPNRQVPIYALEDSVWETLLNIFYSKETLEKYLKETQVKDNVYTLLDKLIEDRNKLSKNKNKIVEWFADGKIDQEIADNKINDLNNKINDLDKKISNLQSTNRSKKSFSINNLYDIFHKIKNPNREQKKEIIHSVVEKIFVERLDNKRSNAYTKPVLKIRIILR

SEQ ID NO: 4472 - protein, 519 aa, Unknown
  Description of Unknown: Integrase B4473 sequence
  PTHR30461:SF3,SM00857,G3DSA:1.10.10.2600,IPR036162,PF13408, IPR025827,G3DSA:3.40.50.1390,PS51737,IPR006119,IPR038109, PF07508,SSF53041,IPR011109,PTHR30461,Coil, PS51736,cd00338,PF00239
MADFEHVIIYLRKSRSDDPATTVEEVLSRHENILQEYAVREWGARIPEGRIYREVVSGETIKDRPVMQHVMKILETGLVSGVLVVEPQRLSRGDLQDCGHIINSLRYTNTAVITPPKTYDLSDEYDRKFFEMELTRGNDYLEYTKKILNRGRIASVKAGNFIGNSAPYGYRKICVGTGKEKYYTLEIVPEEAEAVRLMFDLYVNKDYGFRSIAHALDMAGYKPRRSAEWSPAAISCMIANETYIGRVVWNRRKTIKKWENDTIVRTRPRQSEYISVPGKHPAIISDELFYAAKAKRNRTPRIKRYVQLLNPLAGLLYCGTCGHAMSRKRTVDKKYGSVSVSFLCNNQSNCHTKSVMYDAVIDRVKETLRQSIEDFEVKVNNKDETDIAYHRAMIANLKSELRKLKEKDMRQKDAYEDGIYTKEEFVVRNAKLAEQISIAQLKLDEAESSTTQLVDYQERLVRFRECLEALDDDTISAADKNTLLKSCIDKIMYYNDSPSLPGIGRYVDNPFRLEIFLKL

SEQ ID NO: 4473 - protein, 519 aa, Unknown
  Description of Unknown: Integrase B4474 sequence
  PTHR30461:SF3,IPR036162,PS51737,IPR011109,PTHR30461, PS00397,PF00239,G3DSA:1.10.10.2600,IPR006119,SSF53041, cd00338,SM00857,IPR025827,IPR038109,SSF161270, PS51736,IPR006118,PF13408,G3DSA:3.40.50.1390,PF07508,Coil
MRNVAIYVRVSTMHQAEQGYSIDSQLVDCRKKAHDLGAITINEYVDKGKSGAFLDRPELQRMLNDIKTEKEYYDALIIYKLDRLSRDSMGLAYIIKILQQKNIKIISTDGAQYGTNPQDVLTMQIMGSIAQFDNALRKERSIRGKIEKRKQGKLDKITKYGYTFNDEKQNLDIKEDEAIVIRKIFKWFTEDNLSAFRISKKLNSEKIPAPQPKINRKIINKDNIWFESTIRTMLKDETYAGIRHTMIYKFEKISLNNMKKTKRPPEEWISVPVPSIISRETWDKANNIMNRKSTNPRRTQRTWILQGLVFCEKCGQIMNIKQTPKIGKIKENEEKYNFYFKCRTNILNWFGSDKKCPNRQVPIYALEDSVWETLLNIFYSKETLEKYLKETQVKDNVYNLLDKLIEDRNKLSKNKNKIVEWFADGKIDQEIADNKINDLNNKINDLDKKISNLQSTNKSKKSFSINNLYDIFHKIKNPNREQKKEIIHSIVEKIFVERLDNKRSNAYTKPVLKIRIILR

SEQ ID NO: 4474 - protein, 519 aa, Unknown
  Description of Unknown: Integrase B4475 sequence
  PTHR30461:SF3,SM00857,G3DSA:1.10.10.2600,IPR036162,PF13408, IPR025827,G3DSA:3.40.50.1390,PS51737,IPR006119,IPR038109, PF07508,IPR011109,SSF53041,PTHR30461,PS51736, cd00338,PF00239
MAMAQNITFIPAVKTVGTQKPAEKKQKVRVAAYCRVSTEFEEQESSYETQVAHYTSYINGNPEWEMVEVYADNGISGTRTAKREAFNRMIADCEAGRIDMIITKSISRFSRNTVDCLKYTRKLKEMNIAVFFEKENINTLDAKGEVLMTIMAALAQQESESLSANVRLGIQFRNQQGKVQVNHNWFLGYTKDENGKLIIVPEEAEVVRRIYREYLEGASFVKIRRGLEADGILNGAKHTRWHETNIRQILTNEKYIGDALLQKTYTVSVLDKKRSMNDGAMPKYYVEGCHEAIIDKETFLLVQEELARRSALYKGGKKRMYSSKYALSGNVACGHCGNIYRRVTWYVGDTKPVVWRCVSRLTPGEECVGRSVPEEELHAAIASAVNMTYANRDDIIPVLKENIESVVGCDVDEEIEVIDNMIRKSQMDLLDAGKDEARIQEIGERIVSLHERRQDVLTQAALKKDKIDRIKAMIRFIEEQTGEAEYSEILVRRMVEKVTIHEDRITVEFKSGLAIDVDA

SEQ ID NO: 4475 - protein, 519 aa, Unknown
  Description of Unknown: Integrase B4476 sequence
  PTHR30461:SF3,IPR036162,PS51737,IPR011109,PTHR30461, PS00397,PF00239,G3DSA:1.10.10.2600,IPR006119,SSF53041, cd00338,SM00857,IPR025827,IPR038109,SSF161270, PS51736,IPR006118,PF13408,G3DSA:3.40.50.1390,PF07508,Coil
MRNVAIYVRVSTMHQAEQGYSIDSQLADCRKKAHDLGAITINEYVDKGKSGAFLDRPELQRMLNDIKTEKESYDALIIYKLDRLSRDSMGLAYIIKILQQKNIKIISTDGAQYGTNPQDVLTMQIMGSIAQFDNALRKERSIRGKIEKRKQGKLDKITKYGYIFNDEKQNLDIKEDEAIVIRKIFKWFTEDNLSAFRISKKLNTEKIPAPQPKINRKIINKDNIWFESTIRTMLKDETYAGIRHTMIYKFEKISLNNMKKTKRPPEEWISVPVPSIISRETWDKANNIMNRKSTNLRRTQRTWILQGLVFCEKCGQIMNIKQTPKIGKIKENEEKYNFYFKCRTNILNWFGSDKKCPNRQVPIYALEDSVWETLLNIFYSKETLEKYLKETQLKDNVYNLLDKLIEDRNKLSKNKNKIVEWFADGKIDQEIADNKINDLNNKINDLDKKISNLQSTNRSKKSFSINNLYDIFHKIKNPNREQKKEIIHSVVEKIFVERLDNKRSNAYTKPVLKIRIILR

SEQ ID NO: 4476 - protein, 519 aa, Unknown
  Description of Unknown: Integrase B4477 sequence
  PTHR30461:SF3,SM00857,G3DSA:1.10.10.2600,IPR036162,PS51737, G3DSA:3.40.50.1390,IPR006119,IPR038109,PF07508,IPR011109, SSF53041,PTHR30461,PS51736,cd00338,PF00239
MYRELSYRSDEIIEYLRKSRADDPSLSVEDVLQKHESILSDWAERHDCCIPAENKYREVVSGETIDDRPEFLSVLRRIESPAIKAILCVEVQRLSRGDLEDAGRLIKILRYTRTNVITPSKTYDLSDEYDRDIFERELKRGNEYLEYQKKIMSRGRLQAVRQGDYIGSVAPYGYDKTFVLEGKKKHYTLCINPAEASVVRQIFRMRAVEDLGPSRIAKQLNLQGTHPRNNDSWTYNCVKSILQNPVYTGKVFWNRRKVVHSVHSGSVESSRPWSSEYELHDGRHPAIIDSELFGAAQKISGKVTRAKDKVKVRNPFAGLFVCRCGHAMSYHTYPKTGPRILCDMQRVCHTGSCTFEEAEEIVVRILKQAIHDFDVQLKDSAAAMASREETLSSLRLRLAALDKKEISLWDKYAEEQMPKNVFDELNRRVAEDKAAVQASIYSILSEVPTREAIEEKRGRFSAALAALDDSDITAEAKNRMLKSCIEKISYYREPPVRKAGATNRGWIVWDISVDANLCI

SEQ ID NO: 4477 - protein, 519 aa, Unknown
  Description of Unknown: Integrase B4478 sequence
  SM00857,G3DSA:1.10.10.2600,IPR036162,PS51737, G3DSA:3.40.50.1390,IPR006119,IPR038109,PF07508, IPR011109,SSF53041,PF00239,PTHR30461, PS51736,Coil,cd00338
MQYEEYLIYLRKSRSDASLEAMGVDVLERHEQILLDLAKRMNLSIGGIYREVVSGESISARPEMQKLLSEVESGRWEGVLVMEVERLARGDTVDQGIVQRAFQYSGTKIITPTKTYNPNNEFDEEYFEFGLFMSRREYKTIRRRMRAGVTAAVKEGKWPFNQAPYGWQRVKLEHGRGWVLAPDPDEAPVVKLIFRLYTGPDRIGITHICRYLDNRGIKPRNGDAWLECSVMGILRNIVNDQRVGIGRRKVVKQVQNGSVSKVRPHSDYDFTAPGLQPRLIDHDVFLEAQEYLSKNSHKLPESYGIKNPLAGILVCSCCGKKMQRRPASKDGSGRCPYDVLMCNTRGCPTIGSTLDLVERELIQALSDWVAGYQLDPTLEVENKVPEKEQLLSSAVSNHDLLLKQNGNLYDLLEQGVYTTEIFLERSHELQKRIKESEAHIEILKKDLEYEKEKIANIENFIPSCKELLSCYWDLSVQDRNKALKMLLESVEYTKTKRNRKGDKDNPTFTLNLKPRIPRI

SEQ ID NO: 4478 - protein, 519 aa, Unknown
  Description of Unknown: Integrase B4479 sequence
  PTHR30461:SF3,IPR036162,PS51737,IPR011109,PTHR30461, PS00397,PF00239,G3DSA:1.10.10.2600,IPR006119,SSF53041, cd00338,SM00857,IPR025827,IPR038109,SSF161270, PS51736,IPR006118,PF13408,G3DSA:3.40.50.1390,PF07508,Coil
MRNVAIYVRVSTMHQAEQGYSIDSQLVDCRKKAHDLGAITINEYVDKGKSGAFLDRPELQRMLNDIKTEKEYYDALIIYKLDRLSRDSMGLAYIIKILQQKNIKIISTDGAQYGTNPQDVLTMQIMGSIAQFDNALRKERSIRGKIEKRKQGKLDKITKYGYTFNDEKQNLDIKEDEAIVIRKIFKWFTEDNLSAFRISKKLNSEKIPAPQPKINRKIINKDNIWFESTIRTMLKDETYAGIRHTMIYKFEKISLNNMKKTKRPPEEWISVPVPSIISRETWDKANNIMNRKNTNPRRTQRTWILQGLVFCEKCGQIMNIKQTPKIGKIKENEEKYNFYFKCRTNILNWFGSDKKCPNRQVPIYALEDSVWETLLNIFYSKETLEKYLKETQLKDNVYNLLDKLIEDRNKLSKNKNKIVEWFADGKIDQEIADNKINDLNNKINDLDKKISNLQSTNKSKKSFSINNLYDIFHKIKNPNREQKKEIIHSIVEKIFVERLDNKRSNAYTKPVLKIRIILR

SEQ ID NO: 4479 - protein, 519 aa, Unknown
  Description of Unknown: Integrase B4480 sequence
  cd00338,SM00857,G3DSA:1.10.10.2600,IPR036162,PS51737, G3DSA:3.40.50.1390,IPR006119,IPR038109,PF07508,SSF53041, IPR011109,PTHR30461,PS51736,Coil,PF00239
MNIGNQLGKLKKSDQFCIYLRKSRADAEAEKLGEGETLARHERILTELAVKLGLPIGKIYRELVSGETISARKEIQSMINDCYAGMWKGILVVEVTRLSRGNQGDAQIIMDCLRYSNNNNGVLVVTPTKVYDIVQSSDDEEYMEFELFMSRREYKMIRKRMMRGKLQAVVEGNYMGSYRPYGYDILKTKTGRTLVPNPEEAPIVKNIFEWTVKEHLTPGKICKRLTSLGVPTYTGSAEWAIGTVKTILTNPTYTGKVRWNDRMQTKTMVDGKLVKSRPRSNHTEQYMLYDGKHEAIVDEITFHAAAARFHSDKTKANLKLMNPFAGILICAKCKKAMIYQGYNKRPNTPPRILHKSSQICNVKSAMLKDVMNAVAHALELYIDNFEMKIDNLPNIDENSILSRLESLQKELIKQEKKLPKLFDAWEDGILTDDEFTRRKLVNKERIESIQKQMDHLEDSIPTRDEYEEKIMCLSDALKSLLDPTLDADIKNTYLKSIISSIEYSRDNNTEFILDVFLKD

SEQ ID NO: 4480 - protein, 519 aa, Unknown
  Description of Unknown: Integrase B4481 sequence
  PTHR30461:SF3,IPR036162,PS51737,IPR011109,PTHR30461, PS00397,PF00239,G3DSA:1.10.10.2600,IPR006119,SSF53041, cd00338,SM00857,IPR025827,IPR038109,SSF161270 ,PS51736,IPR006118,PF13408,G3DSA:3.40.50.1390,PF07508,Coil
MRNVAIYVRVSTMHQAEQGYSIDSQLADCRKKAHDLGAITINEYVDKGKSGAFLDRPELQRMLNDIKTEKESYDALIIYKLDRLSRDSMGLAYIIKILQQKNIKIISTDGAQYGTNPQDVLTMQIMGSIAQFDNALRKERSIRGKIEKRKQGKLDKITKYGYTFNDEKQNLDIKEDEAIVIRKIFKWFTEDNLSAFRISKKLNTEKIPAPQPKINRKIINKDNIWFESTIRTMLKDETYAGIRHTMIYKFEKISLNNMKKTKRPPEEWISVPVPSIISRETWDKANNIMNRKNTNPRRTQRTWILQGLVYCEKCGQIMNIKQTPKIGKIKENEEKYNFYFKCRTNILNWFGSDKKCPNRQVPIYALEDSVWETLLNIFYSKETLEKYLKETQVKDNVYTLLDKLIEDRNKLSKNKNKIVEWFADGKIDQEIADNKINDLNNKINDLDKKISNLQSTNRSKKSFSINNLYDIFHKIKNPNREQKKEIIHSVVEKIFVERLDNKRSNAYTKPVLKIRIILR

SEQ ID NO: 4481 - protein, 519 aa, Unknown
  Description of Unknown: Integrase B4482 sequence
  SM00857,G3DSA:1.10.10.2600,IPR036162,PS51737,G3DSA:3.40.50.1390, IPR006119,IPR038109,PF07508,SSF53041,IPR011109, PTHR30461,PS51736,cd00338,PF00239
MSYCIYLRKSRADKELCSEEEVLKRHETTLLELAKNRSYNITKIFREVVSGETLAARPQMQQLLSEVENGLWEGVLVMEVERLARGNSVDQGIVAQAFKYSNTLIITPTKTYNPTNEFDEEYFEFGLFMSRREYKTINRRLNAGRIAACKEGKYAGGNPPYGFDKEKLKGERGWKLIPIPEEIEIVKLIYKLYLSDEDGTGFSGIARRLNDSKVPTRSGVFWTSTQVKKILTNDVYIGKIHWQKVPEKKIVENGVLVKRRYINSNPLIFEGLHDAVIDEDIFNRVQEIVKSRKKPPNTPERPMQNPFAGVLVCAVCGKPLKRRPPDKRRPGHSPSFDCITPYCPTISSPVNIVENRILDGMRMWLEDYKPKESSNNTTDMEYTYNTTRIANCRKELENIQKQLGKTYTLLEQGIYDNETFLERQVFLKNEMSNILSTITKLEEEDNATKARAEYNKTLIPELENLLEVYDTLPDAKSKNVLIKKIFHQIRYSKKTRGNRWAPDKVDDFELEFISKLPSK

SEQ ID NO: 4482 - protein, 519 aa, Unknown
  Description of Unknown: Integrase B4483 sequence
  cd03768,PTHR30461:SF3,SM00857,IPR036162,PF13408,IPR025827, G3DSA:3.40.50.1390,PS51737,IPR006119,PF07508,IPR011109, SSF53041,PTHR30461,PS51736,Coil, PF00239
MRIAIYARKSAFSEKSESVNNQDRMCREYAGFHFPGDHTFLNYTDEDFTGANTDRPALKKMLKDIKSGIIDKLIVYQLDRLSRDVRDFSNMYAELEACGVEFVSVKENIDTESPLGKAMMYICVVFAQMERETISNRVTDNMIGLAGAGWWTGGVLPRGYTSRRVSDGGKEHTMLVPDPEKAEELREIFAEFVKLGQSAQRFTTYCKRNNIKIVPGKYLSEGQVHKILRAPYGAPACAETRRFFVDSGATVLGSEKDWDGTCGIMIYGRTRQSKGYSRNPAENWRVCAGKHEPIFSAELWLAAQSQLTSNIYTKKTKYPTQLLKGSLRCPCGRLMKISRYKKRSGGYNAYYTCSRLQSTGKSPDCVSQINANMLDQKALDIFRQIERDPDMINRCSPLLCDADPAAVKKKENEIKRLEDKIGNLSAALAESSGSAAAKYIIAEIEKIDAQIADKKMQLAGLQASALAADRAAAELAAKQKEIAHLVRNLEALDIEEQNKIARSVLKKCVWDGESLFLTF

SEQ ID NO: 4483 - protein, 519 aa, Unknown
  Description of Unknown: Integrase B4484 sequence
  cd00338,SM00857,G3DSA:1.10.10.2600,IPR036162,PS51737, G3DSA:3.40.50.1390,IPR006119,IPR038109,PF07508,IPR011109, SSF53041,PTHR30461,PS51736,Coil,PF00239
MNIGNQLGKLKKSDQFCIYLRKSRADAEAEKLGEGETLARHERILTELAVKLGLPIGKIYRELVSGETISARKEIKSMINDCYAGMWKGILVVEVTRLSRGNQGDAQTIMDCLRYSNNNNGVLVVTPTKVYDIVQSSDDEEYMEFELFMSRREYKMIRKRMMRGKLQAVVEGNYMGSYRPYGYDILKTKTGRTLVPNPEEAPIVKNIFEWTVKEHLTPGKICKRLTSLGVPTYTGSAEWAIGTVKTILTNPTYTGKVRWNDRMQTKTMVDGKLVKSRPRSNHTEQYMLYDGKHEAIVDEITFHAAAARFHSDKTKANLKLMNPFAGILICAKCKKAMIYQGYNKRPNTPPRILHKSSQICNVKSAMLKDVMNAVAHALELYIDNFEMKIDNLPNIDENSILSRLESLQKELIKQEKKLPKLFDAWEDGILTDDEFTRRKLVNKERIESIQKQMDHLEDSIPTRDEYEEKIMCLSDALKSLLDPTLDADIKNTYLKSIISSIEYSRDNNTEFILDVFLKD

SEQ ID NO: 4484 - protein, 519 aa, Unknown
  Description of Unknown: Integrase B4485 sequence
  PTHR30461:SF3,IPR036162,PS51737,IPR011109,PTHR30461, PS00397,PF00239,G3DSA:1.10.10.2600,IPR006119,SSF53041, cd00338,SM00857,IPR025827,IPR038109,SSF161270 ,PS51736,IPR006118,PF13408,G3DSA:3.40.50.1390,PF07508,Coil
MRNIAIYVRVSTMHQAEQGYSIDSQLVDCRKKAHDLGAITINEYVDKGKSGAFLDRPELQRMLNDIKTEKEYYDALIIYKLDRLSRDSMGLAYIIKILQQKNIKIISTDGAQYGTNPQDVLTMQIMGSIAQFDNALRKERSIRGKIEKRKQGKLDKITKYGYTFNDEKQNLDIKEDEAIVIRKIFKWFTEDNLSAFRISKKLNSEKIPAPQPKINRKIINKDNIWFESTIRTMLKDETYAGIRHTMIYKFEKISLNNMKKTKRPPEEWISVPVPSIISRETWDKANNIMNRKSTNPRRTQRTWILQGLVFCEKCGQIMNIKQTPKIGKIKENEEKYNFYFKCRTNILNWFGSDKKCPNRQVPIYALEDSVWETLLNIFYSKETLEKYLKETQLKDNVYNLLDKLIEDRNKLSKNKNKIVEWFADGKIDQEIADNKINDLNNKINDLDKKISNLQSTNRSKKSFSINNLYDIFHKIKNPNREQKKEIIHSVVEKIFVERLDNKRSNAYTKPVLKIRIILR

SEQ ID NO: 4485 - protein, 519 aa, Unknown
  Description of Unknown: Integrase B4486 sequence
  PTHR30461:SF3,IPR036162,PS51737,IPR011109,PTHR30461, PS00397,PF00239,G3DSA:1.10.10.2600,IPR006119,SSF53041, cd00338,SM00857,IPR025827,IPR038109,SSF161270, PS51736,IPR006118,PF13408,G3DSA:3.40.50.1390,PF07508,Coil
MRNVAIYVRVSTMHQAEQGYSIDSQLADCRKKAHDLGAITINEYVDKGKSGAFLDRPELQRMLNDIKTEKESYDALIIYKLDRLSRDSMGLAYIIKILQQKNIKIISTDGAQYGTNPQDVLTMQIMGSIAQFDNALRKERSIRGKIEKRKQGKLDKITKYGYIFNDEKQNLDIKEDEAIVIRKIFKWFTEDNLSAFRISKKLNTEKIPAPQPKINRKIINKDNIWFESTIRTMLKDETYAGIRHTMIYKFEKISLNNMKKTKRPPEEWISVPVPSIISRETWDKANNIMNRKNTNPRRTQRTWILQGLVYCEKCGQIMNIKQTPKIGKIKENEEKYNFYFKCRTNILNWFGSDKKCPNRQVPIYALEDSVWETLLNIFYSKETLEKYLKETQVKDSVYNLLDKLIEDRNKLSKNKNKIVEWFADGKIDQEIADNKINDLNNKINDLDKKISNLQSTNRSKKSFSINNLYDIFHKIKNPNREQKKEIIHSVVEKIFVERLDNKRSNAYTKPVLKIRIILR

SEQ ID NO: 4486 - protein, 519 aa, Unknown
  Description of Unknown: Integrase B4487 sequence
  PTHR30461:SF3,SM00857,G3DSA:1.10.10.2600,IPR036162,PF13408, PS51737,G3DSA:3.40.50.1390,IPR025827,IPR006119,IPR038109, PF07508,IPR011109,SSF53041,PTHR30461,Coil, PS51736,cd00338,PF00239
MADFEHVIIYLRKSRSDDPATTVEEVLSRHENILQEYAVREWGARIPEDRIYREVVSGETIKDRPVMQHVMKILETGLVSGVLVVEPQRLSRGDLQDCGHIINSLRYTNTAVITPPKTYDLSDEYDRKFFEMELTRGNDYLEYTKKILNRGRIASVKAGNFIGNSAPYGYRKICVGTGKEKYYTLEIVPEEAEAIRLMFDLYVNKDYGFRNIAHALDMAGYKPRRSAEWSPAAISCMIANETYIGRVVWNRRKTIKKWENDTIVRTRPRQSEYISVPGKHPAIISDELFYAAKAKRNRTPRIKRYVQLLNPLAGLLYCGTCGHAMSRKRTVDKKYGSVSVSFLCNNQSNCHTKSVMYDAVIDRVKETLRQSIEDFEVKVNNKDETDIAYHRAMIANLKSELRKLKEKDMRQKDAYEDGIYTKEEFVVRNAKLAEQISIAQLKLDEAESSTTQLVDYQERLVRFRECLEALDDDTISAADKNTLLKSCIDKIMYYNDSPSLPGIGRYVDNPFRLEIFLKL

SEQ ID NO: 4487 - protein, 519 aa, Unknown
  Description of Unknown: Integrase B4488 sequence
  PTHR30461:SF3,cd00338,SM00857,G3DSA:1.10.10.2600,IPR036162, PF13408,IPR025827,G3DSA:3.40.50.1390,PS51737,IPR006119, IPR038109,PF07508,IPR011109,SSF53041,PTHR30461, PS51736,Coil,PF00239
MQTAVIYARYSSDKQTEQSIEGQLYDCYNYAKQHGITVVQEYIDRAMTGKNDDRPAFQQMLHESAMHKWDSVIVWKLDRFARNTIDSSVNRQILAKNGVKLLSVMESFGDDASGQMMTHIIEAINEYYSADLREKTIRGMRQSAMKAQTTGHIPLGYKVVDKKLVIDDETRIIPETVFRMYAEGERLTDIAEYLNAHGYRNRRGRPFTTNSFYNMLANEKYIGIYKYDDIVIEGGIPQMIPNEVFEAVREKLITNRKRAAKNTAKADYYLSGKLYCGHCGEPMSGLSGTGRNGVKHYYYRCNGVQKKSGCHKKLENKYLIEDEVCRAARSAFEQMDKAETAETIYQMYLQTVRNEYAPAELEKELTECTKQAENVVNAIAQTGGNQLLYDKVRELEERKEQLSSALRLSQAMTDNVPSVEQITVFIDDILATDINTTEGKKAIADIMISKVYVYDDKLTVIFKDKDGKSVDIPLSAVSDSSSADCAPSALGSQVSFKANQSRGQRVMFVKLFILGDRSP

SEQ ID NO: 4488 - protein, 519 aa, Unknown
  Description of Unknown: Integrase B4489 sequence
  PTHR30461:SF3,IPR036162,PS51737,IPR011109,PTHR30461, PS00397,PF00239,G3DSA:1.10.10.2600,IPR006119,SSF53041, cd00338,SM00857,IPR025827,IPR038109,PS51736, IPR006118,PF13408,G3DSA:3.40.50.1390,PF07508,Coil
MRNVAIYVRVSTMHQAEQGYSIDSQLVDCRKKAHDLGAITINEYVDKGKSGAFLDRPELQRMLNDIKTEKEYYDALIIYKLDRLSRDSMGLAYIIKILQQKNIKIISTDGAQYGTNPQDVLTMQIMGSIAQFDNALRKERSIRGKIEKRKQGKLDKITKYGYTFNDEKQNLDIKEDEAIVIRKIFKWFTEDNLSAFRISKKLNSEKIPAPQPKINRKIINKDNIWFESTIRTMLKDETYAGIRHTMIYKFEKISLNNMKKTKRPPEEWISVPVPSIISRETWDKANNIMNRKNTNPRRTQRTWILQGLVFCEKCGQIMNIKQTPKIGKIKENEEKYNFYFKCRTNILNWFGSDKKCPNRQVPIYALEDSVWETLLNIFYSKETLEKYLKETQLKDNVYNLLDKLIEDRNKLSKNKNKIVEWFADGKIDQEIADNKINDLNNKINDLDKKISNLQSTNKSKKSFSINNLYDIFHKIKNPNREQKKEIIHSVVEKIFVERLDNKRSNAYTKPVLKIRIILC

SEQ ID NO: 4489 - protein, 519 aa, Unknown
  Description of Unknown: Integrase B4490 sequence
  PTHR30461:SF3,IPR036162,PS51737,IPR011109,PTHR30461, PF00239,G3DSA:1.10.10.2600,IPR006119,SSF53041,cd00338, SM00857,IPR025827,IPR038109,PS51736,mobidb-lite, PF13408,G3DSA:3.40.50.1390,PF07508,Coil
MARKKNIAAGLDAVIYARYSSHNQREVSIEQQIAECTKHAAALGLRIVGTYEDRAISGKTDNRPRFQQMMRDAEKGKFQAVVAWKSNRIGRNMLQAMVNEAKLDDYGVKVFYAEEDFDDTAAGRFALRNMMNVNQFYSENMAEDITRGLYDNANKCMANGRQPLGYKRGADGKVMLDEPAAAVVREIFTRVAAGDLFVDIARDLNAKGIKTSKGAAWNKGSFQSICQNERYKGIYIYGNVRIVDGIPRIVSDELWYKVQEAMRMKKNPVGTRHRVGAEDYLLTGKLRCGHCGSYMTGVSGTSRNGELHYYYTCQKRRTEHACSKKNVRRDVIEPAIAQAIKMYCLTDDVIEWMADQTVQYWEKHDNDLQIEALEQQLAENKKATSNMLKAIEMGIITEATRSRMVELETENSKLTAQLSAAKRDVVKINREDLIDELHILRSKDIHDREVQAELFKDFLVAAYIYDDNRLKLVFSFMGKDNSVEIPLETGEDPPDGGDSPDAKMFVLTPDCSTIGSNES

SEQ ID NO: 4490 - protein, 519 aa, Unknown
  Description of Unknown: Integrase B4491 sequence
  PTHR30461:SF3,SM00857,G3DSA:1.10.10.2600,IPR036162,PF13408, PS51737,G3DSA:3.40.50.1390,IPR025827,IPR006119,IPR038109, PF07508,IPR011109,SSF53041,PTHR30461,Coil, PS51736,cd00338,PF00239
MADFEHVIIYLRKSRSDDPATTVEEVLFRHENILQEYAVREWGARIPEDRIYREVVSGETIKDRPVMQHVMKILETGLVSGVLVVEPQRLSRGDLQDCGHIINSLRYTNTAVITPPKTYDLSDEYDRKFFEMELTRGNDYLEYTKKILNRGRIASVKAGNFIGNSAPYGYRKICVGTGKEKYYTLEIVPEEAEAIRLMFDLYVNKDYGFRNIAHALDMAGYKPRRSAEWSPAAISCMIANETYIGRVVWNRRKTIKKWENDTIVRTRPRQSEYISVPGKHPAIISDELFYAAKAKRNRTPRIKRYVQLLNPLAGLLYCGTCGHAMSRKRTVDKKYGSVSVSFLCNNQSNCHTKSVMYDAVIDRVKETLRQSIEDFEVKVNNKDETDIAYHRAMIANLKGELKKLKEKDMRQKDAYEDGIYTKEEFVVRNAKLAEQISIAQLKLDEAESSTTQLIDYQERLVRFRECLEALDDDTISAADKNTLLKSCIDKIMYYNDSPSLPGIGRYVDNPFRLEIFLKL

SEQ ID NO: 4491 - protein, 519 aa, Unknown
  Description of Unknown: Integrase B4492 sequence
  PTHR30461:SF3,SM00857,G3DSA:1.10.10.2600,IPR036162,PF13408, IPR025827,PS51737,G3DSA:3.40.50.1390,IPR006119,IPR038109, PF07508,SSF53041,IPR011109,PF00239,PTHR30461, PS51736,Coil,cd00338
MRAFIYGRFSSHKQQELSIEAQIDICREYAEKHNITVVGEYVDRARSARTENRADFRRLIRDACTGVVDCVLVWRYDRFFRDRAESALYRKQLEAAGVHLISVTEFIPDGSAGVITQGMIETVAEYFSAKLSEDVTRGMNKAAQHCQITGGAPLGYRPGPNKRWQIDPVGAELVKRCFEWYDSGKSMGELADHFNKEGHKTAKGNSFNKSSFTTILRNKKYIGIYEYDGTVSIAGGVPRIIEDDLFFRVQRKLDANRHRPGAYKAEVPYLLSGKLFCGKCGSPMTGTAGTGKSGVRHYYYICNNRRAKKCDKKNVRLDLIEEAVLQSALDVLTDDNISYISAEVERRCSENSGNKALVASLRVQLTEVEKQLKNIGNAIAQGIITETTKQMLMDAEADRAALRQQIDRATVQASLEVKAEAVACWLDGFRHGDRKSPEFRKDVFGALVHSVFVYDDYMKIIFNVDSAGAALVPFSAVQNAATSDFVGALPGSYLGGSGVPSVFVTTRFVRIVVTVKDTS

SEQ ID NO: 4492 - protein, 519 aa, Unknown
  Description of Unknown: Integrase B4493 sequence
  SM00857,G3DSA:1.10.10.2600,IPR036162,PS51737,G3DSA:3.40.50.1390, IPR006119,IPR038109,PF07508,SSF53041,IPR011109, PTHR30461,Coil,PS51736,cd00338,PF00239
MQQYEEYLIYLRKSRSDASLEAMGVDVLERHEQILLDLTKRMNLSIGGIYREVVSGESISARPEMQRLLSEVEAGRWKGVVVMEVERLARGDTIDQGIVQRAFQYSGTQIVTPAKTYNPNNEFDEEYFEFGLFMSRREYKTIRRRMRAGVTAAVKEGKWPFNKAPYGWQRVKLEHARGWVLAPDPEEAPVVKLIFQLYTGPDRIGITNICRYLDNRGVKPRNGDTWTECSIMGILRNIVNDQRVGIGRRKIVKQVQNGSVSKVRPHSDYDFTAPGLQPRLIDHDVFLEAQTHLGKNSHKLPESYGIKNPLAGIVVCPCCGKKMMRRPASKTPGGAPYDVLKCNTRNCPTIGSALDLVEREVIQALSDWVAGYQLDPTLEVENKVPEKEQLLSSAISNHDVLLKQNGNLYDLLEQGVYTTEIFLERSHELQKRIKESEAHIEILKKDLEYEKEKIANVENFIPSCKELLSCYWELSAQDRNKALKMLLESVEYTKTKRNQKGDKDNPTFTLNLKPRIPRI

SEQ ID NO: 4493 - protein, 519 aa, Unknown
  Description of Unknown: Integrase B4494 sequence
  PTHR30461:SF3,SM00857,G3DSA:1.10.10.2600,IPR036162,PF13408, PS51737,IPR025827,G3DSA:3.40.50.1390,IPR006119,IPR038109, PF07508,SSF53041,IPR011109,PF00239, PTHR30461,PS51736,Coil,cd00338
MRAFIYGRFSSHKQQELSIEAQIDICREYAEKHNITVVGEYVDRARSARTENRADFRRLIRDACTGVVDCVLVWRYDRFFRDRAESALYRKQLEAAGVHLISVTEFIPDGSAGVITQGMIETVAEYFSAKLSEDVTRGMNKAAQHCQITGGAPLGYRPGPNKRWQIDPVGAELVKRCFEWYDSGKSMGELADHFNKEGHKTAKGNSFNKSSFTTILRNKKYIGIYEYDGTVSIAGGVPRIIEDDLFFRVQRKIDANRHRPGAYKAEVPYLLSGKLFCGKCGSPMTGTAGTGKSGVRHYYYICNNRRAKKCDKKNVRLDLIEEAVLHSALDVLTDDNISYISAEVERRCSENSGNKALVASLRVQLTEVEKQLKNIGNAIAQGIITETTKQMLMDAEADRAALRQQIDRATVQASLEVKAEAVACWLDGFRHGDRKSPEFRKDVFGALVHSVFVYDDHMKIIFNVDSAGAALVPFSAVQNAATSDFVGTLPGLYLDRSGVPEKNDPNLFLVRDRFGLFLF

SEQ ID NO: 4494 - protein, 519 aa, Unknown
  Description of Unknown: Integrase B4495 sequence
  PTHR30461:SF3,SM00857,G3DSA:1.10.10.2600,IPR036162,PF13408, PS51737,G3DSA:3.40.50.1390,IPR025827,IPR006119,IPR038109, PF07508,IPR011109,SSF53041,PTHR30461,Coil, PS51736,cd00338,PF00239
MADFEHVIIYLRKSRSDDPATTVEEVLFRHENILQEYAVREWGARIPEDRIYREVVSGETIKDRPVMQHVMKILETGLVSGVLVVEPQRLSRGDLQDCGHIINSLRYTNTAVITPPKTYDLSDEYDRKFFEMELTRGNDYLEYTKKILNRGRIASVKAGNFIGNSAPYGYRKICVGTGKEKYYTLEIVPEEAEAIRLMFDLYVNKDYGFRNIAHALDMAGYKPRRSAEWSPAAISCMIANETYIGRVVWNRRKTIKKWENDTIVRTRPRQSEYISVPGKHPAIISDELFYAAKAKRNRTPRIKRYVQLLNPLAGLLYCGTCGHAMSRKRTVDKKYGSVSVSFLCNNQSNCHTKSVMYDAVIDRVKETLRQSIEDFEVKVNNKDETDIAYHRAMIANLKSELRKLKEKDMRQKDAYEDGIYTKEEFVVRNAKLAEQISIAQLKLDEAESSTTQLVDYQERLVRFRECLEALDDDTISAADKNTLLKSCIDKIMYYNDSPSLPGIGRYVDNPFRLEIFLKL

SEQ ID NO: 4495 - protein, 519 aa, Unknown
  Description of Unknown: Integrase B4496 sequence
  PTHR30461:SF3,IPR036162,PS51737,IPR011109,PTHR30461, PS00397,PF00239,G3DSA:1.10.10.2600,IPR006119,SSF53041, cd00338,SM00857,IPR025827,IPR038109,SSF161270, PS51736,IPR006118,PF13408,G3DSA:3.40.50.1390,PF07508,Coil
MRNVAIYVRVSTMHQAEQGYSIDSQLVDCRKKAHDLGAITINEYVDKGKSGAFLDRPELQRMLNDIKTEKEYYDALIIYKLDRLSRDSMGLAYIIKILQQKNIKIISTDGAQYGTNPQDVLTMQIMGSIAQFDNALRKERSIRGKIEKRKQGKLDKITKYGYTFNDEKQNLDIKEDEAIVIRKIFKWFTEDNLSAFRISKKLNSEKIPAPQPKINRKIINKDNIWFESTIRTMLKDETYAGIRHTMIYKFEKISLNNMKKTKRPPEEWISVPVPSIISRETWDKANNIMNRKSTNPRRTQRTWILQGLVFCEKCGQIMNIKQTPKIGKIKENEEKYNFYFKCRTNILNWFGSDKKCPNRQVPIYALEDSVWETLLNIFYSKETLEKYLKETQLKDNVYNLLDKLIEDRNKLSKNKNKIVEWFADGKIDQEIADNKINDLNNKINDLDKKISNLQSTNKSKKSFSINNLYDIFHKIKNPNREQKKEIIHSIVEKIFVERLDNKRSNAYTKPVLKIRIILR

SEQ ID NO: 4496 - protein, 519 aa, Unknown
  Description of Unknown: Integrase B4497 sequence
  PTHR30461:SF3,SM00857,G3DSA:1.10.10.2600,IPR036162,PF13408, PS51737,IPR025827,G3DSA:3.40.50.1390,IPR006119,IPR038109, PF07508,IPR011109,SSF53041,PF00239,PTHR30461, PS51736,Coil,cd00338
MRVSVNLNAQKPDTTTNAVIYARYSSHGQTEQSIEGQLAKGHEYAAAQGYTVVHEYIDRAMTGRNDNREAFQKMLSDTGKHQFQVVIVWKVDRFGRNREEIAFNKHTCKKNGVRVEYVAESLPNSPEAVILESVLEGMAEYYSIQLSQNIRRGQLESAKKCQCVGGSVPLGYTLDSDKHFVIDPQTAPVVKKIFDLYAEGATISEITGQLNEQGIRTARKQLFTKNSLTKLLKNEKYIGVYTYKDIVRVEGGVPAIVDESTFDRVQELLKINRRAPSHTWTKVEYLLTDKLFCGHCGSPMVGESGFSHTGAKYSYYGCIKRRREKACDKKPVRQDWIEALVLDETVKLLHDDELMEYIIDRTWEYYQVTDKVQEEKAVLEAQLAEVDKAINNLVRAIEAGIFNAATKSRMDELDAQKAALTASLADLELTSGIRITRDHIEYFLLRLRDLDVKDRECQKRLVQTFVNAVFIYDDGRVKITYNYSGQSSTIALNQIASAEKGKGFVCCLPCSLLCCANPC

SEQ ID NO: 4497 - protein, 519 aa, Unknown
  Description of Unknown: Integrase B4498 sequence
  PTHR30461:SF3,cd00338,SM00857,G3DSA:1.10.10.2600,IPR036162, PF13408,IPR025827,G3DSA:3.40.50.1390,PS51737,IPR006119, IPR038109,PF07508,IPR011109,SSF53041,PTHR30461, PS51736,Coil,PF00239
MLNAVIYARFSSDMQREESIDAQVRACKAYAKSKGYTVVKEYVDEAKSGRSTLTRDAYNQMMADAMENKFDVIIFHKIDRNSRNELNYFIFKDKLEKLGIRYEYAAQPIDTDSPEGQVMETVMVGMAAYYSRNLAKETKKGMNENAYKAIFNGGYAPLGYKIVDKHYVIDEKEAEAVRLIFNLYLGGKGYGEICLALAARGYTTRSGKNFPKNSLHDILRNERYMGTYTFNRVPKTKRRNSHSYARPNDFISIPDAIPAIVSKETFLAAQEKMLLNKKRKGGAYTAKRDYLLSGKFFCGYCGSAMQGYSCCTRGNMYYYYSCARKDRVPADRCKQKMIRAEVIEHWIMSTLEREIFSDAGIQRVADSMSTAFGNANKEVKNATTILLQRKAAAERKLNNLYQVIEDGDADEFDMQRLKKAKEELRNINSEICETAVKSAPDIDTSKIISLLKNMREEIFAKKNSHYAKQAIELLVKRVTIMDKTITLSLTTEGCLSLLVPRTRIAVSSDEWKITANLAA

SEQ ID NO: 4498 - protein, 519 aa, Unknown
  Description of Unknown: Integrase B4499 sequence
  cd00338,SM00857,G3DSA:1.10.10.2600,IPR036162,PS51737, G3DSA:3.40.50.1390,IPR006119,IPR038109,PF07508,IPR011109, SSF53041,PTHR30461,PS51736,Coil,PF00239
MNIGNQLGKLKKSDQFCIYLRKSRADAEAEKLGEGETLARHERILTELAVKLGLPIGKIYRELVSGETISARKEIKSMINDCYAGMWKGILVVEVTRLSRGNQGDAQTIMDCLRYSNNNNGVLVVTPTKVYDIVQSSDDEEYMEFELFMSRREYKMIRKRMMRGKLQAVVEGNYMGSYRPYGYDILKTKTGRTLVPNPEEAPIVKNIFEWTVKEHLTPGKICKRLTSLGVPTYTGSAEWAIGTVKTILTNPTYTGKVRWNDRMQTKTMVDGKLVKSRPRSNHTEQYMLYDGKHEAIVDEITFHAAAARFHSDKTKANFKLMNPFAGILICAKCKKAMIYQGYNKRPNTPPRILHKSSQICNVKSAMLKDVMNAVAHALELYIDNFEMKIDNLPNIDENSILSRLESLQKELIKQEKKLPKLFDAWEDGILTDDEFTRRKLVNKERIESIQKQMDHLEDSIPTRDEYEEKIMCLSDALKSLLDPTLDADIKNTYLKSIISSIEYSRDNNTEFILDVFLKD

SEQ ID NO: 4499 - protein, 519 aa, Unknown
  Description of Unknown: Integrase B4500 sequence
  PTHR30461:SF3,IPR036162,PS51737,IPR011109,PTHR30461, PS00397,PF00239,G3DSA:1.10.10.2600,IPR006119,SSF53041, cd00338,SM00857,IPR025827,IPR038109,SSF161270 ,PS51736,IPR006118,PF13408,G3DSA:3.40.50.1390,PF07508,Coil
MRNVAIYVRVSTMHQAEQGYSIDSQLADCRKKAHDLGAITINEYVDKGKSGAFLDRPELQRMLNDIKTEKEYYDALIIYKLDRLSRDSMGLAYIIKILQQKNIKIISTDGAQYGANPQDVLTMQIMGSIAQFDNALRKERSIRGKIEKRKQGKLDKITKYGYTFNDEKQNLDIKEDEAIVIRKIFKWFTEDNLSAFRISKKLNSEKIPAPQPKINRKIINKDNIWFESTIRTMLKDETYAGIRHTMIYKFEKISLNNMKKTKRPPEEWISVPVPSIISRETWDKANNIMNRKNTNPRRTQRTWILQGLVFCEKCGQIMNIKQTPKIGKIKENEEKYNFYFKCRTNILNWFGSDKKCPNRQVPIYALEDSVWETLLNIFYSKETLEKYLKETQLKDNVYNLLDKLIEDRNKLSKNKNKIVEWFADGKIDQEIADNKINDLNNKINDLDKKISNLQSTNKSKKSFSINNLYDIFHKIKNPNREQKKEIIHSIVEKIFVERLDNKRSNAYTKPVLKIRIILR

SEQ ID NO: 4500 - protein, 519 aa, Unknown
  Description of Unknown: Integrase B4501 sequence
  cd00338,SM00857,G3DSA:1.10.10.2600,IPR036162,PS51737, G3DSA:3.40.50.1390,IPR006119,IPR038109,PF07508,IPR011109, SSF53041,PTHR30461,PS51736,Coil,PF00239
MNIGNQLGKLKKSDQFCIYLRKSRADAEAEKLGEGETLARHERILTELAVKLGLPIGKIYRELVSGETISARKEIKSMINDCYAGMWKGILVVEVTRLSRGNQGDAQTIMDCLRYSNNNNGILVVTPTKTYDIVRSPDDEEYMEFELFMSRREYKMIRKRMMRGKLQAVVEGNYMGSYRPYGYDILKTKTGRTLVPNQEEAPIVKNIFEWTVKEHLTPGKICKRLNTIGVPTYSGDPEWSVSSIKTILTNPTYTGKVRWNDRMQVKTMVDGKLVKSRPRSNHTNQYMLYDGKHEAIIDEITFHAAASHFHSDKTKANLKLMNPFAGILICAKCKKTMIYQGYNKRPNTPPRILHKSSQICNVKSAVLKDVMDAVAHALELYIDDFEMKIDNLPVVDENNILSQLEALQKELIKQEKKLPKLFDAWENGILTDDEFTRRKLINKERIESIKKQMDHLEDSVPTKDEYEEKIMLLSDALKSLLDPTLDADIKNTYLKSIISSIEYSRDNNTEFILDVFLKD

SEQ ID NO: 4501 - protein, 519 aa, Unknown
  Description of Unknown: Integrase B4502 sequence
  cd00338,SM00857,G3DSA:1.10.10.2600,IPR036162, PS51737,G3DSA:3.40.50.1390,IPR006119,IPR038109, PF07508,IPR011109,SSF53041,PTHR30461, PS51736,Coil,PF00239
MEQYCLYLRKSRSDQEAEARGEGETLARHEQALLKLAKHQHLNVLTIYREVVSGETIAARPMMQQLLHEVEQGVWSGVLVMEVERLARGDTIDQGIVAQAFKFSDTKIITPMKTYDPNNEFDEEYFEFGLFMSRREYKTINRRLQRGRTASINEGKYVGNIPPYGYQRIKLENDKGFTLQPDPQEAEVVKMIFQWYAGNSGEQLGPSLIAQRLDQLGIKPRKNDTWSEATIRGILINPVYIGMVKWQTRAQVKKSINGTVKKTRPRNHHPLLIKGLHPAIIDEQLYDQVSNRLACYAPAPINRSQTIQNPLASIIVCAKCGHKMIRRPYVNKPSMLICRQPNCDNIGASLELVEKMLLAALKEWVKDMKVSTDTLDLQPVNTLSLKNNQLTIISNDLKVAYTQMDRTYDLLEQGVYSTEKFLERSNALSEKIQSLQTQQKQLEVEIKKEEEEVAQRSTYLPKIEKLVDIYWAIDEPGARNDLLKEVLDHVTYSKEARMKKNHSDAGFTLKIYPLIMPKK

SEQ ID NO: 4502 - protein, 519 aa, Unknown
  Description of Unknown: Integrase B4503 sequence
  PTHR30461:SF3,SM00857,G3DSA:1.10.10.2600,IPR036162,PF13408, IPR025827,PS51737,G3DSA:3.40.50.1390,IPR006119,IPR038109, PF07508,IPR011109,SSF53041,PTHR30461,Coil, PS51736,cd00338,PF00239
MADFEHVIIYLRKSRSDDPATTVEEVLSRHENILQEYAVREWGARIPEDRIYREVVSGETIKDRPVMQHVMKILETGLVSGVLVVEPQRLSRGDLQDCGHIINSLRYTNTAVITPPKTYDLSDEYDRKFFEMELTRGNDYLEYTKKILNRGRIASVKAGNFIGNSAPYGYRKICVGTGKEKYYTLEIVPKEAEAIRLMFDLYVNKDYGFRSIAHALDMAGYKPRRSAEWSPAAISCMIANETYIGRVVWNRRKTIKKWENDTIVRTRPRQSEYISVPGKHPAIISDELFYAAKAKRNRTPRIKRYVQLLNPLAGLLYCGTCGHAMSRKRTVDKKYGSMSVSFLCNNQSNCHTKSVMYDAVIDRVKETLRQSIEDFEVKVNNKDETDIAYHRAMIANLKSELRKLKEKDMRQKDAYEDGIYTKEEFVVRNAKLAEQISIAQMKLDEAESSTTQLVDYQERLVRFRECLEALDDDTISAADKNTLLKSCIDKIMYYNDSPSLPGIGRYVDNPFRLEIFLKL

SEQ ID NO: 4503 - protein, 519 aa, Unknown
  Description of Unknown: Integrase B4504 sequence
  PTHR30461:SF3,IPR036162,PS51737,IPR011109,PTHR30461, PS00397,PF00239,G3DSA:1.10.10.2600,IPR006119,SSF53041, cd00338,SM00857,IPR025827,IPR038109,SSF161270, PS51736,IPR006118,PF13408,G3DSA:3.40.50.1390,PF07508,Coil
MRNVAIYVRVSTMHQAEQGYSIDSQLVDCRKKAHDLGAITINEYVDKGKSGAFLDRPELQRMLNDIKTEKEYYDALIIYKLDRLSRDSMGLAYIIKILQQKNIKIISTDGAQYGTNPQDVLTMQIMGSIAQFDNALRKERSIRGKIEKRKQGKLDKITKYGYTFNDEKQNLDIKEDEAIVIRKIFKWFTEDNLSAFRISKKLNSEKIPAPQPKINRKIINKDNIWFESTIRTMLKDETYAGIRHTMIYKFEKISLNNMKKTKRPPEEWISVPVPSIISRETWDKANNIMNRKNTNPRRTQRTWILQGLVYCEKCGQIMNIKQTPKIGKIKENEEKYNFYFKCRTNILNWFGSDKKCPNRQVPIYTLEDSVWETLLNIFYSKETLEKYLKETQVKDNVYNLLDKLIEDRNKLSKNKNKIVEWFADGKIDQEIADNKINDLNNKINDLDKKISNLQSTNRSKKSFSINNLYDIFHKIKNPNREQKKEIIHSVVEKIFVERLDNKRSNAYTKPVLKIRIILR

SEQ ID NO: 4504 - protein, 519 aa, Unknown
  Description of Unknown: Integrase B4505 sequence
  PTHR30461:SF3,IPR036162,PS51737,IPR011109,PTHR30461, PS00397,PF00239,G3DSA:1.10.10.2600,IPR006119,SSF53041, cd00338,SM00857,IPR025827,IPR038109,SSF161270, PS51736,IPR006118,PF13408,G3DSA:3.40.50.1390,PF07508,Coil
MRNVAIYVRVSTMHQAEQGYSIDSQLVDCRKKAHDLGAITINEYVDKGKSGAFLDRPELQRMLNDIKTEKEYYDALIIYKLDRLSRDSMGLAYIIKILQQKNIKIISTDGAQYGTNPQDVLTMQIMGSIAQFDNALRKERSIRGKIEKRKQGKLDKITKYGYIFNDEKQNLDIKEDEAIVIRKIFKWFTEDNLSAFRISKKLNSEKIPAPQPKINRKIINKDNIWFESTIRTMLKDETYAGIRHTMIYKFEKISLNNMKKTKRPPEEWISVPVPSIISRETWDKANNIMNRKNTNPRRTQRTWILQGLVYCEKCGQIMNIKQTPKIGKIKENEEKYNFYFKCRTNILNWFGSDKKCPNRQVPIYALEDSVWETLLNIFYSKETLEKYLKETQVKDNVYTLLDKLIEDRNKLSKNKNKIVEWFADGKIDQEIADNKINDLNNKINDLDKKISNLQSTNRSKKSFSINNLYDIFHKIKNPNRKQKKEIIHSVVEKIFVERLDNKRSNAYTKPVLKIRIILR

SEQ ID NO: 4505 - protein, 519 aa, Unknown
  Description of Unknown: Integrase B4506 sequence
  SM00857,G3DSA:1.10.10.2600,IPR036162,PF13408,IPR025827, G3DSA:3.40.50.1390,PS51737,IPR006119,IPR038109,PF07508, IPR011109,SSF53041,PF00239,PTHR30461,PS51736, Coil,cd00338
MNTNQIPVVSYSRFSSDMQHETSIEAQQDAINKYAAANGYTIIEDYVDRAKSATTTAKRDEFNRMIEDSKSGKFKFVIVHKFDRFARNRIDSTIAKAILEKSGVRVLSVLEPTSDTPEGELMEGMFELLAQYYSSNLGREVMKGFKVRAGKCLHNGGKPPLGYDVDPVTEKLVINESEAQTVKTIFQMYIDGHGYEDIINTLNKRGSRTKNGNEFGKNSLHDILRNKKYAGYYIYNRWDGKHNRHKEKSPEEVICIENGCPAIISEEMFNKAEKVMEQRKMSPGAKSAVKTYLLTGLIRCGECGNLMSGTQRKNGKGYMYRSYRCKHKDMVHHCSNKEIRADKIEEFVLLQLQKYIFDDKNIPAIVDGVKKQLIQHNAYVVEELRANERALKRLQNRRQNIINAIADGLMQDDFKEVLAQLKNDEKILLERQQELTIRNPDAAFTEDDLRNMISEFSGYVFNRDIPECKKFIAQFVKQVTVYNTKIEVTLRVASILLYGADYTITKSIGRTFLPTPELQ

SEQ ID NO: 4506 - protein, 519 aa, Unknown
  Description of Unknown: Integrase B4507 sequence
  PTHR30461:SF3,cd00338,SM00857,G3DSA:1.10.10.2600,IPR036162, PF13408,PS51737,G3DSA:3.40.50.1390,IPR025827,IPR006119, IPR038109,PF07508,IPR011109,SSF53041,PTHR30461, PS51736,Coil,PF00239
MKKVTKIDKIQNVTSKKQKLRVAAYCRVSTSNDAQLESLETQKAHYESYIASRDDWQFAGLYFDEGITGTKKDKRPELMRLMQDCAAKKIDFIITKSISRFSRNTTDCLELVRKLQELDVPIYFEKENINTGSMESELFLTILSSMAEGESTSISENSKWSIKKRFQNGTFKLSYAPYGYRWDGRTLRIIPEQAEVVKRIFADVLSGKGTDAIAKALDDEGVPTKRGGKWTSTSVRGILSNEKYTGDVIFQKTYTDDSFNRHTNKGELDMYYVADHHEAIISKEDFEAAGLLITQRAAEKGIKRESQKYQQRYAFSGKIICNECGDTFRRRMHSSTYGKYVAWCCNTHLADKDKCSMLYLRDDDLKVAFITVLNKLIYSHKLVLKPYAAALQNNSGDESLVRIQHLERLLEQNTEQRETLTRLVAQGYIDQVLYNSETNALLTQANTYREDIEVINATMSGDSSRFFEAERLLHFAERGSMLEEYGEDLFERFVDHIQVYSRHEVGFVMKCGLTFKEMI

SEQ ID NO: 4507 - protein, 519 aa, Unknown
  Description of Unknown: Integrase B4508 sequence
  cd00338,SM00857,G3DSA:1.10.10.2600,IPR036162,PS51737, G3DSA:3.40.50.1390,IPR006119,IPR038109,PF07508,IPR011109, SSF53041,PTHR30461,PS51736,Coil,PF00239
MNIGNQLGKLKKSDQFCIYLRKSRADAEAEKLGEGDTLARHERILTELAVKLGLPIGKIYRELVSGETISARKEIQSMINDCYAGMWKGILVVEVTRLSRGNQGDAQTIMDCLRYSNNNNGILVVTPTKTYDIVRSPDDEEYMEFELFMSRREYKMIRKRMMRGKLQAVIEGNYMGSYRPYGYDILKTKTGRTLVPNQEEAPIVKNIFEWTVKEHLTPGKICKRLNTIGVPTYSGDPEWSVSSIKTILTNPTYTGKVRWNDRMQVKTMVDGKLVKSRPRSNHTNQYMLYDGKHEAIIDEITFHAAASHFHSDKTKANLKLMNPFAGILICAKCKKTMIYQGYNKRPNTPPRILHKSSQICNVKSAVLKDVMDAVAHALELYIDDFEMKIDNLPVVDENNILSQLEALQKELIKQEKKLSKLFDAWENGILTDDEFTRRKLINKERIESIKKQMDHLEDSVPTKDEYEEKIMLLSDALKSLLDPTLDADIKNTYLKSIISSIEYSRDNNTEFILDVFLKD

SEQ ID NO: 4508 - protein, 519 aa, Unknown
  Description of Unknown: Integrase B4509 sequence
  PTHR30461:SF3,cd00338,SM00857,G3DSA:1.10.10.2600,IPR036162, PF13408,PS51737,G3DSA:3.40.50.1390,IPR025827,IPR006119, IPR038109,PF07508,IPR011109,SSF53041, PTHR30461,PS51736,Coil,PF00239
MKNKHDIKDIRAAVYIRYSSENQRDGYSVEYQLDECKKYIEQQGFIFEKSYIDEAVSGKSADKRTAFFELLADVKNGLYDVVIVYKYSRFARNLLEATLYRQQIEKNGAKLISAMERIDDSTPEGRMMRNIIMTMDEYYSDNLSTFVQSSMYTAAKSGKYLGGILPYGFSVNENGEFIENKAEADIVRRVFELRASGAMPADILRIFRNEGIRGRNGKPFTQQLLNKIVRSEKYIGVYKYAVKGYEPIRIENAFAPIVPRDLWDKVQHVVDNLNVKRAAKGRSRKNIYPLTGKIFCACCGEPFTGNSKGNGLAYYTCRGQDKLQICKNGSVKKDILENYVFGKIKELILCENHVEDIAQIVFDMLNKSTSGDIDAEISDLKKEKADIERKLENLLDLMLDGTISKDILQKKSAALQDELKIVESALKSKEYTAAETVTYDGIHAFLVDMIKQLENADDHVKKAIASQFIDKITINSDDINVRLTVSPFFVGDKLNDGWALFTISPKRSKSRSGGLTRLK

SEQ ID NO: 4509 - protein, 519 aa, Unknown
  Description of Unknown: Integrase B4510 sequence
  PTHR30461:SF3,SM00857,G3DSA:1.10.10.2600,IPR036162,PF13408, PS51737,G3DSA:3.40.50.1390,IPR025827,IPR006119,IPR038109, PF07508,SSF53041,IPR011109,PTHR30461,Coil, PS51736,cd00338,PF00239
MADFEHVIIYLRKSRSDDPATTVEEVLFRHENILQEYAVKEWGARIPEDRIYREVVSGETIKDRPVMQHVMKILETGLVSGVLVVEPQRLSRGDLQDCGHIINSLRYTNTAVITPPKTYDLSDEYDRKFFEMELTRGNDYLEYTKKILNRGRIASVKAGNFIGNSAPYGYRKICVGTGKEKYYTLEIVPEEAEAVRLMFDLYVNKDYGFRSIAHALDMAGYKPRRSAEWSPAAISCMIANETYIGRVVWNRRKTIKKWENDTIVRTRPRQSEYISVPGKHPAIINDELFYAAKAKRNRTPRIKRYVQLLNPLAGLLYCGTCGHAMSRKRTVDKKYGSVSVSFLCNNQSNCHTKSVMYDAVIDRVKETLRQSIEDFEVKVNNKDETDIAYHRAMIANLKSELRKLKEKDMRQKDAYEDGIYTKEEFVVRNAKLAEQISIAQLKLDEAESSTTQLVDYQERLVRFRECLEALDDDTISAADKNALLKSCIDKIMYYNDSPSLPGIGRYVDNPFRLEIFLKL

SEQ ID NO: 4510 - protein, 519 aa, Unknown
  Description of Unknown: Integrase B4511 sequence
  PTHR30461:SF3,SM00857,G3DSA:1.10.10.2600,IPR036162,PS51737, G3DSA:3.40.50.1390,IPR006119,IPR038109,PF07508,IPR011109, SSF53041,PTHR30461,PS51736,cd00338,PF00239
MYRELSYRSDEIIEYLRKSRADDPSLSVEDVLQKHESILSDWAERHDCCIPAENKYREVVSGETIDDRPEFLSVLRRIESPAIKAILCVEVQRLSRGDLEDAGRLIKILRYTRTNVITPSKTYDLSDEYDRDIFERELKRGNEYLEYQKKIMSRGRLQAVRQGDYIGSVAPYGYDKTFVLEGKKKHYTLCVNPAEASVVRQIFRMRAVEDLGPSRIAKQLNLQGTHPRNNDSWTYNCVKSILQNPVYTGKVFWNRRKVVHSVHSGSVESSRPWSSEYELHNGRHPAIIDSELFGAAQKISGKVTRVKDKVKVRNPFAGLFVCRCGHAMSYHTYPKTGPRILCDMQRVCHTGSCTFEEAEEIVVRILKQAIHDFDVQLKDSAAAMASREETLSSLRLRLAALDKKEISLWDKYAEEQMPKNVFDELNRRVAEDKAAVQASIDSILSEVPTREAIEEKRGRFSAALAALDDSDITAEAKNRMLKSCIEKISYYREPPVRKAGAPNRGWIVGDISVDANLCI

SEQ ID NO: 4511 - protein, 519 aa, Unknown
  Description of Unknown: Integrase B4512 sequence
  PTHR30461:SF3,SM00857,G3DSA:1.10.10.2600,IPR036162,PF13408, IPR025827,G3DSA:3.40.50.1390,PS51737,IPR006119,IPR038109, PF07508,IPR011109,SSF53041,PTHR30461, Coil,PS51736,cd00338,PF00239
MADFEHVIIYLRKSRSDDPATTVEEVLSRHENILQEYAVKEWGARIPEDRIYREVVSGETIKDRPVMQHVMKILETGLVSGVLVVEPQRLSRGDLQDCGHIINSLRYTNTAVITPPKTYDLSDEYDRKFFEMELTRGNDYLEYTKKILNRGRIASVKAGNFIGNSAPYGYRKICVGTGKEKYYTLEIVPEEAEAIRLMFDLYVNKDYGFRSIAHALDMAGYKPRRSAEWSPAAISCMIANETYIGRVVWNRRKTIKKWENDTIVRTRPRQSEYISVPGKHPAIISDELFYAAKAKRNRTPRIKRYVQLLNPLAGLLYCGTCGHAMSRKRTVDKKYGSVSVSFLCNNQSNCHTKSVMYDAVIDRVKETLRQSIEDFEVKVNNKDETDIAYHRAMIANLKSELRKLKEKDMRQKDAYEDGIYTKEEFVVRNAKLAEQISIAQMKLDEAESSTTQLVDYQERLVRFRECLEALDDDTISAADKNTLLKSCIDKIMYYNDSPSLPGVGRYVDNPFRLEIFLKL

SEQ ID NO: 4512 - protein, 519 aa, Unknown
  Description of Unknown: Integrase B4513 sequence
  PTHR30461:SF3,IPR036162,PS51737,IPR011109,PTHR30461, PF00239,G3DSA:1.10.10.2600,IPR006119,SSF53041,cd00338, SM00857,IPR025827,IPR038109,mobidb-lite,PS51736, PF13408,G3DSA:3.40.50.1390,PF07508,Coil
MARKKNIAAGQNAVIYARYSSHNQREVSIEQQVRECMKHAAELGLHVVGTYEDRAISGKTDKRPNFQRMMRDAEKGKFQAVVAWKSNRIGRNMLQAMVNEAKLEDCGVKVFYAEEDFDDTAAGRFALRNMMNVNQFYSENMAEDITRGLYDNASKCMANGRQPLGYKRGEDGRVVLDEANAAVVREIFTRVAAGDLFVDIARDLNAQGIKTSKGANWNKGSFQSICQNERYRGIYIYGDVRVADGIPRIVSDDLWYRVQEAMRMKKNPVGTRHRIGAEDYLLTGKLRCGHCGSYMTGVSGTSRNGELHYYYTCQKRRTEHACDKKNIRRDVIEPAVAQAIKMYCLTDDVIEWMADRTVEYWEKHDNDLQIEALEQQLEENKKATSNMLKAIEMGIITEATRTRMVELETEQSRLSVQLNAAKEDVVKIDREQIISYLELLQQGDIHDRDFQMELFKNFLVAVYVYDDNRMKLVFSCMGDQNSVEIPLETGEDPPDGGLSPDAKMFVLTPDSSTKKHCTS

SEQ ID NO: 4513 - protein, 519 aa, Unknown
  Description of Unknown: Integrase B4514 sequence
  PTHR30461:SF3,cd00338,SM00857,G3DSA:1.10.10.2600,IPR036162, PF13408,PS51737,G3DSA:3.40.50.1390,IPR025827,IPR006119, IPR038109,PF07508,IPR011109,SSF53041,PTHR30461, PS51736,Coil,PF00239
MYEDIKTACLYVRFSSHNQTEQSIEGQTRVCRDFCKRHNIRIVEIYADRATSASKDIEKRVQFLKMIKDSEKGLFDAVIVYKLDRFARSRYDSATYKYRLKRNGVQLISATENISNDPEGIILESVLEGMAEFYSAELSQKINRGMRESAYKHNSIGGAIPLGYKIEDKKLVIDPKTAPIVKEAFEKYADGETVAEICRQFNARGYKTSKGTAFGKSSFTKIFRNERYIGVYTFHDYRAEDAIPAIIDKDLWDRVQLRVGKIKNAPARNKAKVVYLLSGKIFCGHCGSKMNGNCNAGNYYYYQCYGKKNGNVDCKKKNIRKEFIERLVAQDALSLLTDEYIEQIATIACEKNQHEIELDSALPTIRDRIHQVDLSLNNLLKAIESGSAPDMLVKRMGELEKEKKDLQVQAKKESEDIIELDKAQVIYWLEQFRGGNIEDEEFCRMLIDLFVNSVTVWDEDDNTYKVTVAYNLTSLPTKTYRLNKGGTLSDFTSNAPDWEAHKDCIVVLHVVPLHGNFRS

SEQ ID NO: 4514 - protein, 519 aa, Unknown
  Description of Unknown: Integrase B4515 sequence
  PTHR30461:SF3,SM00857,G3DSA:1.10.10.2600,IPR036162,PF13408, PS51737,G3DSA:3.40.50.1390,IPR025827,IPR006119,IPR038109, PF07508,SSF53041,IPR011109,PF00239,PTHR30461, PS51736,Coil,cd00338
MADFEHVIIYLRKSRSDDPATTVEEVLSRHENILQEYAVREWGARIPEDRIYREVVSGETIKDRPVMQHVMKILETGLVSGVLVVEPQRLSRGDLQDCGHIINSLRYTNTAVITPPKTYDLSDEYDRKFFEMELTRGNDYLEYTKKILNRGRIASVKAGNFIGNSAPYGYRKICVGTGKEKYYTLEIVPEEAEAVRLMFDLYVNKDYGFRSIAHALDMAGYKPRRSAEWSPAAISCMIANETYIGRVVWNRRKTIKKWENDTIVRTRPRQSEYISVPGKHPAIISDELFYAAKAKRNRTPRIKRYVQLLNPLAGLLYCGTCGHAMSRKRTVDKKYGSVSVSFLCNNQSNCHTKSVMYDAVIDRVKETLRQSIEDFEVKVNNKDETDIAYHRAMIANLKSELRKLKEKDMRQKDAYEDGIYTKEEFVVRNAKLAEQISIAQLKLDEAESSTTQLVDYQERLVRFRECLEALDDDTISAADKNTLLKSCIDKIMYYNDSPSLPGIGRYVDNPFRLEIFLKL

SEQ ID NO: 4515 - protein, 519 aa, Unknown
  Description of Unknown: Integrase B4516 sequence
  PTHR30461:SF3,cd00338,SM00857,G3DSA:1.10.10.2600,IPR036162, PF13408,IPR025827,G3DSA:3.40.50.1390,PS51737,IPR006119, IPR038109,PF07508,IPR011109,SSF53041,PTHR30461, PS51736,Coil,PF00239
MKKVTKIAETTSANVKLKKIRVAAYCRVSTDSDAQLESLEAQKTHYENYITSRDDWEFAGLYYDEGITGTKKDKRPELLRLIDDCKAGKVDFVITKSISRFSRNTTDCLELVRKLLALHIPIYFEKENINTGSMESELFLAILSSMAEGESVSISENNKWSIQKRFESGTYKVSYPPYGYDWDGEQMIINPEQAAVVKEIFAALLSGKGTHAIADDLNRRGISTKRNGRWTATTIRGMLSNEKYVGDCLFQKTYSDSRFVRHNNHGEQTQYMVKDHHEAIISREDFEAAHAFIHQRATEKGVVKGSDKYQNRYTFSGKIICGECGDTFKRRIHSCTGYKYTAWCCSTHIKDKDKCHMLFVKDDDLKQAFVTMMNKLVYAHRIILKPYVDALKNTSSDDSLRRIQEIQTLLAQNTEKRETLTKLMTQGIIDPILFNKETNELLSQADSFRDEINTLKNAVSGDVTKVTAATALLHFTEKGGILQEFDDDLFNKYVNRIIVRSRNEVRFELKCGLTLRERI

SEQ ID NO: 4516 - protein, 519 aa, Unknown
  Description of Unknown: Integrase B4517 sequence
  PTHR30461:SF3,IPR036162,PS51737,IPR011109,PTHR30461, PF00239,G3DSA:1.10.10.2600,IPR006119,SSF53041,cd00338, SM00857,IPR025827,IPR038109,PS51736,mobidb-lite, PF13408,G3DSA:3.40.50.1390,PF07508,Coil
MARKKNIAAGLDAVIYARYSSHNQREVSIEQQIAECTKHAAALGLRIVGTYEDRAISGKTDNRPRFQQMMRDAEKGKFQAVVAWKSNRIGRNMLQAMVNEAKLDDYGVKVFYAEEDFDDTAAGRFALRNMMNVNQFYSENMAEDIIRGLYDNANKCMANGRQPLGYKRGADGKVMLDEPAAAVVREIFTRVAAGDLFVDIARDLNAKGIKTSKGAAWNKGSFQSICQNERYKGIYIYGNVRIVDGIPRIVSDELWYRVQEAMRMKKNPVGTRHRVGAEDYLLTGKLRCGHCGSYMTGVSGTSRNGELHYYYTCQKRRTEHACNKKNVRRDVIEPAIAQAIKMYCLTDDVIEWMADQTVQYWEKHDNDLQIEALEQQLAENKKATSNMLKAIEMGIITEATRSRMVELETENSKLTAQLSAAKRDVVKINREDLIHELHILRSKDIQDREVQAELFKDFLVAAYIYDDNRLKLVFSFMGKDNSVEIPLETGEDPPDGEDSPDAKMFVLTPDSSTKKHCTS

SEQ ID NO: 4517 - protein, 519 aa, Unknown
  Description of Unknown: Integrase B4518 sequence
  PTHR30461:SF3,cd00338,SM00857,G3DSA:1.10.10.2600,IPR036162, PF13408,PS51737,G3DSA:3.40.50.1390,IPR025827,IPR006119, IPR038109,PF07508,SSF53041,IPR011109,PTHR30461, PS51736,Coil,PF00239
MKKVTKIDKVPNVTSKKQKLRVAAYCRVSTSNDAQLESLETQKAHYESYITSRDDWQFAGLYFDEGITGTKKDKRPELMRLMQDCAAKKIDFIITKSISRFSRNTTDCLELVRKLQELDVPIYFEKENINTGSMESELFLTILSSMAEGESTSISENSKWSIKKRFQNGTFKLSYAPYGYRWDGRTLRIIPEQAEVVKRIFADVLSGKGTDAIAKALDDEGVPTKRGGKWTSTSVRGILANEKYTGDVIFQKTYTDDSFNRHTNKGELDMYYVADHHEAIISKEDFEAAGLLITQRAAEKGIKRESQIYQQRYAFSGKIICNECGDTFRRRMHSSTYGKYVAWCCNTHLADKDKCSMMFLRDDDLKVAFITVLNKLIYSHKLVLKPYAAALQNNSGDESLVRIQHLERLLEQNTEQRETLTRLMAQGYIDQVLYNSETNALLTQANTYREDIEVINATMSGDSSRFFEAERLLHFAERGSMLEEYSEDLFERFVDHIQVYSRQEVGFVMKCGLTFKEMI

SEQ ID NO: 4518 - protein, 519 aa, Unknown
  Description of Unknown: Integrase B4519 sequence
  SM00857,G3DSA:1.10.10.2600,IPR036162,PS51737,G3DSA:3.40.50.1390, IPR006119,IPR038109,PF07508,IPR011109,SSF53041, PF00239,PTHR30461,PS51736,Coil,cd00338
MNIGNQLGKLKKSDQFCIYLRKSRADAEAEKLGEGETLARHERILTELAVKLGLPIGKIYRELVSGETISARKEIQSMINDCYAGMWKGILVVEVTRLSRGNQGDAQTIMDCLRYSNNNNGILVVTPTKTYDIVRSPDDEEYMEFELFMSRREYKMIRKRMMRGKLQAVIEGNYMGSYRPYGYDILKTKTGRTLVPNQEEAPIVKNIFEWTVKEHLTPGKICKRLNTIGVPTYSGDPEWSVSSIKTILTNPTYTGKVRWNDRMQVKTMVDGKLVKSRPRSNHTNQYMLYDGKHEAIIDEITFHAAASHFHSDKTKANLKLMNPFAGILICAKCKKTMIYHGYNKRPNTPPRILHKSSQICNVKSAVLKDVMDAVAHALELYIDDFEMKIDNLPVVDENNILSQLEALQKELIKQEKKLPKLFDAWENGILTDDEFTRRKLINKERIESIKKQMDHLEDSVPTKDEYEEKIMLLSDALKSLLDPTLDADIKNTYLKSIISSIEYSRDNNTEFILDVFLKD

SEQ ID NO: 4519 - protein, 519 aa, Unknown
  Description of Unknown: Integrase B4520 sequence
  PTHR30461:SF3,IPR036162,PS51737,IPR011109,PTHR30461, PS00397,PF00239,G3DSA:1.10.10.2600,IPR006119,SSF53041, cd00338,SM00857,IPR025827,IPR038109, PS51736,IPR006118,PF13408,G3DSA:3.40.50.1390,PF07508,Coil
MRNVAIYVRVSTMHQAEQGYSIDSQLVDCRKKAHDLGAITINEYVDKGKSGAFLDRPELQRMLNDIKTEKEYYDALIIYKLDRLSRDSMGLAYIIKILQQKNIKIISTDGAQYGTNPQDVLTMQIMGSIAQFDNALRKERSIRGKIEKRKQGKLDKITKYGYTFNDEKQNLDIKEDEAIVIRKIFKWFTEDNLSAFRISKKLNSEKIPAPQPKINRKIINKDNIWFESTIRTMLKDETYAGIRHTMIYKFEKISLNNMKKTKRPPEEWISVPVPSIISRETWDKANNIMNRKSTNPRRTQRTWILQGLVFCEKCGQIMNIKQTPKIGKIKENEEKYNFYFKCRTNILNWFGSDKKCPNRQVPIYALEDSVWETLLNIFYSKETLEKYLKETQLKDNVYNLLDKLIEDRNKLSKNKNKIVEWFADGKIDQEIADNKINDLNNKINDLDKKISNLQSTNKSKKSFSINNLYDIFHKIKNPNREQKKEIIHSVVEKIFVERLDNKRSNAYTKPVLKIRIILR

SEQ ID NO: 4520 - protein, 519 aa, Unknown
  Description of Unknown: Integrase B4521 sequence
  SM00857,G3DSA:1.10.10.2600,IPR036162,PF13408,PS51737, G3DSA:3.40.50.1390,IPR025827,IPR006119,IPR038109,PF07508, IPR011109,SSF53041,PTHR30461,Coil,PS51736, cd00338,PF00239
MHLFKEIQSDREAEAHGEGETLARHQRILLDLAKKKEYIVGAIYREVVSGETIADRPVMQQLLHEVESGMWDGVLVVEVERLARGDTIDQGVVSRAFQYSDTKIITPTKIYDPNNEFDEEYFEFGLFMSRREYKTIKRRLNAGRISSVKEGKYCGNKPPYGYERIKLAREKGYTLRPVPAQAEIVKMIYTWYAGDGCEQIGVAKIVRKLNDMGIKSALGGDWTPASIQGILTNPVYIGKIRWNGRKTVKTIQNGQVVKTRPRSRNVLICEGLHPSIISDDLYNSVQEIRQKNPPRPISIKNTVRNPLAGIVYCSKCGRAMVRRPHQKRGQEDTLMCPYTSCPTVSSKLSLVEKAVLDGIKEITEKYKLNNDINVPYNTINSGIVSKQNLIREKESELESLNVQKAKQYDLLERGIYTTEVFLERSKTIARSIQSCSDIITKLREEIEHDENIKAQQSNFIPRCEELLNNYWDLNIESRNRMLKNLVEKVVYSKNIKNTYGKGNEINFELDIFPKIQKND

SEQ ID NO: 4521 - protein, 519 aa, Unknown
  Description of Unknown: Integrase B4522 sequence
  PTHR30461:SF3,SM00857,G3DSA:1.10.10.2600,IPR036162,PF13408, PS51737,G3DSA:3.40.50.1390,IPR025827,IPR006119,IPR038109, PF07508,IPR011109,SSF53041,PTHR30461,PS51736, cd00338,PF00239
MARSAKKIEYAPAEQIGVIYARYSSHNQKEESIEQQIAECTEFAEKNGIRIIGIYADKAVSGRSDRRPNFQRMMRDAEKRHFQIVVAYKSNRIARNMLNALQYEARLDLFGIKTLYAKEEFGNTAAGRFALRTMMNVNQFYSENMGEDIKRGMVDNANECKVNGMLPLGYVKSNEGKYAVAPDEAAVVREIFDSFLKDVPVAEIARSLNQRGIRTKLGREWNKNSFHIMLKNDNYIGVVVEDGIPPILEREVFAAVQEKLANKKKTAGRRSANGEYLLTGKLFCGYCGSYMIGVSGTGENGTVHHYYQCQKRHAESRCEKKNVRRDFIEKLIARLTQEYILQDDTIEWIADSTMSFQAMARRESGIAQLEHDLADKRKIAKNIMSAIEQGIITETTKARLLEVEAETRDLERSLSVAKAAAQPVERERVVFSLEQMREGNVGSKEHQKKLIDTFVKSVTLWDDRIQIDYYHTPGKHKFSYSLEELTSKVENESNAADVRAESLEVHHQAAPKKMPLRKA

SEQ ID NO: 4522 - protein, 519 aa, Unknown
  Description of Unknown: Integrase B4523 sequence
  SM00857,G3DSA:1.10.10.2600,IPR036162,PS51737,G3DSA:3.40.50.1390, IPR006119,IPR038109,PF07508,SSF53041,IPR011109, PTHR30461,Coil,PS51736,cd00338,PF00239
MQQYEEYLIYLRKSRSDASLEAMGVDVLERHEQILLDLAKRMNLSIGGIYREVVSGESISARPEMQRLLSEVEAGRWKGVVVMEVERLARGDTIDQGIVQRAFQYSGTQIVTPAKTYNPNNEFDEEYFEFGLFMSRREYKTIRRRMRAGVTAAVKEGKWPFNKAPYGWQRVKLEHARGWVLAPDPEEAPVVKLIFQLYTGPDRIGITNICRYLDNRGVKPRNGDTWTECSIMGILRNIVNDQRVGIGRRKIVKQVQNGSVSKVRPHSDYDFTAPGLQPRLIDHDVFLEAQTHLGKNSHKLPESYGIKNPLAGIVVCPCCGKKMMRRPASKTPGGASYDVLKCNTRNCPTIGSALDLVEREVIQALSDWVAGYQLDPTLEVENKVPEKEQLLSSAISNHDVLLKQNGNLYDLLEQGVYTTEIFLERSHELQKRIKESEAHIEVLKKDLEYEKEKIANVENFIPSCKELLSCYWELSAQDRNKALKMLLENVEYTKTKRNQKGDKDNPTFTLNLKPRIPRI

SEQ ID NO: 4523 - protein, 519 aa, Unknown
  Description of Unknown: Integrase B4524 sequence
  cd00338,SM00857,G3DSA:1.10.10.2600,IPR036162, PS51737,G3DSA:3.40.50.1390,IPR006119,IPR038109, PF07508,IPR011109,SSF53041,PTHR30461, PS51736,Coil,PF00239
MNIGNQLGKLKKSDQFCIYLRKSRADAEAEKLGEGETLARHERILTELAVKLGLPIGKIYRELVSGETISARKEIQSMINDCYAGMWKGILVVEVTRLSRGNQGDAQTIMDCLRYSNNNNGILVVTPTKTYDIVRSPDDEEYMEFELFMSRREYKMIRKRMMRGKLQAVVEGNYMGSYRPYGYDILKTKTGRTLVPNQEEAPIVKNIFEWTVKEHLTPGKICKRLNTIGVPTYSGDPEWSVSSIKTILTNPTYTGKVRWNDRMQVKTMVDGKLVKSRPRSNHTNQYMLYDGKHEAIIDEITFHAAASHFHSDKTKANLKLMNPFAGILICAKCKKTMIYQGYNKRPNTPPRILHKSSQICNVKSAVLKDVMDAVAHALELYIDDFEMKIDNLPVVDENNILSQLEALQKELIKQEKKLPKLFDAWENGILTDDEFTRRKLVNKERIESIKKQMDHLEDSIPTKDEYEEKIMCLSDALKSLLDPTLDADIKNTYLKSIISSIEYSRDNNTEFILDVFLKD

SEQ ID NO: 4524 - protein, 519 aa, Unknown
  Description of Unknown: Integrase B4525 sequence
  PTHR30461:SF3,cd00338,SM00857,G3DSA:1.10.10.2600,IPR036162, PF13408,PS51737,G3DSA:3.40.50.1390,IPR025827,IPR006119, IPR038109,PF07508,IPR011109,SSF53041,PTHR30461, PS51736,Coil,PF00239
MYEDIKTACLYVRFSSHNQTEQSIEGQTRVCRDFCKRHNIRIVEIYADRATSASKDIEKRVQFLKMIKDSEKGLFDAVIVYKLDRFARSRYDSATYKYRLKRNGVQLISATENISNDPEGIILESVLEGMAEFYSAELSQKINRGMRESAYKHNSIGGAIPLGYKIEDKKLVIDPKTAPIVKEAFEKYADGETVAEICRQFNARGYKTSKGTAFGKSSFTKIFRNERYIGVYSFHDYRAEDAIPAIIDKDLWDRVQLRVGKIKNAPARNKAKVVYLLSGKIFCGHCGSKMNGNCNAGNYYYYQCYGKKNGNVDCKKKNIRKEFIERLVAQDALSLLTDEYIEQIATIACEKNQHEIELDSALPTIRDRIHQVDLSLNNLLKAIESGSAPDMLVRRMGELEKEKKELQVQAKKESEDIVELDKAQVIYWLEQFRGGSIEDEEFCRMLIDLFVNSVTVLDEDDGSYKVTVAYNLTSLPTKTYRLNKGGTLSDFTSNAPDWEAHKDCIVVLHVVPLHGNFRS

SEQ ID NO: 4525 - protein, 519 aa, Unknown
  Description of Unknown: Integrase B4526 sequence
  PTHR30461:SF3,IPR036162,PS51737,IPR011109,PTHR30461, PS00397,PF00239,G3DSA:1.10.10.2600,IPR006119,SSF53041, cd00338,SM00857,IPR025827,IPR038109,SSF161270, PS51736,IPR006118,PF13408,G3DSA:3.40.50.1390,PF07508,Coil
MRNVAIYVRVSTMHQAEQGYSIDSQLVDCRKKAHDLGAITINEYVDKGKSGAFLDRPELQRMLNDIKTEKEYYDALIIYKLDRLSRDSMGLAYIIKILQQKNIKIISTDGAQYGTNPQDVLTMQIMGSIAQFDNALRKERSIRGKIEKRKQGKLDKITKYGYTFNDEKQNLDIKEDEAIVIRKIFKWFTEDNLSAFRISKKLNSEKIPAPQPKINRKIINKDNIWFESTIRTMLKDETYAGIRHTMIYKFEKISLNNMKKTKRTPEEWISVPVPSIISRETWDKANNIMNRKNTNPRRTQRTWILQGLVYCEKCGQIMNIKQTPKIGKIKENEEKYNFYFKCRTNILNWFGSGKKCPNRQVPIYALEDSVWETLLNIFYSKETLEKYLKETQVKDNVYTLLDKLIEDRNKLSKNKNKIVEWFADGKIDQEIADNKINDLNNKINDLDKKISNLQSTNRSKKSFSINNLYDIFHKIKNPNREQKKEIIHSVVEKIFVERLDNKRSNAYTKPVLKIRIILR

SEQ ID NO: 4526 - protein, 519 aa, Unknown
  Description of Unknown: Integrase B4527 sequence
  PTHR30461:SF3,SM00857,G3DSA:1.10.10.2600,IPR036162,PF13408, PS51737,G3DSA:3.40.50.1390,IPR025827,IPR006119,IPR038109, PF07508,SSF53041,IPR011109,PTHR30461,Coil, PS51736,cd00338,PF00239
MADFEHVIIYLRKSRSDDPATTVEEVLFRHENILQEYAVKEWGARIPEDRIYREVVSGETIKDRPVMQHVMKILETGLVSGVLVVEPQRLSRGDLQDCGHIINSLRYTNTAVITPPKTYDLSDEYDRKFFEMELTRGNDYLEYTKKILNRGRIASVKAGNFIGNSAPYGYRKICVGTGKEKYYTLEIVPEEAEAIRLMFDLYVNKDYGFRSIAHALDMAGYKPRRSAEWSPAAISCMIANETYIGRVVWNRRKTIKKWENDTIVRTRPRQSEYISVPGKHPAIISDELFYAAKAKRNRTPRIKRYVQLLNPLAGLLYCGTCGHAMSRKRTVDKKYGSVSVSFLCNNQSNCHTKSVMYDAVIDRVKETLRQSIEDFEVKVNNKDETDIAYHRAMITNLKGELKKLKEKDMRQKDAYEDGIYTKEEFVVRNAKLAEQISIAQLKLDEAESSTTQLVDYQERLVRFRECLEALDDDTISAADKNALLKSCIDKIMYYNDSPSLPGIGRYVDNPFRLEIFLKL

SEQ ID NO: 4527 - protein, 519 aa, Unknown
  Description of Unknown: Integrase B4528 sequence
  PTHR30461:SF3,SM00857,G3DSA:1.10.10.2600,IPR036162,PF13408, IPR025827,G3DSA:3.40.50.1390,PS51737,IPR006119,IPR038109, PF07508,IPR011109,SSF53041,PTHR30461,Coil, PS51736,cd00338,PF00239
MADFEHVIIYLRKSRSDDPATTVEEVLSRHENILQEYAVREWGARIPEDRIYREVVSGETIKDRPVMQHVMKILETGLVSGVLVVEPQRLSRGDLQDCGHIINSLRYTNTAVITPPKTYDLSDEYDRKFFEMELTRGNDYLEYTKKILNRGRIASVKAGNFIGNSAPYGYRKICVGTGKEKYYTLEIVSEEAEAIRLMFDLYVNKDYGFRNIAHALDMAGYKPRRSAEWSPAAISCMIANETYIGRVVWNRRKTIKKWENDTIVRTRPRQSEYISVPGKHPAIISDELFYAAKAKRNRTPRIKRYVQLLNPLAGLLYCGTCGHAMSRKRTVDKKYGSVSVSFLCNNQSNCHTKSVMYDAVIDRVKETLRQSIEDFEVKVNNKDETDIAYHRAMIANLKSELRKLKEKDMRQKDAYEDGIYTKEEFVVRNAKLAEQISIAQLKLDEAESSTTQLVDYQERLVRFRECLEALDDDTISAADKNTLLKSCIDKIMYYNDSPSLPGIGRYVDNPFRLEIFLKL

SEQ ID NO: 4528 - protein, 519 aa, Unknown
  Description of Unknown: Integrase B4529 sequence
  SM00857,G3DSA:1.10.10.2600,IPR036162,PS51737,G3DSA:3.40.50.1390, IPR006119,IPR038109,PF07508,IPR011109,SSF53041, PTHR30461,Coil,PS51736,cd00338,PF00239
MYELGEYLIYLRKSRSDSELEKMGVDVLERHEQILLNLAKQMKLSIGGIYREVVSGDSISARPEMQKLLSEVESGRWKGVLVMEIERLARGDTVDQGIVQRAFQYSGTLIVTPAKVYNPDNEFDEEYFEFGLFMSRREYKTIKRRMQTGRYAAVREGKWPYNTAPYGFNRKKLSKEKGWTLELNKDEAPVVRLIFSLYTGPNRVGITKIKHELNQRGIKPRKSDKWTESTIRDILRNVVYDQQVKIGERKVVMVIQDGSPAKTRPRADDYIIVPGRQPRLIAHEIFLEAQSYLGRGKPKAPSSYGVKNPLAGLMVCSECKKKMMRRPASPDGKYVPYDLLMCTTEHCPTIGSPLDLVEEMVVQALSDWVKDYKLSGKATYVSNIPEKEAILRTAKETHEQLLQQKEKLYDFLEQGIYSTETFLERSSSLQQRISESSQSIQLLEKDLEEEKERELNVEMFLPACEGLLDYYWNLSAQERNQALRQVIDSIEYKKLVKNKKGDVRNANFELTIKPKIPRK

SEQ ID NO: 4529 - protein, 519 aa, Unknown
  Description of Unknown: Integrase B4530 sequence
  PTHR30461:SF3,cd00338,SM00857,G3DSA:1.10.10.2600,IPR036162, PF13408,PS51737,G3DSA:3.40.50.1390,IPR025827,IPR006119, IPR038109,PF07508,IPR011109,SSF53041, PTHR30461,PS51736,Coil,PF00239
MTKDLQTGVIYARYSSDKQRDESIEGQIRECTEYAQREGILITKIYTDRALSARTDNRPEFLQMIRDSAHQSFNYVIVYQLDRFSRSREDSAKYKGILRRNGVRVLSAKEHITNEPAGIILESMLEGMAEYYSVELSQKVKRGMTENALKGKMNGSAVPLGYDLTESHHLAVNAHEAKAVRLIYDLYLKQHSIAKISDILHSKGYLTKRGRKISPSVIKTILSNEKYIGVYSWGDIRIEGSIPPIISKKVFDEVQQVMPTRIKNKGRRSEMYNLCGKLVCGECGGHYMGSTATSRNKEKHYYYVCTNRRKYHTCTAPNIRRDELEDLVINRTLEILNQPSNIARIVDLVMSGYNNTTKEAKIAMQGINDKIKAIDTELNNCMTAIKQGFITERLKGEIENLESERNNLLEQKANQESALIPIKFTADHIEYFLERMAKENPTTKAGRSRILDTFIKSVTIYSDRVEIVFNYKNDLPVFNTQCATGSHFEVLVGNLHNKANHFYINSTAYPITLIVPFGF

SEQ ID NO: 4530 - protein, 519 aa, Unknown
  Description of Unknown: Integrase B4531 sequence
  PTHR30461:SF3,SM00857,G3DSA:1.10.10.2600,IPR036162,PS51737, G3DSA:3.40.50.1390,IPR006119,IPR038109,PF07508,IPR011109, SSF53041,PTHR30461,PS51736,cd00338,PF00239
MYRELSYRSDEIIEYLRKSRADDPSLSVEDVLQKHESILSDWAERHDCCIPAENKYREVVSGETIDDRPEFLSVLRRIESPAIKAILCVEVQRLSRGDLEDAGRLIKILRYTRTNVITPSKTYDLSDEYDRDIFERELKRGNEYLEYQKKIMNRGRLQAVRQGDYIGSVAPYGYDKTFVLEGKKKHYTLCINPAEASVVRQIFRMRAVEDLGPSRIAKQLNLQGTHPRNNDSWTYNCVKSILQNPVYTGKVFWNRRKVVHSVHSGSVESSRPWSSEYELHDGRHPAIIDSELFGTAQKISGKVTRAKDKVKVRNPFAGLFVCRCGHAMSYHTYPKTGPRILCDMQRVCHTGSCTFGEAEEIVVRILKQAIHDFDVQLKDSAAAMASREGTLSSLRLRLAALDKKEISLWDKYAEEQMPKNIFDELNRRVAEDKAAVQASIDSILSEVPTREAIEEKRGRFSAALAALDDSDITAEAKNRMLKSCIEKISYYREPPVRKAGAPNRGWIVGDISVDANLCI

SEQ ID NO: 4531 - protein, 519 aa, Unknown
  Description of Unknown: Integrase B4532 sequence
  PTHR30461:SF3,SM00857,G3DSA:1.10.10.2600,IPR036162,PF13408, PS51737,G3DSA:3.40.50.1390,IPR025827,IPR006119,IPR038109, PF07508,IPR011109,SSF53041,PF00239, PTHR30461,PS51736,Coil,cd00338
MYEDIKTACLYVRFSSHNQTEQSIEGQTRVCRDFCKRHNIRIVEIYADRATSASKDIEKRVQFLKMIKDSEKGLFDAVIVYKLDRFARSRYDSATYKYRLKRNGVQLISATENISNDPEGIILESVLEGMAEFYSAELSQKINRGMRESAYKHNSIGGAIPLGYKIEDKKLVIDPKTAPIVKEAFEKYADGETVAEICRQFNARGYKTSKGTAFGKSSFTKIFRNERYIGVYTFHDYRAEDAIPAIIDKDLWDRVQLRVGKIKNAPARNKAKVVYLLSGKIFCGHCGSKMNGNCNAGNYYYYQCYGKKNGNVDCKKKNIRKEFIERLVAQDALSLLTDEYIEQIATIACEKNQHEIELDSALPTIRDRIHQVDLSLNNLLKAIESGSAPDMLVKRMGELEKEKKDLQAQAKKESEDIVELDKAQVIYWLEQFRDGSIEDEEFCRMLIDLFVNSVTVWDEDDNTYKVTVAYNLTSLPTKTYRLNKGGTLSDFTSNAPDREAHKDYIVVLHVVPFHGNFRS

SEQ ID NO: 4532 - protein, 519 aa, Unknown
  Description of Unknown: Integrase B4533 sequence
  PTHR30461:SF3,cd00338,SM00857,G3DSA:1.10.10.2600,IPR036162, PF13408,PS51737,G3DSA:3.40.50.1390,IPR025827,IPR006119, IPR038109,PF07508,IPR011109,SSF53041,PTHR30461, PS51736,Coil,PF00239
MARKKNIAAGLDAVIYARYSSHNQREVSIEQQIAECTKHAAALGLRIVGTYEDRAISGKTDNRPRFQQMMRDAEKGKFQAVVAWKSNRIGRNMLQAMVNEAKLDDYGVKVFYAEEDFDDTAAGRFALRNMMNVNQFYSENMAEDITRGLYDNANKCMANGRQPLGYKRGADGKVMLDEPAAAVVREIFTRVAAGDLFVDIARDLNAKGIKTSKGAAWNKGSFQSICQNERYKGIYIYGNVHIVDGIPRIVSDELWYKVQEAMRMKKNPVGTRHRVGAEDYLLTGKLRCGHCGSYMTGISGTSRNGELHYYYTCQKRRTEHACNKKNVRRDVIEPAIAQAIKMYCLTDDVIEWMADQTVQYWEKHDNDLQIEALEQQLAENKKATSNMLKAIEMGIITEATRSRMVELETENSKLTAQLSAAKRDVVKINREDLIDELHILRSKDIHDREVQAELFKDFLVAAYIYDDNRLKLVFSFMDKDNSVEIPLETGEDPPDGGDSPDAKMFVLPLECSTKKHCTS

SEQ ID NO: 4533 - protein, 519 aa, Unknown
  Description of Unknown: Integrase B4534 sequence
  PTHR30461:SF3,cd00338,SM00857,G3DSA:1.10.10.2600,IPR036162, PF13408,PS51737,IPR025827,G3DSA:3.40.50.1390,IPR006119, IPR038109,PF07508,IPR011109,SSF53041,PTHR30461, mobidb-lite,Coil,PF00239
MPRKPAKHPAKPKRGKKLEIEEPGVLYGRYSSHNQKDISVEQQFEKGYELAAEYGIRIIDTYADRAVSGRTDKRRDFQRMMTDAAKGKFRYVIAWKSNRMGRNMLEALINEARLQDLGVRVLYVEEDFDDTAAGRFAARSMMNVNQFYSENMAEDIKRGLYDNAANCMVANGHLPYGYKADETLHYAIDEPKAAVIREIFTRVSCGEAFVDIMASLNVRGIKTSYGRPWGRSSFQKILSNERYRGIYIYGDVRKEGGIPRIISDELYFKVQEVITTKKNPQGRHRVNGDYLLTGKLFCGHCKSPMTGVSGTGRSGNLHYYYVCQKRRTEKTCDKKNVRRDEIELQVAQAIKDYALKDDVIEWIADSTVAYNERKEAESKVGILEDQLAGTEHGIKNIMSAIEQGIITETTKSRLVELESERATIKANIAAARADIVTVSRDDIISGLEMFRDGDVHDKKYQERLFDTFLVAVYAYDDDLRLVFSFSGNKNTIQIPIESAVNAVENNEAECSFKLCSAPP

SEQ ID NO: 4534 - protein, 519 aa, Unknown
  Description of Unknown: Integrase B4535 sequence
  PTHR30461:SF3,IPR036162,PS51737,IPR011109,PTHR30461, PF00239,G3DSA:1.10.10.2600,IPR006119,SSF53041,cd00338, SM00857,IPR025827,IPR038109,mobidb-lite,PS51736, PF13408,G3DSA:3.40.50.1390,PF07508,Coil
MARKKNIAAGQDAVIYARYSSHNQREVSIEQQVSECMKHAAELGLHVVGTYEDRAISGKTDNRPRFQQMMRDAEKGKFQAVVSWKSNRIGRNMLQAMVNEAKLDDYGVKVFYAEEDFDDTAAGRFALRNMMNVNQFYSENMAEDITRGLYDNASKCMANGRQPLGYKRGEDGRVVLDEANAAVVREIFTRVAAGDLFVDIARDLNAQGIKTSKGANWNKGSFQSICQNERYRGIYIYGDVRVADGIPRIVSDDLWYRVQEAMRMKKNPVGTRHRVGAEDYLLTGKLRCGHCGSYMTGVSGTSRNGELHYYYTCQKRRTEHACDKKNIRRDVIEPAVAQAIKMYCLTDDVIAWIADRTVEYWEKHDNDLQIEALEQQLEENKKATSNMLKAIEMGIITEATRTRMVELETEQSRLSVQLNAAKEDVVKIDREQIISYLELLQQGDIHDRDFQMELFKNFLVAVYVYDDNRMKLVFSCMGDQNSVEIPLETGEDPPDGGLSPDAKMFVLTPDSSTKKHCTS

SEQ ID NO: 4535 - protein, 519 aa, Unknown
  Description of Unknown: Integrase B4536 sequence
  PTHR30461:SF3,IPR036162,PS51737,IPR011109,PTHR30461, PS00397,PF00239,G3DSA:1.10.10.2600,IPR006119,SSF53041, cd00338,SM00857,IPR025827,IPR038109,SSF161270, PS51736,IPR006118,PF13408,G3DSA:3.40.50.1390,PF07508,Coil
MRNVAIYVRVSTMHQAEQGYSIDSQLVDCRKKAHDLGAITINEYVDKGKSGAFLDRPELQRMLNDIKTEKESYDALIIYKLDRLSRDSMGLAYIIKILQQKNIKIISTDGAQYGTNPQDVLTMQIMGSIAQFDNALRKERSIRGKIEKRKQGKLDKITKYGYIFNDEKQNLDIKEDEAIVIRKIFKWFTEDNLSAFRISKKLNTEKIPAPQPKINRKIINKDNIWFESTIRTMLKDETYAGIRHTMIYKFEKISLNNMKKTKRPPEEWISVPVPSIISRETWDKANNIMNRKSTNPRRTQRTWILQGLVFCEKCGQIMNIKQTPKIGKIKENEEKYNFYFKCRTNILNWFGSDKKCPNRQVPIYTLEDSVWETLLNIFYSKETLEKYLKETQLKDNVYNLLDKLIEDRNKLSKNKNKIVEWFADGKIDQEIADNKINDLNNKINDLDKKISNLQSTNRSKKSFSINNLYDIFHKIKNPNREQKKEIIHSVVEKIFVERLDNKRSNAYTKPVLKIRIILR

SEQ ID NO: 4536 - protein, 519 aa, Unknown
  Description of Unknown: Integrase B4537 sequence
  SM00857,G3DSA:1.10.10.2600,IPR036162,PF13408,IPR025827, G3DSA:3.40.50.1390,PS51737,IPR006119,IPR038109,PF07508, SSF53041,IPR011109,PTHR30461,PS51736,cd00338, PF00239
MSLANDYKGISDRVTVIAATTGNKTDKIRVAAYCRVSTDKTDQVNSFITQMRYYTDYIKSNPKMILIDIYADEGISGTLMDKRDEFKRLLKDCKNRKIDRVLVKSVTRFARNSLECIEAVRELKSYGVSVFFENDKIDTENMNSEMLLYIKSAFAQNESMSLSKRMVQSIRMRMEEGTYKLGIAPYGYKLVDGELVVEPDEARNIRKIFDLYLSGIGANAIVKYMQAHETGDMLWNIGRINYVLENERYTGNMIMGKTYTPNVLPLRNRPNKGQMDSFYYSDTHEGIITKEEFDKVKEIKKMRQKTFCRGAKEKAFFSGKIKCRHCGWAYRSIVRNDKMLWSCSKKGLSIDVCHTPNRSNEQIERAFVSMYNKVRQNEKSLIDETIAQLQMLKVRINRGNDEIMQIDKDISVLSAQESLFTTLYSEGSFNEDLYFEKTDTIKKKISELKTRRAHLVSEDDDERCIERLRELKRNLQQFPVGITEFDKEIFNGIIKQIYIEESGAITFVLKGDLEFSAEV

SEQ ID NO: 4537 - protein, 518 aa, Unknown
  Description of Unknown: Integrase B4538 sequence
  cd00338,SM00857,G3DSA:1.10.10.2600,IPR036162,PS51737, G3DSA:3.40.50.1390,IPR006119,IPR038109,PF07508,IPR011109, SSF53041,PTHR30461,PS51736,Coil,PF00239
MSYCIYLRKSRKDLEAEQHGEGETLARHEHTLLSVAKRQNLIIGAIYREVVSGETIADRPVIQQVLHEVESGLWDGVLVMEVERLARGDTIDQGMVQRAFQYSNTLIITPLKTYNPANEFDQEYFEFGLFMSRREYKTIKRRMQAGRYAAVQEGKWPFNSAPYGWDRKKLESEKGWTLILNETEAPVVKLIFSLFTGSDRVGVTFIVHHLNDRGIKPRNGGKWTESTIREILSNPVNDKKVAIGKRKQSVQIVDGSPVKTRPRSGNYDIIVEGRQPRLIEHDMFAEAQSYLGLGTPKPPESYGTKNPLAGLLICNECKKRLQRRPAANPAFKNGAKYDMLICKTDGCPTVGSPLTLVEKQLIACLEDWVSGYELKSLLPESNVPEKQKLVDAAQHNHALLIQQNERLHDLLEQGVYSTQTFLERSQKLQERIRESTTQLAILEKDLEYEKEKDANINNFLPACKSLLAYYWELSIPERNKALKILLEGVEYKKTEKNKRGKKDTPTFELTLKPRIPRI

SEQ ID NO: 4538 - protein, 518 aa, Unknown
  Description of Unknown: Integrase B4539 sequence
  cd00338,SM00857,G3DSA:1.10.10.2600,IPR036162, PF13408,PS51737,G3DSA:3.40.50.1390,IPR025827, IPR006119,IPR038109,PF07508,IPR011109, SSF53041,PTHR30461,Coil,PF00239
MQENETYVIYLRKSRADSEKSSLEEVFAKHESELQSLAERTLGNRIPEDKIFREVVSGETITDRPVISQILKVMESKKIKGVFVVDPQRLTRGDLLDKGHLINVFKYTNTKIITPYKTFDLNNDFDLKLFKMELDKGSDYLEYYKMIQARGRIASVRSGQYIGSTAPYGYDKYSYKENKHTVNTLKPNSDEATVVQLIYHLYVNESLSYAAIANKLNAMNIKPRKSTSWSPYSLKEILHNPVYIGKVRWNRRKTVMKYKNESLLKTRPIALNNSIISDGIHKAIIDETLFDSAQNRSGKSPRNHSSSKLKNPLAGLMFCGNCGRAMSYKTYKNNAGSEKQPPRYLCNNQSNCHTKSVKATDVINQIIGALECYIEDFKVELENDDGNSFNVRSQIISVLNKQLQDLEIREETQYEMLENKIYTPELFKKRRQKLLEEREILLDKLQEAKVQEPVKIDYQEKIISFTDTVEALKNPDIDILQKNMLLKKCIKKITYTTDEEKGNRWRESTFEIDITPLI

SEQ ID NO: 4539 - protein, 518 aa, Unknown
  Description of Unknown: Integrase B4540 sequence
  cd03768,PTHR30461:SF3,SM00857,IPR036162,PF13408, IPR025827,G3DSA:3.40.50.1390,PS51737,IPR006119,PF07508, IPR011109,SSF53041,PTHR30461,PS51736,Coil, PF00239
MFTVGIYARKSVYRDNSDSVQVQVRLGKEYAGIIFKDKELEFRVYDSDEGFSGKNTNRPDFQRMMNDVENGLLNAVVVYKLDRISRNVQQFSAMYEILHQHQVAFISVKESFDTSTPMGRTVMYILAAFAQLERENTSERVTDGMLALGTAGKWTGGICPSGMKSVRMQCGDKYHSYLQIDPDTIWRPKMLYELLLDGNPITRIERYCRDHGIKSQTGKYLNTSQIYNILTNPVYCQNSIEAYYYFCDLGCKLPEASGFDGNHGLIGYGKTKTGTNSQHKRTSSEWTIAIGIHDYVIPADKWIAAQKRLGTNKMIRTAKYEAGILKGVLKCSCGGSMEVRTYTKNNIQFSYYYCRRMQRYGKEYCNSGYTPVKKLDSVFLNKLKQIQLDPARVTMDHPEDVFTQSSADLKKILHNLEASIMNLTNALTQAMGSSASEYIIRQIEELDHQKQITEAALRDAKIKEAQRIQNTNAVDQIYQSICYLLDHFDDIDYHGKNELIRKIVKNCIFDGENLKITF

SEQ ID NO: 4540 - protein, 518 aa, Unknown
  Description of Unknown: Integrase B4541 sequence
  SM00857,G3DSA:1.10.10.2600,IPR036162,PS51737,G3DSA:3.40.50.1390, IPR006119,IPR038109,PF07508,IPR011109,SSF53041, PTHR30461,PS51736,cd00338,PF00239
MNIGNQLGKLKKSDQFCIYLRKSRADAEAEKLGEGETLARHERILTELAVKLGLPIGKIYREIVSGETISARKEIQSMINDCYAGMWKGILVVEVTRLSRGNQGDAQIIMDCLRYSNNNNGVLVVTPTKVYDIVQSSDDEEYMEFELFMSRREYKMIRKRMMRGKLQAVVEGNYMGSYRPYGYDILKTKTGRTLVPNPEEAPIVKNIFEWTVKEHLTPGKICKRLTSLGVPTYTGSAEWAIGTVKTILTNPTYTGKVRWNDRMQTKTLVNGNLVSSRPRAHTSQYMLYEGKHKGIVDEITFHAASSRFYSDKTKANLKLMNPLAGILICAKCKKAMIYQGYLKRPNTLPRILHKTSQVCNVKSAVLKDVVDAVAHALELYIDDFEMKIDNLPDVDENSILSQLEVLQKELIKQEKKLPKLFDAWEDGILTDEEFTRRKLINKERIESIKKQMDHLEDSVPTKDEYEEKIMLLSDALKSLLDPTLDADIKNTYLKSIISSIEYSRDNNTEFILDVFLKD

SEQ ID NO: 4541 - protein, 518 aa, Unknown
  Description of Unknown: Integrase B4542 sequence
  PTHR30461:SF3,SM00857,G3DSA:1.10.10.2600,IPR036162, PF13408,IPR025827,PS51737,G3DSA:3.40.50.1390, IPR006119,IPR038109,PF07508,IPR011109, SSF53041,PF00239,PTHR30461,PS51736,Coil,cd00338
MLSFNNIIIYLRKSRSDDPTQSVEEVLARHEHILQEYCMKEYGEYIPENRIYREVVSGETIQDRPIIQQVLRLLESGGIDGVLVVEPQRLSRGDLENCGHIVNSFRYTNTLVITPTKTYNLQDEYDRKFFEMELTRGNDYLEYTKKILARGRLASVMQGNYINAIRPYGYNKVVIGTGKDKIHTLEIFKEENDVLLLMKHLYLDENYGLVRIAHTLDNLGIKAPNCEHWSPSTIKRMLSNPLYNGKIVWNRRKTVVKWKDGKKVKSKPLNKSDDVIIVQGKHPATFDDETFNAILKRMENSPKIKRSSKLRNPFAGLLFCSTCGSAMILRRSGRKSGVYSLTCNRQSICHTKSVQYKAVLLKVKQSLAEAISDFEVKMSNNDTTASELHAINISTLENELEQLYRKDLIQKDAFEDGIYSKAEYMQRNAQLQTQIATVTDKLNRAREDAPEPVSYEERIVCFRDCLNALDDDTVSAEVKNTLLKACISKIVYYNDSPSISGIGRYVDNPFRLEIFLKL

SEQ ID NO: 4542 - protein, 518 aa, Unknown
  Description of Unknown: Integrase B4543 sequence
  cd03768,PTHR30461:SF3,SM00857,IPR036162,PF13408, IPR025827,G3DSA:3.40.50.1390,IPR006119,PF07508,SSF53041, IPR011109,PTHR30461,PS51736,Coil,PF00239
MRIAIYARKSAFSDKSESVHNQDRMCREYCALHFPGEHIFLNYTDEDKTGANTNRPALQKMMRDVHAGIIDLLIVYQLDRLTRDVRDYCNLSAELNSCGVQFTSVKESVDTSTPIGEALTTLSAVFAQMERKTLSNRVYDNMMGLARSGWWTGGNLPCGYTTQRVVENGKPHTLLVPDPEKAEQLLNVFKLFVERGSSFRSFASFALTNDCFDVFGVPSTSQVRRVITSPYGAPANKDLRDYYLSIGANVVGAESDWDGTHGVMRYGVTDQRNGNATNPLTAWIVCPGRHEPILPADLWLAAQDQVKSNMFCKQAKYPPVLLKGILRCKCGRMMSPVRSRYKGKVYISYRCTRTGEVGRKSPDCVSACRDYVLDEKVLSVFREIERDPEVIKKYSPAAPTADQDVLHKKEKEIESLQKKIGNLSSALAINPESTAAKYIIADMESLDSQIQKKQMELAGLRANRLTAAQAEKELAAKQKEIARLVRNLDDLPPEEQNKIARSVLRKCVWDGETLFLEF

SEQ ID NO: 4543 - protein, 518 aa, Unknown
  Description of Unknown: Integrase B4544 sequence
  cd03768,PTHR30461:SF3,SM00857,IPR036162,PF13408,PS51737,G3DSA:3 .40.50.1390,IPR025827,IPR006119,PF07508,IPR011109,SSF53041, PTHR30461,PS51736,Coil,PF00239
MRIAIYARKSAFSDKSESVHNQDRMCREYCALHFPGEHVFVNYADEDKTGANVNRPALQKMMRDVHAGIIDLLIVYQLDRLTRDVRDYCNLSAELNDCGVHFTSVKEAVDTSTPIGEALSTLSAVFAQMERKTLSNRVYDNMMGLAMAGWWTGGNLPCGYTTRRVVENGKPHTLLVPDPEKAEQLLNVFKLFVERGSSFRSFASFALTNDCFHVFGVPSTSQVRRVITSPYGAPANRDLRDYYLSIGANVVGTESDWDGTHGVMRYGVTDQRNGNATNPRTAWIVCPGRHEPILPADLWLAAQDQVKSNMFCKQAKHPPVLLKGILRCKCGRMMSPVRSRYKGKVYISYRCTRTGEVGRKSPDCVSACRDYVLDEKVLSVFREIERDPDVIKKYSPAVPATDQDSLHKKEKEIELLQKKIGNLSSALAINPESTAAKYIIADMESLDSQIQKKQMELASLRASRLTAAQAEKELFEKQKEIARLVRNLDDLPPEEQNKIARSVLRKCVWDGETLFLEF

SEQ ID NO: 4544 - protein, 518 aa, Unknown
  Description of Unknown: Integrase B4545 sequence
  PTHR30461:SF3,cd00338,SM00857,G3DSA:1.10.10.2600,IPR036162, PF13408,PS51737,G3DSA:3.40.50.1390,IPR025827,IPR006119, IPR038109,PF07508,SSF53041,IPR011109,PTHR30461, PS51736,Coil,PF00239
MARKTDKPLSNIAVIYARFSSHNQREESIEQQVAECKLFAAQQGLEVTEIYSDSAQSGRTENRSQFLRLQRDAKKGKFTNIVAYKSNRIARNMVNALTFENDMEKLGVKLYYAKEEFGNNAAGRFALRMMMNVNQFYSENMAEDIRRGMEDNAMKCKVNGPAPYGYKSGKSGTYEIDEPAAAVVREIFTRVACGDSFVDIYTDLNNRGLKTRKGNKWGRSSFQSILKCEKYTGVYIYDNIRVEGGMPEIISKEMFLKVQRILGTKGNPQGRHRINGDYLLTGKLFCGECGHHMMGLSGTGKNGLLHYYYGCSGKKEKPRCSKKNVRRDELEYEVARLVQTYILQDDVITWLADTLTKYQEEHSSDGDMAILNTQLSETEKSIKNLMAAIEQGIITPSTKERLMELESEKSKIENNITLLKADTITVSKEQIGGWLDSFRDGNIKDKRFQKRLFDSFLSAVYVYDDNRVRIVFNLCGLNKGDIDTKLMLGDTEAIEKISDCSYKRCYGSPDLIKVEHLF

SEQ ID NO: 4545 - protein, 518 aa, Unknown
  Description of Unknown: Integrase B4546 sequence
  SM00857,IPR036162,PF13408,IPR025827,G3DSA:3.40.50.1390, IPR006119,SSF53041,PTHR30461,Coil,PS51736, cd00338,PF00239
MEKKRAAIYARFSSHNQRSESIEIQVENSTRYCQENGLDVVRIYTDYAKTGRNTDRAEFQRMMDDARLGLFDFVVIYKVTRIMRNRDEMALARIMLRKSGVEILYAGEEIASGSSGVLQLGMLEVLAEWESAIDSERIRDGIQKNAQRCMANGRTLYGWDIVEGRYRVNDREAAWLRKMKNKLFSGATMAEVVRSVDAMRTRQGKKVNQDTATKLLLRPQNGGTYCYAGVVVEGGMPALWPKHEQDMIISMLKSRHKPHRRVDTAEEWPLSGKLWCACCDSTLTGTSGTSATGKTYAYYKCNKCGRTFRRDVLEDAIVDVVCEAVKRPEIRGNIAALMADWSKDNAEETPLESERIKGEIRRIDAAFENIWQAIESGIAPPGGKDRVQELTERKNELEAEYHMAKAHESLEPDYEEIRQWLDEIAQNLMPQEILKMFIRAAEIEGDVVKLFFAFDYYGNDFTPPKYRHELFSNENSSCNSPMVEPKRKTANAHKITLKSCYVQVSRNWFVIVSNLKNT

SEQ ID NO: 4546 - protein, 518 aa, Unknown
  Description of Unknown: Integrase B4547 sequence
  SM00857,G3DSA:1.10.10.2600,IPR036162,PF13408, IPR025827,PS51737,G3DSA:3.40.50.1390,IPR006119, IPR038109,PF07508,IPR011109,SSF53041, PF00239,PTHR30461,Coil,cd00338
MQENETYVIYLRKSRADSEKSSLEEVFAKHESELQSLAERTLGNRIPEDKIFREVVSGETITDRPVISQILKVMESKKIKGVFVVDPQRLTRGDLLDKGHLINVFKYTNTKIITPYKTFDLNNDFDLKLFKMELDKGSDYLEYYKMIQARGRIASVRSGQYIGSTAPYGYDKYSYKENKHTVNTLKPNSDEATVVQLIYHLYVNESLSYAAIANKLNTMNIKPRKSTSWSPYSLKEILHNPVYIGKVRWNRRKTVMKYKNESLLKTRPIALNDSIISDGIHEAIIDETLFDSAQECNGKTPRNHSSSKLINPLAGLIFCGNCGRAMSYKTYKNNAGSEKQSPRYLCNNQSNCHTKSAKATDVINQIISALECYIEDFKVKLENDDGNSFNVRSQIISVLNKQLQDLEVREETQYEMLENKIYTPELFKKRRQKLLEEREVLLDKLQEAKVQEPVKIDYQEKIISFTDTVEALKNPDIDILQKNMLLKKCIKKITYTTDKEKGNRWRESTFEIDITPLI

SEQ ID NO: 4547 - protein, 518 aa, Unknown
  Description of Unknown: Integrase B4548 sequence
  PTHR30461:SF3,SM00857,G3DSA:1.10.10.2600,IPR036162,PF13408, IPR025827,PS51737,G3DSA:3.40.50.1390,IPR006119,IPR038109, PF07508,SSF53041,IPR011109,PTHR30461,Coil, PS51736,cd00338,PF00239
MKTVTKIMPDKPKKKKLRVAAYCRVSTSFDDQLTSLETQKSHYEEYIKSKRGWELAGIYFDEGITGTKKEVRPGLQQLITDCELGKIDYIITKSLSRFARNTTDCIEMVRKLMNLGIPIYFEKENIDTGSMQDEFLVTLMGSLAEQESRSISDNQKWSYQERFKSGNYKAGYAPYGYTVTDGKYIVNEEEAIWVRYIFEQCLAGKGAYTIADDLNKRQAPTKRGGKWAESTVRAVLRNEKYIGDCLVQKTYMDDEFKRHVNHGERDQYYLQDDHQPIISRKTFEAAARMLDFLGKEKNVDPQGGRSLNRYPFSGKIVCGHCGKHFQRRMQYTGSLVYPSWACRQHLADVSKCPQKSVKETALQQAFIVLMNKLSFGRKPILETLKRALNGNTFQQDPEKMEAINRRLTECRIQQEQLADFLHKGYLPSHAYNTEMAKLKIEMDTLEKQRSVQRSPEQMAQQKNLDELIQYLKEFPMQTAFDGEAFTRFVDHILVLSQTEFTFHLKCGLNLTERVKTDG

SEQ ID NO: 4548 - protein, 518 aa, Unknown
  Description of Unknown: Integrase B4549 sequence
  SM00857,G3DSA:1.10.10.2600,IPR036162,PS51737,G3DSA:3.40.50.1390, IPR006119,IPR038109,PF07508,IPR011109,SSF53041, PTHR30461,Coil,PS51736,cd00338,PF00239
MSYAIYLRKSQADLEAEASGAGETLSRHRMALLELAKRMQLEIGAVYEEIVSGETIAARPQMQKLLSEVGTGKWEGVLVMEVERLARGDSIDQGIVSQAFKFSGTKIITPLKIYDPTNEMDEEYLEFGLFMSRREYNTIKRRMVAGRIASVKEGKYMGKVDPFGYRRIKLEHEKGWSLDVVPEQAEIIRKIYEMYLAPGGSVTAVARYLKSIGSKTRLGADWSRASVIQTLKNPLYCGYVTWGHKPTRKAVEDGHITKKRYLSNDYVKVRGRHTPLVAEDDWNAAQKKLRDTTGYKVRSDRTMRNPFQKLMYCADCGHAMQLSTSTRNGRPNYSIFCPWPHCTNVSSRLDTLDNAVQDALRGWLQSYKVQVSHEQQTLPQESDTKAAIANSRSELTRVDEQMQRAFDFVEQGIYTPEQFLERRRVLSGRRDELSAAIQKLEDTLQSIRRIYDMSADVIPRIESVLNAYPSAETAEEKNKLLCSVLRRIIYQKHPSEAGNAGKYELNLDFLPIIPSVED

SEQ ID NO: 4549 - protein, 518 aa, Unknown
  Description of Unknown: Integrase B4550 sequence
  PTHR30461:SF3,SM00857,G3DSA:1.10.10.2600,IPR036162, G3DSA:3.40.50.1390,IPR006119,IPR038109,PF07508,SSF53041 ,IPR011109,PTHR30461,cd00338,PF00239
MASENDKNHRVRVAQYLRMSTDHQQYSLHNQSEYIKDYAEKNNMEIAYTYDDAGKSGVSIIGRHSLQQLLSDVEQKKIDIQAVLFYDVSRFGRFQNSDEAAYYSFLFERNGVDLIYCSEPIPTKDFPLESSVILNIKRSSAAYHSRNLSDKVFIGQVNLIKLGYHQGGMAGYGLRRLLVDENGIAKEILSFRKRKSIQTDRVILIPGPKNEIKIVNRIYDLFIDNNVPEFIIAERLNEQNIPAENGTLWTRAKIHQILTNEKYIGNNIYNKTSSKLKSRLVKNPKHEWVRCDKAYKPIISKKKYNKAQEIIQLRSIHLTNEDLLEKLKQKLESNGKLSGFIIDEDDTGPSSSVYRTRFGGLLRAYTLIGYKPEHDYSYIQINEALRSFYSGIIEDFKGEILKSNCYIDEYKYAPMLYINDEFLISVLITKCTHMKSGKLRWKVRFDNSQKADITIVIRMDSQNISPLDFYIIPKIENEYSKMWMTETNNIRLDLYRFDNLDKLLQIITRMKVRELYAA

SEQ ID NO: 4550 - protein, 518 aa, Unknown
  Description of Unknown: Integrase B4551 sequence
  SM00857,G3DSA:1.10.10.2600,IPR036162,PS51737,G3DSA:3.40.50.1390, IPR006119,IPR038109,PF07508,IPR011109,SSF53041, PTHR30461,PS51736,cd00338,PF00239
MNIGNQLGKLKKSDQFCIYLRKSRADAEAEKLGEGETLARHERILTELAVKLGLPIGKIYREIVSGETISARKEIQSMINDCYAGMWKGILVVEVTRLSRGNQGDAQIIMDCLRYSNNNNGVLVVTPTKVYDIVQSSDDEEYMEFELFMSRREYKMIRKRMMRGKLQAVVEGNYMGSYRPYGYDILKTKTGRTLVPNPEEAPIVKNIFEWTVKEHLTPGKICKRLTSLGVPTYTGSAEWAIGTVKTILTNPTYTGKVRWNDRMQTKTLVNGNLVSSRPRAHTSQYMLYEGKHKGIVDEITFHAASSRFYSDKTKANLKLMNPLAGILICAKCKKAMIYQGYLKRPNTLPRILHKTSQVCNVKSAVLKDVVDAVAHALELYIDDFEMKIDNLPDVDENSILSQLEVLQKELIKQEKKLPKLFDAWEDGILTDEEFTRRKLINKERIESIKKQMDHLEDSVPTKDEYEEKIMFLSDALKSLLDPTLDADTKNTYLKSIISSIEYSRDNNTEFILDVFLKD

SEQ ID NO: 4551 - protein, 518 aa, Unknown
  Description of Unknown: Integrase B4552 sequence
  PTHR30461:SF3,cd00338,SM00857,G3DSA:1.10.10.2600, IPR036162,PF13408,IPR025827,PS51737, G3DSA:3.40.50.1390,IPR006119,IPR038109,PF07508, SSF53041,IPR011109,PTHR30461,PS51736,Coil,PF00239
MIKAVIYARYSCDNQREESIEGQLRECKEFATRKGYTLVGSYIDRAMSAKTDNRPEFQRMIKESAKELFDVVIVWKLDRFARNRYDSAHYKATLRRNGVKVVSATEVISEGAEGIILESVLEGYAEYYSAELSEKVIRGMTENALKCQYNGGYIPVGYKVDENKHYQIDELTAPFVKEAFLMYVNGRHIKKIVEYFNENGIRSSRNKPMTKTTVSTILQNRKYIGEYQYRDIVVSDGIPAIISRELFALAQQRTEQNKYAPSASRSEIKYLLTGKLMCGDCGSVYAGESGTGRTGQKYHYYKCVKAKKRDGCERKAIKKDEVEEAVIEATVENIFVDEVIEEIADRVISWQEKESTLVPLYQRELAEVEKSIANLLSAIEQGIITSATKNRMAELESLKIDLEVKIAREEIQTQILTKDQVKFWLKNMEKLDLASIDNRQRIINTFVNSIYVYEDRFEVNFNCREGFETIPLDIERFVSRLEIVGEPYLCNKIDAHLEKLVFTSFFCVLRVKISGVKP

SEQ ID NO: 4552 - protein, 518 aa, Unknown
  Description of Unknown: Integrase B4553 sequence
  SM00857,G3DSA:1.10.10.2600,IPR036162,PS51737,G3DSA:3.40.50.1390, IPR006119,IPR038109,PF07508,IPR011109,SSF53041, PTHR30461,Coil,PS51736,cd00338,PF00239
MNLAEQLGLTESDQFCIYLRKSRADAEAEKLGEGETLARHERILTEFATREGLPIGKIYREIVSGETIAARKEIQSMINDCYAGMWKGILVVEVTRLSRGNQGDAQTIMDCLRYSNNNNGILVVTPTKTYDIVRSPDDEEYMEFELFMSRREYKMIRKRMMRGKLQAVVEGNYMGSYRPYGYDILKTKTGRTLVPNQEEAPIVKNIFEWTVKEHLTPGKICKRLNTIGVPTYSGDPEWSVSSIKTILTNPTYTGKVRWNDRMQVKTMVDGKLVKSRPRSNHTNQYMLYDGKHEAIIDEITFHAAASHFHSDKTKANLKLMNPLAGILICAKCKKAMIYQGYNKRPNTPPRILHKSSQICNVKSAVLKDVMDAVAHALELYIDDFEMKIDNLPVVDENNILSQLEALQKELIKQEKKLPKLFDAWENGILTDNEFTRRKLVNKERIESIKKQMDHLEDSIPTKDEYEEKIMCLSDALKSLLDPTLDADIKNTYLKSIISSIEYSRDNNTEFILDVFLKD

SEQ ID NO: 4553 - protein, 518 aa, Unknown
  Description of Unknown: Integrase B4554 sequence
  cd03768,PTHR30461:SF3,SM00857,IPR036162, PF13408,IPR025827,G3DSA:3.40.50.1390,PS51737, IPR006119,PF07508,SSF53041,IPR011109, PTHR30461,PS51736,Coil,PF00239
MRIAIYARKSAFSDKSESVHNQDRMCREYCALHFPGEHIFLNYTDEDKTGANTNRPALQKMMRDVHAGIIDLLVVYQLDRLTRDVRDYCNLSAELNDCGVHFTSVKESVDTSTPIGEALSTLSAVFAQMERKTLSNRVYDNMMGLARAGWWTGGNLPCGYTTRRVVENGKPHTLLVPDPEKADQLVNVFKLFVERGSSFHSFASFALTNDCFDVFGIPSTSQVRRVITSPYGVPANKDLRDYYLSLGANVIGTESDWDGTHGVMRYGVTDQRNGNATNPRTAWIVCPGRHEPILPADLWLAAQDQVKSNMFCKQAKHPPVLLKGILRCKCGRMMSPVRSRYKGKVYISYRCTRTGEVGRKSPDCVSACRDYVLDEKVLSVFREIERDPEVIKKYSPAAPATDQDALHKKEKEIESLQKKIGNLSSALAINPESTAAKYIIADMESLDSQIQKKQMELAGLQANRLTAAQAEKELFEKQKEIARLVQNLDDLPPEEQNKIARSVLRKCVWDGETLFLEF

SEQ ID NO: 4554 - protein, 518 aa, Unknown
  Description of Unknown: Integrase B4555 sequence
  PTHR30461:SF3,SM00857,G3DSA:1.10.10.2600,IPR036162,G3DSA:3.40.50 .1390,IPR006119,IPR038109,PF07508,IPR011109,SSF53041, PTHR30461,cd00338,PF00239
MASENDKNHKVRVAQYLRMSTDHQQYSLHNQSEYIKDYAEKNNMEIAYTYDDAGKSGVSIIGRHSLQQLLSDVEQKKIDIQAVLFYDVSRFGRFQNSDEAAYYSFLFERNGVDLIYCSEPIPTKDFPLESSVILNIKRSSAAYHSRNLSEKVFIGQVNLIKLGYHQGGMAGYGLRRLLVDENGIAKEILGFRKRKSIQTDRVILIPGPKNEIKIVNSIYDLFIDDNMPEFIIAERLNEQNIPAENGTLWTRAKIHQILTNEKYIGNNIYNKTSSKLKSRLVKNPKNEWVRCDKAYKPIISKKKYNKAQEIIQLRSVHLTNDELLEKLKQKLESNGKLSGFIIDEDDTGPSSSVYRTRFGGLLRAYTLIGYKPEHDYSYIQINEALRSFYSGIIEDFKGEILKSNCYIDEYKYAPMLYINDELLISVLITKCTPMKSGKLRWKVRFDNSQKADITIVIRMDSQNISPLDFYIIPKIENEYSKMCMTETNNIRLDLYRFDNLDKLLQIITRMKVRELYAA

SEQ ID NO: 4555 - protein, 518 aa, Unknown
  Description of Unknown: Integrase B4556 sequence
  SM00857,G3DSA:1.10.10.2600,IPR036162,PS51737, G3DSA:3.40.50.1390,IPR006119,IPR038109,PF07508, SSF53041,IPR011109,PTHR30461,Coil, PS51736,cd00338,PF00239
MKTYTPTDYALYLRKSRADLEAEAHGEGDTLARHEHILMELAKSRALPIGAIYREIVSGERIANRPVMQQLLSEVEDGRWKGVLVTETSRLARGDTIDQGIVAQAFKFSGTLIVTPSKTYDPTQEADEEWMEFGLFMSRQEYRMIRRRQLAGTRASKKEGHYVPGRPPYGYERYKLDGRGWSLRPVEPQAGVIRTIYDMYLSGKGFSEIANELNAMKIRTPLDKKWVPATTRAILQNPHYAGFIPSAMKVNTKIVQKGKLITKRPVNKNCELYEGIHEAIIPRDVWYSVQQRMKDTVTPRVPRKYQQMNPLAGLVYCDQCGKLMSRHPYRREDKVRFSCENPSCSTVSSLFEDVESLVLQSLREFLHEIELSSPALLDTKSEEIALQNIEKQLTDINRRLQRTYELLEDGVYSKETFLQRQSAISQDQTALLNTKHEIERKLHNKQTDIEAQKNSAPLIRHVLDVYPTLEDPKEQNLLLKQVIRRIDYHKTVRVYGKAKSDLHLTIHPKIAIPQTSNI

SEQ ID NO: 4556 - protein, 518 aa, Unknown
  Description of Unknown: Integrase B4557 sequence
  SM00857,G3DSA:1.10.10.2600,IPR036162,PS51737,G3DSA:3.40.50.1390, IPR006119,IPR038109,PF07508,IPR011109,SSF53041, PTHR30461,PS51736,cd00338,PF00239
MNIGNQLGKLKKSDQFCIYLRKSRADAEAEKLGEGETLARHERILTELAVKLGLPIGKIYREIVSGETISARKEIQSMINDCYAGMWKGILVVEVTRLSRGNQGDAQIIMDCLRYSNNNNGVLVVTPTKVYDIVQSSDDEEYMEFELFMSRREYKMIRKRMMRGKLQAVVEGNYMGSYRPYGYDILKTKTGRTLVPNPEEAPIVKNIFEWTVKEHLTPGKICKRLTSLGVPTYTGSAEWAIGTVKTILTNPTYTGKVRWNDRMQTKTLVNGNLVSSRPRAHTSQYMLYEGKHEGIVDEITFHAASSRFYSDKTKANLKLMNPLAGILICAKCKKAMIYQGYLKRPNTLPRILHKTSQVCNVKSAVLKDVVDAVAHALELYIDDFEMKIDNLPDVDENSILSQLEVLQKELIKQEKKLPKLFDAWEDGILTDEEFTRRKLINKERIESIKKQMDHLEDSVPTKDEYEEKIMLLSDALKSLLDPTLDADIKNTYLKSIISSIEYSRDNNTEFILDVFLKD

SEQ ID NO: 4557 - protein, 518 aa, Unknown
  Description of Unknown: Integrase B4558 sequence
  PTHR30461:SF3,cd00338,SM00857,G3DSA:1.10.10.2600, IPR036162,PF13408,PS51737,IPR025827, G3DSA:3.40.50.1390,IPR006119,IPR038109,PF07508, IPR011109,SSF53041,PTHR30461,PS51736,Coil,PF00239
MKTAYGYGRFSTDRQREESIEAQEIAIRNFCKQNNISLIAFYADRGLSGTNDNREQFQNMLDDADKGGVDYVIVHKLDRFARNRYDSVIVRKRLADHGVKLLSVLERVNDDSPEDIILLSVLEGMSEYYSKNLSREVKKGMYRNVEKGIYNGGFLPYGYKVNVNNETHFVEIDENEAAIVREIYSLYLENNGYVTIANKLNERGLKTKRGNIWTADTIGKLLKNEKYKGTYFHGKTKVIKNGRRQKVIKNKDWKQEETYPVIIDAEIWEAAKRRRTMNKPKGGKKHEYLLVGYAKCKKCGANYIGSSSAPYNDHVYRFYTCSRHNRKKCDAKIINADMLETIVIDFIKEKFFESESLDQYINDCIKLLNTDINNDDKIEAINKEIKSCTKKLDRLVELYIDDNISQEKYCDKKNELDCRVKSLEHELNLITIDRPVISKKEVKKIVNNFIKNMDDSFKYKKMLIDTFLDSVTIDDETFEITLIYNLFSKTEKIICNIDNASPYSSKKAFTASPPLQIN

SEQ ID NO: 4558 - protein, 518 aa, Unknown
  Description of Unknown: Integrase B4559 sequence
  cd03768,PTHR30461:SF3,SM00857,IPR036162,PF13408, IPR025827,G3DSA:3.40.50.1390,IPR006119,PF07508,SSF53041, IPR011109,PTHR30461,PS51736,Coil,PF00239
MRIAIYARKSAFSDKSESVHNQDRMCREYCALHFPGEHIFLNYTDEDKTGANVNRPALQKMMRDVHAGIIDLLVVYQLDRLTRDVRDYCNLSAELNDCGVHFTSVKESVDTSTPIGEALSTLSAVFAQMERKTISNRVYDNMMGLARAGWWTGGNLPCGYTTRRVVENGKPHTLLVPDPEKAEQLVTVFKLFVERGSSFHSFASFALTNDCFDVFGIPSTSQVRRVITSPYGAPANKDLRDYYLSIGANVIGAESDWDGTHGVMRYGVTDQRNGTATNPRESWIVCPGRHEPILPADLWLAAQNQVKSNMFCKQAKHPPVLLKGILRCKCGRMMSPVRSRYKGKVYISYRCTRTGEVGRKSPDCVSACRDYVLDEKVLSVFREIERDPEVIKKYSPAAPATDHDALRKKEKEIESLQKKIGNLSSALAINPESTAAKYIIADMESLDSQIQKKQMELAGLQANRLTAAQAEKELFEKQKEIARLVQNLDDLPPEEQNKIARSVLRKCVWDGETLFLEF

SEQ ID NO: 4559 - protein, 518 aa, Unknown
  Description of Unknown: Integrase B4560 sequence
  cd00338,SM00857,G3DSA:1.10.10.2600,IPR036162, PS51737,G3DSA:3.40.50.1390,IPR006119,IPR038109, PF07508,SSF53041,IPR011109,PTHR30461, PS51736,Coil,PF00239
MQYEEYLIYLRKSRSDASLEAMGVDVLERHEQILLDLAKRMNLSIGGIYREVVSGESISARPEMQRLLSEVEAGRWKGVVVMEVERLARGDTIDQGIVQRAFQYSGTQIVTPAKTYNPNNEFDEEYFEFGLFMSRREYKTIRRRMRAGVTAAVKEGKWPFNKAPYGWQRVKLEHARGWVLAPDPEEAPVVKLIFQLYTGPDRIGITNICRYLDNRGVKPRNGDTWTECSIMGILRNIVNDQRVGIGRRKIVKQVQNGSVSKVRPHSDYDFTAPGLQPRLIDHDVFLEAQTHLGKNSHKLPESYGIKNPLAGIVVCSCCGKKMMRRPASKTPGGAPYDVLKCNTRNCPTIGSALDLVEREVIQALSDWVAGYQLDPTLEVENKVPEKEQLLSSAISNHDVLLKQNGNLYDLLEQGVYTTEIFLERSHELQKRIKESEAHIEVLKKDLEYEKEKITNVENFIPSCKELLSCYWELSAQDRNKALKMLLESVEYTKTKRNKYGDKDNPTFTLNLKPRIPRI

SEQ ID NO: 4560 - protein, 518 aa, Unknown
  Description of Unknown: Integrase B4561 sequence
  cd00338,SM00857,G3DSA:1.10.10.2600,IPR036162,PS51737, G3DSA:3.40.50.1390,IPR006119,IPR038109,PF07508,SSF53041, IPR011109,PTHR30461,PS51736,Coil,PF00239
MQYEEYLIYLRKSRSDASLEAMGVDVLERHEQILLDLAKRMNLSIGGIYREVVSGESISARPEMQRLLSEVEAGRWKGVVVMEVERLARGDTIDQGIVQRAFQYSGTQIVTPAKTYNPNNEFDEEYFEFGLFMSRREYKTIRRRMRAGVTAAVKEGKWPFNKAPYGWLRVKLEHARGWVLAPDPEEAPVVKLIFQLYTGPNRIGITNICKYLDNRGIKPRNGDTWTECSIMGILRNIVNDQRVGIGRRKIVKQVQNGSVSKVRPHSDYDFTAPGLQPRLIDHDVFLEAQTHLGKNSHKLPESYGIKNPLAGIVVCSCCAKKMMRRPASKTPGGAPYDVLKCNTRNCPTIGSALDLVEREVIQALSDWVAGYQLDPTLEVENKVPEKEQLLSSAISNHDVLLKQNGNLYDLLEQGVYTTEIFLERSHELQKRIKESEAHIEVLKKDLEYEKEKIANVENFIPSCKELLSCYWELSAQDRNKALKMLLESVEYTKTKRNQKGDKDNPTFTLNLKPRIPRI

SEQ ID NO: 4561 - protein, 518 aa, Unknown
  Description of Unknown: Integrase B4562 sequence
  SM00857,G3DSA:1.10.10.2600,IPR036162,PF13408, PS51737,IPR025827,G3DSA:3.40.50.1390,IPR006119, IPR038109,PF07508,IPR011109,SSF53041, PF00239,PTHR30461,Coil,cd00338
MQENETYVIYLRKSRADSEKSSLEEVFAKHESELQSLAERTLGNRIPEDKIFREVVSGETITDRPVISQILKVMESKKIKGVFVVDPQRLTRGDLLDKGHLINVFKYTNTKIITPYKTFDLNNDFDLKLFKMELDKGSDYLEYYKMIQARGRIASVRSGQYIGSTAPYGYDKYSYKENKHTVNTLKPNSDEATVVQLIYHLYVNESLSCAAIANKLNTMNIKPRKSTSWSPYSLKEILHNPVYIGKVRWNRRKTVMKYKNESLLKTRPIALNDSIISDGIHEAIIDEALFDSAQECNGKTPRNHSSSKLINPLAGLIFCGNCGRAMSYKTYKNNAGSEKQPPRYLCNNQSNCHTKSAKATDVINQIISALECYIEDFKVKLENDDGNSFNVRSQIISVLNKQLQDLEVREETQYEMLENKIYTPELFKKRRQKLLEEREVLLDKLQEAKVQEPVKIDYQEKIISFTDTVEALKNPDIDILQKNMLLKKCIKKITYTTDKEKGNRWRESTFEIDITPLI

SEQ ID NO: 4562 - protein, 518 aa, Unknown
  Description of Unknown: Integrase B4563 sequence
  PTHR30461:SF3,IPR036162,PS51737,IPR011109,PTHR30461, PS00397,PF00239,G3DSA:1.10.10.2600,IPR006119,SSF53041, cd00338,SM00857,IPR025827,IPR038109,PS51736, IPR006118,PF13408,G3DSA:3.40.50.1390,PF07508,Coil
MENQIKTAALYIRVSTDKQEELSPDSQKRLLLEYAKNHDMIVSQKHIYVENGISGRKADKRPKFQQMIAAAKSEEHPFDVILLWKFSRFARNQEESIVYKSMLRNKCHVDVVSISEPLIEGPFGGLIERIIEWMDEFYSIRLSGDVTRGMTENALRGAYQCRPPLGYRIPYHKATPEIIPEEAEIVRLIFDKYVNGRMSIFAITKYLNSLGLKTNRGKPFEKRSVEYILQNPGYAGDVRWNRTVNETKEVRDPSEWIIRPGHHPAIISKGLFLAAQKRFQAEYRPKNAKPAEVSKHWLSGLLKCPACGRSLSSCVMHRKTAPDTFSFQCYGYLKGKCGHNCYVRAEEIEPAVIRALEDAIQRGSVTYTVKKNREKERNGEKELETLRKNLDRITQKEARAREAYMDGIDTKEEYRQNKERLLQERAELEKMISRLEQAEPEENANDARMMENISSVLDILRSGDFSVQEKNAALKSIVDRIVFYKDRGHIDVDYYLVEFPENPLFSGKFSIHTHLRSG

SEQ ID NO: 4563 - protein, 518 aa, Unknown
  Description of Unknown: Integrase B4564 sequence
  cd03768,PTHR30461:SF3,SM00857,IPR036162,PF13408, PS51737,G3DSA:3.40.50.1390,IPR025827,IPR006119,PF07508, IPR011109,SSF53041,PTHR30461,PS51736,Coil, PF00239
MRIAIYARKSAFSDKSESVHNQDRMCREYCALHFPGEHVFVNYADEDKTGANTNRPALQKMMRDVHAGIIDLLVVYQLDRLTRDVRDYCNLSAELNDCGVHFTSVKEAVDTSTPIGEALSTLSAVFAQMERKTLSNRVYDNMMGLARAGWWTGGNLPCGYTARRVVENGKPHTLLVPDPEKAEQLVTVFNLFVERGSSFCSFASFAQTNDCFDVFGIPSASQVRRVITSPYGAPSNKDLRDYYLSIGANVIGAESDWDGTHGVMRYGVTDQRNGNATNPRTAWIVCPGRHEPILPADLWLAAQDQVKSNMFCKQAKHPPVLLKGILRCKCGRMMSPVRSRYKGKVYISYRCTRTGEVGRKSPDCVSACRDYVLDEKVLSVFREIERDPDVIKKYSPAAPATDQDALHKKEKEIETLQKKIGNLSSALAINPESTAAKYIIADMESLDSQIQKKQMELAGLQANRLTAAQAEKELFEKQKEIARLVQNLDDLPPEEQNKIARSVLRKCVWDGETLFLEF

SEQ ID NO: 4564 - protein, 518 aa, Unknown
  Description of Unknown: Integrase B4565 sequence
  cd03768,PTHR30461:SF3,SM00857,IPR036162,PF13408, IPR025827,G3DSA:3.40.50.1390,PS51737,IPR006119,PF07508, IPR011109,SSF53041,PTHR30461,PS51736,Coil, PF00239
MFTVGIYARKSVYRDNSDSVQVQVRLGKEYAGIIFKDKELEFRVYDSDEGFSGKNTNRPDFQRMMNDVENGLLNAVVVYKLDRISRNVQQFSAMYEILHQHQVAFISVKESFDTSTPMGRTVMYILAAFAQLERENTSERVTDGMLALGTAGKWTGGICPSGMKSVRMQCGDKYHSYLQIDPDTIWRPKLLYELLLDGNPITRIERYCRDHGIKSQTGKYLNTSQIYNILTNPVYCQNSIEAYYYFCDLGCKLPEASGFDGNHGLIGYGKTKTGTNSQHKRTSSEWTIAIGIHDYVLPADKWIAAQKRLGTNKMIRTAKYEAGILKGVLKCSCGGSMEVRTYTKNNIQFSYYYCRRMQRYGKEYCNSGYTPVKKLDSIFLEKLKQIQLDPARVTIDHLEDVFTQSPTDLKKTLHNLESSIMNLTNVLTQAMGSSASEYIIKQIEELDRQKQITEAALRDAELKEAQQVQKTNAIDQIYQSICYLLNHFDDIDYHGKNELIRKIVKSCIFDGENLKITF

SEQ ID NO: 4565 - protein, 518 aa, Unknown
  Description of Unknown: Integrase B4566 sequence
  SM00857,G3DSA:1.10.10.2600,IPR036162,PF13408,IPR025827, G3DSA:3.40.50.1390,PS51737,IPR006119,IPR038109,PF07508, IPR011109,SSF53041,PTHR30461,Coil,PS51736, cd00338,PF00239
MQEAIKKDVKIIRPTKGLCGDKKLRVAAYCRVSTSSVDQENSFIAQVKYYNDFLNRSENMELVDIYADEGITGTSTNKRDDFNRMIKDSSLGKIDRIFVKSVSRFARNSLECIENIRLLKSYGTTVLFENDAIDTETMNSEMILYIKSAFAQSESLSGSKRVSTAIRMKMENGEFYNYTAPFGYKAENKTLIPIPEEAEIVIRIFREYIGGKGIGKIVADLNKDSVPGKPWVKERVRYILTNEKYCGDSLYQKSYTPPVLPLRNISNRGEVPKYYVEGTHAAIIDKETFHTVKQMFDRNMLIYGKRQKREIENFAGRLICGDCGRVYKKRIVGSQPTWICSKNGVAGQRCKTHPLSEGALKKSFVFMYNRLQQHRELIIKEAYQKLLELRKAFFNSSSAVLDIDTELAELAEQNAMYVRFHSQKIIDEVTFIEQTGEIKQRINELRSRRIKLMNNNEEERCIELLREAMQELEELPQAILLFNFNIFDKLVNKVAVMPDSLVFELRCGIKLREEIIWN

SEQ ID NO: 4566 - protein, 518 aa, Unknown
  Description of Unknown: Integrase B4567 sequence
  PTHR30461:SF3,cd00338,SM00857,G3DSA:1.10.10.2600,IPR036162, PS51737,G3DSA:3.40.50.1390,IPR006119,IPR038109,PF07508, IPR011109,SSF53041,PTHR30461,PS51736,Coil, PF00239
MGGRAAIYARFSSHNQRGESIEIQVEKSRAYCAENDLRVVATYCDFAQTGTNTDRAEFQRMMADAKRGLFDFVVIYKVTRIMRNRDEMAMARIMLRRCRVEILYAGEDISDGSAGVLQLGMLEVLAEYESALDGERIRDGIQKNAERCMANGCVRYGWDIVDGRYVVNEEEAAAIRLGVRMVLSGKSVADVVRAWEPYRTKRGGKWRFQTVRRILMRRENGGEYRYAGVVVPGGMPAIVPMDDEERVIRMLEDSHRPRAKTEAWDFPLTGKLYDGRDGGLMTGTSGTGKSGRPYHYYRCRSCGRTVRRDVVEKRVADAVREALGSADSRERIARMLADAEEERADEKPLSETIKGELAKIETAFSNIWAAIESGIAPPGGKERIDALKQRQALLKDELRTAEALEAARLDYDRALFWLEGMAAAEVDDAQLLRTFVARVVLGGPDDDDGLRVAFTFDDSAGLGDNPSLPGAIGPGGEVFDRMNASSTISNRQVEKCLYLPFYCLQIPRRIELCAGRER

SEQ ID NO: 4567 - protein, 518 aa, Unknown
  Description of Unknown: Integrase B4568 sequence
  PTHR30461:SF3,cd00338,SM00857,G3DSA:1.10.10.2600,IPR036162, PF13408,IPR025827,G3DSA:3.40.50.1390,PS51737,IPR006119, IPR038109,PF07508,IPR011109,SSF53041,PTHR30461, PS51736,Coil,PF00239
MVAIYVRQSLDKKDSLSIESQINDCITLCKRNGWDDYQVYKDKGWSAKNLDRPEFQKMNNDVEAGKIKAVVCYKIDRISRSIRDLVNLIEDYHELGVHFVSFADNINTAAPGGLMMATLFGSLAQMEREAIIARVTDNYYYRCELGYWGGGPAPYGFNLKKIVENGQKHTVLEINEREAAVVKQFFKWYLEPDGTIYEILKKADKAGITTRKGGAWTSRVVSELLSKPMYAPNSMDIYNFYAAQGVRVRVTPEQCDGKLSLNVFGRRDRGSKHPKRSRPVNEMTLAICKNPPIIDSDTFLKTQFKKKAKLQVSPRTGTAKTTMLSGLVKCAICGRAMSPSGSSRGVRYFTCSGKRNYAAGTCTSKSIKVSALEKIVIDDILRYATNPKVIDMFHAMQGSKLTAEQSHEVNLLQQEAAKLDIEIDNLLDACSAGNTTAIEYLNKRIEKIDTRKHEILTRINEIKRDTENVISLFSGIEIENVPYILAHGSIAEKKNVCQFLLSSVLFTNADDVKVYYKM

SEQ ID NO: 4568 - protein, 518 aa, Unknown
  Description of Unknown: Integrase B4569 sequence
  PTHR30461:SF3,cd00338,SM00857,G3DSA:1.10.10.2600,IPR036162, PF13408,IPR025827,G3DSA:3.40.50.1390,PS51737,IPR006119, IPR038109,PF07508,SSF53041,IPR011109,PTHR30461, PS51736,Coil,PF00239
MSKLYCMYLRKSRADLEAEARGEGETLSRHRRTLTELAIRMHLPLGEVYDEIATGESIAARPQMQRMLADIEAGMWAGVLCMDVDRLARGDSIDQGIISQTFLYSNAIIITPGKTYDPRNESDSEFFEMKMFFSRREYAQIRKRLQAGRMRSVLDGRYMGTRPPYGYKRVKIQGDKGWTLEIVPEKAEIVRMIYDWYVNGMDGRPVGCGAIATRLNDMGLRTDMGNRFDPSCILNIITNPAYVGMVRWNQRTTVVSLQNGQRIKSRPKSDEPIIVRGLHAPILTQEIYDAAQERHAGRYVPKTPETLALSNPLAGLVVCHECGHTLQRKPSPRGCWIFCPTRRCKTIGILEDVFERAVLEHLQNWLVTYSDENAPSAPAKNAADAVAEQLQRQKQTLQTQLSRLYDLLEQGVYTTEVFLARQRELTERLSALDEKLAAAQKPPELDMEACIRQALPRVKAVLDAYPLAETAAEKNALLKSVIERIDYQKTKRSTRWQNSLDFLQMTIYPRVPAGEIQG

SEQ ID NO: 4569 - protein, 518 aa, Unknown
  Description of Unknown: Integrase B4570 sequence
  PTHR30461:SF3,SM00857,G3DSA:1.10.10.2600,IPR036162,PS51737, G3DSA:3.40.50.1390,IPR006119,IPR038109,PF07508,IPR011109, SSF53041,PF00239,PTHR30461,PS51736,Coil, cd00338
MNYRSFEMRLLVYLRKSRSDVEEERKAAAEGREYDTLARHRRNLMDVIKREGHILVEPPYEELVSGDSIIERPEVQKMLNRMDEGDIDGVLVIDIDRLGRGDMYDSGILDRAFRYNNIKLITPTEIYDPEEENWELVFGVKSLVARQELKSINKRLQGGRRDKAKMGRSISKKPPYGYLRDENLKLYPDPDTAWVIQKIFEMTVKGNGRQAIAKKLDEWSVAPPDTNRNHWSPSTITAIVKNEVYIGKIIWGKITYLKRGGQYTRRKMKPEEWIVKDEAHEPLVTKELFDAANAAHSGRFRPSTKANNVLSNPLAGILKCELCGYTMLYQPRKDRPNSMIYCTKAQCRGKQKGAMLYLVENRILVSLEQYIKEFEIPKQQDAKNNSSIIQFQEKALDKKKKEIAEANKQKSALHDFLEKGVYDINTFMERQKVLVDRIEKLKDETRLIVEDMEKEKFREKNTKQFIPLVKSVLTAYRETDDIEKKNRLLKSVLERATFLRKKEWTKIDQFVIQLYPKI

SEQ ID NO: 4570 - protein, 518 aa, Unknown
  Description of Unknown: Integrase B4571 sequence
  PTHR30461:SF3,SM00857,G3DSA:1.10.10.2600,IPR036162,G3DSA:3.40.50 .1390,IPR006119,IPR038109,PF07508,SSF53041,IPR011109, PTHR30461,PS51736,cd00338,PF00239
MASENDKNHKVRVAQYLRMSTDHQQYSLHNQSEYIKDYAEKNNMEIAYTYDDAGKSGVSIIGRHSLQQLLSDVEQKKIDIQAVLFYDVSRFGRFQNSDEAAYYSFLFERNGVDLIYCSEPIPTKDFPLESSVILNIKRSSAAYHSRNLSEKVFIGQANLIKLGYHQGGMAGYGLRRLLVDENGIAKEILGFRKRKSIQTDRVILIPGPKNEIKIVNSIYDLFIDDNMPEFIIAERLNEQNIPAENGTLWTRAKIHQILTNEKYIGNNIYNKTSSKLKSRLVKNPKNEWVRCDKAYKPIISKKKYNKAQEIIQLRSVHLTNEELLEKLKQKLESNGKLSGFIIDEDDTGPSSSVYRTRFGGLLRAYTLIGYKPEHDYSYIQINEALRSFYSGIIEDFKGEILKSNCYIDEYKYAPMLYINDEFLISVLITKCTHMKSGKLRWKVRFDNSQKADITIVIRMDSQNISPLDFYIIPKIENEYSKMWMTETNNIRLDLYRFDNLDKLLQIITRMKVRELYAA

SEQ ID NO: 4571 - protein, 518 aa, Unknown
  Description of Unknown: Integrase B4572 sequence
  SM00857,G3DSA:1.10.10.2600,IPR036162,PS51737, G3DSA:3.40.50.1390,IPR006119,IPR038109,PF07508, SSF53041,IPR011109,PTHR30461,Coil, PS51736,cd00338,PF00239
MQYEEYLIYLRKSRSDASLEAMGVDVLERHEQILLDLAKRMNLSIGGIYREVVSGESISARPEMQRLLSEVEAGRWKGVVVMEVERLARGDTIDQGIVQRAFQYSGTQIVTPAKTYNPNNEFDEEYFEFGLFMSRREYKTIRRRMRAGVTAAVKEGKWPFNKAPYGWQRVKLEHARGWVLAPDPEEAPVVKLIFQLYTGPNRIGITNICRYLDNRGVKPRNGDTWTECSIMGILRNIVNDQRVGIGRRKIVKQVQNGSVNKVRPHSDYDFTAPGLQPRLIDHDVFLEAQTHLGKNSHKLPESYGIKNPLAGIVVCSCCGKKMMRRPASKTPGGAPYDVLKCNTRNCPTIGSALDLVEREVIQALSDWVAGYQLDPTLEVENKVPEKEQLLSSAISNHDVLLKQNGNLYDLLEQGVYTTEIFLERSHELQKRIKESEVHIEVLKKDLEYEKEKIANVENFIPSCKELLSCYWELSAQDRNKALKMLLESVEYTKTKRNKYGDKDNPTFTLNLKPRIPRI

SEQ ID NO: 4572 - protein, 518 aa, Unknown
  Description of Unknown: Integrase B4573 sequence
  SM00857,G3DSA:1.10.10.2600,IPR036162,PS51737,G3DSA:3.40.50.1390, IPR006119,IPR038109,PF07508,SSF53041,IPR011109, PTHR30461,Coil,PS51736,cd00338,PF00239
MKTYTPTDYALYLRKSRADLEAEAHGEGDTLARHEHILMELAKSRALPIGAIYREIVSGERIANRPVMQQLLSEVEDGRWKGVLVTETSRLARGDTIDQGIVAQAFKFSGTLIVTPSKTYDPTQEADEEWMEFGLFMSRQEYRMIRRRQLAGTRASKKEGHYVPGRPPYGYERYKLDGRGWSLRPVEPQAGVIRTIYDMYLSGKGFSEIANELNAMKIRTPLDKKWVPATTRAILQNPHYAGFIPSAMKVNTKIVQKGKLITKRPVNKNCELYEGIHEAIIPRDVWYSVQQRMKDTVTPRVPRKYQQMNPLAGLVYCDQCGKLMSRHPYRREDKVRFGCENPSCSTVSSLFEDVESLVLQSLREFLHKIELSSPALLDTKSEEIALQNIEKQLTDINRRLQRTYELLEDGFYSKETFLQRQSAISQDQTALLNTKHEIERKLHNKQTDIEAQKNSAPLIRHVLDVYPTLEDPKEQNLLLKQVIRRIDYHKTVRVYGKAKSDLHLTIHPKIAIPQTSNI

SEQ ID NO: 4573 - protein, 518 aa, Unknown
  Description of Unknown: Integrase B4574 sequence
  SM00857,G3DSA:1.10.10.2600,IPR036162,PF13408, IPR025827,PS51737,G3DSA:3.40.50.1390,IPR006119, IPR038109,PF07508,SSF53041,IPR011109, PF00239,PTHR30461,Coil,cd00338
MQENETYVIYLRKSRADSEKSSLEEVFAKHESELQSLAERTLGNRIPEDKIFREVVSGETITDRPVISQILKVMESKKIKGVFVVDPQRLTRGDLLDKGHLINVFKYTNTKIITPYKTFDLNNDFDLKLFKMELDKGSDYLEYYKMIQARGRIASVRSGQYIGSTAPYGYDKYSYKENKHTVNTLKPNSDEATVVQLIYHLYVNESLSYAAIANKLNTMNIKPRKSTSWSPYSLKEILHNPVYIGKVRWNRRKTVMKYKNESLLKTRPIALNDSIISDGIHEAIIDEALFDSAQECNGKTPRNHSSSKLINPLAGLIFCGNCGRAMSYKTYKNNAGSEKQPPRYLCNNQSNCHTKSAKATDVINQIISALECYIEDFKVKLENDDGNSFNVRSQIISVLNKQLQDLEVREETQYEMLENKIYTPELFKKRRQKLLEEREVLLDKLQEAKVQEPVKIDYQEKIISFTDTVEALKNPDIDILQKNMLLKKCIKKITYTTDKEKGNRWRESTFEIDITPLI

SEQ ID NO: 4574 - protein, 518 aa, Unknown
  Description of Unknown: Integrase B4575 sequence
  SM00857,G3DSA:1.10.10.2600,IPR036162,PS51737,G3DSA:3.40.50.1390, IPR006119,IPR038109,PF07508,IPR011109,SSF53041, PF00239,PTHR30461,PS51736,Coil,cd00338
MEKLINNNMEYYCAYLRKSRKDMEAEAHGQGETLARHEKRLKDYADSVGIKISKFYREVVSGETISARPVMQQLLTDVENGMWTGVLVVEVERLARGNTLDQGIVSNAFQYSNTKIITPLKTYDPNNDYDEEYFEFGLFMSRREYKKINQRLHEGILASVKEGKHVGTSAPYGYNKYKLPKQKGYSLKINEYEANMIKLIYNFYCSGNGLEFICNELNRLGFKPRRSNEFTKSSITHILTNPVYIGKIKYTDKATTKKVVNGNIVRVKNENKNVIYVDGLHEPIIDLNTWNKVQNIRNSNLISRTKVDYTLKNPMASILKCGLCGRSLSRITYSNRNDIRICCRKCKENVGSNINFVEDKLLQSLKLLLEDYKVKLINNDNSDIETLLKINEDNILNYKTELEKLKLQLNKTYDLLEQEVYTKDIFIERSNLLKQQIKETNNKITELEYEKNNIMSQKNNKEILVPKIENVIDSYYETDDIKMKNNLLKDVLEKVEYTKINPSDKDDFKLKLFPKIQA

SEQ ID NO: 4575 - protein, 518 aa, Unknown
  Description of Unknown: Integrase B4576 sequence
  PTHR30461:SF3,SM00857,IPR036162,G3DSA:3.40.50.1390,IPR006119, PF07508,IPR011109,SSF53041,PTHR30461,Coil, PS51736,cd00338,PF00239
MSIMSFSNIIIYLRKSRADDPTMTVEEVLAKHESILQDYCVNEFGQPIPESRIYREVVSGETIQDRPVMQRVLRLLESGNIDGVLVVEPQRLSRGDLEDCGHIINSFRYTNTAVITPTKTYNLQDEYDRKFFEMELTRGNDYLEYTKKILARGRLAAVMSGQYIGSVRPYGYNKVVYGSGKNKIRTLEKFKKENDILVLMKRLYLDNDYTPEEIARTFDSMGIESPRGKHWTASAVRRLLASPINNGKIVWNKRQTVVEWKNGKQVKSRAKSNKDDVIIVQGKHPATYDDETYTAIMAKLSIHSVKVTNQRGLRNPFAGILFCQCGRAMSLRSTHNGHSVILICNDHFYCHTRSVAFNPVLDKVKEALSEAITDFSVKISNKEHTESELYALNISTLENKLEQLYKKDLVQKDAYEDGVYSKAEYIQRNTQLQEQISAIANSLKEMRAKAPEVINYKDCIIRFQDCLNALEDNNVSIEVKNALLKACISKIVYHSVNSNSEYSGRTKNPFNLEVFFKL

SEQ ID NO: 4576 - protein, 518 aa, Unknown
  Description of Unknown: Integrase B4577 sequence
  cd03768,PTHR30461:SF3,SM00857,IPR036162,PF13408, PS51737,G3DSA:3.40.50.1390,IPR025827,IPR006119,PF07508, IPR011109,SSF53041,PTHR30461,PS51736,Coil, PF00239
MRIAIYARKSAFSDKSESVHNQDRMCREYCALHFPGEHIFLNYTDEDKTGANTNRPALQNMMRDVHAGIIDLLIVYQLDRLTRDVRDYCNLSAELNDCGVHFTSVKESVDTSTPIGEALTTLSAVFAQMERKTLSNRVYDNMMGLARSGWWTGGNLPCGYTTQRVVENGKPHTLLVPDPEKAEQLVTVFNLFVERGSSFCSFASFAQTNDCFDAFGIPSASQVRRVITSPYGSPANKDLRDYYLSLGANVIGAESDWDGTHGVMRYGVTDQRNGTATNPRESWIVCPGRHEPILPADLWLAAQDQVKSNVFCKQAKHPPVLLKGILRCKCGRMMSPVRSRYKGKVYISYRCTRTGEVGRKSPDCVSACRDYVLDEKVLSVFREIERDPEVIKKYSPAAPATDQDALRKKEKEIESLQKKIGNLSSALAINPESTAAKYIIADMESLDSQIQKKQMELAGLQANRLTAAQAEKELFEKQKEIARLVQNLDDLPPEEQNRIARSVLRKCVWDGETLFLEF

SEQ ID NO: 4577 - protein, 518 aa, Unknown
  Description of Unknown: Integrase B4578 sequence
  cd00338,SM00857,G3DSA:1.10.10.2600,IPR036162,PS51737, G3DSA:3.40.50.1390,IPR006119,IPR038109,PF07508,IPR011109, SSF53041,PTHR30461,PS51736,Coil,PF00239
MQYEEYLIYLRKSRSDASLEAMGVDVLERHEQILLDLAKRMNLSIGGIYREVVSGESISARPEMQRLLSEVEAGRWKGVVVMEVERLARGDTIDQGIVQRAFQYSGTQIVTPAKTYNPNNEFDEEYFEFGLFMSRREYKTIRRRMRAGVTAAVKEGKWPFNKAPYGWQRVKLEHARGWVLAPDPEEAPVVKLIFQLYTGPDRIGITNICRYLDNRGVKPRNGDTWTECSIMGILRNIVNDQRVGIGRRKIVKQVQNGSVSKVRPHSDYDFTAPGLQPRLIDHDVFLEAQTHLGKNSHKLPESYGIKNPLAGIVVCSCCGKKMMRRPASKTPGGAPYDVLKCNTRNCPTIGSALDLVEREVIQALSDWVAGYQLDPTLEVENKVPEKEQLLSSAISNHDMLLKQNGNLYDLLEQGVYTTEIFLERSHELQKRIKESEAHIEVLKKDLEYEKEKIANVENFIPSCKELLSCYWELSAQDRNKALKMLLESVEYTKTKRNKYRDKDNPTFTLNLKPRIPRI

SEQ ID NO: 4578 - protein, 518 aa, Unknown
  Description of Unknown: Integrase B4579 sequence
  SM00857,G3DSA:1.10.10.2600,IPR036162,PF13408, IPR025827,PS51737,G3DSA:3.40.50.1390,IPR006119, IPR038109,PF07508,SSF53041,IPR011109, PF00239,PTHR30461,Coil,cd00338
MQENETYVIYLRKSRADSEKSSLEEVFAKHESELQSLAERTLGNRIPEDKIFREVVSGETITDRPVISQILKVMESKKIKGVFVVDPQRLTRGDLLDKGHLINVFKYTNTKIITPYKTFDLNNDFDLKLFKMELDKGSDYLEYYKMIQARGRIASVRSGQYIGSTAPYGYDKYSYKENKHTVNTLKPNSDEATVVQLIYHLYVNESLSYAAIANKLNTMNIKPRKSTSWSPYSLKEILHNPVYIGKVRWNRRKTVMKYKNESLLKTRPIALNDSIISDGIHEAIIDEALFDSAQECNGKTPRNHSSSKLINPLAGLIFCGNCGRAMSYKTYKNNAGSEKQSPRYLCNNQSNCHTKSAKATDVINQIISALECYIEDFKVKLENDDGNSFNVRSQIISVLNKQLQDLEVREETQYEMLENKIYTPELFKKRRQKLLEEREVLLDKLQEAKVQEPVKIDYQEKIISFTDTVEALKNPDIDILQKNMLLKKCIKKITYTTDKEKGNRWRESTFEIDITPLI

SEQ ID NO: 4579 - protein, 518 aa, Unknown
  Description of Unknown: Integrase B4580 sequence
  SM00857,G3DSA:1.10.10.2600,IPR036162,PF13408,PS51737, G3DSA:3.40.50.1390,IPR025827,IPR006119,IPR038109,PF07508, SSF53041,IPR011109,PTHR30461,Coil,PS51736, cd00338,PF00239
MDLYAQYLRKSRADVEAEQHGEGETLARHKHMLDALAQKMGIEVTKVYREIVSGETIAARPVMQQLLQDVESGMYKGVLVVEVERLARGDTIDQGIVSQTFKYSDTQIITPTKIYNPNNEFDEEYFEFGLFMSRREYKTINRRIQAGRLESAKEGKFPSWNAPFGYKVVKLVNEKGYTLEPLESEADAVKKIFDMYVNEHAGTTTIAHTLTEMGYKPRKTDHFTTHTIISILDNPLYAGYMVWGRRKETTIMKNGIVTKTRPRLRPCDEYEKYEGRHEGLVSKELWQKAHEMRIAKINTSPKRATQLTNPLCGLIYCSKCGQRMQRRPAGSRQPADVIMCQNTACDNRAAYMRLIEERIIDSLKTWLNEYDVSENEEQKITDNIAVMKKNINKYEQELTTVTKQLNNAYDLLEQGVYTTDIFFQRSATLKDRIESLNTQIESVKKEILEEEKRQTAKIQFVPKLKKIIECYWSLDTPKSKNDILKEVIERVVYTKNVKGHGHEDEFSIIVYPVVPKHK

SEQ ID NO: 4580 - protein, 518 aa, Unknown
  Description of Unknown: Integrase B4581 sequence
  PTHR30461:SF3,SM00857,G3DSA:1.10.10.2600,IPR036162,PF13408, IPR025827,G3DSA:3.40.50.1390,PS51737,IPR006119,IPR038109, PF07508,IPR011109,SSF53041,PF00239,PTHR30461, PS51736,Coil,cd00338
MLSFNNIIIYLRKSRSDDPTQSVEEVLARHEHILQEYCMKEYGECIPENRIYREVVSGETIQDRPIIQQVLRLLESGSIDGVLVVEPQRLSRGDLENCGHIVNSFRYTNTLVITPTKTYNLQDEYDRKFFEMELTRGNDYLEYTKKILARGRLASVMQGNYINAIRPYGYNKIVIGTGKDKIHTLEIFKEESDVLLLMKHLYLDENYGLVRIAHTLDDLSIKAPKGDHWSASTISRILSNPLYNGKIVWNKRKTVVKWKDGKKVKSKPLNRGDDVIIVQGKHPAIFDDETFNAILKRMENSPKVKRSSKLRNPFAGLLFCSTCGSAMILRRSGRKSGVYSLTCNRQSICHTKSVQYKAVLLKVKQSLAEAISDFEVKMSNNNTTASELHAINISTLENELEQLYRKDLIQKDAFEDGTYSKAEYMQRNAQLQTQIAAVTDKLNRARKDAPEPVSYEERIVCFRDCLNALDDDTVSAEVKNTLLKACISKIVYYNDSPSISGIGRYVDNPFRLEIFLKL

SEQ ID NO: 4581 - protein, 518 aa, Unknown
  Description of Unknown: Integrase B4582 sequence
  SM00857,G3DSA:1.10.10.2600,IPR036162,PF13408,IPR025827, G3DSA:3.40.50.1390,PS51737,IPR006119,IPR038109,PF07508, SSF53041,IPR011109,PTHR30461,Coil,PS51736, cd00338,PF00239
MDSIMNSADRRTWACCAYLRKSREDEERERMGKGETLARHRRIIESLAMENGHEIREWYPEVVSGETIAARHEIKRLLVDLADGKWDAVYVVEASRLGRGGGSDQEKIINAFRYTDTALITEMKVYDPHNRGDMRQLKSELRSSEDELDAISTRLKRGKYQAAKEGVWQATGKEPFGWRSIRVNGMWTLEPSERHGVLMHIYDLLEAGENYCSIARILNEEGEPTPRGGEHWRHQTVKAIAENPVNCGMNRYGARVMVREFDKETFEGRKMKKNNANPQLTRGLWFGNGTLSIERFERLVGKSVASARLHKDRELKNPLAGLLRCAECGYAMQMHMMSSGKSKAYFFQHAKKDAGRLRSCKGCRGARADQVMAMVAEALRKAADDVEIELAKPTNDSFEAQRKALEASLKKEKLARKRASDAYEAGVYDLAESKQRRQKIDNRIEALETKLAKAKPKRYDRQTVVTLRECIDMLEDDEVPVKAKNDFLKQVVERIEYSNDTAPYVLPNKPHLEIFLKG

SEQ ID NO: 4582 - protein, 518 aa, Unknown
  Description of Unknown: Integrase B4583 sequence
  SM00857,G3DSA:1.10.10.2600,IPR036162,PF13408,IPR025827, PS51737,G3DSA:3.40.50.1390,IPR006119,IPR038109,PF07508, IPR011109,SSF53041,PF00239,PTHR30461,Coil, cd00338
MQENETYVIYLRKSRADSEKSSLEEVFAKHESELQSLAERTLGNRIPEDKIFREVVSGETITDRPVISQILKVMESKKIKGVFVVDPQRLTRGDLLDKGHLINVFKYTNTKIITPYKTFDLNNDFDLKLFKMELDKGSDYLEYYKMIQARGRIASVRSGQYIGSTAPYGYDKYSYKENKHTVNTLKPNSDEATVVQLIYHLYVNESLSYAAIANKLNTMNIKPRKSTSWSPYSLKEILHNPVYIGKVRWNRRKTVMKYKNESLLKTRPIALNDSIISDGIHEAIIDETLFDSAQECNGKTPRNHSSSKLINPLAGLIFCGNCGRAMSYKTYKNDAGSEKQSPRYLCNNQSNCHTKSAKATDVINQIISALECYIEDFKVKLENDDGNSFNVRSQIISVLSKQLQDLEVREETQYEMLENKIYTPELFKKRRQKLLEEREVLLDKLQEAKVQEPVKIDYQEKIISFTDTVEALKNPDIDILQKNMLLKKCIKKITYTTDKEKGNRWRKSTFEIDITPLI

SEQ ID NO: 4583 - protein, 518 aa, Unknown
  Description of Unknown: Integrase B4584 sequence
  cd03768,PTHR30461:SF3,SM00857,IPR036162,G3DSA:3.40.50.1390, IPR006119,PF07508,IPR011109,SSF53041,PTHR30461, PS51736,Coil,PF00239
MRIAIYARKSAFSDKSESVHNQDRMCREYCALHFPGEHIFLNYTDEDKTGANTNRPALQKMMRDVHAGIIDLLIVYQLDRLTRDVRDYCNLSAELNDCGVHFTSVKESVDTSTPIGEALSTLSAVFAQMERKTISNRVYDNMMGLARAGWWTGGNLPCGYTTRRVVENGKPHTLLVPDPEKAGQLVTVFKLFVKRGSSFHSFASFALTNGCFDVFGIPSTSQVRRVITSPYGAPANNALRDYYLSLGANVIGAESDWDGTHGVMRYGVTDQRNGTTTNPRESWIVCPGRHDPILPADLWLAAQDQVKSNMFCKQAKHPPVLLKGILSCKCGRMMSPVRSRYKDKVYISYRCTRTGEVGRKSPDCVSACRDYVLDEKVLSVFREIERDPEVIKKYSPAAPATDQDALRKKEKEIESLQKKIGNLSSALAINPESTAAKYIIADMESLDSQIQKKQMELAGLQANRLTAAQAEKELFEKQKEIARLVQNLDDLPPEEQNRIARSVLRKCVWDGETLFLEF

SEQ ID NO: 4584 - protein, 518 aa, Unknown
  Description of Unknown: Integrase B4585 sequence
  PTHR30461:SF3,cd00338,SM00857,G3DSA:1.10.10.2600, IPR036162,PF13408,PS51737,G3DSA:3.40.50.1390, IPR025827,IPR006119,IPR038109,PF07508, IPR011109,SSF53041,PTHR30461,mobidb-lite,Coil,PF00239
MPKKAPKHPAKPKRGKKLEIEEPGVLYGRYSSHNQKDISVEQQFEKGYELAAEYGIKIVDTYADRAVSGRTDKRRDFQRMMADAAKGKFCYVIAWKSNRMGRNMLEALINETKLQELGVRVLYVEEDFDDTAAGRFAARSMMNVNQFYSENMAEDIKRGLYDNAANCMVANGHLPYGYKADETLHYTIDEPKAAVIREIFTRVATGEALVDITSSLNARGIVTSYGRPWGRSSFQKILSNERYRGIYIYGDVRIEGGIPRIVSDELYFKVQEVLTTKKNPQGRHRINGDYLLTGKLFCGHCKAPMVGVSGTSKTGNLHQYYVCQRRRTEKDCDKKNVRRDDIELQIAEAIKNTALKDEIIEWIADSTMAYNERKEAESKVGILEDQLAGTERSIKNVMAAIEQGIITATTKDRLVELESERTAIQAKIAAARADIVTISRDDLISGLEMFREGDVHDKKYQARLFDTFLVAVYLYDDDMKIVFSFSGDKNTIRIPLNQSIDNIENCAESSYKLCLGPP

SEQ ID NO: 4585 - protein, 518 aa, Unknown
  Description of Unknown: Integrase B4586 sequence
  SM00857,G3DSA:1.10.10.2600,IPR036162,PS51737,G3DSA:3.40.50.1390, IPR006119,IPR038109,PF07508,IPR011109,SSF53041, PTHR30461,Coil,PS51736,cd00338,PF00239
MTLAEQLRLTESDQFCIYLRKSRADAEAEKLGQGETLARHERILTDFAAREGLPVGKIYREIVSGETIAARDEIQNLIRESYEGMWRGVIVVEVTRLSRGNQGDAQTIMDCLRYSHNNKGMLVVTPTKCYDIVHSSDDEEYMEFELFMSRREYKMIHKRMERGRIQAVVEGNYMGSYRPYGYDILKNRTGRTLIPNPEEAPIVKNIFEWTVREHLTPGKICKRLTSLGVPTYTGSAEWAIGTVKTILTNPTYTGKVRWNDRMQVKTMVDGKLVKSRPRSNHTDQYMLYDGKHEAIVDEITFHAAASRFHSDKTKSNLKLMNPFAGVLICAKCKKAMIYQGYNKRPNTPPRILHKSSQICNVKSAVLKDVMDAVAHALELYIDDFEMKIDNLPEVDENSILSQLESLQKELIKQEKKLPKLFDAWEDGILTDEEFTRRKLVNKERIESIKKQMDHLEDSVPTKDEYEEKIMLLSDALKSLLDPTLDADIKNTYLKSIISSIEYSRDNNTEFILDVFLKD

SEQ ID NO: 4586 - protein, 518 aa, Unknown
  Description of Unknown: Integrase B4587 sequence
  PTHR30461:SF3,SM00857,G3DSA:1.10.10.2600,IPR036162,PF13408, PS51737,IPR025827,G3DSA:3.40.50.1390,IPR006119,IPR038109, PF07508,IPR011109,SSF53041,PF00239, PTHR30461,PS51736,Coil,cd00338
MLSFNNIIIYLRKSRSDDPTQSVEEVLARHEHILQEYCMKEYGECIPENRIYREVVSGETIQDRPIIQQVLRLLESGSIDGVLVVEPQRLSRGDLENCGHIVNSFRYTNTLVITPTKTYNLQDEYDRKFFEMELTRGNDYLEYTKKILARGRLASVMQGNYINAIRPYGYNKVVIGTGKDKIHTLEIFKEESDVLLLMKHLYLDENYGLVRIAHTLDDLSIKAPKGDHWSASTISRILSNPLYNGKIVWNKRKTVVKWKDGKKVKSKPLNRGDDVIIVQGKHPAIFDDETFNAILKRMENSPKVKRSSKLRNPFAGLLFCSTCGSAMILRRSGRKSGIYSLTCNRQSICHTKSVQYKDVLLKVKQSLAEAISDFEVKMSNNNTTASELHAINISTLENELEQLYRKDLIQKDAFEDGTYSKAEYMQRNAQLQTQIAAVTDKLNHAREDAPEPVSYEERIVCFRDCLNALDDDTVSAEVKNTLLKACISKIVYYNDSPSISGIGRYVDNPFRLEIFLKL

SEQ ID NO: 4587 - protein, 518 aa, Unknown
  Description of Unknown: Integrase B4588 sequence
  cd00338,SM00857,G3DSA:1.10.10.2600,IPR036162,PS51737, G3DSA:3.40.50.1390,IPR006119,IPR038109,PF07508,SSF53041, IPR011109,PTHR30461,PS51736,Coil,PF00239
MQYEEYLIYLRKSRSDASLEAMGVDVLERHEQILLDLAKRMNLSIGGIYREVVSGESISARPEMQRLLSEVEAGRWKGVVVMEVERLARGDTIDQGIVQRAFQYSGTQIVTPAKTYNPNNEFDEEYFEFGLFMSRREYKTIRRRMRAGVTAAVKEGKWPFNKAPYGWQRVKLEHARGWVLAPDPEEAPVVKLIFQLYTGPDRIGVTNICRYLDNRGVKPRNGDTWTECSIMGILRNIVNDQRVGIGRRKIVKQVQNGSVSKVRPHSDYDFTAPGLQPRLIDHDVFLEAQTHLGKNSHKLPESYGIKNPLAGIVVCSCCGKKMMRRPASKTPGGAPYDVLKCNTRNCPTIGSALDLVEREVIQALSDWVAGYQLDPTLEVENKVPEKEQLLSSAISNHDVLLKQNGNLYDLLEQGVYTTEIFLERSHELQKRIKESEAHIEVLKKDLEYEKEKIANVENFIPSCKELLSCYWELSAQDRNKALKMLLESVEYTKTKRNQKGDKDNPTFTLNLKPRIPRI

SEQ ID NO: 4588 - protein, 518 aa, Unknown
  Description of Unknown: Integrase B4589 sequence
  PTHR30461:SF3,SM00857,G3DSA:1.10.10.2600,IPR036162,PF13408, IPR025827,G3DSA:3.40.50.1390,PS51737,IPR006119,IPR038109, PF07508,SSF53041,IPR011109,PF00239, PTHR30461,PS51736,Coil,cd00338
MNTVIYARYSAGPRQTDQSIEGQLRVCTDFCKQRGLTVIDTYCDRHISGRTDERPEFQRLIADAKRKKFEAVVVYKTDRFARNKYDSAVYKRELKRNGIQIFYAAEAIPDGPEGIILESLMEGLAEYYSAELAQKIKRGMHESALKCQSTGSERPLGYRVDEQKHFQIDPESAQTVQTIFEQYIKGESNAAICELLNSRGLRTAQGKPFNKNSINRIIKNRKYIGEYRYHDIVVEGGMPAIISKDTFNLAQAEMERRRTRKAPKSPKAEYLLAGRLFCGHCKGPMQGVSGTGKSGNKWYYYYCGNTRGKNKTCDKKQVSRDRLERAVVDFTVRYILQEDFLEELARKVHAAQERQNDTASEIAFYEKKLADNKKYIANVLRAIESGAATQTLPARLQELENEQAVILGELSFLKGKHLAFTEDQIFFALMKHLEPYPGESEQDYRRRIISDFVSEVYLYDDRLLIYFNISSEDGKLKSADLSNIEGSEFDEGLVSSTKGVLHEPFYFVGGFAVTIWFK

SEQ ID NO: 4589 - protein, 518 aa, Unknown
  Description of Unknown: Integrase B4590 sequence
  cd03768,PTHR30461:SF3,SM00857,IPR036162,PS51737, G3DSA:3.40.50.1390,IPR006119,PF07508,IPR011109,SSF53041, PTHR30461,PS51736,Coil,PF00239
MRIAIYARKSAFSDKSESVHNQDRMCREYCALHFPGEHVFVNYADEDKTGANTNRPALQKMMRDVHAGIIDLLIVYQLDRLTRDVRDYCNLSAELNDCGVHFTSVKESVDTSTPIGEALSTLSAVFAQMERKTISNRVYDNMMGLARAGWWTGGNLPCGYTTQRVVENGKPHTLLVPDPEKAEQLVTVFKLFVERGSSFHSFASFALTNDCFDVFGVPSTSQVRRVITSPYGVPANKDLRDYYLSLGANVVGTESDWDGAHGVMRYGVTDQRNGTATNPRESWIVCPGRHEPILPADLWLAAQNQVKSNMFCKQAKYPPVLLKGILSCKCGRMMSPVRSRYKDKVYISYRCTRTGEVGRKSPDCVSACRDYVLDEKVLSVFREIERDPEVIKKYSPAAPATDQDALHKKEKEIESLQKKIGNLSSALAINPESTAAKYIIADMESLDSQIQKKQMELAGLQANRLTAAQAEKELFEKQKEIARLVQNLDDLPPEEQNKIARSVLRKCVWDGETLFLEF

SEQ ID NO: 4590 - protein, 518 aa, Unknown
  Description of Unknown: Integrase B4591 sequence
  PTHR30461:SF3,SM00857,G3DSA:1.10.10.2600,IPR036162,G3DSA:3.40. 50.1390,IPR006119,IPR038109,PF07508,IPR011109,SSF53041, PTHR30461,cd00338,PF00239
MASENEKNHRVRVAQYLRMSTDHQQYSLHNQSEYIKDYAEKNNMEIAYTYDDAGKSGVSIVGRHSLQQLLSDVEQKKIDIQAVLFYDVSRFGRFQNSDEAAYYSFLFERNGVDLIYCSEPIPTKDFPLESSVILNIKRSSAAYHSRNLSEKVFIGQVNLIKLGYHQGGMAGYGLRRLLVDENGIAKEILSFRKRKSIQTDRVILIPGPKNEIKIVNRIYDLFIDNNVPEFIIAERLNEQNIPAENGTLWTRAKIHQILTNEKYIGNNIYNKTSSKLKSRLVKNPKHEWVRCDKAYKPIISKKKYNKAQEIIQLRSIHLTNEDLLEKLKQKLESNGKLSGFIIDEDDTGPSSSVYRTRFGGLLRAYTLIGYKPEHDYSYLKINEALRSFYSEIIEDFKGEILKSNCHIDEYKYAPMLYINDEFLISVLVTKCIHMKSGKLRWKVRFDNSQKADITIVIRMNSQNISPLDFYIIPKIENEYNKMCMTETNNIRLDLYRFDNLDKLLQIITRMKVRELYAA

SEQ ID NO: 4591 - protein, 518 aa, Unknown
  Description of Unknown: Integrase B4592 sequence
  cd00338,SM00857,G3DSA:1.10.10.2600,IPR036162,PS51737, G3DSA:3.40.50.1390,IPR006119,IPR038109,PF07508,IPR011109, SSF53041,PTHR30461,PS51736,Coil,PF00239
MPKAISYIRFSTKIQSVGDSTKRQSKYINDWLKRNPDYYLDESLRFQDLGISGFSGANARSGAFGEFLAAVESGYIEAGSVLLVESLDRVSRQDIDTAGEQLRKILRSGVEVVTLVDNEWYTKESLKDSLSMIKAMLVMERAHEESAMKSTRLRSVWAAKRERAAKGEIMSKRCAAWLKVSEDRSHFEFIPENVKAVQRVFQLRLEGLSHVKIAKQMNDEGFSTLNQFKSVKGGWSQSSVTELLSNRSVIGFKVPSKSMAVKGVSEIPNYYPSIITDEQFYAVQQLKQGSGRKPSSDLPLLTNLFKGVLRCSECGFIMVVAGVSAKRSGIYKCSMKSEGRCNSVGFSRLQTDRALVQGLLYNTNRLALNRDNGSAIGSLQSELEHLQKQRERLIKLAMLADDTESMAKDLKALNSQIKDAEKAVSEVHQREQSSQLETISHLDLTVKKDRIEAQIIIKRIVKEIRLNTAGKKCDVFLHNGLKLLNFPLDRALDGEIFLEVLPVLEADEFDFDTYRMIE

SEQ ID NO: 4592 - protein, 518 aa, Unknown
  Description of Unknown: Integrase B4593 sequence
  PTHR30461:SF3,SM00857,G3DSA:1.10.10.2600,IPR036162, G3DSA:3.40.50.1390,IPR006119,IPR038109,PF07508, IPR011109,SSF53041,PTHR30461,cd00338,PF00239
MASENDKNHKVRVAQYLRMSTDHQQYSLHNQSEYIKDYAEKNNMEIAYTYDDAGKSGVSIIGRHSLQQLLSDVEQKKIDIQAVLFYDVSRFGRFQNSDEAAYYSFLFERNGVDLIYCSEPIPTKDFPLESSVILNIKRSSAAYHSRNLSEKVFIGQVNLIKLGYHQGGMAGYGLRRLLVDENGIAKEILGFRKRKSIQTDRVILIPGPKNEIKIVNSIYDLFIDDNMPEFIIAERLNEQNIPAENGTLWTRAKIHQILTNEKYIGNNIYNKTSSKLKSRLVKNPKNEWVRCDKAYKPIISKKKYNKAQEIIQLRSVHLTNEELLEKLKQKLESNGKLSGFIIDEDDTGPSSSVYRTRFGGLLRAYTLIGYKPEHDYSYIQINEALRSFYSGIIEDFKGEILKSNCYIDEYKYAPMLYINDELLISVLITKCTPMKSGKLRWKVRFDNSQKADITIVIRMDSQNISPLDFYIIPKIENEYSKMCMTETNNIRLDLYRFDNLDKLLQIITRMKVRELYAA

SEQ ID NO: 4593 - protein, 518 aa, Unknown
  Description of Unknown: Integrase B4594 sequence
  PTHR30461:SF3,cd00338,SM00857,G3DSA:1.10.10.2600,IPR036162, PF13408,PS51737,G3DSA:3.40.50.1390,IPR025827,IPR006119, IPR038109,PF07508,IPR011109,SSF53041,PTHR30461, PS51736,Coil,PF00239
MYEDIKTACLYVRFSSHNQTEQSIEGQTRVCQEFCQRHNIKIVEIYADRATSASKNTEKRVSFLKMIKDSEKGLFDAVVVYKLDRFARSRYDSATYKYRLKKNGVQLISATENITNSPEGIILESVLEGMAEFYSAELSQKINRGMRESAYKHNSIGGALPLGYKTVDKKLVIDEKTAPIVREAFTMYAEGHSVAEICRIFNARGYKTSKGTEFGKNSFSKIFRNERYIGTYTYHDYRAEDAIPAIIDRDLWDRVQLRLKKVKNSPGRNKAKRVYLLSGKLFCGHCGESMNGNCNGNKYAFYECYGKKSKYNGCQKRNLRKEYIERLVAQDALSLLTDENIEHLATVACERNDYEIETGSPIPVIRDRIHQTEVSINNLTKAIETGATPDALVKRMVELEREKKDLSTQLKKEEELIVPLEKEQVIFWLEKFKDGDIEDEEFCRLLIDLFVNSVTVWDEDNDMLKVTIAYNLTSLPTKTYRLTKDGTLSDFTGNAPAPKTVCFWQRQLHRVPVPFRRC

SEQ ID NO: 4594 - protein, 518 aa, Unknown
  Description of Unknown: Integrase B4595 sequence
  PTHR30461:SF3,SM00857,G3DSA:1.10.10.2600,IPR036162,PF13408, IPR025827,G3DSA:3.40.50.1390,PS51737,IPR006119,IPR038109, PF07508,IPR011109,SSF53041,PF00239,PTHR30461, PS51736,Coil,cd00338
MNVVLYMRYSSDRQTEQSIEGQKRVCMDFCERQGYNVVGEYIDRATSAYKETAKRTNFYRMIRDSSNGLWQGVVVYKLDRFARNRYDSATYKVRLKKNGVKVISATENISDSPEGVILESVLEGMAEFYSKELSQKVSRGLNESAHKCNSTGGAIPLGYKTVDKKLTVDEPNAQIVKEAFDLYAGGATISEICEKFNSQGYRTKKGTEFNKNSFKSMFRNEKYIGTYTYKDIRIEGGIPAIIDKETFETVRKKLSANAQAPARGKARVNYLLSQKLFCGHCGANMIGESGRSKTGETYYYYSCSTRKRFHSCKKRTIRKDLIERIVAENAMRLITPEMINTIADMAIKCNREDIESDAIIPALTADLKEINTSIKNLLKMVERGVESETLDSRLKELEKRKKDTESRLDAAKSEYLTLDKTVIVGWLSQFLSGDIEDEDFRRHLIDTLINSVTVWDEPDGGYKITTVYNLKGNTQTYRVNADGSSDLERNSPPRKRQFSCEDCRFFLFCMFIFSFFFF

SEQ ID NO: 4595 - protein, 518 aa, Unknown
  Description of Unknown: Integrase B4596 sequence
  SM00857,G3DSA:1.10.10.2600,IPR036162,PS51737,G3DSA:3.40.50.1390, IPR006119,IPR038109,PF07508,IPR011109,SSF53041, PTHR30461,PS51736,cd00338,PF00239
MNIGNQLGKLKKSDQFCIYLRKSRADAEAEKLGEGETLARHERILTELAVKLGLPIGKIYREIVSGETISARKEIQSMINDCYAGMWKGILVVEVTRLSRGNQGDAQIIMDCLRYSNNNNGVLVVTPTKIYDIVQSSDDEEYMEFELFMSRREYKMIRKRMMRGKLQAVVEGNYMGSYRPYGYDILKTKTGRTLVPNPEEAPIVKNIFEWTVKEHLTPGKICKRLTSLGVPTYTGSAEWAIGTVKTILTNPTYTGKVRWNDRMQTKTLVNGNLVSSRPRAHTNQYMLYEGKHEGIVDEITFHAASSRFYSDKTKANLKLMNPLAGILICAKCKKAMIYQGYLKRPNTPPRILHKTSQVCNVKSAVLKDVVDAVAHALELYIDDFEMKIDNLPDVDENSILSQLEVLQKELIKQEKKLPKLFDAWEDGILTDEEFTRRKLINKERIESIKKQMDHLEDSVPTKDEYEEKIMLLSDALKSLLDPTLDADIKNTYLKSIISSIEYSRDNNTEFILDVFLKD

SEQ ID NO: 4596 - protein, 518 aa, Unknown
  Description of Unknown: Integrase B4597 sequence
  PTHR30461:SF3,cd00338,SM00857,G3DSA:1.10.10.2600, IPR036162,PS51737,G3DSA:3.40.50.1390,IPR006119, IPR038109,PF07508,IPR011109,SSF53041, PTHR30461,PS51736,Coil,PF00239
MGGRAAIYARFSSHNQRGESIEIQVEKSRAYCAENDLRVVATYCDFAQTGTNTDRAEFQRMMADAKRGLFDFVVIYKVTRIMRNRDEMAMARIMLRRCRVEILYAGEDISDGSAGVLQLGMLEVLAEYESARDGERIRDGIQKNAERCMANGCVRYGWDIVDGRYVVNEEEAAAIRLGVRMVLSGKSVADVVRAWEPYRTKRGGKWRFQTVRRILMRRENGGEYRYAGVVVPGGMPAIVPMDDEERVVRMLEDSHRPRAKTEAWDFPLTGKLYDGRDGGLMTGTSGTGKSGRPYHYYRCRSCGRTVRRDVVEKRVADAVREALGSADSRERIARMLADAEEERADEKPLSETIKGELAKIETAFSNIWAAIESGIAPPGGKERIDALKQRQALLKDELRTAEALEAARLDYDRALFWLEGMAAAEVDDAQLLRTFVARVVLGGPDDDDGLRVAFTFDDSAGLGDNPSLPGAIGPGGEVFDRMNASSTNSYKQVEKCLYLLFYYLQIPRRIELCAGRGR

SEQ ID NO: 4597 - protein, 518 aa, Unknown
  Description of Unknown: Integrase B4598 sequence
  PTHR30461:SF3,cd00338,SM00857,G3DSA:1.10.10.2600,IPR036162, PS51737,G3DSA:3.40.50.1390,IPR006119,IPR038109,PF07508, IPR011109,SSF53041,PTHR30461,PS51736,Coil, PF00239
MGGRAAIYARFSSHNQRGESIEIQVEKSRAYCAENDLRVVATYCDFAQTGTNTDRAEFQRMMADARRGLFDFVVIYKVTRIMRNRDEMAMARIMLRRCRVEILYAGEDISDGSAGVLQLGMLEVLAEYESALDGERIRDGIQKNAERCMANGCVRYGWDIVDGRYAVNEEEAAAIRLGVRMVLSGKSVADVVRAWEPYRTKRGGKWRFQTVRRILMRRENGGEYRYAGVVVPGGMPAIVPMDDEERVIRMLEDSHRPRAKTEAWDFPLTGKLYDGRDGGLMTGTSGTGKSGRPYHYYRCRSCGRTVRRDVVEKRVADAVREALGSADSRERIARMLADAEEERADEKPLSETIKGELAKIETAFSNIWAAIESGIAPPGGKERIDALKQRQALLKDELRTAEALEAARLDYDRALFWLEGMAAAEVDDAQLLRTFVARVVLGGPDDDDGLRVAFTFDDSAGLGDNPSLPGAIGPGGEVFDRMNASSTNSYRQVEKCLYLLFYYLQIPRRIELYAGRER

SEQ ID NO: 4598 - protein, 518 aa, Unknown
  Description of Unknown: Integrase B4599 sequence
  PTHR30461:SF3,SM00857,G3DSA:1.10.10.2600,IPR036162,G3DSA:3.40.50 .1390,IPR006119,IPR038109,PF07508,IPR011109,SSF53041, PTHR30461,cd00338,PF00239
MASENDKNHRVRVAQYLRMSTDHQQYSLHNQSEYIKDYAEKNNMEIAYTYDDAGKSGVSIVGRHSLQQLLSDVEQKKIDIQAVLFYDVSRFGRFQNSDEAAYYSFLFERNGVDLIYCSEPIPTKDFPLESSVILNIKRSSAAYHSRNLSEKVFIGQVNLIKLGYHQGGMAGYGLRRLLVDENGIAKEILSFRKRKSIQTDRVILIPGPKNEIKIVNRIYDLFIDNNVPEFIIAERLNEQNIPAENGTLWTRAKIHQILTNEKYIGNNIYNKTSSKLKSRLVKNPKHEWVRCDKAYKPIISKKKHNKAQEIIQLRSIHLTNEDLLEKLKQKLESNGKLSGFIIDEDDTGPSSSVYRTRFGGLLRAYTLIGYKPEHDYSYLKINEALRSFHSEIIEDFKGEILKSNCHIDEYKYAPMLYINDEFLISVLVTKCIHMKSGKLRWKVRFDNSQKADITIVIRMNSQNISPLDFYIIPKIENEYNKMCMTETNNIRLDLYRFDNLDKLLQIITRMKVRELYAA

SEQ ID NO: 4599 - protein, 518 aa, Unknown
  Description of Unknown: Integrase B4600 sequence
  cd03768,PTHR30461:SF3,SM00857,IPR036162, PF13408,IPR025827,G3DSA:3.40.50.1390,PS51737, IPR006119,PF07508,SSF53041,IPR011109, PTHR30461,PS51736,Coil,PF00239
MRIAIYARKSAFSDKSESVHNQDRMCREYCALHFPGEHIFLNYTDENTTGANTNRSALQKMMRDVHAGIIDLLIVYQLDRLTRDVRDYCNLSAELNDCGVHFTSVKEAVDTSTPIGEALSTLSAVFAQMERKTISNRVYDNMMGLARAGWWTGGNLPCGYTTRRVVENGKPHTLLVPDPEKAEQLVTVFNLFVERGSSFCSFASFAQTNNCFDVFGIPSASQVRRVITSPYGAPANKDLRDYYLSIGANVIGTESDWDGTHGVMRYGVTDQRNGNATNPRTAWIVCPGRHEPILPADLWLAAQDQVKSNMFCKQAKHPPVLLKGILRCKCGRMMSPVRSRYKGKVYISYRCTRTGEVGRKSPDCVSACRDYVLDEKVLSVFREIERDPDVIKKYSPAAPATDQDALHKKEKEIESLQKKIGNLSSALAINPESTAAKYIIADMESLDSQIQKKQMELAGLQANRLTAAQAEEELAAKQKEIARLVRNLDDLPPEEQNKIARSVLRKCVWDGETLFLEF

SEQ ID NO: 4600 - protein, 518 aa, Unknown
  Description of Unknown: Integrase B4601 sequence
  SM00857,G3DSA:1.10.10.2600,IPR036162,PS51737,G3DSA:3.40.50.1390, IPR006119,IPR038109,PF07508,IPR011109,SSF53041, PF00239,PTHR30461,PS51736,Coil,cd00338
MKNEYCIYLRKSRGDSQLESKGVDILERHEHTLLDLARQTNLTITAIYREVVSGDSISARPEMQKLLSEVESGKWKGVLVMEVERLARGDTIDQGVVQRAFQYTNTLIVTPTKVYDPANEFDEEYFEFGLFMSRREYKTIKRRMQAGRYAAAREGKWPFNSAPFGFQRLKLQREKGWSLALEEKEVPVVQLVYSKFTGPDRVGITYIRRYLNDHQITTRSGKLWTDSMIREMLSNPVYDQKVAIGRRKRVTVLENGQPVKKRPRCEDYEVYQGKHPRIIDHGVWIEAQSYLGLGKPKLPEQYGVKNPLAGLIVCGECKKRMLRRPAAPPGSTHGASYDSILCNTQGCATVGCSLDLLERAVIEALSEWVKDYELDDIVPESKVPELMELLESAKAEKSTLLSQKEKLFDLLERGTYSSDVFLERSHSLQERINAADDKILDLQKEIEYEQNNDAHIHSFIPSCKGLLSCYWDLSVPDRNKALKMLLDSVEYKKTKKNKKGHRDDASFELTIKPRIPRI

SEQ ID NO: 4601 - protein, 518 aa, Unknown
  Description of Unknown: Integrase B4602 sequence
  PTHR30461:SF3,cd00338,SM00857,IPR036162,PF13408, IPR025827,G3DSA:3.40.50.1390,mobidb-lite,PS51737,IPR006119, PF07508,SSF53041,IPR011109,PTHR30461, PS51736,Coil,PF00239
MVAIYVRQSLDKKDSLSIDSQIEDCITLCKRNGWNDYKVYRDKGWSAKNLDRPSFQQMNEDVLNGKIEAVVCYKIDRISRSIRDLVNLIEDYNEIGVHFVSYSDNINTAAPGGMMLATLFGSLAQMEREAIIARVTDNYYYRCEQGFWGGGPAPYGYRLKKVVVNGQKHTVLDQDPAEAAVVRQFFDWYLEPGGTVYKILQRAADQNILTRKGKSWTSRVVSDILSKPVYAPNTMDIYNYYASQGVKLRIAPEQCDGTQSVNVFGKRDRGSKHPKRSRPASEMTFAIARHQPIIDSDQFLRVQLKKKATLTTTPRTGTSHITILSGLVRCGDCGRAMSPSGSNRGVRYFICSGRRNYASNACNSPSIKMDALEDIVLAHTLQHYSLPEIIQVLDKFKNHTLSPQESVRVNTLKQELAKTENEISSLIDACLVSNPTAISYLNDRIEKLDREKKKIIEKITALKNSKSDLQELLRNIDIENLPEIFAGDDFDLKKYVCHQLIRKITFYNQEHIKIEYTV

SEQ ID NO: 4602 - protein, 518 aa, Unknown
  Description of Unknown: Integrase B4603 sequence
  PTHR30461:SF3,SM00857,G3DSA:1.10.10.2600,IPR036162,G3DSA:3.40.50 .1390,IPR006119,IPR038109,PF07508,SSF53041,IPR011109, PTHR30461,cd00338,PF00239
MASENDKNHRVRVAQYLRMSTDHQQYSLHNQSEYIKDYAEKNNMEIAYTYDDAGKSGVSIVGRHSLQQLLSDVEQKKIDIQAVLFYDVSRFGRFQNSDEAAYYSFLFERNGVDLIYCSEPIPTKDFPLESSVILNIKRSSAAYHSRNLSEKVFIGQVNLIKLGYHQGGMAGYGLRRLLVDENGIAKEILSFRKRKSIQTDRVILIPGPKNEIKIVNRIYDLFIDNNVPEFIIAERLNEQNIPAENGTLWTRAKIHQILTNEKYIGNNIYNKTSSKLKSRLVKNPKHEWVRCDKAYKPIISKKKYNKAQEIIQLRSIHLTNEDLLEKLKQKLESNGKLSGFIIDEDDTGPSSSVYRTRFGGLLRAYTLIGYKPEHDYSYLKINEALRSFHSEIIEDFKGEILKSNCHIDEYKYAPMLYINDEFLISVLVTKCIHMKSGKLRWKVRFDNSQKADITIVIRMNSQNISPLDFYIIPKIENEYNKMCMTETNNIRLDLYRFDNLDKLLQIITRMKVRELYAA

SEQ ID NO: 4603 - protein, 518 aa, Unknown
  Description of Unknown: Integrase B4604 sequence
  SM00857,G3DSA:1.10.10.2600,IPR036162,PS51737, G3DSA:3.40.50.1390,IPR006119,IPR038109,PF07508, IPR011109,SSF53041,PF00239,PTHR30461, PS51736,Coil,cd00338
MQYEEYLIYLRKSRSDASLEAMGVDVLERHEQILLDLAKRMNLSIGGIYREVVSGESISARPEMQKLLSEVETGRWKGVVVMEVERLARGDTIDQGIVQRAFQYSGTQIVTPAKTYNPNNEFDEEYFEFGLFMSRREYKTIRRRMRAGVTAAVKEGKWPFNMAPYGWQRVKLEHGRGWVLAPDPEEAPVVKLIFQLYTGPDRIGITNICRYLDNRGVKPRNGDTWTECSIMGILRNIVNDQRVGIGRRKIVKQVQNGSVSKVRPHSDYDFTAPGLQPRLIDHDVFLEAQTHLGKNSHKLPESYGIKNPLAGIVVCSCCGKKMMRRPASKTSGGAPYDVLKCNTRNCPTIGSALDLVEREVIQALSDWVAGYQLDPTLEVENKVPEKEQLLSSAISNHDVLLKQNGNLYDLLEQGVYTTEIFLERSHELQKRIKESEAHIEVLKKDLEYEKEKIANVENFIPSCKELLSCYWELSAQDRNRALKMLLESVEYTKTKRNQKGDKDNPTFTLNLKPRIPRI

SEQ ID NO: 4604 - protein, 518 aa, Unknown
  Description of Unknown: Integrase B4605 sequence
  PTHR30461:SF3,SM00857,IPR036162,G3DSA:3.40.50.1390,IPR006119, PF07508,SSF53041,IPR011109,PTHR30461,Coil, PS51736,cd00338,PF00239
MSIMSFNNIIIYLRKSRADDPTMTVEEVLAKHESILQDYCIAEFGQPMPESRIYREVVSGETIQDRPVMQRVLRLLESGNIDGVLVVEPQRLSRGDLEDCGHIINSFRYTNTAVITPTKTYNLQDEYDRKFFEMELTRGNDYLEYTKKILARGRLAAVMSGQYIGSVRPYGYNKVVYGSGKNRIRTLEKFKKENDILILMKRLYLDNDYTPEEIARTFDSMGIEPPKGKHWTASAVRRLLASPINNGKIVWNKRQTVVEWKNGKQVKSRAKSNKDDVIIVQGKHPATYDDETYAAIMAKLSIHSVKVTNQRGLRNPFAGILFCQCGRAMSLRSTHNGHSVILICNDHFYCHTRSVAFNPVLEKVKEALSEAITDFSVKISNKEQTESELYALNISTLENKLEQLYKKDLVQKDAYEDGVYSKAEYIQRNAQLQEQISAIANSLKEMRAKAPEVINYKDCIIRFQDCLNALEDNNVSIEVKNALLKACISKIVYHSINSNPEYSGRTKNPFNLEVFFKL

SEQ ID NO: 4605 - protein, 518 aa, Unknown
  Description of Unknown: Integrase B4606 sequence
  cd00338,SM00857,G3DSA:1.10.10.2600,IPR036162, PS51737,G3DSA:3.40.50.1390,IPR006119,IPR038109, PF07508,SSF53041,IPR011109,PTHR30461, PS51736,Coil,PF00239
MQYEEYLIYLRKSRSDASLEAMGVDVLERHEQILLDLAKRMNLSIGGIYREVVSGESISARPEMQRLLSEVEAGRWKGVVVMEVERLARGDTIDQGIVQRAFQYSGTQIVTPAKTYNPNNEFDEEYFEFGLFMSRREYKTIRRRMRAGVTAAVKEGKWPFNKAPYGWQRVKLEHARGWVLAPDPEEAPVVKLIFQLYTGPDRIGITNICRYLDNRGVKPRNGDTWTECSIMGILRNIVNDQRVGIGRRKIVKQVQNGSVNKVRPHSDYDFTAPGLQPRLIDHDVFLEAQTHLGKNSHKLPESYGIKNPLAGIVVCSCCGKKMMRRPASKTPGGASYDVLKCNTRNCPTIGSALDLVEREVIQALSDWVAGYQLDPTLEVENKVPEKEQLLSSAINNHDVLLKQNGNLYDLLEQGVYTTEIFLERSHKLQKRIKESEAHIEVLKKDLEYEKEKIANIENFIPSCMELLSCYWELSAQDRNKALKMLLENVEYTKTKRNQKGDKDNPTFTLNLKPRIPRI

SEQ ID NO: 4606 - protein, 518 aa, Unknown
  Description of Unknown: Integrase B4607 sequence
  cd00338,SM00857,G3DSA:1.10.10.2600,IPR036162,PS51737, G3DSA:3.40.50.1390,IPR006119,IPR038109,PF07508,IPR011109, SSF53041,PTHR30461,PS51736,Coil,PF00239
MQYEEYLIYLRKSRSDASLEAMGVDVLERHEQILLDLAKRMNLSIGGIYREVVSGESISARPEMQRLLSEVEAGRWKGVVVMEVERLARGDTIDQGIVQRAFQYSGTQIVTPAKTYNPNNEFDEEYFEFGLFMSRREYKTIRRRMRAGVTAAVKEGKWPFNKAPYGWLRVKLEHARGWVLAPDPEEAPVVKLIFQLYTGPDRIGITNICRYLDNRGVKPRNGDTWTECSIMGILRNIVNDQRVGIGRRKIVKQVQNGSVSKVRPHSDYDFTAPGLQPRLIDHDVFLEAQTHLGKNSHKLPESYGIKNPLAGIVVCSCCGKKMMRRPASKTPGGAPYDVLKCNTRNCPTIGSALDLVEREVIQALSDWVAGYQLDPTLEVENKVPEKEQLLSSAISNHDVLLKQNGNLYDLLEQGVYTTEIFLERSHELQKRIKESEAHIEVLKKDLEYEKEKIANIENFIPSCMELLSCYWELSAQDRNKALKMLLENVEYTKTKRNQKGDKDNPTFTLNLKPRIPRI

SEQ ID NO: 4607 - protein, 518 aa, Unknown
  Description of Unknown: Integrase B4608 sequence
  cd00338,SM00857,G3DSA:1.10.10.2600,IPR036162, PF13408,PS51737,IPR025827,G3DSA:3.40.50.1390, IPR006119,IPR038109,PF07508,SSF53041, IPR011109,PTHR30461,PS51736,Coil,PF00239
MKTYTPTDYALYLRKSRADLEAEAHGEGDTLARHEHILMELAKSRALPIGAIYREIVSGERIANRPVMQQLLSEVEDGRWKGVLVTETSRLARGDTIDQGIVAQAFKFSGTLIVTPSKTYDPTQEADEEWMEFGLFMSRQEYRMIRRRMTAGMQAAKREGRYISNVPPYGYERYKLDGRGWSLRPIESQAKVVRMIFDLYLSGLGYCEIEKRLNALHIPAPKSDKWSARTIPGILRNAHYIGCIPAAFRPGKKVVKDGQITVTRPRNHNCELYKGLHEPIIDRAVWDQVQARLGKNAAVRTPGNRQQSNPLAGLIICDCCGKRMQRRPQTGTGSQTQIQCTTRGCATVAHNADELEQLVLDSLRTFLARLEVGTPAAPDLSAERRALSEIEKQLTDLDSRLRRTFELVEDGTYTREIFLSRQAELTAERERLTADRTAIQHKIEQAQHEYDARTGLAPAVRHVLDTYNTDLPAADRNKLLKQVIDRIDYHKRTRTRWTKESDLSLTLHPVVFSSTTNR

SEQ ID NO: 4608 - protein, 518 aa, Unknown
  Description of Unknown: Integrase B4609 sequence
  SM00857,G3DSA:1.10.10.2600,IPR036162,PS51737,G3DSA:3.40.50.1390, IPR006119,IPR038109,PF07508,IPR011109,SSF53041, PTHR30461,Coil,PS51736,cd00338,PF00239
MKTYTPTDYALYLRKSRADLEAEAHGEGDTLARHEHILMELAKSRALPIGAIYREIVSGERIANRPVMQQLLSEVEDGRWKGVLVTETSRLARGDTIDQGIVAQAFKFSGTLIVTPAKTYDPTQEADEEWMEFGLFMSRQEYRMIRRRQLAGTRASKKEGHYVPGRPPYGYERYKLDGRGWSLRPVEPQAGVIRTIYDMYLSGKGFSEIANELNAMKIRTPLDKKWVPATTRAILQNPHYAGFIPSAMKVNTKIVQKGKLITKRPVNKNCELYEGIHEAIIPRDVWYSVQQRMKDTVTPRVPRKYQQMNPLAGLVYCDQCGKLMSRHPYRREDKVRFGCENPSCSTVSSLFEDVESLVLQSLREFLHEIELSSPTLLDTKSEEIALQNIEKQLTDINHRLQRTYELLEDGVYSKETFLQRQSAISQDQTALLNTKHEIERKLHNKQTDIEAQKNSAPLIRHVLDVYPTLEDPKEQNLLLKQVIRRIDYHKTVRVYGKAKSDLHLTIHPKIAIPQTSNI

SEQ ID NO: 4609 - protein, 518 aa, Unknown
  Description of Unknown: Integrase B4610 sequence
  PTHR30461:SF3,cd00338,SM00857,G3DSA:1.10.10.2600,IPR036162, PF13408,IPR025827,G3DSA:3.40.50.1390,PS51737,IPR006119, IPR038109,PF07508,IPR011109,SSF53041, PTHR30461,PS51736,Coil,PF00239
MSKLYCMYLRKSRADLEAEARGEGETLSRHRRTLTELAIRMHLPLGEVYDEIATGESIAARPQMQRMLADIEAGMWAGVLCMDVDRLARGDSIDQGIISQTFLYSNAIIITPGKTYDPRNESDSEFFEMKMFFSRREYAQIRKRLQAGRMRSVLDGRYMGTRPPYGYKRVKIQGDKGWTLEIVPEKAEIVRMIYDWYVNGMDGRPVGCGAIATRLNDMGLRTDMGNRFDPSCILNIITNPAYIGMVRWNQRTTVVSLQNGQRIKSRPRSDEPIIVRGLHAPILTQEIYDAAQERHAGRYVPKTPETLALSNPLAGLVVCHECGHTLQRKPSPRGCWIFCPTRRCKTIGILEDVFERAVLEHLQNWLVTYSDENAPSAPAKNAADAVAEQLQRQKQTLQTQLSRLYDLLEQGVYTTEVFLTRQRELTERLSALEEKLAAAQKPPELDMEACIRQALPRVKAVLDAYPLAETAAEKNALLKSVIEKIDYQKTKRSTRWQNSLDFLQMTIYPRVPAGEIQR

SEQ ID NO: 4610 - protein, 518 aa, Unknown
  Description of Unknown: Integrase B4611 sequence
  PTHR30461:SF3,SM00857,IPR036162,PF13408,PS51737, IPR025827,G3DSA:3.40.50.1390,IPR006119,IPR011109,SSF53041, PTHR30461,Coil,PS51736,cd00338,PF00239
MQLVPCDRPRPGRRAVSYARFSSHNQRSESIEIQEDNNLAYCAINDLDVVAMYADEAKSGRNTARADFQRMVADAKAGLFDFVVIYKVTRIMRNRDEMALLRITLRKYGVEILYSGEDIGTGSDGILQLGLKEVLAEWESAQLSERIVDGIQKNAERGMANGRTLYGWNIVDGYYEVSELEASVLRRAKSMLFNGKTVAEIVRALDGHKTKRGKPIKQNTLTKMLKRKQNAGVYSYAGVEIEGGMPALWTMEDQRMIWKILGDETRPRRKALSADFLLTGKLYCGKCDTPMTGTSGTSKTGATYYYYKDKKGCGRQVRKDVIEDNVADAVRAALSDEATREKIADLVCEYSESEDPTPQSDVILAELKEIRASYANILKAIEQGVIPPGSKERIADLQQQEETLNEELRIAEAIEAVALDRDRVLFWLEQVAEAPDAKTLIDVFVARVVLLGDDLHIVMHFDDNDGPPVGRIIDEDRGGVLPNGTRLHHNEISRTPWFGYYVAWRTLVIVTKYRKTPC

SEQ ID NO: 4611 - protein, 518 aa, Unknown
  Description of Unknown: Integrase B4612 sequence
  PTHR30461:SF3,SM00857,G3DSA:1.10.10.2600,IPR036162,PF13408, IPR025827,G3DSA:3.40.50.1390,PS51737,IPR006119,IPR038109, PF07508,SSF53041,IPR011109,PF00239, PTHR30461,PS51736,Coil,cd00338
MSSVDKIAVIYARYSSHGQTEQSIEGQIAAAQKYAEQHGYTIIHIYADRAMTGRNDDREQFQKMLSDTAMHQFGVILLWKIDRFGRNREEIAFNRYRCKKNGVRVERVAEDVPDGPEGVILDSVLEGMAEYYSLQLAQNVRRGQRESAKKSMSIGGNKMLGYVVNPETKRYESDPKTASYVTEIFKRYANGETISEIVAWLNAQGIRTTRGSEFTVNSLHRLLKNEKYTGVYIFHDIRNEGGMPALTDRATFDKVQEMLKVNRRAPVRVWSKTEYLLTDKLFCGHCGAIMVGESGHGRNGTKHSYYTCLNRKKKKSCDKKPVRQDVIEPLVLRAIGKLLENPATLENIADQVWAAYERSDTSGDTIKALDKQIADVDRALSNVMKAIEMGIINEMTKTRMDELTNQKQALSQSRAEAGLTGGFKLTRDMILFFLQEMAALDMADRDSQKRLIKTFVNAIYLYDDHFDIAFNYTDNGKVAVRMQEINDAASGEVFGCCAQSPTKEKDVETHVLTSFLFV

SEQ ID NO: 4612 - protein, 518 aa, Unknown
  Description of Unknown: Integrase B4613 sequence
  PTHR30461:SF3,cd00338,SM00857,IPR036162,PF13408, IPR025827,G3DSA:3.40.50.1390,IPR006119,SSF53041,PTHR30461, PS51736,Coil,PF00239
MEYSICKNPRLGKRGVSYARFSSHNQRSESIEIQHDANLAFMAIQDLDLVGVFSDEAKSGRNTNREDFQRMLTWAREGRMDFVVIYKVTRIMRNRDEMAMLRVELRKYGVEILYSGEDIGKGSDAVLQLGLKEVLAEWESAQLGERIVDGINKNAERCMANGNTLYGWDIADGFYVVNDLEASVLRRAKSMLFNGKTVAEIVRALEGHTTKRGKPIKHNTLTKLLKRKQNAGVYSYAGHEQEGGMPALWTMEEQRMIWKILGDDTRPRKKAANADYLLTGKLWCGKCDTPMTGTSGTGKSGTVYYYYQDKKGCGRKVRKDVIEENVAEAVLAALSKEATREKIADLMCEFEEWEDPTPMTEVIEAELKEIAQNHANILKAIEQGIIPDGAKERIETLKAREEVLRDELRIAKSMEAATADRDRVLFWLENIAEVADTKTLIDVFVSKVVLLGDDLHIVMHFDDNEGPPGGNAVLDRGGGVLPDCTTLHHGDISRTPWLGYYVAWRTLVIVTRYKKTPS

SEQ ID NO: 4613 - protein, 518 aa, Unknown
  Description of Unknown: Integrase B4614 sequence
  SM00857,G3DSA:1.10.10.2600,IPR036162,PF13408, IPR025827,G3DSA:3.40.50.1390,PS51737,IPR006119, IPR038109,PF07508,IPR011109,SSF53041, PF00239,PTHR30461,Coil,cd00338
MQENETYVIYLRKSRADSEKFSLEEVFAKHESELQSLAERTLGNRIPVDKIFREVVSGETITDRPVISHILKVMESKKIKGVFVVDPQRLTRGDLLDKGHLINVFKYTNTKIITPYKTFDLNNDFDLKLFKMELDKGSDYLEYYKMIQARGRIASVRSGQYIGSTAPYGYDKYSYKENKHTVNTLKPNSDEATVVQLIYHLYVNESLSYAAIANKLNTMNIKPRKSTSWSPYSLKEILHNPVYIGKVRWNRRKTVMKYKNESLLKTRPIALNDFIISDGIHEAIIDEALFDSAQNRSGKSPRNHSSSKLKNPIAGLMFCGNCGRAMSYKTYKNNAGSEKQPPRYLCNNQSNCHTKSVKATDVINQIISALECYIEDFKVKLENDDGNSFNVRSRIISVLNKQLQDLEVREETQYEMLENKIYTPELFKKRRQKLLEEREVLLDKLQEAKVQEPVKIDYQEKIISFTDTVEALKNPDIDILQKNMLLKKCIKKITYTTDKEKGNRWRESTFEIDITPLI

SEQ ID NO: 4614 - protein, 518 aa, Unknown
  Description of Unknown: Integrase B4615 sequence
  PTHR30461:SF3,SM00857,IPR036162,G3DSA:3.40.50.1390,IPR006119, PF07508,IPR011109,SSF53041,PTHR30461,Coil, PS51736,cd00338,PF00239
MSIMSFNNIIIYLRKSRADDPTMTVEEVLAKHESILQDYCIAEFDQPMPESRIYREVVSGETIQDRPVIQRVLRLLESGNIDGVLVVEPQRLSRGDLEDCGHIINSFRYTNTMVITPTKTYNLQDEYDRKFFEMELTRGNDYLEYTKKILARGRLAAVMSGQYIGSVRPYGYTKIVYGSGKNRIRTLEKFKKENDILILMKRLYLDEDYTPEEIARAFDNMGIEPPRGKHWTASAVRRLLASPINNGKIVWNKRQTVVEWRNGKQVKSRAKSNKDDVIIVQGKHPATYDDETYTAIMAKLSIHSVKVTNQRGLRNPFAGILFCQCGRAMSLRSTHGGHSVILICNDHSYCRTRSVAFNPVLDKVKEALSEAITDFTVKISNKEQTDSELYALNISTLENKLEQLYKKDLVQKDAYEDGVYSKAEYIQRNTQLQEQISVIANSLEEMRAKAPEVINYKDCIIRFQDCLNALEDNNVSIEVKNALLKACISKIVYHSVNSNPEYSGRTKNPFNLEVFFKL

SEQ ID NO: 4615 - protein, 518 aa, Unknown
  Description of Unknown: Integrase B4616 sequence
  SM00857,G3DSA:1.10.10.2600,IPR036162,PS51737, G3DSA:3.40.50.1390,IPR006119,IPR038109,PF07508, IPR011109,SSF53041,PTHR30461,PS51736, cd00338,PF00239
MNIGNQLGKLKKSDQFCIYLRKSRADAEAEKLGEGETLARHERILTELAVKLGLPIGKIYREIVSGETISARKEIQSMINDCYAGMWKGILVVEVTRLSRGNQGDAQIIMDCLRYSNNNNGVLVVTPTKVYDIVQSSDDEEYMEFELFMSRREYKMIRKRMMRGKLQAVVEGNYMGSYRPYEYDILKTKTGRTLVPNPEEAPIVKNIFEWTVKEHLTPGKICKRLTSLGVPTYTGSAEWAIGTVKTILTNPTYTGKVRWNDRMQTKTLVNGNLVSSRPRAHTSQYMLYEGKHKGIVDEITFHAASSRFYSDKTKANLKLMNPLAGILICAKCKKAMIYQGYLKRPNTLPRILHKTSQVCNVKSAVLKDVVDAVAHALELYIDDFEMKIDNLPDVDENSILSQLEVLQKELIKQEKKLPKLFDAWEDGILTDEEFTRRKLINKERIESIKKQMDHLEDSVPTKDEYEEKIMLLSDALKSLLDPTLDADIKNTYLKSIISSIEYSRDNNTEFILDVFLKD

SEQ ID NO: 4616 - protein, 518 aa, Unknown
  Description of Unknown: Integrase B4617 sequence
  PTHR30461:SF3,SM00857,G3DSA:1.10.10.2600,IPR036162,PF13408, IPR025827,G3DSA:3.40.50.1390,PS51737,IPR006119,IPR038109, PF07508,IPR011109,SSF53041,PF00239,PTHR30461, PS51736,Coil,cd00338
MLSFNNIIIYLRKSRSDDPTQSVEEVLARHEHILQEYCMKEYGECIPENRIYREVVSGETIQDRPIIQQVLRLLESGSIDGVLVVEPQRLSRGDLENCGHIVNSFRYTNTLVITPTKTYNLQDEYDRKFFEMELTRGNDYLEYTKKILARGRLASVMQGNYINAIRPYGYNKVVIGTGKDKIHTLEIFKEESDVLLLMKHLYLDENYGLVRIAHTLDDLSIKAPKGDHWSASTISRILSNPLYNGKIVWNKRKTVVKWKDGKKVKSKPLNRGDDVIIVQGKHPAIFDDETFNAILKRMENSPKVKRSNKLRNPFAGLLFCSTCGSAMILRRSGRKSGVYSLTCNRQSICHTKSVQYKAVLLKVKQSLAEAISDFEVKMSNNNTTASELHAINISTLENELEQLYRKDLIQKDAFEDGIYSKAEYMQRNAQLQTQIAAATDKLNRAREDAPEPVSYEERIVCFRDCLNALDDDTVSAEVKNTLLKACISKIVYYNDSPSISGIGRYVDNPFRLEIFLKL

SEQ ID NO: 4617 - protein, 518 aa, Unknown
  Description of Unknown: Integrase B4618 sequence
  SM00857,G3DSA:1.10.10.2600,IPR036162,PF13408,IPR025827, G3DSA:3.40.50.1390,PS51737,IPR006119,IPR038109,PF07508, SSF53041,IPR011109,PTHR30461,Coil,PS51736, cd00338,PF00239
MAKKKKPAGGNAIIYARYSSHNQRDVSIEQQIEACRKHAAELGLTITDTYEDRAISGRTDNRPAFQRMMHDAENGRFSYVLAWKSNRMGRNMMQAMVNESRLMDCGVKVYYAEEDFDDSAAGRFALRSMMNVNQFYSDNLAEDVRRGLMDNANKCMANGRQPLGYKRGEDGKVVVDEPAAAIVREVYARVASGELFTDIARDLNRRGIKTADKGEWNKNSFHRLCSNEKYRGIYIYGDVRIEGGIPSIIDDTLWYKVQEALRVKKLKRNGRHRPGEDDYLLTGKLRCGKCGGYMIGMSGRSKTGDIHYYYACQNRRVGHTCDKKNIRRDIIEPAVAQAIKEYCLTDDAIEWIADKTIEYWEEADRNLQLDSIEGDLAAVQSSISNVMKAIEMGVVTETTRDRLIELEKQRTDLKSKLALAKEEVIHVDRKKLISSLLLFRNGDIHDRQYQEDLFNTFLISVYVYDDDDNGHLKLIFNAFGENNTVDLPINFGETGDVPVFSDREKVRASSPSVNQEAI

SEQ ID NO: 4618 - protein, 518 aa, Unknown
  Description of Unknown: Integrase B4619 sequence
  cd00338,SM00857,G3DSA:1.10.10.2600,IPR036162,PF13408, PS51737,G3DSA:3.40.50.1390,IPR025827,IPR006119,IPR038109, PF07508,SSF53041,IPR011109,PTHR30461,Coil, PF00239
MQENETYVIYLRKSRADSEKFSLEEVFAKHESELQSLAERTLGNRIPVDKIFREVVSGETITDRPVISHILKLMESKKIKGVFVVDPQRLTRGDLLDKGHLINVFKYTNTKIITPYKTFDLNNDFDLKLFKMELDKGSDYLEYYKMIQARGRIASVRSGQYIGSTAPYGYDKYSYKENKHTVNTLKPNSDEATVVQLIYHLYVNESLSYAAIANKLNAMNIKPRKSTSWSPYSLKEILHNPVYIGKVRWNRRKTVMKYKNESLLKTRPIALNNSIISDGIHKAIIDETLFDSAQNRSGKSPRNHSSSKLKNPLAGLMFCGNCGRAMSYKTYKNNVGSEKQPPRYLCNNQSNCHTKSVKATDVINQIIGALECYIEDFKVELENDDGNSFNVRSQIISVLNKQLQDLEIREETQYEMLENKIYTPELFKKRRQKLLEEREILLDKLQEAKVQEPVKIDYQEKIISFTDTVEALKNPDIDILQKNMLLKKCIKKITCTTDEEKGNRWRESTFEIDITPLI

SEQ ID NO: 4619 - protein, 518 aa, Unknown
  Description of Unknown: Integrase B4620 sequence
  PTHR30461:SF3,cd00338,SM00857,G3DSA:1.10.10.2600,IPR036162, PF13408,IPR025827,G3DSA:3.40.50.1390,PS51737,IPR006119, IPR038109,PF07508,IPR011109,SSF53041,PTHR30461, PS51736,Coil,PF00239
MDITNNLKAAAAYGRYSSHLQNEQSIEGQFADIYAKAQKEGYTIIKEYVDEAMTGRNDNRPAFQQMIKDSKKGIFEAVFVWAIDRFARNRYLAAIYKHELRKNGVKLIYAAENIPDGPEGIMLEGILESAAEYFSEYNAQKSMRGKRETALKGKYNGGGILWGYKLNKDNHYIIDKKVAPIIQNIFKQYAAGISSIKIAENLNNSGIKTCNNTDWDNRKVLQLLKRKGYGGFYCWSDYCLDDKIPAIIDKKTFEMVQEKMKKNKAKAATFKAKDYYVLSGKLYCGKCDCKMVGNRSRVSRKTNQKMSYYVCSGKKLYKKCDLKSFRKEFVEDLVINEIKNFLSDSERLEIIAERIYELLEKETASFKLSDALKAQLNDIEKSLKNLLYAIEKGIISETTQKRLEELEKQKKALMLKIRQEELNEQKTIISKEQILFFLERLRLADTENKQTQEKLVETFVNKIYIDENCLRIIFNISGDNNETKIDLKAVQQAEKDKAEFNPSSVLDTSHRCYYTYYS

SEQ ID NO: 4620 - protein, 518 aa, Unknown
  Description of Unknown: Integrase B4621 sequence
  cd00338,SM00857,G3DSA:1.10.10.2600,IPR036162,PS51737, G3DSA:3.40.50.1390,IPR006119,IPR038109,PF07508,SSF53041, IPR011109,PTHR30461,PS51736,Coil,PF00239
MKNLINNNMENYCAYLRKSRKDMDAEAHGQGETLARHEKRLKDYANSVGIKISKFYREVVSGETISARPVMQQLLTDVENGMWSGVLVVEVERLARGNTLDQGIVSNAFQYSNTKIITPLKTYDPNNDYDEEYFEFGLFMSRREYKKINQRLHEGILSSVNEGKHVGAAAPYGYDKYKLPKQKGYSLKINDYEANMIRSIYDLYCSGNGLEFICNELDRLGYKPRRGNSFAKSTITNILTNPVYIGKIKYTDKATIKKVINGNIVRVKNENKNEIYVDGLHQPIIDLDMWNKAQNIRKKNLTNRTKIDYTLKNPMASIIKCGLCGGALSRITYSNRNDIRICCRKCKENVGSNIDSVENKLLQSLKILLNDYKIKIINNDNSDIEMLLKITENNILNLKNELNKLKIQLNKTYDLLEQEIYTKDIFIERSSLLKQQIKDTNNNIIKLESQKKQIIAKKNNREILIPKIENVIDSYFETNDIKMKNELLKSVLEKVEYTKITPKDKDDFKLKLFPKIQA

SEQ ID NO: 4621 - protein, 518 aa, Unknown
  Description of Unknown: Integrase B4622 sequence
  PTHR30461:SF3,SM00857,G3DSA:1.10.10.2600,IPR036162, G3DSA:3.40.50.1390,IPR006119,IPR038109,PF07508,SSF53041, IPR011109,PTHR30461,cd00338,PF00239
MASGNEKNHRVRVAQYLRMSTDHQQYSLHNQSEYIKDYAEKNNMEIAYTYDDAGKSGVSIVGRHSLQQLLSDVEQKKIDIQAVLFYDVSRFGRFQNSDEAAYYSFLFERNGVDLIYCSEPIPTKDFPLESSVILNIKRSSAAYHSRNLSEKVFIGQVNLIKLGYHQGGMAGYGLRRLLVDENGIAKEILNFRKRKSIQTDRVILIPGPKNEIKIVNRIYDLFIDSNVPEFIIAERLNEQSIPAENGTSWTRAKIHQILTNEKYIGNNIYNKTSSKLKSKLVKNPKHEWIRCDKAYKPIISKKKYNKAQEIIQLRSIHLTNEDLLEKLKEKLESNGKLSGFIIDEDDTGPSSSVYRTRFGGLLRAYTLIGYKPEHDYSYLQINEALRSFYSEIIEDFKGEILKSNCHIDEYKYYPMLYINDEFLISVLVTKCIHMKSGKLRWKVRFDNSQKADITIVIRMNSQNISPLDFYIIPKIENEYSKMCMMETNNIRLDLYRFDNLDKFLQIITRMKVRELYAA

SEQ ID NO: 4622 - protein, 518 aa, Unknown
  Description of Unknown: Integrase B4623 sequence
  SM00857,G3DSA:1.10.10.2600,IPR036162,PS51737,G3DSA:3.40.50.1390, IPR006119,IPR038109,PF07508,SSF53041,IPR011109, PTHR30461,Coil,PS51736,cd00338,PF00239
MQYEEYLIYLRKSRSDASLEAMGVDVLERHEQILLDLAKRMNLSIGGIYREVVSGESISARPEMQRLLSEVEAGRWKGVVVMEVERLARGDTIDQGIVQRAFQYSGTQIVTPAKTYNPNNEFDEEYFEFGLFMSRREYKTIRRRMRAGVTAAVKEGKWPFNKAPYGWQRVKLEHARGWVLAPDPEEAPVVKLIFQLYTGPDRIGITNICRYLDNRGVKPRNGDTWTECSIMGILRNIVNDQRVGIGRRKIVKQVQNGSVSKVRPHSDYDFTAPGLQPRLIDHDVFLEAQTHLGKNSHKLPESYGIKNPLAGIVVCSCCGKKMMRRPASKTPGGASYDVLKCNTRNCPTIGSALDLVEREVIQALSDWVAGYQLDPTLEVENKVPEKEQLLSSAISNHDVLLKQNGNLYDLLEQGVYTTEIFLERSHELQKRIKESEVHIEVLKKDLEYEKEKIANVENFIPSCKELLSCYWELSAQDRNKALKMLLESVEYTKTKRNKYGDKDNPTFTLNLKPRIPRI

SEQ ID NO: 4623 - protein, 518 aa, Unknown
  Description of Unknown: Integrase B4624 sequence
  PTHR30461:SF3,cd00338,SM00857,G3DSA:1.10.10.2600,IPR036162, PF13408,PS51737,G3DSA:3.40.50.1390,IPR025827,IPR006119, IPR038109,PF07508,SSF53041,IPR011109, PTHR30461,PS51736,Coil,PF00239
MARKTDKPLSNIAVIYARFSSHNQREESIEQQVAECKLFAAQQGLEVTEIYSDAAQSGRTENRSQFLRLQRDAKKGKFTNIVAYKSNRIARNMVNALTFENDMEKLGVKLYYAKEEFGNNAAGRFALRMMMNVNQFYSENMAEDIRRGMEDNAMKCKVNGPAPYGYKSGKSGTYEIDEPAAAVVREIFTRVACGDSFVDIYTDLNNRGLKTRKGNKWGRSSFQSILKCEKYTGVYIYDNIRVEGGMPEIISKEMFLKVQRILGTKGNPQGRHRINGDYLLTGKLFCGECGHHMMGLSGTGKNGLLHYYYGCSGKKEKPRCSKKNVRRDELEYEVARLVQTYILQDDVITWLADTLTKYQEEHSSDGDMAILNTQLSETEKSIKNLMAAIEQGIITPSTKERLMELESEKSKIENNITLLKADTITVSKEQIGGWLDSFRDGNIKDKRFQKRLFDSFLSAVYVYDDNRVRIVFNLCGLNKGDIDTKLMLGDTEAIEKISDCSYKRCYGSPDLIKVEHLF

SEQ ID NO: 4624 - protein, 518 aa, Unknown
  Description of Unknown: Integrase B4625 sequence
  PTHR30461:SF3,SM00857,G3DSA:1.10.10.2600,IPR036162,PS51737, G3DSA:3.40.50.1390,IPR006119,IPR038109,PF07508,IPR011109, SSF53041,PF00239,PTHR30461,PS51736,Coil, cd00338
MKNEYCIYLRKSRGDSALEAMGVDVLERHERTLLDLAKQMNLSITAIYREVVSGDSISARPEMQKLLSEVESGKWKGVLVMEVERLARGDTIDQGIVQRAFQYTDTLIVTPVKVYNPANEFDEEYFEFGLFMSRREYKTIKRRMQAGRYAAAKEGKWPFNAAPYGFRRFKLSKEKGWTLALEEDEVPIVRLVYARYTGPDRVGITTIRRYLNDHQMFTRSGKLWTDSMIREMLANPVYDQMVAIGRRKCITALEDGQPVKKRPRCDDYEIYHAKHPRIIDHDVWMEAQSYLGRGKPKLPEQYSVKNPLAGLIVCSQCKKKMLRRPAAPSGSKHGADYDSILCNTQGCLTVGCSLDLLEHSVIDALSEWVKDYELDHVTPESKVPELTDLLESTEKEKSALLSQKENLFNLLEQGVYSSEVFLERSHVLQERINAVDDKILDLQKEIEYEKNNDAHIHSFIPSCKGLLSCYWDLSVAEKNKALKMLLHSVEYKKLKKNKKGYKDDASFELTIKPRIPRI

SEQ ID NO: 4625 - protein, 517 aa, Unknown
  Description of Unknown: Integrase B4626 sequence
  PTHR30461:SF3,cd00338,SM00857,G3DSA:1.10.10.2600,IPR036162, PF13408,PS51737,IPR025827,G3DSA:3.40.50.1390,IPR006119, IPR038109,PF07508,SSF53041,IPR011109,PTHR30461, PS51736,Coil,PF00239
MCAKKKPAMLEPDMQDAVIYTRYSSHNQKDCSIEQQVADCEIFARQNNLRVVKVYADRHLSGTTDNRPQFQQMLKDAAHGHWAYVICWKIDRFARNRYDSATYKFRLKKAGVRVLYAKESIPDGPEGILLESVLEGSAEYYSAALAQNIRRGMKYNAEQCKVNSGSIPFGYCKGPDGRFAIHEANAEVVREIFRKAAAGMPFVDIANDLNSRGLKTSRGGRWNKGSFRLLMNEAYIGVYHFSDTRIEGGMPALIDQGTFWAANERLKANSSVRGRHQDGGDYLLTGKLKCAHCGSYMIGFSGTGKSGELHYYYGCQKRRRERACKKANVPREWIERVVVKAALDYVLRPDVMEWIADAVMEYQEREAASAQLAALTAELEENQKATDNVMKAIEAGIITSTTKQRLLDLEAKAQDLKRAIELEKLSHVRLERDQVLFWLDRFRGGSLQSQEFRRKVIDAFVSVVYLSDDHLRIAFNYSGGSNAEADFDLVMDAEAAAGELSKKFAQGHVASTNIKAT

SEQ ID NO: 4626 - protein, 517 aa, Unknown
  Description of Unknown: Integrase B4627 sequence
  PTHR30461:SF3,SM00857,G3DSA:1.10.10.2600,IPR036162,PF13408, PS51737,IPR025827,G3DSA:3.40.50.1390,IPR006119,IPR038109, PF07508,IPR011109,SSF53041,PF00239,PTHR30461, PS51736,Coil,cd00338
MARSKKTECLPLERIGVIYARYSSHNQKEESIEQQVEECTSFALLNGIKIVHVYADKALSGRTDKRPQFQRLMRDAEKRSFSVVVAYKSNRIARDMLNALKYEDRLGKYGIETLYAKEEFGNTAAGRFALRTMMNVNQFYSENMAEDIKRGMLDNAENCKVNGALPLGYVSGPDKRYAIEPKEAEIVRGIYDKVLEGVSFADIANDLNACGVRTKHGSLWNKCSFHRILTNDVYIGVYRHSGVVKEGGVPPILEREVFIAMQKYLETKKNPRGRHRENGDYLLTGKLRCGYCESFMVGVSGTSKTGDKHYYYTCNSRHAGSGCKKENVRRDTIEYTVAALTQQVVFKEDIIEWIATAAVKLAKEASGQNEIDAMEAELAEDRKATKNIMAAIEQGIFTATTKSRLLELEADIASLEQSIRDAKAISEGKLLEKERVVYFLTSLREGNLHSKTYQKRLIDTFVRAVYLWDDRIGIDYYYAGKDSMVKYSLSEIEADIGENIREVLKDSLTGHHDCRTL

SEQ ID NO: 4627 - protein, 517 aa, Unknown
  Description of Unknown: Integrase B4628 sequence
  PTHR30461:SF3,SM00857,G3DSA:1.10.10.2600,IPR036162,PF13408, IPR025827,G3DSA:3.40.50.1390,PS51737,IPR006119,IPR038109, PF07508,SSF53041,IPR011109,PTHR30461,Coil, PS51736,cd00338,PF00239
MPRKKKLQEVGGLRLVAYYRYSGGSGQTEQSIEGQRRDCEAYAKLHGMTIQHEYIDRHISGKTDDRVSFQQMIRDSDKGAFDMVICWKTDRFARNRYDSAVYKKRLRDNGVEIIYAAESNISGAEGIIIEGLMESLAEYYSAELAEKMRRGMRESALKCQAINRCRPLGFTTDAGKKFIIDERTAPAVRFIFEHYAAGESAAYIVEQLNEKGYRTSQGNEFNKSSINRIIQNEMYRGVYISKAYDVRIEGGVPAIVDDDLWRRAQAMAKLNKQKRAKYSSKADYFLSGKLYCGECGCLMKGISGHSSTNGEVYRYYACSNPKCKKHNIPKEELEGTVIQAIIDNLLQPEAMEALAEAMVAVQEADADKPNAEREAIQQELADVRRRSKNILDAIENGTANPHLTARLDELTERENTLRFQLSTLTDEKPLRFTKEEYLFLLEQFLIDPAERNEDYGRRVVHTFVTSMEVSDSKLLIYFNISEENADKNKNASPSELQKESSTVKRLVRVARIELTAS

SEQ ID NO: 4628 - protein, 517 aa, Unknown
  Description of Unknown: Integrase B4629 sequence
  PTHR30461:SF3,cd00338,SM00857,G3DSA:1.10.10.2600,IPR036162, PF13408,PS51737,G3DSA:3.40.50.1390,IPR025827,IPR006119, IPR038109,PF07508,IPR011109,SSF53041,PTHR30461, PS51736,Coil,PF00239
MYEEIKTACLYLRYSSSNQTEQSIEGQMHVCQDFCQRHNIRIVEMYIDRATSASKDIEKRVEFLKMIKDSEKGNFDAVIVYKLDRFARSRYDSATYKYRLKRNGVQLVSATENITQDPEGIILESVLEGMAEFYSAELSQKINRGMRESAMKHNSIGGAIPLGYKTVDKKLVIDETTAPIVREAFQMYADGESVAEICRTFNNRGYKTSKGTRFGKSSFTKIFRNEKYIGVYKYHDYRAEDVIPPIIDKDLWDRVQVRVGKIKKAPARNKAKHTYLLTGKLFCGHCGSAMNADGNSQGYLYYRCYGKKNLDKQCNKRNMEKNLIERLVAQDAMSFLTDEYIEKIATIACDRNKQEIESDSPIPVIRDRIRQVDVSLNNLLKAIETGSAPDMLVKRMGELETEKKDMEVQLKKEMAHQVYIEKEQVIFWLEKFREGDINDEEFCQTVIDLFVNSVTVWDEPDDKFRITIAYNLTSIPQKTYRLSKDGRSSDYASNTPCKKACQCSIWHHISQLFFCFL

SEQ ID NO: 4629 - protein, 517 aa, Unknown
  Description of Unknown: Integrase B4630 sequence
  PTHR30461:SF3,SM00857,G3DSA:1.10.10.2600,IPR036162,PF13408, PS51737,G3DSA:3.40.50.1390,IPR025827,IPR006119,IPR038109, PF07508,IPR011109,SSF53041,PF00239,PTHR30461, PS51736,Coil,cd00338
MNVVLYMRYSSDRQTEQSIEGQKRVCMDFCERQGYNVVGEYIDRATSAYKETAKRTNFCRMIRDSSNGLWQGVVVYKLDRFARNRYDSATYKVRLKKNGVKVISATENISDSPEGVILESVLEGMAEFYSKELSQKVSRGLNESAHKCNSTGGAIPLGYKTVNKKLTVDEPNAQIVKEAFDLYAGGATISEICEKFNSQGYRTKKGTEFNKNSFKSMFRNEKYIGTYTYKDIRIEGGIPAIIDKETFETVQKRLSANAQAPARGKARVNYLLSQKLFCGHCGANMTGDSGRSKTGETYYYYSCSTRKRFHSCKKRTIRKDLIERIVAENAMRLITPEMINTIADMAIKCNREDIESDAIIPALTADLKEINTSIKNLLKMVERGVESETLDLRLKELEKRKKDTESRLDAAKSEYLTLDKTVIVGWLSQFLSGDIEDEDFRRHLIDTLINSVTVWDEPDGGYKITTVYNLKGNTQTYRVNADGSSDMKRNSPPKEYNPNSLFFFKSLFGYTTKYRVE

SEQ ID NO: 4630 - protein, 517 aa, Unknown
  Description of Unknown: Integrase B4631 sequence
  PTHR30461:SF3,SM00857,G3DSA:1.10.10.2600,IPR036162,PF13408, PS51737,G3DSA:3.40.50.1390,IPR025827,IPR006119,IPR038109, PF07508,IPR011109,SSF53041,PF00239,PTHR30461, PS51736,Coil,cd00338
MNVVLYMRYSSDRQTEQSIEGQKRVCMDFCERQGYNVVGEYIDRATSAYKETAKRTNFCRMIRDSSNGLWQGVVVYKLDRFARNRYDSATYKVRLKKNGVKVISATENISDSPEGVILESVLEGMAEFYSKELSQKVSRGLNESAHKCNSTGGAIPLGYKTVDKKLTVDEPNAQIVKEAFDLYAGGATISEICEKFNSQGYRTKKGTEFNKNSFKTMLRNEKYIGTYTYKDIRIEGGIPAIIDKETFETVQKRLSANAQAPARGKARVNYLLSQKLFCGHCGANMTGDSGRSKTGETYYYYSCSTRKRFHSCKKRTIRKDLIERIVAENAMRLITPEMINTIADMAIKCNREDIESDAIIPALTADLKEINTSIKNLLKMVERGVESETLDSRLKELEKRKKDTELRLDAAKSEYLTLDKTVIVGWLSQFLSGDIEDEDFRRHLIDTLINSVTVWDEPDGGYKITTVYNLKGNTQTYRVNADGSSDMKRNSPPKEYNPNSLFFFKSLFGYTIKYRVE

SEQ ID NO: 4631 - protein, 517 aa, Unknown
  Description of Unknown: Integrase B4632 sequence
  PTHR30461:SF3,SM00857,G3DSA:1.10.10.2600,IPR036162,PF13408, PS51737,G3DSA:3.40.50.1390,IPR025827,IPR006119,IPR038109, PF07508,SSF53041,IPR011109,PTHR30461,Coil, PS51736,cd00338,PF00239
MPRKKKLQEVGGLRLVAYYRYSGGSGQTEQSIEGQRRDCEAYAKLHGMTIQHEYIDRHISGKTDDRVSFQQMIRDSDKGAFDMVICWKTDRFARNRYDSAVYKKRLRDNGVEIIYAAESNISGAEGIIIEGLMESLAEYYSAELAEKMRRGMRESALKCQAINRCRPLGFTTDAGKKFIIDERTAPAVRFIFEHYAAGESAAYIVEQLNEKGYRTSQGNEFNKSSINRIIQNEMYRGVYISKAYDVRIEGGVPAIVDDELWRRAQAMAKLNKQKRAKYSAKADYFLSGKLYCGECGCLMKGISGHSSTNGEVYRYYACSNPKCKKHNVPKEELEGKVIQAIIDNLLQPEAMEALAEAMVAVQETDADKPNAEREAIQQELADVRRRSKNILDAIENGTANPHLTARLDELTERENTLRFQLSTLTDEKPLRFTKEEYLFLLEQFLIDPAERNEDYGRRVVHTFVTSMEVSDSKLLIYFNISEENADKNKNASPSELQKESSTVKRLVRVARIELTAS

SEQ ID NO: 4632 - protein, 517 aa, Unknown
  Description of Unknown: Integrase B4633 sequence
  PTHR30461:SF3,cd00338,SM00857,G3DSA:1.10.10.2600,IPR036162, PF13408,PS51737,IPR025827,G3DSA:3.40.50.1390,IPR006119, IPR038109,PF07508,IPR011109,SSF53041,PTHR30461, PS51736,Coil,PF00239
MPRKKKLQEVGGRRLVAYYRYSGGSHQTEQSIEGQRRDCETYARIHGMVILHEYIDRHISGKTDDRPEFQQMIADAGKGMFDYVICWKTDRIARSRYDSIIYKKKLRDNGVELLYAAEANVEGSGGIIVEGLMEALAEYYSAELAEKVRRGMRESALKGKAIGSSRPLGLTVDKDKKYIIDPAGAAAVRYIFEQYAAGAASSSIVAHLNEQGLCTSRGNPFNKSSVVRIIQNEVYRGVYVSPKFDVRIEGAVPAIIDDDLWERAQKMFVRNRQSRSPRNDRADYILSGKLFCGECGTAMKGVSGRSSNGEVYFYYNCPCKDCHRRNIPKDELEGLVIRTVCNDVLQPDVMDRIADSVIEAQTAELNQPNPEKEALQHELADVQRKAKNLLSALENGTAGAMLTNRLAELEQQADTLSYQLSSLESEPKFPVFSKEEILYLLEQFLIAPSEKTKAYRRRLIDTFVSKIEVSNTELTIYFNISEEDCGKMKKAPQLNQPEGCSTEKQMVRVARIELTAS

SEQ ID NO: 4633 - protein, 517 aa, Unknown
  Description of Unknown: Integrase B4634 sequence
  PTHR30461:SF3,SM00857,G3DSA:1.10.10.2600,IPR036162,PF13408, PS51737,IPR025827,G3DSA:3.40.50.1390,IPR006119,IPR038109, PF07508,IPR011109,SSF53041,PTHR30461,PS51736, cd00338,PF00239
MNVIKIPAKPQKGNTAAKTEIKKLRVAAYCRVSTDNEEQASSYESQIQHYTEYINSKPEWEMVKVYADEGISATSTKGREQFNAMIEDCKKGLIDMILTKSISRFARNTVDCLNYIRMLKGMNIPVFFEKEAINTMDTRGEVLLTIMASLAQQESESLSKNTKMGIQYRFQQGKVMVNARCFLGYDKDEDGHLVINPEQAEIVKRIFREYLEGKSCKKIAQGLERDGILTSRGKSKWHDTTIRKILENEKYMGDVLLQKTCTVDFLNKKRVKNTGMQPQYYVEDDHEAIIPKEIFLMVQEEIARRSEQNACFGRRKNFSANHPFSKIVFCADCGEEFRRIHWNNRGKKSIVWRCLTRLKQKDQCHARTVNEETLIEAFLDALNEIVGNSDDYMTRLKENLETAINEVHPESAAALAAKMAKLQQELIDRTERRENYDDITEEILRLRELQEQTAMDDTAKSEHKKRIRELLKFIERQKSKVCVFDGSLVKKLLEKVNVYDDYLEFRFKSGVTVSVEK

SEQ ID NO: 4634 - protein, 517 aa, Unknown
  Description of Unknown: Integrase B4635 sequence
  PTHR30461:SF3,SM00857,G3DSA:1.10.10.2600,IPR036162,PF13408, IPR025827,G3DSA:3.40.50.1390,PS51737,IPR006119,IPR038109, PF07508,IPR011109,SSF53041,PTHR30461,PS51736, cd00338,PF00239
MQRAVIYARFSSDMQREESIDAQVRACKAYAKNKGYIVVDTYADEAKSGRDVTKRDAYNQMLADAMEDKFDVIIFHKIDRNSRNELNYFTFKDKLERLGISYEYAAQPIDTISPEGQVMETIMVGMSAYYSRNLAKETKKGLNENAYKALFNGGCPPLGYKIVDKKYVIDESEAAAVRLIFELYLAGKGYAEICRALDSKGFTTKSGKPFGKNSLYDILGNEKYIGTYTFNKIPKGKGKRNMHSQKRPDDYISIEDALPAIISKEDFFIVQAKRERNRCHAAKYTAKHDYLLSGKVFCGECGSAMVGHRVRQRYYYYGCTRKEQTPTSKCQQRMIRAEVLEHWVMQILERVVFTVSGMRRIADAIAKGYQEEESRHAAEQEALAKRKAAAEKKLNNIYKIFEEGEADEFDRQRLNQIKAELREINKSICEASVKSVESLDNKKIVAFLTTIKSEIFVKNNIDYARRAIDLLVTNVTVTGTVIKVTLSTQNVCAYLVPRTRTQTSGYKFSISIDTKAA

SEQ ID NO: 4635 - protein, 517 aa, Unknown
  Description of Unknown: Integrase B4636 sequence
  PTHR30461:SF3,SM00857,G3DSA:1.10.10.2600,IPR036162,PF13408, PS51737,G3DSA:3.40.50.1390,IPR025827,IPR006119,IPR038109, PF07508,SSF53041,IPR011109,PTHR30461,PS51736, cd00338,PF00239
MAKITKIEATQAIKKKIRVAAYARVSTSSDEQLLSLETQKEHYDSFIKANPDMEYAGLYYDEGISGTKVEKRDGLLRLLKDCEDGKIDRVITKSISRFSRNTTDCLEMVRSLSRLGIYLYFEKENIDTEHMSSELMLSILSSIAESESRSISENTKWSIKHRYEAGTFIIAYPPYGYENEDGKMVIVPEEAEVVKEIFQRTISGQGSYVIAKWLNEAGIPSKRGNVWHSSTVKSILKNEKYTGDVIFQKTYTDDNFNRHMNYGERNMYLCKNHHEPIISHEVFEMTAEVMAQRGKEKGIEVGDAKYLNRYALSGKIICGECGATFKRRTHYKPSGDYIAWTCCSHIKDKTSCSMLYIKDEDVKRALVRMMRKLKACHEQILKPFVAGLKGTNNKERLHQVLELESQIEKNLEQQNIMVNLMSAGYIEPELYHAERSALFMEADRLAKEKDFISKGINGDLTHLEEAQKLLRYMAKKNNAIDYDDVLMQDYVERIIVQSRDEVCFELKCGLKLIERLV

SEQ ID NO: 4636 - protein, 517 aa, Unknown
  Description of Unknown: Integrase B4637 sequence
  PTHR30461:SF3,SM00857,G3DSA:1.10.10.2600,IPR036162,PF13408, PS51737,G3DSA:3.40.50.1390,IPR025827,IPR006119,IPR038109, PF07508,IPR011109,SSF53041,PTHR30461,Coil, PS51736,cd00338,PF00239
MATVKEIAPHALQPEHLRVAAYCRVSSDSEDQLHSYAAQIRNYTEVIAQHDGWELVDVYADEGLTGTRMDKRDDFNRMMRDCRKGKIDRILVKSVARFARNTKECLASLRELSGMGVTVRFEKENIDTGTLTTELMVSVSGSLAQQESLSISANQRLSYQHRMECGEFITCSAPYGYRIKDKKNLEILPEEAAAVRWAFDAYLKGNSSKWIAEQLTAKGIPTQNGAEKWQETSIRYLLTNEKYIGDTLCQKSYSCGFPFVQKRNRGERMQYYVENSHPAIIDRDTFEKVQELLRKKAQKEKRRRERSPFALKILCGNCGTMFLRRTSKNGYVTWVCRTHDRSADACHVGRIPESEIRAAFLRMYRKLKCNADMILKPAMEQMNALDAILQQNNPKTLTINRAIAEATEESHKISTLRVNGLLDADTCTARMNVISAKLAQLRRERRRLAENEALDEVMDALRKVRQTILDGPEQMDDFDDDRFESLVEKIIAESQTEIRFRLYGGLELRERLEVAVR

SEQ ID NO: 4637 - protein, 517 aa, Unknown
  Description of Unknown: Integrase B4638 sequence
  PTHR30461:SF3,SM00857,G3DSA:1.10.10.2600,IPR036162,PF13408, IPR025827,G3DSA:3.40.50.1390,PS51737,IPR006119,IPR038109, PF07508,IPR011109,SSF53041,PF00239,PTHR30461, PS51736,Coil,cd00338
MARSKKTECLPLERIGVIYARYSSHNQKEESIEQQVEECTSFALLNGIKIVHVYADKALSGRTDKRPQFQRLMRDAEKRSFSVVVAYKSNRIARDMLNALKYEDRLGKYGIETLYAKEEFGNTAAGRFALRTMMNVNQFYSENMAEDIKRGMLDNAENCKVNGALPLGYVSGPDKRYAIEPKEAEIVRGIYDKVLEGVSFADIANDLNACGVRTKHGSLWNKCSFHRILTNDVYIGVYRHSGVVKEGGVPPILEREVFIAMQKYLERKKNPRGRHRENGDYLLTGKLRCGYCESFMVGISGTSKTGDKHYYYSCNGRRSGSGCKKENVRRDSIEYAVAALTQQVVFKEDVIEWIATAAVKLAKEASGQDEIDAMEAELAENRKATKNIMAAIEQGIFTATTKNRLLELEADIASLEQSIRDAKAISEGKLLEKERVVYFLTSLREGNLHSKTYQKRLIDTFVRTVYLWDDYIGIDYYYAGKDSVVKYSLSEIESDIGENIREVLKDSLTGHHDCRTL

SEQ ID NO: 4638 - protein, 517 aa, Unknown
  Description of Unknown: Integrase B4639 sequence
  PTHR30461:SF3,SM00857,G3DSA:1.10.10.2600,IPR036162,PF13408, IPR025827,PS51737,G3DSA:3.40.50.1390,IPR006119,IPR038109, PF07508,IPR011109,SSF53041,PTHR30461,PS51736, cd00338,PF00239
MQRAVIYARFSSDMQREESIDAQVRACKAYAKNKGYIVVDTYVDEAKSGREITKRDAYNKMMADAMEDKFDVIIFHKIDRNSRNELNYFKFKDKLERLGINYEYAAQPIDTDSPEGQVMETVMVGMAAYYSRNLSKETKKGLNENAYKALFNGGCPPLGYKIVDKKYAIDENEAAAVRLIFELYLAGKGYAEICRVLDSKGFTTKGGKPFGKNSLYDILGNEKYIGTYTFNKIPKGKGKRNMHSQKRPDDYISIENALPAIISKEDFAAVQLKRERNRRRAAKYTAKHDYLLSGKVFCGECGSAMVGHRVRQRYYYYGCTRKEQTPASKCQQRMIRADVLDHWVMQILERVVFTVSGMRRIADAIAKGYQDEESRQAAEQEALAKRKAAAEKKMNNIYKIFEEGEADEFDRQRLKQIKAELREINKSICETSVKSVENLDNKKIVAFLTTIKSEIFVKNNMDYAKRAIDLLVSNVTVTGTVIKVTLSTQNVCAYMVPRTRTQTSGYKFSISIDTKAA

SEQ ID NO: 4639 - protein, 517 aa, Unknown
  Description of Unknown: Integrase B4640 sequence
  SM00857,G3DSA:1.10.10.2600,IPR036162,PS51737,G3DSA:3.40.50.1390, IPR006119,IPR038109,PF07508,SSF53041,IPR011109, PTHR30461,Coil,PS51736,cd00338,PF00239
MTRKVAIYLRMSLDMDGKGAGIERQREDCRTLAANRGWEVVDEYVDNSISASKSNVRRPAYDRMEADYEAGRFDTIVCWHFDRLTRQPMQMEQWLNRAEQGNLQVVTCTGDYNLTDHTGRLMVRVLAAVARNEIENKSARQKRATIQKAHKGGPSAGIPPYGYDDEYNVIEDRAETVRGIFKAIQAGVSMADIVRALNGEAGRDHEVPWLKPCPSPGVVRWQRDNAKRAERGLEPKAKLKKTRWTHHMVLRIAINPSYAAYRMHMPQDIRDKPEHRGAGSETAPGKRACIVRDDDGEPVQGQWEPIVDKDLWWSVSEILCDPKRDKRRHNRSGRAGLGSGTYICGECGHYMTTLGQSYRCRQCGITRRSAKIDQLVCRVIERRLSREDAVEALTARSKPTEESKAIEEQIRDQEAKIKRAEADYDDGVITGRDLKRNRDKATAEIENLRQQQVATLPEATQSVLVGMSDPAEGFKKSSMVTKRSIIEALLEVKVYKAVRGRKQFDPGTVDIVWKTDA

SEQ ID NO: 4640 - protein, 517 aa, Unknown
  Description of Unknown: Integrase B4641 sequence
  PTHR30461:SF3,SM00857,IPR036162,G3DSA:3.40.50.1390,IPR006119, SSF53041,PF00239,PTHR30461,PS51736,Coil, cd00338
MPKGTRAAIYARFSSHNQRSESIDIQVEKSREYCAQNGLDVVRVYSDYAQTGRNVKRADFQRMMEDAKLGIFDYVVIYKVTRIMRNRDEMALARIRLRKAGVEILYAGESLGEGSTRVLNLGMLEVLAEWESAIDSERIRDGINKNAQRGMANGRTHYGWDIVNGYYEVNEREAAVMHRMKNMLFAGSTVAEIKRAVAGERGKRGKPLTHGVITKLLRREQNCGVYDYAGVRIEDGMPALWSREDQDMINSILGSNGRKHNKTRDTNDYPLSGKMWRPECGQYYVGTCGTSKTGRVYHYYKCKKCKRTFRRDAVEEAVLDTVLETIKKPDIRQRIVDVMALYNEMNEEKEEPESKRIEREIRRIDTAFERIWQAIEDGIAPPGGKERVAMLREQKAALEADLRQAQASEGANLSGEAIAAWLDSIAQEPDAAEIIETFVRLIEVDGDELKLYFAFDYWGDDFQPKQKKANPEKGSPNNPMVEPQKIFANPTIAANGREIKVSTNWFCIITLFSSKKS

SEQ ID NO: 4641 - protein, 517 aa, Unknown
  Description of Unknown: Integrase B4642 sequence
  SM00857,G3DSA:1.10.10.2600,IPR036162,PF13408,IPR025827, G3DSA:3.40.50.1390,PS51737,IPR006119,IPR038109,PF07508, IPR011109,SSF53041,PTHR30461,PS51736,cd00338, PF00239
MVAAAYARYSTERQNETSILAQLQAIEAYCAQHDLTLYKHQYIDQAFSGTNTDRPAFQQLLSDANRHCFDAVVIYDISRGSRDVVDWFAFRRQMQQLGIAVYSVTNTLGDLDDPNAFLTEMITAGLGQHMVLQTRQKSIAGKRIKAAQGLFCGGVAPYGYRIENARYVIDEREAPAVRLIFDMYVNGHSYGDIIAALSASGFCTRSGRRFSSTALHDILSNQRYSGRFVWFERVERHMHKHVGKPGDPITVEDAIPRIISDEIFERVQKRMETKIIRKRGKREYMLSGLLKCGLCGASLAGTTVTSKGIEYPRYSCIRRHKEHNCDLVTLKADILDKAVAQIIREKILNRDLIEQTAQLVIDRYSASKEDTSKLQARVAASSAKIYRLISMAADLPETPPEMRQQIIDETARKKALEAQLVAAQKSELPVTKDDVIALLERDCDRLAETPSLLREMALTYIKQITVYNDRLDICYYLIPGLKNNNPSDTDGLLTGALPRYESRLLYNLTIPRPDLAA

SEQ ID NO: 4642 - protein, 517 aa, Unknown
  Description of Unknown: Integrase B4643 sequence
  PTHR30461:SF3,SM00857,G3DSA:1.10.10.2600,IPR036162,PF13408, PS51737,G3DSA:3.40.50.1390,IPR025827,IPR006119,IPR038109, PF07508,IPR011109,SSF53041,PTHR30461,Coil, PS51736,cd00338,PF00239
MATVKEIAPHALQPEHLRVAAYCRVSSDSEDQLHSYAAQIRNYTEVIAQHDGWELVDVYADEGLTGTRMDKRDDFNRMMRDCRKGKIDRILVKSVARFARNTKECLASLRELSGMGVTVRFEKENIDTGTLTTELMVSVSGSLAQQESLSISANQRLSYQHRMECGEFITCSAPYGYRIKDKKNLEILPEEAAAVRWAFDAYLKGNSSKWIAEQLTAKGIPTQNGAEKWQETSIRYLLTNEKYIGDTLCQKSYSCGFPFVQKRNRGERMQYYVENSHPAIIDRDTFEKVQELLRKKAQKEKRRRERSPFALKILCGNCGTMFLRRTSKNGYVTWVCRTHDRSADACHVGRIPESEIRAAFLRMYRKLKCNADMILKPAMEQMNALDAILQQNNPKTLTINRAIAEATEESHKISTLRVNGLLDADTCTARMNVISAKLAQLRRERRRLAENEALDEVMDALRKVRQTILDGPEQMDDFDDDLFESLVEKIIAESQTEIRFRLYGGLELRERLEVAVR

SEQ ID NO: 4643 - protein, 517 aa, Unknown
  Description of Unknown: Integrase B4644 sequence
  PTHR30461:SF3,SM00857,G3DSA:1.10.10.2600,IPR036162,PF13408, IPR025827,G3DSA:3.40.50.1390,PS51737,IPR006119,IPR038109, PF07508,SSF53041,IPR011109,PF00239,PTHR30461, PS51736,Coil,cd00338
MKKAVIYARYSSHKQNEESIEGQLRECYQFAEKNGFTVTHEYIDRAISGKTADRPSFQELIADSSKGKFEAVIMYTLDRFARNRYDSAMYKAKLKKNGVKLYYAKQPMPDTPEGIILESVLEGYAEYYSENLSRGVKRGMHEVALQGRVTGKAPLGYVADKNKKYQIDPETAQAVKYIFQMYSEGITQREISLYLNSHGYRTATGRKFGKSSYHSILTNEKYMGVYRYGDVVIENCIPPIISKELFDKVQERMRCENHKGARNKAKETYLLSGKIYCGHCGKPMIGESGTSRHGNIYRYYKCSCRKANPKSCDKKPEKKEPLEDLIVRKTITRVFTDENIEIISDKVIDLLKEDLEQVSHVKQLENTLEETKNKIQNILTAIEQGIIVKSTLERLHELEKEKDEIESNLSIEKSRYNNLPTKNQIMFYLYSLKNGNVDNGHFRRQLVRSIINSIFVYDNPDGGKKIVVNFNLPNNEIDTLSLSDSDMNLLGAPIPTNPNIFVNKDWFTIVFDIKEIG

SEQ ID NO: 4644 - protein, 517 aa, Unknown
  Description of Unknown: Integrase B4645 sequence
  PTHR30461:SF3,cd00338,SM00857,G3DSA:1.10.10.2600,IPR036162, PF13408,IPR025827,PS51737,G3DSA:3.40.50.1390,IPR006119, IPR038109,PF07508,IPR011109,SSF53041,PTHR30461, PS51736,Coil,PF00239
MCAKKKPATLEPDMQDAVIYTRYSSHNQRDCSIEQQVADCEIFARQNNLRVVKVYADRHLSGTTDNRPQFQQMLKDAAHGHWAYVICWKIDRFARNRYDSATYKFRLKKAGVRVLYAKESIPDGPEGILLESVLEGSAEYYSAALAQNIRRGMKYNAEQCKVNSGSIPFGYCKGPDGRFAIHEANAEVVREIFRKAAAGMPFVDIANDLNSRGLKTSRGGRWNKGSFRLLMNEAYIGVYHFSDTRIEGGMPALIDQGTFWAANERLKANSSVRGRHQDGGDYLLTGKLKCAHCGSYMIGFSGTGKSGELHYYYGCQKRRRERACKKANIPREWIERVVVKAALDYVLRPDVMEWIADAVMEYQEREAASAQLAALTAELEENQKATDNVMKAIEAGIITSTTKQRLLDLEAKAQDLKRAIELEKLSHVRLERDQVLFWLDRFRGGSLQSQEFRRKVIDAFVSVVYLSDDHLRIAFNYSGGSNAEADFDLVMDAEAAAGELSKKFAQGHVASTNIKAT

SEQ ID NO: 4645 - protein, 517 aa, Unknown
  Description of Unknown: Integrase B4646 sequence
  PTHR30461:SF3,SM00857,G3DSA:1.10.10.2600,IPR036162,PF13408, IPR025827,PS51737,G3DSA:3.40.50.1390,IPR006119,IPR038109, PF07508,IPR011109,SSF53041,PTHR30461,PS51736, cd00338,PF00239
MKKLTKIKIRDAVHQKKKLKVAAYCRVSTASDKQLVSLDVQKEHYENYIRSNEEWEFAGIYYDEGITGTKKDIRAGLLSMIADCEAGKIEFIVTKSISRFARNTMDCLEMVRKLTGLGVAIYFEKENINTGSMESELMLSILSSFAEKESVSISENNKWSVQKRFQKGTFIISYPPYGYYNNNGTMSIVPEEAEVVKEIFAACLAGKGTLAIAKELNDKGIKAKKNGKWYAGSIKNILTNEKYTGDVIFQKTYTDDSLNRHINYGERDRFLCKDHHEPIICHEVFDRVRAVLDQRAMDKGNGIETFRYKKRYCFSGKIKCGECGKTFKRRQHYKPSGNYVAWTCETHLENKEKCSMLYINDESVKLAFLTMMNKLIYSNKEILKPLYRKICHVYEKDRLLKINELETRINENADRKHILANLMAKGILDTAILNKENAALAMEEQTLWSEKEKLVVLDNKRVKELRKLVDFAAKSKMLKVFREETFIDFVERITVESRLTLVFHLKCGLNLKERLVK

SEQ ID NO: 4646 - protein, 517 aa, Unknown
  Description of Unknown: Integrase B4647 sequence
  PTHR30461:SF3,SM00857,IPR036162,G3DSA:3.40.50.1390,mobidb-lite, IPR006119,SSF53041,PF00239,PTHR30461,PS51736, Coil,cd00338
MPKGTRAAIYARFSSHNQRSESIDIQVEKSREYCAENGLDVVRVYSDYAQTGRDVKRVEFQRMMEDAKLGIFDYVVIYKVTRIMRNRDEMALARIRLRKAGVEILYAGESLGEGSTRVLNLGMLEVLAEWESAIDSERIRDGINKNAQRGMANGRTHYGWDIVNGYYEVNEREAAVMHRMKNMLFAGSTVAEIKRAVAGERGKRGKPLTHGVITKLLRREQNCGVYDYAGVRIEDGMPALWSREDQDMINSILGSNGRKHNKTRDTNDYPLSGKMWCPECGQYYVGTCGTSKTGRVYHYYKCKKCRRTFRRDAVEEAVLDTVLETIKKPDVRQRIVDAMALYDEMNEEKEEPESKRIEREIKRIDAAFERIWQAIEDGIAPPGGKERVDMLREQKAALEADLRQAQASESAHLSGEDIAAWLDHIAQEPDAAEIIDTFVRLIEVDGDELKLYFAFDYWGDDFQPKQKKTNPEKGSSNNPMVEPQKIFANPTIAANGREIKVSTNWFCIITLFSSKKS

SEQ ID NO: 4647 - protein, 517 aa, Unknown
  Description of Unknown: Integrase B4648 sequence
  PTHR30461:SF3,SM00857,G3DSA:1.10.10.2600,IPR036162, PF13408,IPR025827,G3DSA:3.40.50.1390,PS51737, IPR006119,IPR038109,PF07508,IPR011109, SSF53041,PTHR30461,Coil,PS51736,cd00338,PF00239
MLYAIYLRKSRADLEAEAMGQGETLARHRAALLDYAAHHGLEIGAVYEEIISGESIDARPKMKQLLREVEQGRWAGVLCMDIDRLARGNSADQARVSNTFRISGTLIITPSKVYDQSRESDEEYVDFELFMARREYKAISRRIMRGRIASVKEGHFIGSTPPYGYDKVKVEKGRGFTLLPNSESDTVKQIYSMCISGMGCNAIARRLDMMGVTPRKGSSWSSASIQDILKNPVYCGKIRWQYRREEKSLTDGIVTTRRRENPDCIIAQGLHPALISEEEFDQAQQFLNSRRIPHKKESTELRNPLSGLVYCGMCGSMMTRLGTGSRNHSDTLRCPNRNCGNVSAKLELVESALVEGVARWLNDCRVNVSRKPAADTAKAERTAAEKVRAELAKLDSQREKIYSFLEQGVYSAGEFRERMESLEKRRTQLSENLRQAEQAVSEAEGNRQLYAQIIPSVERVMDIYAQSTPEEKNRLLKTIISRAEYIKTERNTRGNADRCNFTLNVIPLFPEIKTGAE

SEQ ID NO: 4648 - protein, 517 aa, Unknown
  Description of Unknown: Integrase B4649 sequence
  PTHR30461:SF3,cd00338,SM00857,G3DSA:1.10.10.2600,IPR036162, PF13408,PS51737,G3DSA:3.40.50.1390,IPR025827,IPR006119, IPR038109,PF07508,IPR011109,SSF53041,PTHR30461, PS51736,Coil,PF00239
MCAKKKPAMLEPDMQDAVIYTRYSSHNQRDCSIEQQVADCEIFARQNNLRVVKVYADRHLSGTTDNRPQFQQMLKDASHGHWAYVICWKIDRFARNRYDSATYKFRLKKAGVRVLYAKESIPDGPEGILLESVLEGSAEYYSAALAQNIRRGMKFNAEQCKVNSGSIPFGYCKGPDGRFAIHEANAEVVREIFRKAAAGMPFVDIANDLNSRGLKTSRGGRWNKGSFRLLMNEAYIGVYHFSDTRIEGGMPALIDQGTFWAANERLKANSSVRGRHQDGGDYLLTGKLKCAHCGSYMIGFSGTGKNGELHYYYGCQKRRRERACKKANVPREWIERVVVKAALDYVLRPDVMEWIADAVMEYQEREAASAQLAALTAELEENQKATENVMKAIEAGIITSTTKQRLLDLEAKAQDLKRAIELEKLSHVRLERDQVLFWLDRFRGGSLQSQEFRRKVIDAFVSVVYLSDDHLRIAFNYSGGSNAEADFDLVMDAEAAAGELSKKFAQGHVTSTNIKAT

SEQ ID NO: 4649 - protein, 517 aa, Unknown
  Description of Unknown: Integrase B4650 sequence
  PTHR30461:SF3,SM00857,G3DSA:1.10.10.2600,IPR036162,PF13408, PS51737,IPR025827,G3DSA:3.40.50.1390,IPR006119,IPR038109, PF07508,IPR011109,SSF53041,PTHR30461,Coil, PS51736,cd00338,PF00239
MASVTKLTKPQSKVQATLQVAAYCRVSTNSDEQEDSLANQQDHFKSYIQQQPNWLLHKIYYDNGISGTKAQNRPGLQALLKDCQNGQVDLVLTKSISRFSRNTTDCLRIIRQLKQLDIPVIFEKENINTDSMDSELILSVLGSLAQDESQSIAHNVRLGYQQRASNGVFHYSLPPYGYQKDANRDLIIDPIERKVVLRIFNWTIEGKSPGQIAQTLNEQAISTKRNGKWHDSTIRGILQNTVYLGTTEFQKTFTDDEYHRHPNQGEQGKIIIEEHHPAIIDQATFTQVQKIIMLKRKFYPQAKAKPQRHTFSRKIYCGNCQKLFKRQSRSGKVCWGCQTHIKSAKDCPVKSIREDALHLAFCTMVNKLIFSQKFLLEPLVEQLQADQNQEQAAKLSQVETELKEAKDKQDNLQQLRKQELIEKDFFTKQDAELEQEIANLQSEIERLKQLLGDQNSKLPLTHELLKLCQRSNYLTAFNAELFEQIIESITVDQDHNLTFHLKCGLNLTEGSKHHVKA

SEQ ID NO: 4650 - protein, 517 aa, Unknown
  Description of Unknown: Integrase B4651 sequence
  PTHR30461:SF3,SM00857,G3DSA:1.10.10.2600,IPR036162,PF13408, PS51737,G3DSA:3.40.50.1390,IPR025827,IPR006119,IPR038109, PF07508,IPR011109,SSF53041,PTHR30461,Coil, PS51736,cd00338,PF00239
MPRKKKLQEVGGLRLVAYYRYSGGSGQTEQSIEGQRRDCEAYAKLHGMTIQHEYIDRHISGKTDDRVSFQQMIRDSDKGAFDMVICWKTDRFARNRYDSAVYKKRLRDNGVEIIYAAESNISGAEGIIIEGLMESLAEYYSAELAEKMRRGMRESALKCQAINRCRPLGFTTDAGKKFIIDERTAPAVRFIFEHYAAGESAAYIVEQLNEKGYRTSQGNEFNKSSINRIIQNEMYRGVYISKAYDVRIEGGVPAIVDDELWWRAQAMAKLNKQKRAKYSAKADYFLSGKLYCGECGCLMKGISGHSSTNGEVYRYYACSNPRCKKHNIPKEELEGKVIQAIIDNLLQPEAMEALAEAMVAVQEADADKPNAEREAIQQELADVRRRSKNILDAIENGTANPHLTARLDELTERENTLRFQLSTLTDEKPLRFTKEEYLFLLEQFLIDPAERNEDYGRRVVHTFVTSMEVSDSKLLIYFNISEENADKNKNASPSELQKESSTVKRLVRVARIELTAS

SEQ ID NO: 4651 - protein, 517 aa, Unknown
  Description of Unknown: Integrase B4652 sequence
  PTHR30461:SF3,cd00338,SM00857,G3DSA:1.10.10.2600,IPR036162, PF13408,PS51737,G3DSA:3.40.50.1390,IPR025827,IPR006119, IPR038109,PF07508,IPR011109,SSF53041,PTHR30461, PS51736,Coil,PF00239
MCAKKKPAMLEPDMQDAVIYTRYSSHNQRDCSIEQQVADCEIFARQNNLRVVKVYADRHLSGTTDNRPQFQQMLKDASHGHWAYVICWKIDRFARNRYDSATYKFRLKKAGVRVLYAKESIPDGPEGILLESVLEGSAEYYSAALAQNIRRGMKFNAEQCKVNSGSIPFGYCKGPDGRFAIHEANAEVVREIFRKAAAGMPFVDIANDLNSRGLKTSRGGRWNKGSFRLLMNEAYIGVYHFSDTRIEGGMPALIDQGTFWAANERLKANSSVRGRHQDGGDYLLTGKLKCAHCGSYMIGFSGTGKNGELHYYYGCQKRRRERACKKANVPREWIERVVVKAALDYVLRPDVMEWIADAVMEYQEREAASAQLAALTAELEENQKATDNVMKAIEAGIITSTTKQRLLDLEAKAQDLKRAIELEKLSHVRLERDQVLFWLDRFRGGSLQSQEFRRKVIDAFVSVVYLSDDHLRIAFNYSGGSNAEADFDLVMDAEAAAGELSKKFAQGHVASTNIKAT

SEQ ID NO: 4652 - protein, 517 aa, Unknown
  Description of Unknown: Integrase B4653 sequence
  PTHR30461:SF3,SM00857,IPR036162,G3DSA:3.40.50.1390,IPR006119, SSF53041,PF00239,PTHR30461,PS51736,Coil, cd00338
MPKGTRAAIYARFSSHNQRSESIDIQVEKSREYCNEHGLDVVRVYSDYAQTGRDVQRVEFQRMMKDAKLGIFDYVVIYKVTRIMRNRDEMALARIKLRKAGVEILYAGESLGEGSMRVLNLGMLEVLAEWESAIDSERIRDGINKNAQRGMANGRTHYGWDIVNGYYEVNEREAAVMHRMKNMLFAGSTVAEIKRAVAGERGKRGKPLTHGVITKLLRREQNCGVYDYAGVRIEDGMPALWSREDQDMINSILGSNGRKHNKTRDTNDYPLSGKMWCPECGQYYVGTCGTSKTGRVYHYYKCKKCRRTFRRDAVEEAVLDTVLETIKKPDVRQRIVDAMALYDEMNEEKEEPESKSIEREIKRIDAEFERIWQAIEDGIAPPGGKERVDMLREQKAALEADLRQAQASESAHLSGEDIAAWLDHIAQEPDAAEIIETFVRLIEVDGDELKLYFAFDYWGDDFQPKQKKTNPEKGSSNVPMVEPQKIFANPTIAANGREIKVSNNWFCIVTLFNSKKS

SEQ ID NO: 4653 - protein, 517 aa, Unknown
  Description of Unknown: Integrase B4654 sequence
  PTHR30461:SF3,SM00857,G3DSA:1.10.10.2600,IPR036162, PF13408,IPR025827,G3DSA:3.40.50.1390,PS51737, IPR006119,IPR038109,PF07508,IPR011109, SSF53041,PTHR30461,PS51736,cd00338,PF00239
MQRAVIYARFSSDMQREESIDAQLRACKAYAKNKGYIVVDTYVDEAKSGREITKRDAYNKMMADAMEDKFDVIIFHKIDRNSRNELNYFTFKDKLERLGISYEYAAQPIDTISPEGQVMETIMVGMSAYYSRNLAKETKKGLNENAYKALFNGGCPPLGYKIVDKKYVIDENEAAAVRLIFELYLAGKGYAEICRVLDSKGFTTKGGKPFGKNSLYDILGNEKYIGTYTFNKIPKGKGKRNMHSQKRPDDYISIENALPAIISKEDFFIVQAKRERNRCHAAKYTAKHDYLLSGKVFCGECGSAMVGHRVRQRYYYYGCTRKEQTPTSKCQQRMIRAEVLEHWVMQILERVVFTVSGMRRIADAIAKGYQEEESRHAAEQEALAKRKAAAEKKLNNIYKIFEEGEADEFDRQRLNQIKVELREINKSICEASVKSVESLDNKKIVAFLTTIKSEIFVKNNMDYAKRAIDLLVTNVTVTGTVIKVTLSTQNVCAYLVPRTRTQTSGYKFSISIDTKAA

SEQ ID NO: 4654 - protein, 517 aa, Unknown
  Description of Unknown: Integrase B4655 sequence
  PTHR30461:SF3,SM00857,G3DSA:1.10.10.2600,IPR036162,PF13408, IPR025827,PS51737,G3DSA:3.40.50.1390,IPR006119,IPR038109, PF07508,IPR011109,SSF53041,PTHR30461,Coil, PS51736,cd00338,PF00239
MEQFDVNEIIMYLRKSRADAENETVEEVLARHENLLQDYALKTFGHIIPAANIYKEVASGETIESRPEIKKILSLAANNRNYKALLVVEPQRITRGDMLDCGTIIRVFKYNNIKIITPSKSFDLQDTYDLKYFQMTLQQGNEYLEYIKFILNRGRISSVKEGCFIGQKPPYGYEKAKKGKQFTLKPSDCADVVRLIFDLYVNKNMGCNQIASELDHRGIKPRFNEYWSAASIREMLKNPVYIGKIRWNYKRTVIHTDEHGSTKKMRIRDNDNAMIVDGLHEAIIDEELFNKAQEKTGKNSRSRTSGELRNPFATLLKCGNCGYSMSYRTYKNKDGTQRGEPRMLCTHQIHCHTPSVGYNEFEKALISALRLRLEDFQIKISGENGGTADIQESILKNLNKELETLEKQQTKLYDFLERGIYAEDVFLKRNSALSVRRAELNKAIEMQSNAIPETVYYEDKIYKISQAIEMLQNPDLSAAEKNAFLKTFIDHIEYFSELPGKGNRFLENKFSLEIFFL

SEQ ID NO: 4655 - protein, 517 aa, Unknown
  Description of Unknown: Integrase B4656 sequence
  PTHR30461:SF3,cd00338,SM00857,G3DSA:1.10.10.2600,IPR036162, PF13408,IPR025827,G3DSA:3.40.50.1390,PS51737,IPR006119, IPR038109,PF07508,SSF53041,IPR011109,PTHR30461, PS51736,Coil,PF00239
MYLVAYARYSSDNQREESITAQLRAIHNWADANGHIIVKEYIDEALSARTDKRPNFLKMIEDSKTEDWNGVVVHKLDRFSRNRYNSAVYKKTLKDNNKKLFSVLEKLDDSPESIIMEAMLEGLSEYYSANLAREVKKGLNENALDCKHNGGTPPLGYSVLNSHYVINEQEAVIIKLIFDMYRTNHSYVEICLELNLRGYKTKRNKNFSKNSIHDILVNEKYIGNYTFGYGNRAKKRGQPNPDMIKIEGGMPAIIDKNVFFEVQEKMKGRKHMGGTYKAKQVYILSGILKCGICGEKYVGAKKNKFWSVYECSGHKKGVCDNKAIKKEEIEKIVVDELKTKLKKLFNNTELLEKVNSTYKDLYDNAENNLKVEEEKLINVKAQINNINKAVMDGLYSPEMKDQMNSLQTKKELIEHSIYLIKNISEKNEITSNDLNKIINTDLLKLESDNLEDIKEIVQKYVKEVLITPENINIKIVLDDTNINTKHKGDTDVCDSPPPKFEKRTAIILNLAVLFFFI

SEQ ID NO: 4656 - protein, 517 aa, Unknown
  Description of Unknown: Integrase B4657 sequence
  SM00857,G3DSA:1.10.10.2600,IPR036162,PS51737,G3DSA:3.40.50.1390, IPR006119,IPR038109,PF07508,IPR011109,SSF53041, PF00239,PTHR30461,PS51736,Coil,cd00338
MSYCIYLRKSRKDLEAEQAGQGETLARHERTLLSLARQRNLIIGNIYREIVSGESIAARPVMQKLLKEVESGIWDGVLVMEIERLARGDTIDQGTVQRAFQYSNTYIITPQKTYDPSNEFDEEYFEFGLFMSRREYKTIKRRMQAGRYAAAKEGKWPFNAAPYGYRRVKLQNEKGWTLAFDDSEASVCRMIFSMFTGPDRKGITIIRRYLNQHGIKPRNGDLWTDSSIRCILSNPAYDGKVAIGRRKVVPTIENGLPTKTRPRSNDYAVYEGRHPALISHAIYAEAQSYLGHGTPKLPESYGVKNPLAGLIICKECGKRMQRRPATNPWVKNGAKYDMLICHTDSCPTVGSPLDLVERELIHALEDWVSGYELQETLPESRVPELEQMLESAKQEHDTSEKQKSRLYDLLEQGVYDSETFLLRSRALQDRLEESLAGVTRLEQELESERKIQANITNFLPACHDLLSCYWSLDAPDRNKALKILIDSVDYRKTSRNKKGEAEKASFELTIKPRIPRI

SEQ ID NO: 4657 - protein, 517 aa, Unknown
  Description of Unknown: Integrase B4658 sequence
  PTHR30461:SF3,SM00857,G3DSA:1.10.10.2600,IPR036162,PS51737, G3DSA:3.40.50.1390,IPR006119,IPR038109,PF07508,SSF53041, IPR011109,PTHR30461,PS51736,cd00338, PF00239
MLFNYTQPEEKIKAAAYVRMSTEHQKYSPENQMAAIKEYADKHNYEIIKTYSDGGKSGLNISGRASLQQMLADVQGRQQQYKVILVLDVTRWGRFQDADESAYLEFMCKKAGVRVQYCAEQFTNDDSPVSTIIKSVKRTMAAEYSRELSGKVFAGQSRLITLGYKQGGPAGYGLRRMLIDEYGNHKGMLARGEHKSIATDRVILVPGPEEEQENVRWMYKAFVYDGKNEGAIADELNHRGIKTDLDKDWTKATVREVLSNEKYIGNNIFNRISYKLKIKRVRNPEDIWVRKDNAFQGIVDPSLFFMAKGIFAARCRKLSDEEMLQKLKELQDRKGYLSAIVIDEAEDMPSSAAYSGRFGGLTRAYQLIGFNPGRDFRYIEINRYLRELHQENIQSTIQGLINCGADIKLNESQNLLNVNNMFTASLVICRCNALSNGKYRWKVRFDTVLNPDVTIAIRMKANNSDTLDYYLLPSLDFKIPNIKLDEQNTGFIDSYRFENLDYLYEMAKCISIRGQLR

SEQ ID NO: 4658 - protein, 517 aa, Unknown
  Description of Unknown: Integrase B4659 sequence
  PTHR30461:SF3,SM00857,G3DSA:1.10.10.2600,IPR036162,PF13408, PS51737,G3DSA:3.40.50.1390,IPR025827,IPR006119,IPR038109, PF07508,IPR011109,SSF53041,PF00239,PTHR30461, PS51736,Coil,cd00338
MARSKKTECLPLERIGVIYARYSSHNQKEESIEQQVEECTSFALLNGIKIVHVYADKALSGRTDKRPQFQRLMRDAEKRSFSVVVAYKSNRIARDMLNALKYEDRLGKYGIETLYAKEEFGNTAAGRFALRTMMNVNQFYSENMAEDIKRGMLDNAENCKVNGALPLGYVSGPDKRYAIEPKEAEIVRGIYDKVLEGVSFVDIANDLNACGVRTKHGSLWNKCSFHRILTNDVYIGVYRHSGVVKEGGVPPILEREVFIAMQKYLETKKNPRGRHRENGDYLLTGKLRCGYCESFMVGVSGTSKTGDKHYYYTCNSRHAGNGCKKENVRRDTIEYTVAALTQQVVFKEDIIEWIATAAVKLAKEASGQNEIDAMEAELAEDRKATKNIMAAIEQGIFTATTKSRLLELEADIASLEQSIRDAKAISEGKLLEKERVVYFLTSLREGNLHSKTYQKRLIDTFVRAVYLWDDRIGIDYYYAGKDSMVKYSLSEIEADIGENIREVLKDSLTGHHDCRTL

SEQ ID NO: 4659 - protein, 517 aa, Unknown
  Description of Unknown: Integrase B4660 sequence
  PTHR30461:SF3,SM00857,G3DSA:1.10.10.2600,IPR036162,PF13408, PS51737,G3DSA:3.40.50.1390,IPR025827,IPR006119,IPR038109, PF07508,IPR011109,SSF53041,PF00239,PTHR30461, PS51736,Coil,cd00338
MNVVLYMRYSSDRQTEQSIEGQKRVCMDFCERQGYNVVGEYIDRATSAYKETAKRTNFCRMIRDSSNGLWQGVVVYKLDRFARNRYDSATYKVRLKKNGVKVISATENISDSPEGVILESVLEGMAEFYSKELSQKVSRGLNESAHKCNSTGGAIPLGYKTVNKKLTVDELNAQIVKEAFDLYAGGATISEICEKFNSQGYRTKKGTEFNKNSFKTMLRNEKYIGTYTYKDIRIEGGIPAIIDKETFETVQKRLSANAQAPARGKARVNYLLSQKLFCGHCGANMIGDSGRSKTGETYNYYSCSTRKRFHSCKKRTIRKDLIERIVAENAMRLITPEMINTIADMAIKCNREDIESDAIIPALTADLKEINTSINNLLKMVERGVESETLDSRLQELEKRKKDTESRLDAAKSEYLTLDKTVIVGWLSQFLAGDIEDEDFRRHLIDTLINSVTVWDEPDGGYKITTVYNLKGNTQTYRVNADGSSDMKRNSPPKEYNPNSLFFFKSLFGYTTKYRVE

SEQ ID NO: 4660 - protein, 517 aa, Unknown
  Description of Unknown: Integrase B4661 sequence
  PTHR30461:SF3,SM00857,G3DSA:1.10.10.2600,IPR036162,PF13408, PS51737,G3DSA:3.40.50.1390,IPR025827,IPR006119,IPR038109, PF07508,IPR011109,SSF53041,PF00239,PTHR30461, PS51736,Coil,cd00338
MTKNKKTDTVSEKCKAVIYARFSSDKQREESIEGQIRECTQFAKSQNLEIIGTYIDRALSARSDNRPDFLRMIADSSKGLFQYVVVYQLDRFSRSRYDSAVYKHKLKKNGVRVLSAKERIGDDPSSIILESMLEGYAEYYSAELSQKVKRGMTENVLEHKWTGGYVPLGYCLAPDKTLQIDPVGAEAVKIIYDKWIAGCRIMEIIRYLNDHNYVTSRKAKFRYSSLNRILTNPIYTGLYQWGSIEVADYAPAIITQKQFALAQEKIHHIKAHPRAKRRSANYALTGMIYCGVCGSPMTGQSGHSKSSALYHYYRCSTKNNYHDRGKKLNIKCTNRNISRDKLEDLVLQTTINILMNPEAVRMIAKQAVAAQEKDPAATEIDRIKEDKKLIQKKLNNSIKAVEAGIISTTLAANISQYEKEIADLDIKMEKIKLLSTPVKIDEIAVEFFLKSLLLNKKEHDKYRLDMFQTFIRRVVVYPDKVEIQYNYTATPHILENPVTKMMTGFSGCSRCERLVTR

SEQ ID NO: 4661 - protein, 517 aa, Unknown
  Description of Unknown: Integrase B4662 sequence
  PTHR30461:SF3,cd00338,SM00857,IPR036162,PF13408, IPR025827,G3DSA:3.40.50.1390,PS51736,IPR006119,SSF53041, PTHR30461,mobidb-lite,Coil,PF00239
MPKGTRAAIYARFSSHNQRSESIDIQVEKSREYCAQNGLDVVRVYSDYAQTGRDVQRVEFQRMMADAKLGLFDYVVIYKVTRIMRNRDEMALARIRLRKAGVEILYAGESLGEGSTRVLNLGMLEVLAEWESAIDSERIRDGINKNAQRGMANGRTHYGWDIVNGYYDVNEREAAVMHRMKNMLFAGSTVAEIKRAVAGERGKRGKPLTHGVITKLLRREQNCGVYDYAGVRIEDGMPALWSREDQDMINSILGSNGRKHNKTRDTNDYPLSGKMWCPECDQYYVGTCGTSKTGRVYHYYKCKKCKRTFRRDAVEEAVLDTVLETIKKPDIRQRIVDVMALYNEMNEEKEEPESKRIEREIKRIDTAFERIWQAIEDGIAPPGGKERVAMLREQKAALEADLRQAQANEGANLSGEAIAAWLDHIAQEPDAAEIIETFVRLIEVDGDELKLYFAFDYWGDDFQPKQKKTNPEKGSPNNPMVEPQKIFANPTIAANGREIKVSTNWLCIITLFSSKKS

SEQ ID NO: 4662 - protein, 517 aa, Unknown
  Description of Unknown: Integrase B4663 sequence
  PTHR30461:SF3,SM00857,G3DSA:1.10.10.2600,IPR036162, PF13408,IPR025827,G3DSA:3.40.50.1390,PS51737, IPR006119,IPR038109,PF07508,IPR011109, SSF53041,PTHR30461,PS51736,cd00338,PF00239
MQRAVIYARFSSDMQREESIDAQVRACKAYAKNKGYIVVDTYADEAKSGRDVTKRDAYNQMLADAMEDKFDVIIFHKIDRNSRNELNYFTFKDKLERLGISYEYAAQPIDTISPEGQVMETIMVGMSAYYSRNLAKETKKGLNENAYKALFNGGCPPLGYKIVDKKYVIDESEAAAVRLIFELYLAGKGYAEICRALDSKGFTTKSGKPFGKNSLYDILGNEKYIGTYTFNKIPKGKGKRNMHSQKRPDDYISIEDALPAIISKEDFFIVQAKRERNRCHAAKYTAKHDYLLSGKVFCGECGSAMVGHRVRQRYYYYGCTRKEQTPTSKCQQRMIRAEVLEHWVMQILERVVFTVSGMRRIADAIAKGYQEEESRHAAEQEALAKRKAAAEKKLNNIYKIFEEGEADEFDRQRLNQIKAELREINKSICEVSVKSVESLDNKKIVAFLTTIKSEIFVKNNIDYARRAIDLLVTNVTVTGTVIKVTLSTQNVCAYLVPRTRTQTSGYKFSISIDTKAA

SEQ ID NO: 4663 - protein, 517 aa, Unknown
  Description of Unknown: Integrase B4664 sequence
  PTHR30461:SF3,SM00857,G3DSA:1.10.10.2600,IPR036162,PF13408, IPR025827,G3DSA:3.40.50.1390,PS51737,IPR006119,IPR038109, PF07508,IPR011109,SSF53041,PF00239,PTHR30461, PS51736,Coil,cd00338
MNVVLYMRYSSDRQTEQSIEGQKRVCMDFCERQGYNVVGEYIDRATSAYKETAKRTNFCRMIRDSSNGLWQGVVVYKLDRFARNRYDSATYKVRLKKNGVKVISATENISDSPEGVILESVLEGMAEFYSKELSQKVSRGLNESAHKCNSTGGAIPLGYKTVDKKLTVDEPSAQIVKEAFDLYAGGATISEICEKFNSQGYRTKKGTEFNKNSFKSMFKNEKYIGTYTYKDIRIEGGIPAIIDKETFETVQKKLSANAQAPARGKARVNYLLSQKLFCGHCGANMIGDSGRSKTGETYNYYSCSTRKRFHSCKKRTIRKDLIERIVAENAMRLITPEMINTIADMAIKCNREDIESDAIIPALTADLKEINTSIKNLLKMVERGVESETLDSRLKELEKRKKDTESRLDAAKSEYLTLDKTVIVGWLSQFLSGDIEDEDFRRHLIDTLINSVTVWDEPDGGYKITTVYNLKGNTQTYRVNADGSSDMKRNSSPKEYNPNSLFFFKSLFGYTIKYRVE

SEQ ID NO: 4664 - protein, 517 aa, Unknown
  Description of Unknown: Integrase B4665 sequence
  PTHR30461:SF3,cd00338,SM00857,G3DSA:1.10.10.2600,IPR036162, PF13408,PS51737,IPR025827,G3DSA:3.40.50.1390,IPR006119, IPR038109,PF07508,IPR011109,SSF53041,PTHR30461, PS51736,Coil,PF00239
MCAKKKPAMLEPDMQDAVIYTRYSSHNQRDCSIEQQVADCEIFARQNNLRVVKVYADRHLSGTTDNRPQFQQMLKDATHGHWAYVICWKIDRFARNRYDSATYKFRLKKAGVRVLYAKESIPDGPEGILLESVLEGSAEYYSAALAQNIRRGMKYNAEQCKVNSGSIPFGYCKGPDGRFAIHEANAEVVREIFRKAAAGMPFVDIANDLNSRGLKTSRGGRWNKGSFRLLMNEAYIGVYHFSDTRIEGGMPALIDQGTFWAANERLKANSSVRGRHQDGGDYLLTGKLKCAHCGSYMIGFSGTGKSGELHYYYGCQKRRRERACKKANVPREWIERVVVKAALDYVLRPDVMEWIADAVMEYQEREAASAQLAALTAELEENQKATDNVMKAIEAGIITSTTKQRLLDLEAKAQDLKRAIELEKLSHVRLERDQVLFWLDRFRGGSLQSQEFRRKVIDAFVSVVYLSDDHLRIAFNYSGGSNAEADFDLVMDAEAAAGELSKKFAQGHVASTNIKAT

SEQ ID NO: 4665 - protein, 517 aa, Unknown
  Description of Unknown: Integrase B4666 sequence
  PTHR30461:SF3,SM00857,G3DSA:1.10.10.2600,IPR036162,PF13408, IPR025827,G3DSA:3.40.50.1390,PS51737,IPR006119,IPR038109, PF07508,IPR011109,SSF53041,PTHR30461,PS51736, cd00338,PF00239
MQRAVIYARFSSDMQREESIDAQVRACKTYAKNKGYIVVDTYADEAKSGREITKRDAYNKMMADAMEDKFDVIIFHKIDRNSRNELNYFTFKDKLERLGISYEYAAQPIDTVSPEGQVMETIMVGMSAYYSRNLAKETKKGLNENAYKALFNGGCPPLGYKIVDKKYVIDENEAAAVRLIFELYLAGKGYAEICRALDSKGFTTKSGKPFGKNSLYDILGNEKYIGTYTFNKIPKGKGKRNMHSQKRPDDYISIEDALPAIISKEDFFIVQAKRERNRCHAAKYTAKHDYLLSGKVFCGECGSAMVGHRVRQRYYYYGCTRKEQTPTSKCQQRMIRAEVLEHWVMQILERVVFTVSGMRRIADAIAKGYQEEESRHAAEQEALAKRKAAAEKKLNNIYKIFEEGEADEFDRQRLNQIKVELREINKSIYEASVKSVESLDNKKIVAFLTTIKSEIFVKNNIDYARRAIDLLVTNVTVTGTVIKVTLSTQNVCAYLVPRTRTQPSAYNFSISIDTKAA

SEQ ID NO: 4666 - protein, 517 aa, Unknown
  Description of Unknown: Integrase B4667 sequence
  PTHR30461:SF3,SM00857,G3DSA:1.10.10.2600,IPR036162,PF13408, PS51737,G3DSA:3.40.50.1390,IPR025827,IPR006119,IPR038109, PF07508,IPR011109,SSF53041,PF00239,PTHR30461, PS51736,Coil,cd00338
MTKNKKTDTVSEKCKAVIYARFSSDKQREESIEGQIRECTQFAKSQNLEIIGTYIDRALSARSDNRPDFLRMIADSSKGLFHYVVVYQLDRFSRSRYDSAVYKHKLKKNGVRVLSAKERIGDDPSSIILESMLEGYAEYYSAELSQKVKRGMTENVLEHKWTGGYVPLGYCLAPDKTLQIDPIGAEAVKIIYDKWLAGCRIMEIIRYLNDHNYVTSRKAKFRYSSLNRILTNPIYTGLYQWGSIEVADYAPAIITQKQFALAQEKIHHIKAHPRAKRRSANYALTGMIYCGVCGSPMTGQSGHSKSGALYHYYRCSTKNNYHNRGKKLNVKCTNRNISREKLEDLVLQTTINILMNPEAVHMIAKQAVAVQQKDPASMELDRIKEDKKSIQKKLNNSIKAVEAGIISATLAANISQYEKEIADLDIKMEKIKLSSTPVKIDEIAVEFFLKSLLLNKKEHDKYRLDMFQTFIRRVIVYPDKVEIQYNYTATPHILENPVTKMMTGNPGCSRCERLVTR

SEQ ID NO: 4667 - protein, 517 aa, Unknown
  Description of Unknown: Integrase B4668 sequence
  PTHR30461:SF3,cd00338,SM00857,G3DSA:1.10.10.2600,IPR036162, PF13408,IPR025827,PS51737,G3DSA:3.40.50.1390,IPR006119, IPR038109,PF07508,IPR011109,SSF53041,PTHR30461, PS51736,Coil,PF00239
MARSKKTECLPLERIGVIYARYSSHNQKEESIEQQVEECMNFASLNGIKIVHVYADKALSGRTDKRPQFQRLMRDAEKRSFSVVVAYKSNRIARDMLNALKYEDRLGKYGIETLYAKEEFGNTAAGRFALRTMMNVNQFYSENMAEDIKRGMLDNAENCKVNGALPLGYVSGPDKRYAIEPKEAEIVRRIYDKVLEGVSFADIANDLNACGVRTKHGSLWNKCSFHRILTNDVYIGVYRHSGVVKEGGVPPILEREVFIAMQKYLETKKNPRGRHRENGDYLLTGKLRCGYCESFMVGVSGTSKTGDKHYYYTCNGRHAGSGCKKENVRRDTIEYTVAALTQQVVFKEDIIEWIATAAVKLAKEASGQNEIDAMEAELAEDRKATKNIMAAIEQGIFTATTKSRLLELEADIASLEQSIRDAKAISEGKLLEKERVVYFLTSLREGNLHSKTYQKRLIDTFVRAVYLWDDRIGIDYYYAGKDSMVKYSLSEIEADIGENIREVLKDSLTGHHDCRTL

SEQ ID NO: 4668 - protein, 517 aa, Unknown
  Description of Unknown: Integrase B4669 sequence
  PTHR30461:SF3,SM00857,G3DSA:1.10.10.2600,IPR036162,PF13408, IPR025827,G3DSA:3.40.50.1390,PS51737,IPR006119,IPR038109, PF07508,SSF53041,IPR011109,PF00239,PTHR30461, PS51736,Coil,cd00338
MTAVIYARYSSDNQREESIEGQIRECTAYAEKNGITIVKHYIDRAISAKTDNRPQFQQMIKDSDKKLFDIVLVWKLDRFARNRYDSARYKTQLKKNGVKLMSATEIISEGPEGIILESVLEGYAEYYSADLAEKVVRGQTENILKGRCNGGRGTFGYTLDSERKFHIDPLASPFVLESFTKYRDGLTMKEIRDWLNENGIKNPVGGEFTYNSVEHMLKNRRYIGELKFRDVVVPDAIPPIVPLELFDDVQEKIAKNKKAPARRKAEDDYLLTTKLHCGCCGALMFGESGTSRTGEVHRYYKCATAKKKKGCKKKTVRKQWLEDLVVNQTMQLVRDDAAMESIIAKVMELQDRENTNLPLYEKQLRDAESGIQNMLNAIQAGILTSSTKERLEQLEETKRELEARIAEEKLAKPKIKEEFIRFWLMRFRKLDMSLKDQRQALVDTFINSIYLYDDKVLITFNYKEGTQTITFEEAAEAASKGNGSDLDCFTAPKTSTHCVLVFLFVRGSRPRTTLFII

SEQ ID NO: 4669 - protein, 517 aa, Unknown
  Description of Unknown: Integrase B4670 sequence
  PTHR30461:SF3,SM00857,G3DSA:1.10.10.2600,IPR036162,PF13408, IPR025827,G3DSA:3.40.50.1390,PS51737,IPR006119,IPR038109, PF07508,IPR011109,SSF53041,PF00239,PTHR30461, PS51736,Coil,cd00338
MTAVIYARYSSDNQREESIEGQIRECTAYAEKNGITIVKHYIDRAISAKTDNRPEFQQMIKDSDKKLFDIVLVWKLDRFARNRYDSARYKTQLKKNGVKLMSATEIISEGPEGIILESVLEGYAEYYSADLAEKVVRGQTENILKGRCNGGRGTFGYTLDSERKFHIDPLTSPFVLESFKKYNEGSTMKEIRDWLNENGIKNPVGGAFTYNSVEHMLKNRRYIGELKFRDVVVPDAIPPIIPLELFEDVQEKIAKNKKAPARRKAEDDYLLTTKLFCGYCGALMFGESGTSRTGEVHRYYKCATAKKHKGCKKKTVRKQWLEDLVVNQTMQLVKDDAAMESIIAKVMELQNKENTNIPLYEKQLRDAESGIQNMLNAIQAGILTSSTKERLEQLEETKRELEARIAEEKLAKPKVTEEFIRFWLLRFRKLDMSLKDQRQALVDTFINAIYLYDDKVLITFNYKEGTQTITFEEAAQAASKRNGSDLDCFTAPKTSTHCVLVFLFVRGSRPRTTLFII

SEQ ID NO: 4670 - protein, 517 aa, Unknown
  Description of Unknown: Integrase B4671 sequence
  PTHR30461:SF3,cd00338,SM00857,G3DSA:1.10.10.2600,IPR036162, PF13408,PS51737,G3DSA:3.40.50.1390,IPR025827,IPR006119, IPR038109,PF07508,IPR011109,SSF53041,PTHR30461, PS51736,Coil,PF00239
MCAKKKPAMLEPDMQDAVIYTRYSSHNQRDCSIEQQVADCEIFARQNNLRVVKVYADRHLSGTTDNRPQFQQMLKDASHGHWAYVICWKIDRFARNRYDSATYKFRLKKAGVRVLYAKESIPDGPEGILLESVLEGSAEYYSAALAQNIRRGMKYNAEQCKVNSGSIPFGYCKGPDGRFAIHEANAEVVREIFRKAAAGMPFVDIANDLNSRGLKTSRGGRWNKGSFRLLMNEAYIGVYHFSDTRIEGGMPALIDQGTFWAANERLKANSSVRGRHQDGGDYLLTGKLKCAHCGSYMIGFSGTGKNGELHYYYGCQKRRRERACKKANVPREWIERVVVKAALDYVLRPDVMEWIADAVMEYQEREAASAQLAALTAELEENQKATDNVMKAIEAGIITSTTKQRLLDLEAKAQDLKRAIELEKLSHVRLERDQVLFWLDRFRGGSLQSQEFRRKVIDAFVSVVYLSDDHLRIAFNYSGGPNAEADFDLVMDAETAAGELSKKFAQGHVTSTNIKAT

SEQ ID NO: 4671 - protein, 517 aa, Unknown
  Description of Unknown: Integrase B4672 sequence
  PTHR30461:SF3,SM00857,G3DSA:1.10.10.2600,IPR036162,PF13408, PS51737,IPR025827,G3DSA:3.40.50.1390,IPR006119,IPR038109, PF07508,IPR011109,SSF53041,PTHR30461,Coil, PS51736,cd00338,PF00239
MATVKEIAPHALQPEHLRVAAYCRVSSDSEDQLHSYAAQICNYTEVIAQHDGWDLVDVYADEGMTGTRVDKRDDFNRMMRDCRKGKIDCILVKSVARFARNTKECLASLRELSGMGVTVRFEKENIDTGTLTTELMVSVSGSLAQQESLSISANQRLSYQHRMECGEFITCSAPYGYRIKDKKNLEILPEEAAAVRWAFDAYLKGNSSKWIAEQLTAKGIPTQNGAEKWQETSIRYLLTNEKYIGDTLCQKSYSCGFPFVQKRNRGERMQYYVENSHPAIIDRDTFEKVQELLRKKAQKEKRHRERSPFALKILCGNCGTMFLRRTSKNGYVTWVCRTHDRSADACHVGRIPESEIRAAFLRMYRKLKCNADTILKPAMEQMNALDTVLQQNNPKTLTINRAIAEATEESHKISTLRVNGLLDADTCTARMNVISAKLAQLRRERRRLAENETLDEVMDALRKVRQTILDGPEQMDDFDDDLFESLVEKIIAESQTEIRFRLYGGLELRERLEVAVR

SEQ ID NO: 4672 - protein, 517 aa, Unknown
  Description of Unknown: Integrase B4673 sequence
  PTHR30461:SF3,cd00338,SM00857,G3DSA:1.10.10.2600,IPR036162, PF13408,PS51737,G3DSA:3.40.50.1390,IPR025827,IPR006119, IPR038109,PF07508,SSF53041,IPR011109,PTHR30461, PS51736,Coil,PF00239
MCAKKKPAMLEPDMQDAVIYTRYSSHNQRDCSIEQQVADCEIFARQNNLRVVKVYADRHLSGTTDNRPQFQQMLKDAAHGHWAYVICWKIDRFARNRYDSATYKFRLKKAGVRVLYAKESIPDGPEGILLESVLEGSAEYYSAALAQNIRRGMKYNAEQCKVNSGSIPFGYRKGPDGRFAIHEANAEVVREIFRKAAAGMPFVDIANDLNSRGLKTSRGGRWNKGSFRLLMNEAYIGVYHFSDTRIEGGMPALIDQGTFWAVNERLKANSSVRGRHQDGGDYLLTGKLKCAHCGSYMIGFSGTGKNGELHYYYGCQKRRRERACKKANVPREWIERVVVKAALDYVLRPDVMEWIADAVMEYQEREAASAQLAALTAELEENQKVTDNVMKAIEAGIITSTTKQRLLDLEAKAQDLKRAIELEKLSHVRLERDQVLFWLDRFRGGSLQSQEFRRKVIDAFVSVVYLSDDHLRIAFNYSGGSNAEADFDLVMDAEAAAGELSKKFAQGHVASTNIKAT

SEQ ID NO: 4673 - protein, 517 aa, Unknown
  Description of Unknown: Integrase B4674 sequence
  PTHR30461:SF3,SM00857,G3DSA:1.10.10.2600,IPR036162,PS51737, G3DSA:3.40.50.1390,mobidb-lite,IPR006119,IPR038109,SSF53041, IPR011109,PF00239,PTHR30461,PS51736,Coil, cd00338
MPKGTRAAIYARFSSHNQRSESIDIQVEKSREYCNEHGLDVVRVYSDYAQTGRDVQRVEFQRMMKDAKLGIFDYVVIYKVTRIMRNRDEMALARIKLRKAGVEILYAGESLGEGSTRVLNLGMLEVLAEWESAIDSERIRDGINKNAQRGMANGRTHYGWDIVNGYYEVNEREAAVMHRMKNMLFAGSTVAEIQRAVAGERGKRGKPLTHGVITKLLRREQNCGVYDYAGVRIEDGMPALWSREDQDMINSILGSNGRKHNKTRDTNDYPLSGKMWCPECGQYYVGTCGTSKTGRVYHYYKCKKCRRTFRRDAVEEAVLDTVLETIKKPDVRQRIVDAMALYDEMNEEKEEPESKRIEREIKRIDAAFERIWQAIEDGIAPPGGKERVDMLREQKAALEADLRQAQASESAHLSGEAIAAWLDHIAQEPDAAEIIETFVRLIEVDGDELKLYFAFDYWGDDFQPKQKKTNPEKGSPNNPMVEPQKIFANPTIAANGREIKVSNNWFCIVTLFNSKKS

SEQ ID NO: 4674 - protein, 517 aa, Unknown
  Description of Unknown: Integrase B4675 sequence
  PTHR30461:SF3,SM00857,G3DSA:1.10.10.2600,IPR036162,PF13408, PS51737,IPR025827,G3DSA:3.40.50.1390,IPR006119,IPR038109, PF07508,SSF53041,IPR011109,PTHR30461,Coil, PS51736,cd00338,PF00239
MPRKKKLQEVGGLRLVAYYRYSGGSGQTEQSIEGQRRDCEAYAKLHGMTIQHEYIDRHISGKTDDRVSFQQMIRDSDKGAFDMVICWKTDRFARNRYDSAVYKKRLRDNGVEIIYAAESNISGAEGIIIEGLMESLAEYYSAELAEKMRRGMRESALKCQAINRCRPLGFTTDAGKKFIIDERTAPAVRFIFEHYAAGESAAYIVDQLNEKGYRTSQGNEFNKSSINRIIQNEMYRGVYISKAYDVRIEGGVPAIVDDELWRRAQAMAKLNKQKRAKYSAKADYFLSGKLYCGECGCLMKGISGHSSTNGEVYRYYACSNPKCKKHNVPKEELEGKVIQAIIDNLLQPEAMEALAEAMVAVQETDADKPNAEREAIQQELADVRRRSKNILDAIENGTANPHLTARLDELTERENTLRFQLSTLTDEKPLRFTKEEYLFLLEQFLIDPAERNEDYGRRVVHTFVTSMEVSDSKLLIYFNISEETADKNKNASPSELQKESSTVKRLVRVARIELTAS

SEQ ID NO: 4675 - protein, 517 aa, Unknown
  Description of Unknown: Integrase B4676 sequence
  PTHR30461:SF3,SM00857,G3DSA:1.10.10.2600,IPR036162,PF13408, IPR025827,G3DSA:3.40.50.1390,PS51737,IPR006119,IPR038109, PF07508,IPR011109,SSF53041,PF00239,PTHR30461, PS51736,Coil,cd00338
MKTAVIYARYSSDKQTEQSIEGQLYDCYNYAKQHGITVVQEYIDRAMTGKNDDRPAFQQMLHESAMHKWDSVIVWKLDRFARNTIDSAVNRQILAKNGVKLLSVMESFGDDASGQMMTHIIEAINEYYSADLREKTIRGMRQSAMKAQTTGHIPLGYKVVDKKLVIDDETRIIPETVFRMYAEGERLTDIAEHLNAQGYRNRRGRPFTTNSFYNMLANEKYIGIYKYDDIVIEGGIPQMIPNEVFEAVREKLITNRKRAAKNTAKADYYLSGKLYCGHCGEPMSGLSGTGRNGVKHYYYRCNGVQKKSGCHKKLENKYLIEDEVCRAARSAFEQMDKAETAETIYQMYLQTVRNEYAPAELEKELTECTKQAENVVNAIAQTGGNQLLYDKVRELEERKEQLSSALRLSQAMTDNVPSVEQITVFIDDILATDINTTEGKKAIADIMISKVYVYDDKLTVIFKDKDGKSVDIPLSAVSDSSSADCAPSALGSHIVQIRTLHRVRIFLCFIRGRLCLG

SEQ ID NO: 4676 - protein, 517 aa, Unknown
  Description of Unknown: Integrase B4677 sequence
  PTHR30461:SF3,SM00857,IPR036162,G3DSA:3.40.50.1390,IPR006119, PF07508,SSF53041,IPR011109,PTHR30461,PS51736, cd00338,PF00239
MLLNYTKMEEKTKAAAYVRMSTEHQKYSPANQMAAIRDYADKHGYEIIQIYSDEGKSGLNIAGRASLQRMIDDVQNKNVKYKAILVLDVTRWGRFQDADESAYYEYICKRSGVRVQYCAEQFENDDSPISTIVKGVKRTMAAEYSRELSGKVFTGQSRLITLGYRQGGPAGYGLRRMLIDEHGNHKGILARGEHKSIATDRVILVPGSEEEQENVRWMYRAFVCEGRNEGWIADELNRRGVRTDLNKEWTKATVREVLSNEKYIGNNIFNRISFKLKIKRVRNPEDMWIRKDQAFQGIVDPSLFFMAKGIFAARCRKLSDEEMLQKLKELQDKKGYLSAIVIDEAEDMPSSAAYSGRFGGLVRAYRLIGFDPGRDFRYVEINRYLRELHQENIQDTIQKLMNCGAKVKLNESGNLLNVNDMFSASLVICRCNSLNNGKYRWKVRFDTILNPDVTIAVRMKADNASVLDYYLLPSLDFRLPNIKLDEHNAGFIDSYRFENMDYLYEMAKCISIREVKQ

SEQ ID NO: 4677 - protein, 517 aa, Unknown
  Description of Unknown: Integrase B4678 sequence
  PTHR30461:SF3,cd00338,SM00857,G3DSA:1.10.10.2600, IPR036162,PF13408,IPR025827,G3DSA:3.40.50.1390, PS51737,IPR006119,IPR038109,PF07508, SSF53041,IPR011109,PTHR30461,PS51736,Coil,PF00239
MCAKKKPAMLEPDMQDAVIYTRYSSHNQRDCSIEQQVADCEIFARQNNLRVVKVYADRHLSGTTDNRPQFQQMLKDAAHGHWAYVICWKIDRFARNRYDSATYKFRLKKAGVRVLYAKESIPDGPEGILLESVLEGSAEYYSAALAQNIRRGMKYNAEQCKVNSGSIPFGYRKGPDGRFAIHEANAEVVREIFRKAAAGMPFVDIANDLNSRGLKTSRGGRWNKGSFRLLMNEAYIGVYHFSDTRIEGGMPALIDQGTFWAANERLKANSSVRGRHQDGGDYLLTGKLKCAHCGSYMIGFSGTGKNGELHYYYGCQKRRRERACKKANVPREWIERVVVKSALDYVLRPDVMEWIADAVMEYQEREAASAQLAALTAELEENQKATDNVMKAIEAGIITSTTKQRLLDLEAKAQDLKRAIELEKLSHVRLERDQVLFWLDRFRGGSLQSQEFRRKVIDAFVSVVYLSDDHLRIAFNYSGGSNAEADFDLVMDAEAAAGELSKKFAQGHVTSTSTKAT

SEQ ID NO: 4678 - protein, 516 aa, Unknown
  Description of Unknown: Integrase B4679 sequence
  PTHR30461:SF3,SM00857,G3DSA:1.10.10.2600,IPR036162,PF13408, PS51737,IPR025827,G3DSA:3.40.50.1390,IPR006119,IPR038109, PF07508,IPR011109,SSF53041,PF00239,PTHR30461, PS51736,Coil,cd00338
MARKKIKKGDGQRLVAYYRYSGGSGQTEQSIEGQRRDCEAYARLHGMTIQHEYIDRHISGKTDDRGAFQQMIADSDKGAFDYVICWKTDRFARNRYDSAVYKKRLRDNGVEILYAAESNISGSEGIIIEGLMEALAEYYSAELSEKMRRGMRESALKGRAISRCRALGLTTDSDKHFIIDPKTAPIVHFIFERYAAGDSSMSIVEQLNAKGLRTSQGNQFNKCSIPRIIQNEAYRGVYVSKAYNVRIEGAIPAIIDDELWERAQIMLKLNQQKRTKNAAKADYFLSGKLFCKECGSPMKGVSGHSSTNGEVYRYYACSNPKCHKHNIPKDDLEGKVVQSICDHLLQPESMDALADAMIEVQKQDAVKPNAERLAVEENLADVRRRSKNILDAIENGTANPQLYARLDELTERENTLSYQLATLQNEKAIVFTKEQFLFLLEQFCIEPSERSEEYGRRLINTFVTNMEVSDSELFIYFNVSEETVNKTKNAPQKNFQKESSSEMRLVRVARIELTAS

SEQ ID NO: 4679 - protein, 516 aa, Unknown
  Description of Unknown: Integrase B4680 sequence
  PTHR30461:SF3,SM00857,G3DSA:1.10.10.2600,IPR036162,PS51737, G3DSA:3.40.50.1390,IPR006119,IPR038109,PF07508,IPR011109, SSF53041,PTHR30461,Coil,PS51736,cd00338, PF00239
MSYCIYLRKSRKDLEAEQHGEGETLARHERALLSLAKKNNLIISSIYREVVSGETIAARPVMQQLLHEVEQNLWDGVLVMEVERLARGDTIDQGVVQRAFQYSNTLIITPSKTYDPANEFDEEYFEFGLFMSRREYKTIKRRMQNGRYAAISEGKWPYNSAPYGFRRMKLEKEKGWTLAFDENEAPVVRLIFSMFTGPERVGIRSITRTLNSYGTKPRNSKLWSESTVRGILSNVVYDQCVKIGERKVVRTVENGVLTTARPRTSDYTIVPGRHPRLIDHDVFAEAQSYLGCGSPKPAGSNIIKNPLAGIIVCSECKKKMIRRPPSGTASRVPYDLMLCSTYDCPTIGSPLDLVEREVYNALSDWVEGYRLSGQMPSKSLIPEKEVLLESAQQTLDQLLRQKGTMYDLLEQGVYSTEVFLERSDSLQNRISEAESNVAQLKLELDKERQREANIEQFLPACEDLLSCYWDLSIPERNRLLKLLIESIEYKKLTKNKRGHLNEPNFELTIKPRIPRK

SEQ ID NO: 4680 - protein, 516 aa, Unknown
  Description of Unknown: Integrase B4681 sequence
  PTHR30461:SF3,cd00338,SM00857,IPR036162,PF13408, IPR025827,G3DSA:3.40.50.1390,PS51737,IPR006119,PF07508, IPR011109,SSF53041,PTHR30461,PS51736,Coil, PF00239
MKAIYVRQSLDKKDSLSIDAQIEDCINLCKRSGWNDYKVYKDKGWSAKNLDRPAFRQLNQDVQNGLIDGVICYKIDRISRSIRDFVNLIVDYQDLGVHFISFADNINTAAPGGMMMATLFVSLAQMEREAIITRVTDNYYYRCELGFWGGGPAPYGFRLVKTTENGQKHTILDPVPEEAEVIRTFFAWYLEPGATVRSIMNRAHLAGMQTRSGSDWTSRVLSDMLSKPLYAPNSMDIYNFYASQGVRVKISPEQCDGKQSLNIFGLRDRNSAHPKRSRPVSEMTLAIAKHKPIVDSDTYLKVQYKKKSRLAVTPRAGTSRTAVLSGLVRCGYCGRAMSPSGAKNGRYFTCSGRRNYAKGVCQGKSVKMDFLDDYVLNDLADFISQPEIKSMFKDGKAQRIPSSEQAKINEYKQRIATIDIDIQKLLDACLTSGDVAVKYLNERIDLLDTEKQNLQAEILAIQNKSNRKLELEGLDINSAPTALAGGEFDTKKYLCNFFIEQIIFYDRDNVQIRYKM

SEQ ID NO: 4681 - protein, 516 aa, Unknown
  Description of Unknown: Integrase B4682 sequence
  PTHR30461:SF3,IPR036162,PS51737,IPR011109,PTHR30461, PS00397,PF00239,G3DSA:1.10.10.2600,IPR006119,SSF53041, cd00338,SM00857,IPR025827,IPR038109,PS51736, IPR006118,PF13408,G3DSA:3.40.50.1390,PF07508,Coil
MSKKVMRKSTESTDRIRTGAAYIRVSTDDQLEYSPESQLEEIKKYCLQHNILLPSEYIFVEEDGRSGRKSSNRYAFQNMIATAKTKPKPFDVVVLWKFSRFARNQDESTFYKSMLRKKLGIDVVSVSEPLIDGMYGRLIEMIIEWQDEFYSVNLSGEVRRSMLSRARKGLYNGKMPLGYTKAPNENPVIEEQAAAIVRKIFDMYASGSDINYITRDLNDHGYKTKTGKRFDQEGVIYILENPFYIGKVRYNMRESSATSTLRDPEEWIISDSHHPPIIDQNTWDIVQERRERSKKIMQRYEHPVSHTKHWLSGLVKCPVCGKSLSHKEGYPRKSTHGGSYISGEGFQCLGYMKGLHTGSQYISAKKLTDAVISSLHEVLESVTDVSFELVRTYEPTVELDRQRYQRELASLDRKLERIKEAYLNEIDTLEDYKRNKEMIEKRRADLEALLSELTTAASGPENYKEQFLSRVQSVLDIIESDAPNDLKAEALRGIVRKIVFYKDTNTLEFHYYLMVE

SEQ ID NO: 4682 - protein, 516 aa, Unknown
  Description of Unknown: Integrase B4683 sequence
  PTHR30461:SF3,SM00857,G3DSA:1.10.10.2600,IPR036162,PF13408, PS51737,IPR025827,G3DSA:3.40.50.1390,IPR006119,IPR038109, PF07508,IPR011109,SSF53041,PTHR30461,PS51736, cd00338,PF00239
MQRAVIYARFSSDMQREESIDAQVRACKAYAKNKGYIVVDTYADEAKSGRDVTKRDAYNQMLADAMEDKFDIIIFHKIDRNSRNELNYFTFKDKLEKLGIRYEYAAQPIDALSPEGQMMETMMVGMAAYYSRNLAKETKKGLNENAYKALFNGGCPPLGYKIVDKKYVIDEQEAAAVRLIFELYLNGYGYAAICMELSAKGYTTKAGKAFAKNSLHDILCNEKYIGTYTFNKIPRKKGGRNSHAAERPEDFISIENAFPAIISKDDWALVRAKMDRNRHRAASYTAKEKYLLSGKVFCGHCGSAMVGHRIRKRYCYYGCTRKEQTPTSKCPQKMIRAEVLEHWVLQILERVVFTVGGMRRIADAIVDAYEAEQKEQAGSQATLLQRKAVAEKKLNNLYKIFEEGNADEFDRQRLNQIKAELREINKSICETSVKPAKLLSKQKIAAILAAMKDEIFVKKNSYYVQQAVDLLVDHVTITDKVLKITLSTQNVCAYLVPRNRDGMSVYTFTIAINLAA

SEQ ID NO: 4683 - protein, 516 aa, Unknown
  Description of Unknown: Integrase B4684 sequence
  PTHR30461:SF3,IPR036162,PS51737,IPR011109,PTHR30461, PS00397,PF00239,G3DSA:1.10.10.2600,IPR006119,SSF53041, cd00338,SM00857,IPR025827,IPR038109,IPR006118, PF13408,G3DSA:3.40.50.1390,PF07508,Coil
MAKKVMRKSAESTDRIRTGAAYIRVSTDDQLEYSPESQLEEIKRYCLQHNILLPSEFIFVEEDGRSGRKSSNRYAFQNMIATAKTKPKPFDVIVLWKFSRFARNQDESTFYKSMLRKKLGIDVVSVSEPLIDGMYGRLIEMIIEWQDEFYSVNLSGEVRRSMLSRARKGLYNGKMPLGYTKAPNENPVIEEQESAIVRKIFDMYATGSDINYITRDLNDHGYKTKTGKRFDQEGVIYILENPFYIGKVRYNMRESSATSTLRDPEEWIISDSHHEPIIDMDTWNIVQERREHSKKLMQRYEHPVSHTKHWLSGLVKCPVCGKSLSHKEGYPRKSTHGGSYISGEGFQCLGYMKGLHTGSQYISAKKLTSAVITSLHEVLESVTDVSFELVRTYEPTVELDRQRYQRELASLDRKLERIKEAYLNEIDTLEDYKRNKEMIEKRRADLEALLSELTTAASGPENYKEQFLSRVQSVLDIIESDAPNDLKAEALRGIVRKIVFYKDTNTLEFHYYLMVE

SEQ ID NO: 4684 - protein, 516 aa, Unknown
  Description of Unknown: Integrase B4685 sequence
  PTHR30461:SF3,SM00857,G3DSA:1.10.10.2600,IPR036162,PF13408, IPR025827,G3DSA:3.40.50.1390,PS51737,IPR006119,IPR038109, PF07508,IPR011109,SSF53041,PTHR30461,Coil, PS51736,cd00338,PF00239
MARRKKVSPGNRLVAYYRYSGGSQQTEQSIEGQRRDCEAYARQHGLTIVHEYIDRHISGRGVESRLAFQQMIADSSKHLFDLVICWKTDRFARNRYDSAVYKKKLRDNGVRILYAAESSVEGPEGIILEGLMESLAEYYSAELAQKMRRGMRESALKGKAINPNRPLGLTTDEHKRFIIDEKNAPTIRFIFEHYAAGESSASIVDQLNAAGLRTSKGNSFNKCSIPRIIQNEAYHGVYICKAYDVRIDGAVPAIIDDDLWKRAQKMLTLNKQHRAPHSSHADYLLSGKLFCGCCHSLMRGISGHNCRNDVYYYYACGNKADGGTCKKKNIPKDVAENLVVNAICENILRPDTLEDLADAIAAAQQADVNQPDPERAMLEQNLADVRRKINNIIESIENGTASSRLSARLADLEQQESTLNYQLESLKEVHPPVLDRERILFLLEQFLISPNERTEDYNRRIIDTFVNRIEITDTEMLIYFNLSEASASEKQKNSQSNNCSTGNHLVRVARIELTAS

SEQ ID NO: 4685 - protein, 516 aa, Unknown
  Description of Unknown: Integrase B4686 sequence
  PTHR30461:SF3,SM00857,IPR006118,G3DSA:1.10.10.2600,IPR036162, PS51737,G3DSA:3.40.50.1390,Coil,IPR006119,IPR038109, PF07508,SSF53041,IPR011109,PTHR30461,PS00397, PS51736,cd00338,PF00239
MSKKVMRKSTESTDRIRTGAAYIRVSTDDQLEYSPESQLEEIKKYCLQHNILLPSEFIFVEEDGRSGRKSSNRYAFQNMIATAKTKPKPFDVIVLWKFSRFARNQDESTFYKSMLRKKLGIDVVSVSEPLIDGMYGRLIEMIIEWQDEFYSVNLSGEVRRSMLSRARKGLYNGKMPLGYTKAPNENPVIEEQAAAIVRKIFDMYASGSDINYITRDLNDHGYKTKTGKRFDQEGVIYILENPFYIGKVRYNMRESSATSALRDPEEWIISDSFHDPIIDMDTWNIVQERRERSKKLMQRYEHPVSHTKHWLSGLVKCPVCGKSLSHKEGYPRKSTHGGSYVSGEGFQCLGYMKGLHTGSQYISAKKLTGAVISSLHEVLESVTDVSFELVRTYEPTVELDRQRYQRELASLDRKLERIKDAYLNEIDTLEDYKRNKDMIEKRRADLEALLSELTTAASGPENYKEQFLNRVQSVLDIIESDAPNDLKAEALRGIVRKIVFYKDTNTLEFHYYLMVE

SEQ ID NO: 4686 - protein, 516 aa, Unknown
  Description of Unknown: Integrase B4687 sequence
  PTHR30461:SF3,IPR036162,PS51737,IPR011109,PTHR30461, PS00397,PF00239,G3DSA:1.10.10.2600,IPR006119,SSF53041, cd00338,SM00857,IPR025827,IPR038109,PS51736, IPR006118,PF13408,G3DSA:3.40.50.1390,PF07508,Coil
MSKKVMRKSTESTDRIRTGAAYIRVSTDDQLEYSPESQLEEIKKYCLQHNILLPSEYIFVEEDGRSGRKSSNRYAFQNMIATAKTKPKPFDVVVLWKFSRFARNQDESTFYKSMLRKKLGIDVVSVSEPLIDGMYGRLIEMIIEWQDEFYSVNLSGEVRRSMLSRARKGLYNGKMPLGYTKAPNENPVIEEQEAAIIRKIFDMYASGSDINYITRDLNDYGYKTKTGKRFDQEGVIYILENPFYIGKVRYNMRESSATSTLRDPEEWIISDSHHEPIIDMDTWNIVQERREHSKKLMQRYEHPVSHTKHWLSGLVKCPVCGKSLSHKEGYPRKSTHGGSYISGEGFQCLGYMKGLHTGSQYISAKKLTSAVITSLHEVLESVTDVSFELVRTYEPTVELDRQRYQRELASLDRKLERIKEAYLNEIDTLEDYKRNKEMIEKRRADLEALLSELTTAASGPENYKEQFLSRVQSVLDIIESDAPNDLKAEALRGIVRKIVFYKDTNTLEFHYYLMVE

SEQ ID NO: 4687 - protein, 516 aa, Unknown
  Description of Unknown: Integrase B4688 sequence
  PTHR30461:SF3,cd00338,SM00857,IPR036162,PF13408, IPR025827,G3DSA:3.40.50.1390,PS51737,IPR006119,PF07508, IPR011109,SSF53041,PTHR30461,PS51736,Coil, PF00239
MKAIYVRQSLDKKDSLSIDAQIEDCINLCKRSGWNDYKVYKDKGWSAKNLDRPAFRQLNQDVQNGLIDGVICYKIDRISRSIRDFVNLIVDYQDLGVHFISFADNINTAAPGGMMMATLFVSLAQMEREAIITRVTDNYYYRCELGFWGGGPAPYGFRLVKTTENGQKHTILDPVPEEAEVIRTFFAWYLEPGATVRSIMNRAHLAGMQTRSGSDWTSRVLSDMLSKPLYAPNSMDIYNFYASQGVRVKISPEQCDGKQSLNIFGMRDRNSAHPKRSRPVSEMTLAIAKHKPIVDSDTYLKVQYKKKSRLAVTPRAGTSRTAVLSGLVRCGYCGRAMSPSGAKNGRYFTCSGRRNYAKGVCQGKSVKMDFLDDYVLNDLADFISQPEIKSMFKDGKAQRIPSSEQAKINEYKQRIATIDIDIQKLLDACLTSGDVAVKYLNERIDLLDTEKQNLQAEILAIQNKSNRKLELEGLDINSAPTALAGGEFDTKKYLCNFFIEQIIFYDRDNVQIRYKM

SEQ ID NO: 4688 - protein, 516 aa, Unknown
  Description of Unknown: Integrase B4689 sequence
  PTHR30461:SF3,IPR036162,PS51737,IPR011109,PTHR30461, PS00397,PF00239,G3DSA:1.10.10.2600,IPR006119,SSF53041, cd00338,SM00857,IPR025827,IPR038109,PS51736, IPR006118,PF13408,G3DSA:3.40.50.1390,PF07508,Coil
MSKKVMRKSTESTDRIRTGAAYIRVSTDDQLEYSPESQLEEIKKYCLQHNILLPSEYIFVEEDGRSGRKSSNRYAFQNMIATAKTKPKPFDVVVLWKFSRFARNQDESTFYKSMLRKKLGIDVVSVSEPLIDGMYGRLIEMIIEWQDEFYSVNLSGEVRRSMLSRARKGLYNGKMPLGYTKAPNENPVIEEQAAAIVRKIFDMYASGSDINYITRDLNDHGYKTKTGKRFDQKGVIYILENPFYIGKVRYNMRESSATSTLRDPEEWIISDSHHPPIIDQNTWDIVQERRERSKKIMQRYEHPVSHTKHWLSGLVKCPVCGKSLSHKEGYPRKSTHGGSYISGEGFQCLGYMKGLHTGSQYISAKKLTDAVISSLHEVLESVTDVSFELVRTYEPTVELDRQRYQRELASLDRKLERIKEAYLNEIDTLEDYKRNKEMIEKRRADLEALLSELTTAASGPENYKEQFLSRVQSVLDIIESDAPNDLKAEALRGIVRKIVFYKDTNTLEFHYYLMVE

SEQ ID NO: 4689 - protein, 516 aa, Unknown
  Description of Unknown: Integrase B4690 sequence
  PTHR30461:SF3,SM00857,G3DSA:1.10.10.2600,IPR036162,PS51737, G3DSA:3.40.50.1390,IPR006119,IPR038109,PF07508,SSF53041, IPR011109,PTHR30461,Coil,PS51736,cd00338, PF00239
MSYCIYLRKSRKDLEAEQHGEGETLARHERALLSLAKKNNLIISNIYREVVSGETIAARPVMQQLLHEVEQNLWDGVLVMEVERLARGDTIDQGVVQRAFQYSNTLIITPSKTYDPANEFDEEYFEFGLFMSRREYKTIKRRMQNGRYAAISEGKWPYNSAPYGFRRTKLEKEKGWTLAFDENEAPVVRLIFSMFTGPERVGIRSITRTLNSYGTKPRNSKLWSESTVRGILSNVVYDQCVKIGERKVVRTVENGVLTTTRPRTSDYTIVSGRHPRLIDHDVFAEAQSYLGCGSPKPAGSNIIKNPLAGIIVCSECKKKMIRRPPSGTASRVPYDLMLCSTYDCPTIGSPLDLVEREVYNALSDWVEGYRLSGQMPSKSLIPEKEVLLESAQQTLDQLLRQKGTMYDLLEQGVYSTEVFLERSDSLQNRISEAESNVAQLKLELDKERQREANIEQFLPACEDLLSCYWDLSIPERNRLLKLLIESIEYKKLTKNKRGHLNEPNFELTIKPRIPRK

SEQ ID NO: 4690 - protein, 516 aa, Unknown
  Description of Unknown: Integrase B4691 sequence
  SM00857,IPR006118,G3DSA:1.10.10.2600,IPR036162,PS51737, G3DSA:3.40.50.1390,PS00397,IPR006119,IPR038109,PF07508, IPR011109,SSF53041,PTHR30461,Coil,PS51736, cd00338,PF00239
MSKKVMRKSPEVTEQIRTGAAYIRVSTDDQLEYSPESQLEEIKRYCLQHNILLPSEFIFVEEEGRSGRKSSNRYAFQNMIAMAKTKPKPFDVIVLWKFSRFARNQDESTFYKSMLRKKLGIDVVSVSEPLIDGMYGRLIEMIIEWQDEFYSVNLSGEVRRSMLSRARKGLYNGKMPLGYTKPPNENPVIEEQEAAIVRKIFDMYASGSDINYITRGLNDHGYKTKTGKKFDQEGVIYILENPFYIGKVRYNMRESSATSTLRDPDEWIIADSFHEPIIDMETWNIVQERRERSKKLAGRYEHPVSHAKHWLSGLVKCPVCGKSLSHKEGYPRKSTNGTTYLSGEGFQCLGYMKGLHSGSQFISAKKLTDSVITSLRDVLESTTDVSFELVRTYEPTIELDCQRYQRELASLDRKLERIREAYMNEIDTLEDYKRNKEMIEKRRADLEALLADMTTAASGPENYKEQFLNRVQSVLDIIESDAPNDLKAEALRGIVRKIVFYKDTNTLEFHYYLMVE

SEQ ID NO: 4691 - protein, 516 aa, Unknown
  Description of Unknown: Integrase B4692 sequence
  PTHR30461:SF3,SM00857,G3DSA:1.10.10.2600,IPR036162,PF13408, IPR025827,G3DSA:3.40.50.1390,PS51737,IPR006119,IPR038109, PF07508,IPR011109,SSF53041,PTHR30461,PS51736, cd00338,PF00239
MSSVDKIAVVYARYSSHGQTEQSIEGQIAAAQKYAEQHGYTIIHVYADRAMTGRNDDREEFQRMLSDTATHQFGVILLWKIDRFGRNREEIAFNRYRCKKNGVRVERVAEDVPDGPEGVILDSVLEGMAEYYSLQLAQNVRRGQRESAKKSQTVGGCKIIGYNVDPDTKRYEVDPKTAPFVTEVFKRYANGETISEIVAWLNAQGVRTTRGGEFTVNSLHRLLKNEKYTGVYIFHDIRNEGGMPALIDRATFDKAQEMLKVNRRAPARVWSKTEYLLTDKLFCGHCGAMMVGESGHGRNGTKHNYYTCWNRKKKKLCDKKPVRQDVIEPLVLRSIGKLLENPATLENIADQVWAAYERSDTSGDTIKALDKQIADVDRALSNVMKAIEMGIINEMTKARMDELTDQKQALSAGRAEAGLAGGFKLTRDMILFFLQEIAALDMADRDSQKRLIKTFVNAIYLYDDHFDIAFNYTDKGKVVVRMQEINDAACGEVFGRCAQSPAKRGCCTSSKKERPK

SEQ ID NO: 4692 - protein, 516 aa, Unknown
  Description of Unknown: Integrase B4693 sequence
  PTHR30461:SF3,SM00857,G3DSA:1.10.10.2600,IPR036162,PF13408, PS51737,G3DSA:3.40.50.1390,IPR025827,IPR006119,IPR038109, PF07508,IPR011109,SSF53041,PF00239,PTHR30461, PS51736,Coil,cd00338
MKAVIYARFSSHNQREESIEGQVRACQRFAKEHDMTVIEIYADRGLSGLHADNRPEFQRMIADSDRHKFQALIMWNLDRFSRDKYDTAVYKSRLKKNGVTLYYSDQNIPDTPEGIILESLLEGFAQYYSANLSRNAKRGLQENARKCLWNGGGLPLGYTIDETKHFVIDPAGAACVRLIFQMYADNHSIKEIVSILNEKGYRTVKGNKFRLGSIQGVLRNRKYIGEYHASGITVPNGVPAIVDVELFNAVQEKIGVVSAAKARNKAEIPYLLTTKVFCGHCGSPMIGESGTGKGGSTYRYYKCCCRKNRKGQCDKRTEQKEWLEETVVAQTVEKFLHPDVIEDVSNACAAVLEQDCQNNALLKALNAQLADVEKSSRNLIKAIEAGVFTASMRERLAELEQQKEDITVQIAREQLRKPQLSAEQIAFFLRSFLDGDAHDPNFQERIIESLVRRVDVYDEGPGNRKLTVFYNLKKNNHSSVSVKCSDSESVGLPKGRLHKQPIFFFASCRRARIGRQ

SEQ ID NO: 4693 - protein, 516 aa, Unknown
  Description of Unknown: Integrase B4694 sequence
  PTHR30461:SF3,SM00857,IPR006118,G3DSA:1.10.10.2600,IPR036162, PS51737,G3DSA:3.40.50.1390,Coil,IPR006119,IPR038109, PF07508,IPR011109,SSF53041,PTHR30461,PS00397, PS51736,cd00338,PF00239
MSKKVMRKSTESTDRIRTGAAYIRVSTDDQLEYSPESQLEEIKKYCLQHNILLPSEYIFVEEDGRSGRKSSNRYAFQNMIATAKTKPKPFDVVVLWKFSRFARNQDESTFYKSMLRKKLGIDVVSVSEPLIDGMYGRLIEMIIEWQDEFYSVNLSGEVRRSMLSRARKGLYNGKMPLGYTKAPNENPVIEEQAAAIVRKIFDMYASGSDINYITRDLNDHGYKTKTGKRFDQEGVIYILENPFYIGKVRYNMRESSATSTLRDPEEWIISNSHHPPIIDQNTWDIVQERRERSKKIMQRYEHPVSHTKHWLSGLVKCPVCGKSLSHKEGYPRKSAHGGSYISGEGFQCLGYMKGLHTGSQYISAKKLTCAVISSLHEVLESVTDVSFELVRTYEPTVELDRQRYQCELASLDRKLERIKDAYLNEIDTLEDYKRNKEMIEKRRADLEVLLSELTTAASGPENYKEQFLSRVQSVLDIIESDAPNDLKAEALRGIVRKIVFYKDTNTLEFHYYLMVE

SEQ ID NO: 4694 - protein, 516 aa, Unknown
  Description of Unknown: Integrase B4695 sequence
  PTHR30461:SF3,IPR036162,PS51737,IPR011109,PTHR30461, PS00397,PF00239,G3DSA:1.10.10.2600,IPR006119,SSF53041, cd00338,SM00857,IPR025827,IPR038109,PS51736, IPR006118,PF13408,G3DSA:3.40.50.1390,PF07508,Coil
MAKKVIRKSAESTDRIRTGAAYIRVSTDDQLEYSPESQLEEIKRYCLQHNILLPSEYIFIEEDGRSGRKSSNRYAFQNMIATAKTKPKPFDVVVLWKFSRFARNQDESTFYKSMLRKKLGIDVVSVSEPLIDGMYGRLIEMIIEWQDEFYSVNLSGEVRRSMLSRARKGLYNGKMPLGYTKAPNENPVIEEQEAAIVRKIFDMYATGSDINYITRDLNDHGYKTKTGNHFDQEGVIYILENPFYIGKVRYNMRESSATSTLRDPEEWIISDSFHEPIIDMDTWNIVQKRREHSKKLMQRYEHPVSHTKHWLSGLVKCPVCGKSLSHKEGYPRKSTHGGSYISGEGFQCLGYMKGLHTGSQYISAKKLTSAVITSLHEVLESVTDVSFELVRTYEPTVELDRQRYQRELASLDRKLERIKEAYLNEIDTLEDYKRNKEMIEKRRADLEALLSELTTAASGPENYKEQFLSRVQSVLDIIESDAPNDLKAEALRGIVRKIVFYKDTNTLEFHYYLMVE

SEQ ID NO: 4695 - protein, 516 aa, Unknown
  Description of Unknown: Integrase B4696 sequence
  PTHR30461:SF3,IPR036162,PS51737,IPR011109,PTHR30461, PS00397,PF00239,G3DSA:1.10.10.2600,IPR006119,SSF53041, cd00338,SM00857,IPR025827,IPR038109,PS51736, IPR006118,PF13408,G3DSA:3.40.50.1390,PF07508,Coil
MAKKVIRKSAESTDRIRTGAAYIRVSTDDQLEYSPESQLEEIKRYCLQHNILLPSEYIFVEEDGRSGRKSSNRYAFQNMIATAKTKPKPFDVIVLWKFSRFARNQDESTFYKSMLRKKLGIDVVSVSEPLIDGMYGRLIEMIIEWQDEFYSVNLSGEVRRSMLSRARKGLYNGKMPLGYTKAPNENPVIEEQAAAIVRKIFDMYASGSDINYITRDLNDHGYKTKTGKRFDQEGVIYILENPFYIGKVRYNMRESSATSTLRDPEEWIISDSHHPPIIDQNTWDIVQERRERSKKLMQRYEHPVSHTKHWLSGLVKCPVCGKSLSHKEGYPRKSTHGGSYISGEGFQCLGYMKGLHTGSQYISAKKLTSAVITSLHEVLESVTDVSFELVRTYEPTVELDRQRYQRELASLDRKLERIKEAYLNEIDTLEDYKRNKEMIEKRRADLEALLSELTTAASGPENYKEQFLSRVQSVLDIIESDAPNDLKAEALRGIVRKIVFYKDTNTLEFHYYLMVD

SEQ ID NO: 4696 - protein, 516 aa, Unknown
  Description of Unknown: Integrase B4697 sequence
  IPR036162,PS51737,IPR011109,PTHR30461,PS00397, PF00239,G3DSA:1.10.10.2600,IPR006119,SSF53041,cd00338, SM00857,IPR025827,IPR038109,PS51736,IPR006118, PF13408,G3DSA:3.40.50.1390,PF07508,Coil
MAKKVIRKSAESTDRIRTGAAYIRVSTDDQLEYSPESQLEEIKRYCLQHNILLPSEYIFVEEDGRSGRKSSNRYAFQNMIATAKTKPKPFDVIVLWKFSRFARNQDESTFYKSMLRKKLGIDVVSVSEPLIDGMYGRLIEMIIEWQDEFYSVNLSGEVRRSMLSRARKGLYNGKMPLGYTKAPNENPVIEEQEAAIVRKIFDMYATGSDINYITRDLNDHGYKTKTGNHFDQEGVIYILENPFYIGKVRYNMRESSATSTLRDPKEWIISDSFHEPIIDMDTWNIVQERREHSKKLMQRYEHPVSHTKHWLSGLVKCPVCGKSLSHKEGYPRKSTHGGSYISGEGFQCLGYMKGLHTGSQYISAKKLTDAVISSLHEVLESVTDVSFELVRTYEPTVELDRQRYQRELASLDRKLERIREAYMNEIDTLEDYKRNKEMIEKRRADLEVLLSELTTAASGPENYKEQFLSRVQSVLDVIESDAPNDLKAEALRGIVRKIVFYKDTNTLEFHYYLMVE

SEQ ID NO: 4697 - protein, 516 aa, Unknown
  Description of Unknown: Integrase B4698 sequence
  PTHR30461:SF3,cd00338,SM00857,G3DSA:1.10.10.2600,IPR036162, PF13408,IPR025827,G3DSA:3.40.50.1390,PS51737,IPR006119, IPR038109,PF07508,SSF53041,IPR011109,PTHR30461, PS51736,Coil,PF00239
MLIRKIDAQKPTVSKKLRVAAYCRVSTDQEDQKESLEAQKAHYESWIKRHSDWEFAGVFYDLGISGTKADSRDGLQALLYACRTGSVDYVLTKSVSRFSRNTADCLSIVRELLSCNISIYFEKENIDTSSMESELMLSLLSSMAQDESESISKNVKWTIQQKIEAGTFKFGYPPYGYTRDADGNFIIDPKEADVIRLIFSYALSGMGTYKIAQMLEKRKIPTRKGGKWAGSTVKGILVNEKYYGAAAFQKTYTDSNFQRHHNHGEVDSFYAEEHHEPLISKEAFDKVQLLLQKHAEERKIEKNIGKYHKKYPFSGRIVCGECGDKFKRQTQSVGIAWACTTHLYDKASCSMKFIKDAAIKAAFVTMLNKLIFGYKFILFPYLDALKLSDADNNLLNILDIKAELQKNMDRKQDLRKLRVNGFLDSVMYTQELRQIEKQNEEYRTALKNQERTAVNGSIKETEKLIRFIETFGIQSEFSDEVFTEYVDSIIVYSRICIGFRLNCGLTLKEELCTGTE

SEQ ID NO: 4698 - protein, 516 aa, Unknown
  Description of Unknown: Integrase B4699 sequence
  PTHR30461:SF3,SM00857,G3DSA:1.10.10.2600,IPR036162,PF13408, IPR025827,PS51737,G3DSA:3.40.50.1390,IPR006119,IPR038109, PF07508,IPR011109,SSF53041,PF00239,PTHR30461, PS51736,Coil,cd00338
MARKKKVSPGNRLVAYYRYSGGSQQTEQSIEGQRRDCEAYARQHGLTIVHEYIDRHISGRGVESRLAFQQMIADSSKHLFDLVICWKTDRFARNRYDSAVYKKKLRDNGVRILYAAESSVEGPEGIILEGLMESLAEYYSAELAQKMRRGMRESALKGKAINPNRPLGLTTDEHKRFIIDEKNAPTIRFIFEHYAAGESSASIVDQLNAAGLRTSKGNSFNKCSIPRIIQNEAYHGVYICKAYDVRIDGAIPAIIDDDLWKRAQKMLTLNKQHRAPHSSHADYLLSGKLFCGCCHSLMRGISGHNCRNDVYYYYACGNKADGGTCKKKNIPKDVAENLVVNAICENILRPDTLEDLADAIAAAQQADVNQPDPERAMLEQNLADVRRKINNIIESIENGTASSRLSARLADLEQQESTLNYQLESLKEVHPPVLDRERILFLLEQFLISPNERTEDYNRRIIDTFVNRIEITDTEMLIYFNLSEASASEKQKNSQPNSCSTGNHLVRVARIELTAS

SEQ ID NO: 4699 - protein, 516 aa, Unknown
  Description of Unknown: Integrase B4700 sequence
  PTHR30461:SF3,IPR036162,PS51737,IPR011109,PTHR30461, PS00397,PF00239,G3DSA:1.10.10.2600,IPR006119,SSF53041, cd00338,SM00857,IPR025827,IPR038109,PS51736, IPR006118,PF13408,G3DSA:3.40.50.1390,PF07508,Coil
MAKKVIRKSAESTDRIRTGAAYIRVSTDDQLEYSPESQLEEIKRYCLQHNILLPSEYIFVEEDGRSGRKSSNRYAFQNMIATAKTKPKPFDVIVLWKFSRFARNQDESTFYKSMLRKKLGIDVVSVSEPLIDGMYGRLIEMIIEWQDEFYSVNLSGEVRRSMLSRARKGLYNGKMPLGYTKAPNENPVIEEQEAAIVRKIFDMYATGSDINYITRDLNDHGYKTKTGNHFDQEGVIYILENPFYIGKVRYNMRESSATSTLRDPEEWIISDSFHEPIIDMDTWNIVQERREHSKKLMQRYEHPVSHTKHWLSGLVKCPVCGKSLSHKEGYPRKSTHGGSYISGEGFQCLGYMKGLHTGSQYISAKKLTSAVITSLHEVLESVTDVSFELVRTYEPTVELDRQRYQRELASLDRKLERIKEAYLNEIDTLEDYKRNKDMIEKRRADLEVLLSELTTAASGPENYKEQFLSRVQSVLDIIESDAPNDLKAEALRGIVRKIVFYKDTNTLEFHYYLMVE

SEQ ID NO: 4700 - protein, 516 aa, Unknown
  Description of Unknown: Integrase B4701 sequence
  PTHR30461:SF3,SM00857,G3DSA:1.10.10.2600,IPR036162,PF13408, PS51737,G3DSA:3.40.50.1390,IPR025827,IPR006119,IPR038109, PF07508,IPR011109,SSF53041,PF00239,PTHR30461, PS51736,Coil,cd00338
MKAVIYARFSSHNQREESIEGQVRACQRFAKEHDMTVIEIYADRGLSGLHADNRPEFQRMIADSDRHKFQALIMWNLDRFSRDKYDTAVYKSRLKKNGVTLYYSDQNIPDTPEGIILESLLEGFAQYYSANLSRNAKRGLQENARKCLWNGGGLPLGYTIDETKHFVIDPAGATCVRLIFQMYADNHSIKEIVSTLNEKGYRTVKGNKFRLGSIQGVLRNRKYIGEYHASGITVPNGVPAIVDVELFNAVQEKIGVVSTAKARNKAEIPYLLTTKVFCGHCGSPMIGESGTGKGGSTYRYYKCSCRKNRKGQCDKRTEQKEWLEETVVAQTVEKFLHPNVIEDVSNACAAVLEQDCQNNALLKALNAQLADVEKSSRNLIKAIEAGVFTASMRERLAELEQQKEDITVQIAREQLRKPQLSAEQIAFFLRSFLDGDAHDPNFQERIIESLVRRVDVYDEGSGNRKLTVFYNLKKNNHSSVSVKCSDSESVGLPKGRLQKQPIFLFASCRRTRIGRQ

SEQ ID NO: 4701 - protein, 516 aa, Unknown
  Description of Unknown: Integrase B4702 sequence
  PTHR30461:SF3,SM00857,G3DSA:1.10.10.2600,IPR036162,PF13408, PS51737,IPR025827,G3DSA:3.40.50.1390,IPR006119,IPR038109, PF07508,IPR011109,SSF53041,PTHR30461,Coil, PS51736,cd00338,PF00239
MARKKKVSPGNRLVAYYRYSGGSQQTEQSIEGQRRDCEAYARQHGLTIVHEYIDRHISGRGVESRLAFQQMIADSSKHLFDLVICWKTDRFARNRYDSAVYKKKLRDNGVRILYAAESSVEGPEGIILEGLMESLAEYYSAELAQKMRRGMRESALKGRAINPSRPLGLTTDEHKRFIIDEKNAPTIRFIFEHYAAGESSASIVEQLNAAGLRTSKGNAFNKCSIPRIIQNEAYHGVYICKAYDVRIDGAIPAIIDDDLWKRAQKMLTLNKQHRAPHSSHADYLLSGKLFCGCCHSLMRGISGHNCRNDVYYYYACGNKADGGTCKKKNIPKDVAENLVVNAICENVLRPDTLEDLADAIAAAQQADVNQPDPERAMLEQNLADVHRKINNIIESIENGTASSRLSARLADLEQQESTLNYQLESMKEIHPPVLDRERILFLLEQFLISPNERTEDYNRRIIDTFVNRIEITDTEMLIYFNLSEASASEKQKNSQPNSCSTGNHLVRVARIELTAS

SEQ ID NO: 4702 - protein, 516 aa, Unknown
  Description of Unknown: Integrase B4703 sequence
  PTHR30461:SF3,SM00857,IPR006118,G3DSA:1.10.10.2600,IPR036162, PS51737,G3DSA:3.40.50.1390,Coil,IPR006119,IPR038109, PF07508,IPR011109,SSF53041,PTHR30461,PS00397, PS51736,cd00338,PF00239
MAKKVMRKSAESTDRIRTGAAYIRVSTDDQLEYSPESQLEEIKKYCLQHNILLPSEYIFVEEDGRSGRKSSNRYAFQNMIATAKTKPKPFDVVVLWKFSRFARNQDESTFYKSMLRKKLGIDVVSVSEPLIDGMYGRLIEMIIEWQDEFYSVNLSGEVRRSMLSRARKGLYNGKMPLGYTKAPNENPVIEEQEAAIVRKIFDMYASGSDINYITRDLNDHGYKTKTGKRFDQEGVIYILENPFYIGKVRYNMRESSATSTLRDPEEWIISDSHHPPIIDQNTWDIVQERRERSKKIMQRYEHPVSHTKHWLSGLVKCPICGKSLSHKEGYPRKAPNGSTYISGEGFQCLGYMKGLHTGSQYISAKKLTGAVISSLHEVLENVTDVSFELVRTYEPTVELDRQRYQRELASLDRKLERIKEAYLNEIDTLEDYKRNKEMIEKRRADLEVLLSELTTAASGPENYKERFLSRVQSVLDIIESDAPNDLKAEALRGIVRKIVFYKDTNTLEFHYYLMVE

SEQ ID NO: 4703 - protein, 516 aa, Unknown
  Description of Unknown: Integrase B4704 sequence
  PTHR30461:SF3,IPR036162,PS51737,IPR011109,PTHR30461, PS00397,PF00239,G3DSA:1.10.10.2600,IPR006119,SSF53041, cd00338,SM00857,IPR025827,IPR038109,PS51736, IPR006118,PF13408,G3DSA:3.40.50.1390,PF07508,Coil
MSKKVMRKSTESTDRIRTGAAYIRVSTDDQLEYSPESQLEEIKKYCLQHNILLPSEYIFVEEDGRSGRKSSNRYAFQNMIATAKTKPKPFDVIVLWKFSRFARNQDESTFYKSMLRKKLGIDVVSVSEPLIDGMYGRLIEMIIEWQDEFYSVNLSGEVRRSMLSRARKGLYNGKMPLGYTKAPNENPVIEEQEAAIVRKIFDMYATGSDINYITRDLNDHGYKTKTGNHFDQEGVIYILENPFYIGKVRYNMRESSATSTLRDPEEWIISDSHHEPIIDMDTWNIVQERREHSKKLMQRYEHPVSHTKHWLSGLVKCPVCGKSLSHKEGYPRKSTHGGSYISGEGFQCLGYMKGLHTGSQYISAKKLTSAVITSLHEVLESVTDVSFELVRTYEPTVELDRQRYQRELASLDRKLERIKEAYLNEIDTLEDYKRNKEMIEKRRADLEILLSELTTAASGPENYKEQFLSRVQSVLDIIESDAPNDLKAEAIRGIVRKIVFYKDTNTLEFHYYLMVE

SEQ ID NO: 4704 - protein, 516 aa, Unknown
  Description of Unknown: Integrase B4705 sequence
  PTHR30461:SF3,IPR036162,PS51737,IPR011109,PTHR30461, PS00397,PF00239,G3DSA:1.10.10.2600,IPR006119,SSF53041, cd00338,SM00857,IPR025827,IPR038109,PS51736, IPR006118,PF13408,G3DSA:3.40.50.1390,PF07508,Coil
MSKNVIRKSAESTDRIRTGAAYIRVSTDDQLEYSPESQLEEIKRYCLQHNILLPSEYIFVEEDGRSGRKSSNRYAFQNMIATAKTKPKPFDVIVLWKFSRFARNQDESTFYKSMLRKKLGIDVVSVSEPLIDGMYGRLIEMIIEWQDEFYSVNLSGEVRRSMLSRARKGLYNGKMPLGYTKAPNENPVIEEQEAAIVRKIFDMYASGSDINYITRDLNDHGYKTKTGKRFDQEGVIYILENPFYIGKVRYNMRESSATSTLRDPEEWIISDSHHPPIIYQNTWDIVQERRERSKKIMQRYEHPVSHTKHWLSGLVKCPICGKSLSHKEGYPRKAPNGSTYISGEGFQCLGYIKGLHAGSQYISAKKLTGAVISSLHEVLESVTDVSFELVRTYEPTVELDRQRYQRELASLDRKLERIKEAYLNEIDTLEDYKRNKEMIEKRRADLEILLSELTTAASGPENYKEQFLSRVQSVLDIIESDAPNDLKAEALRGIVRKIVFYKDTNTLEFHYYLMVE

SEQ ID NO: 4705 - protein, 516 aa, Unknown
  Description of Unknown: Integrase B4706 sequence
  PTHR30461:SF3,SM00857,IPR006118,G3DSA:1.10.10.2600,IPR036162, PS51737,G3DSA:3.40.50.1390,Coil,IPR006119,IPR038109, PF07508,IPR011109,SSF53041,PTHR30461,PS00397, PS51736,cd00338,PF00239
MSKKVMRKSSEVTEQIRTGAAYIRVSTDDQLEYSPESQLEEIKRYCLQHNILLPSEFIFVEEEGRSGRKSSNRYAFQNMIAMAKTKPKPFDVIVLWKFSRFARNQDESTFYKSMLRKKLGIDVVSVSEPLIDGMYGRLIEMIIEWQDEFYSVNLSGEVRRSMLSRARKGLYNGKMPLGYTKPPNENPVIEEQEAAIVRKIFDMYASGSDINYITRELNDHGYKTKTGKKFDQEGVIYILENPFYIGKVRYNMRESSATSTLRDPDEWIIADSFHEPIIDMETWNIVQERRERSKKLAGRYEHPVSHVKHWLSGLVKCPVCGKSLSHKEGYPRKSTNGTTYLSGEGFQCLGYMKGLHSGSQFISAKKLTDSVITSLRDVLESTTDVSFELVRTYEPTIELDCQRYQRELASLDRKLERIREAYLNEIDTLEDYKRNKEMIEKRRADLEALLSELTTAASGPENYKEQFLSRVQSVLDIIESDAPNDLKAEALRGIVRKIVFYKDTNTLEFHYYLMVE

SEQ ID NO: 4706 - protein, 516 aa, Unknown
  Description of Unknown: Integrase B4707 sequence
  SM00857,G3DSA:1.10.10.2600,IPR036162,PF13408,PS51737, G3DSA:3.40.50.1390,IPR025827,IPR006119,IPR038109,PF07508, SSF53041,IPR011109,PTHR30461,Coil,PS51736, cd00338,PF00239
MKDAVIYARYSSDRQREESIEGQIRVCQDYAKRNGFHIINIYTDRALTGRSDKRPGFQMMIRDAATHTFQYVIVYKLNRFSRDRYDSANYKHKLKKQGVKLLSAMENISDDPAGILLESVIEGISEYYSAELSENVIRGMTQSALEGKWPGGNIPLGYKLDEENRLIIDEEKAPIVRAVFQMFLDGMSVPRIVQELNNKKYTTNAGKEFSRSRVYYILHNERYIGVFMWKDIRKDDLIPPIVSKDTFYLAQEKVKKMKKHPYRTNGKYLLSGKIFCAACGSKVAGTSGKSCMGAKYYYYACSHHHKSSRYPYCETKNIRADVLEDLIYSKTNEIISNKAAVQAIARQAVKLQGNTSASLEVQALENRISDVSKKVQNCVRAIESGIISDAVSVSLSENERILAALKDELAKAKLLQESGSLTEEKICYFFEKIGQKAKETEKYKNILLTSLVRAVFICNDYIEIQYNYAEQLPILTNPVRIENSSCECTNGGHILHSHELNNLIFYERYFCIRIAV

SEQ ID NO: 4707 - protein, 516 aa, Unknown
  Description of Unknown: Integrase B4708 sequence
  SM00857,IPR006118,G3DSA:1.10.10.2600,IPR036162,PS51737, G3DSA:3.40.50.1390,PS00397,IPR006119,IPR038109,PF07508, IPR011109,SSF53041,PTHR30461,Coil,PS51736, cd00338,PF00239
MAKKVMRKSAESMDRIRTGAAYIRVSTDDQLEYSPESQLEEIKRYCLQHNILLPSEFIFVEEDGRSGRKSSNRYAFQNMIAMAKTKPKPFDVIVLWKFSRFARNQDESTFYKSMLRKKLGIDVVSVSEPLIDGMYGRLIEMIIEWQDEFYSVNLSGEVRRSMLSRARKGLYNGKMPLGYTKAPNENPVIEEQEAAIVRKIFDMYASGSDINYITRDLNDHGYKTKTGKKFDQEGVIYILENPFYIGKVRYNMRESSATSALRDPDEWIVADSFHEPIIDMETWNIVQERRERSKKLAGRYEHPVSHAKHWLSGLVKCPVCGKSLSHKEGYPRKSTNGITYLSGEGFQCLGYMKGLHSGSQFISAKKLTDSVITSLRDVLESATDVSFELVRTYEPTIELDRQRYQRELASLDRKLERIREAYMNEIDTLEDYKRNKEMIEKRRADLEALLDDMTTAASGPENYKEQFLNRVQSVLDIIESDAPNDLKAEALRGIVRKIVFYKDTNTLEFHYYLMVE

SEQ ID NO: 4708 - protein, 516 aa, Unknown
  Description of Unknown: Integrase B4709 sequence
  PTHR30461:SF3,SM00857,G3DSA:1.10.10.2600,IPR036162,PF13408, IPR025827,G3DSA:3.40.50.1390,PS51737,IPR006119,IPR038109, PF07508,IPR011109,SSF53041,PTHR30461,Coil, PS51736,cd00338,PF00239
MNAVIYARYSPGPRQTDQSIEGQVRDCMAYAKENNITVLNVYADKHISGSDFTHRAEFNHMIADSEKRQFEAVIVWKIDRFGRDREEIALNKIRLKRNGVRILYAKESIPDGPEGIILESLMEGLAEYYIEDLRQKVKRGQRESALKGKAVSGQAPYGYYIDEDKHYQEKKEESWVVRYVFEHSSAGETATDILAQLQQLGVKNRKGESITKNGIYTMLRNRKYIGECTYDGIPIPIPALIDQKLWDSVHARMKHRPRKPAAFKAPERYLLSCRIFCGECGSLMVGESGRGKSGKIYHYYKCAAQKRKGGSDCMLKTYRKNDLENYVIRCTVQDVLRDDVIDYIADEVVAISKKSDQEQRLASYQASLRDAQKSLKNVMAAIENGILTPSTKDRLMELENQVEEYKTLIAKEKIRKTTITKDQVVYWLNLFRSGDLADEGFRLRLLDVFVHSVYIYNDKVVIAYNYSDDDHSEPLDPDVFRCSNIHHRVRDRVPYSNFLFFPHTFVYVSYEKIPSA

SEQ ID NO: 4709 - protein, 516 aa, Unknown
  Description of Unknown: Integrase B4710 sequence
  PTHR30461:SF3,IPR036162,PS51737,IPR011109,PTHR30461, PS00397,PF00239,G3DSA:1.10.10.2600,IPR006119,SSF53041, cd00338,SM00857,IPR025827,IPR038109,PS51736, IPR006118,PF13408,G3DSA:3.40.50.1390,PF07508,Coil
MAKKVMRKSAESTDRIRTGAAYIRVSTDDQLEYSPESQLEEIKRYCLQHNILLPSEYIFVEEDGRSGRKSSNRYAFQNMIAMAKTKPKPFDVIVLWKFSRFARNQDESTFYKSMLRKKLGIDVVSVSEPLIDGMYGRLIEMIIEWQDEFYSVNLSGEVRRSMLSRARKGLYNGKMPLGYTKAPNENPVIEEHEAAIIRKIFDMYASGSDINYITRDLNDHGYKTKTGKRFDQEGVIYILENPFYIGKVRYNMRESSATSTLRDPEEWIISDSHHPPIIDQNTWDIVQERRERSKKIMQRYEHPVSHTKHWLSGLVKCPICGKSLSHKEGYPRKAPNGSTYISGEGFQCLGYMKGLHTGSQYISAKKLTSAVITSLHEVLESVTDVSFELVRTYEPTVELDRQRYQRELASLDRKLERIKEAYLNEIDTLEDYKRNKEMIEKRRADLEVLLSELTTAASGPENYKEQFLSRVQSVLDIIESDAPNDLKAEALRGIVRKIVFYKDTNTLEFHYYLMVE

SEQ ID NO: 4710 - protein, 516 aa, Unknown
  Description of Unknown: Integrase B4711 sequence
  PTHR30461:SF3,cd00338,SM00857,IPR036162,PF13408, PS51737,IPR025827,G3DSA:3.40.50.1390,IPR006119,PF07508, IPR011109,SSF53041,PTHR30461,PS51736,Coil, PF00239
MKAIYVRQSLDKKDSLSIDAQIEDCINLCKRNGWNDYKVYKDKGWSAKNLDRPAFRQLNQDVQNGLIDGVICYKIDRISRSIRDFVNLIVDYQDLGVHFISFADNINTAAPGGMMMATLFVSLAQMEREAIITRVTDNYYYRCELGFWGGGPAPYGFRLAKTTENGQKHTILEPVPEEAEVIRTFFAWYLEPGATVRSIMNRAHLAGMQTRSGSDWTSRVLSDMLSKPLYAPNSMDIYNFYASQGVRVKISPEQCDGKQSLNIFGMRDRNSAHPKRSRPVSEMTLAIAKHKPIVDSDTYLKVQYKKKSRLAVTPRAGTSRTAVLSGLVRCGYCGRAMSPSGAKNGRYFTCSGRRNYAKGVCQGKSVKMDFLDDYVLNDLADFISQPEIKSMFKDGKAQRIPSSEQAKINEYKQRIATIDIDIQKLLDACLTSGDVAVKYLNERIDLLDTEKQNLQAEILAIQNKSNRKLELEGLDINSAPTALAGGEFDTIKYLCNFFIEQIIFYDRDNVQIRYKM

SEQ ID NO: 4711 - protein, 516 aa, Unknown
  Description of Unknown: Integrase B4712 sequence
  PTHR30461:SF3,cd00338,SM00857,IPR036162,PF13408, PS51737,IPR025827,G3DSA:3.40.50.1390,IPR006119,PF07508, IPR011109,SSF53041,PTHR30461,PS51736,Coil, PF00239
MKAIYVRQSLDKKDSLSIDAQIEDCINLCKRSGWNDYKVYKDKGWSAKNLDRPAFRQLNQDVQNGLIDGVICYKIDRISRSIRDFVNLIVDYQDLGVHFISFADNINTAAPGGMMMATLFVSLAQMEREAIITRVTDNYYYRCELGFWGGGPAPYGFRLAKTTENGQKHTILEPVPEEAEVIRTFFAWYLEPGATVRSIMNRAHLAGMQTRSGSDWTSRVLSDMLSKPLYAPNSMDIYNFYASQGVRVKISPEQCDGKQSLNIFGMRDRNSAHPKRSRPVSEMTLAIAKHKPIVDSDTYLKVQYKKKSRLAVTPRAGTSRTAVLSGLVRCGYCGRAMSPSGAKNGRYFTCSGRRNYAKGVCQGKSVKMDFLESYVLNDLADFISQPEIKSMFKDGKAQRIPSSEQAKINEYKQRIATIDIDIQKLLDACLTSSDVAVKYLNERIDLLDTEKQNLQAEILAIQNKSNRKLELEGLDINSAPTALAGGEFDTKKYLCNFFIEQIIFYDRDNVQIRYKM

SEQ ID NO: 4712 - protein, 516 aa, Unknown
  Description of Unknown: Integrase B4713 sequence
  PTHR30461:SF3,SM00857,G3DSA:1.10.10.2600,IPR036162,PS51737, G3DSA:3.40.50.1390,IPR006119,IPR038109,PF07508,IPR011109, SSF53041,PTHR30461,Coil,PS51736,cd00338, PF00239
MSYCIYLRKSRKDLEAEQHGEGETLARHERALLSLAKKNNLIISNIYREVVSGETIAARPVMQQLLHEVEQNLWDGVLVMEVERLARGDTIDQGVVQRAFQYSNTLIITPSKTYDPANEFDEEYFEFGLFMSRREYKTIKRRMQNGRYAAISEGKWPYNSAPYGFRRVKLEKEKGWTLAFDENEAPVVRLIFSMFTGPERVGIRSITRTLNSYGTKPRNSKLWSESTVRGILSNVVYDQCVKIGERKVVRTVENGVLTTARPRTSDYTIVSGRHPRLIDHDVFAEAQSYLGCGSPKPAGSNIIKNPLAGIIVCSECKKKMIRRPPSGTASRVPYDLMLCSTYDCPTIGSPLDLVEREVYNALSDWVEGYRLSGQMPSKSLIPEKEVLLESAQQTLDQLLRQKGTMYDLLEQGVYSTEVFLERSDSLQNRISEAESTVAQLKLELDKERQREANIEQFLPACEDLLSCYWDLSIPERNRLLKLLIESIEYKKLTKNKRGHLNEPNFELTIKPRIPRK

SEQ ID NO: 4713 - protein, 516 aa, Unknown
  Description of Unknown: Integrase B4714 sequence
  PTHR30461:SF3,SM00857,G3DSA:1.10.10.2600,IPR036162,PF13408, PS51737,G3DSA:3.40.50.1390,IPR025827,IPR006119,IPR038109, PF07508,IPR011109,SSF53041,PF00239,PTHR30461, PS51736,Coil,cd00338
MKAVIYARFSSHNQREESIEGQVRACQRFAKEHDMTVIEIYADRGLSGLHADNRPEFQRMIADSDRHKFQALIMWNLDRFSRDKYDTAVYKSRLKKNGVTLYYSDQNIPDTPEGIILESLLEGFAQYYSANLSRNAKRGLQENARKCLWNGGGLPLGYTIDETKHFVIDPAGAACVRLIFQMYADNHSIKEIVSTLNEKGYRTVKGNKFRLGSIQGVLRNRKYIGEYHASGITVPNGVPAIVDVELFNAVQEKIGVVSAAKARNKAEIPYLLTTKVFCGHCGSPMIGESGTGKGGSTYRYYKCSCRKNRKGQCDKRTEQKEWLEETVVAQTVEKFLHPDVIEDVSNACAAVLEQDCQNNALLKALNAQLADVEKSSRNLIKAIEAGVFTSSMRERLAELEQQKEDITVQIAREQLRKPQLSAEQIAFFLRSFLDGDAHDPNFQERIIESLVRRVDVYDEGPGNRKLTVFYNLKKNNHSSVSVKCSDSESVGLPKRSVAKAADFLLTSCRRTRIGRQ

SEQ ID NO: 4714 - protein, 516 aa, Unknown
  Description of Unknown: Integrase B4715 sequence
  PTHR30461:SF3,IPR036162,PS51737,IPR011109,PTHR30461, PS00397,PF00239,G3DSA:1.10.10.2600,IPR006119,SSF53041, cd00338,SM00857,IPR025827,IPR038109,IPR006118, PF13408,G3DSA:3.40.50.1390,PF07508,Coil
MAKKVMRKSAESTDPIRTGAAYIRVSTDDQLEYSPESQLEEIKRYCLQHNILLPSEFIFVEEDGRSGRKSSNRYAFQNMIATAKTKPKPFDVIVLWKFSRFARNQDESTFYKSMLRKKLGIDVVSVSEPLIDGMYGRLIEMIIEWQDEFYSVNLSGEVRRSMLSRARKGLYNGKMPLGYTKAPNENPVIEEQEAAIVRKIFDMYATGSDINYITRDLNDHGYKTKTGNHFDQEGVIYILENPFYIGKVRYNMRESSATSTLRDPEEWIISDSHHEPIIDMDTWNIVQERREHSKKLMQRYEHPVSHTKHWLSGLVKCPVCGKSLSHKEGYPRKSTHGGSYISGEGFQCLGYMKGLHTGSQYISAKKLTSAVITSLHEVLESVTDVSFELVRTYEPTVELDRQRYQRELASLDRKLERIKEAYLNEIDTLEDYKRNKEMIEKRRADLEILLSELTTAASGPENYKEQFLSRVQSVLDIIESDAPNDLKAEAIRGIVRKIVFYKDTNTLEFHYYLMVE

SEQ ID NO: 4715 - protein, 516 aa, Unknown
  Description of Unknown: Integrase B4716 sequence
  PTHR30461:SF3,SM00857,G3DSA:1.10.10.2600,IPR036162,PS51737, G3DSA:3.40.50.1390,IPR006119,IPR038109,PF07508,IPR011109, SSF53041,PTHR30461,Coil,PS51736,cd00338, PF00239
MSYCIYLRKSRKDLEAEQHGEGETLARHERALLSLAKKNNLIISNIYREVVSGETIAARPVMQQLLHEVEQNLWDGVLVMEVERLARGDTIDQGVVQRAFQYSNTLIITPSKTYDPANEFDEEYFEFGLFMSRREYKTIKRRMQNGRYAAISEGKWPYNSAPYGFRRTKLEKEKGWTLAFDENEAPVVRLIFSMFTGPERVGIRSITRTLNSYGTKPRNSKLWSESTVRGILSNVVYDQCVKIGERKVVRTVENGVITTARPRTSDYTIVSGRHPRLINHDVFAEAQSYLGCGSPKPAGSNIIKNPLAGIIVCSECKKKMIRRPPSGTASRVPYDLMLCSTYDCPTIGSPLDLVEREVYNALSDWVEGYRLSGQMPSKSLIPEKEVLLESAQQTLDQLLRQKGTMYDLLEQGVYSTEVFLERSASLQNRISEAESNVAQLKLELDKERQREANIEQFLPACEDLLSCYWDLSIPERNRLLKLLIESIEYKKLTKNKRGHLNEPNFELTIKPRIPRK

SEQ ID NO: 4716 - protein, 516 aa, Unknown
  Description of Unknown: Integrase B4717 sequence
  PTHR30461:SF3,SM00857,IPR006118,G3DSA:1.10.10.2600,IPR036162, PS51737,G3DSA:3.40.50.1390,Coil,IPR006119,IPR038109, PF07508,SSF53041,IPR011109,PTHR30461,PS00397, PS51736,cd00338,PF00239
MAKKVMRKSAESTDRIRTGAAYIRVSTDDQLEYSPESQLEEIKRYCLQHNILLPSEYIFVEEDGRSGRKSSNRYAFQNMIATAKTKPKPFDVIVLWKFSRFARNQDESTFYKSMLRKKLGIDVVSVSEPLIDGMYGRLIEMIIEWQDEFYSVNLSGEVRRSMLSRARKGLYNGKMPLGYTKAPNENPVIEEQAAAIVRKIFDMYASGSDINYITRDLNDHGYKTKTGKRFDQEGVIYILENPFYIGKVRYNMRESSATSTLRDPEEWIISDSHHPPIIDQNTWDIVQERRERSKKIMQRYEHPVSHTKHWLSGLVKCPICGKSLSHKEGYPRKAPNGSTYISGEGFQCLGYMKGLHTGSQYISAKKLTGAVISSLHEVLESVTDVSFELVRTYEPTVELDRQRYQRELASLDRKLERIKEAYLNEIDTLEDYKRNKEMIEKRRADLEVLLSELTTAASGPENYKERFLSRVQSVLDIIESDAPNDLKAEALRGIVRKIVFYKDTNTLEFHYYLMVE

SEQ ID NO: 4717 - protein, 516 aa, Unknown
  Description of Unknown: Integrase B4718 sequence
  PTHR30461:SF3,SM00857,G3DSA:1.10.10.2600,IPR036162,PF13408, PS51737,IPR025827,G3DSA:3.40.50.1390,IPR006119,IPR038109, PF07508,SSF53041,IPR011109,PF00239,PTHR30461, PS51736,Coil,cd00338
MPKNKKSDNVNEKCKAVIYARFSSDKQREESIEGQIRECTQFAKSQNLEIIGTYIDRALSARSDNRPDFLRMIADSSKGLFQYVVVYQLDRFSRSRYDSAVYKHKLKKNGVRVLSAKERIGDDPSSIILESMLEGYAEYYSAELSQKVKRGMTENVLEHKWTGGYVPLGYSLAPDKTLQIDPSGAEAVKIIYEKWLSGYRIMDIIRYLNEHNYVTSRKSKFRYNSLNRILTNPIYTGLYRWGTIEVADYAPAIITQKQFALAQEKIHHIKAHPRAKRRSANYALTGMIYCGVCGAPMTGQSGHSKSGALYHYYRCSTKNNYHNRGKKLNVKCTNRNISREKLEDLVLQTTINILMNPEAVHMIAKQAVAVQQKDPASMELDRIKEDKKIIQKKLNNSIKAVEAGIISTTLAANISQYEKEIADLDIKMEKIKLSSTPVKIDEIAVEFFLKNLLLQKKEHDKYRLDMFQTFIRRVIVYPDKVEIQYNYTATPILENPVTKMMTGNSECSRCERLVTR

SEQ ID NO: 4718 - protein, 516 aa, Unknown
  Description of Unknown: Integrase B4719 sequence
  PTHR30461:SF3,SM00857,G3DSA:1.10.10.2600,IPR036162,PF13408, PS51737,IPR025827,G3DSA:3.40.50.1390,IPR006119,IPR038109, PF07508,IPR011109,SSF53041,PTHR30461,Coil, PS51736,cd00338,PF00239
MARKKKVSPGNRLVAYYRYSGGSQQTEQSIEGQRRDCEAYARQHGLTIVHEYIDRHISGRGVESRLAFQQMIADSSKHLFDLVICWKTDRFARNRYDSAVYKKKLRDNGVRILYAAESSVEGPEGIILEGLMESLAEYYSAELAQKMRRGMRESALKGRAINPSRPLGLTTDEHKRFIIDEKNAPTIRFIFEHYAAGESSASIVEQLNAAGLRTSKGNAFNKCSIPRIIQNEAYHGVYICKAYDVRIDGAIPAIIDDDLWKRAQKMLTLNKQHRAPHSSHADYLLSGKLFCGCCHSLMRGISGHNCRNDVYYYYACGNKADGGTCKKKNIPKDVAENLVVNAICENILRPDTLEDLADAIAAAQQADVNQPDPERAMLEQNLADVHRKINNIIESIENGTASSRLSARLADLEQQESTLNYQLESLKEVHPPVLDRERILFLLEQFLISPNERTEDYNRRIIDTFVNRIDITDTEMLIYFNLSEASASEKQKNSQPNSCSTGNHLVRVARIELTAS

SEQ ID NO: 4719 - protein, 516 aa, Unknown
  Description of Unknown: Integrase B4720 sequence
  PTHR30461:SF3,IPR036162,PS51737,IPR011109,PTHR30461, PS00397,PF00239,G3DSA:1.10.10.2600,IPR006119,SSF53041, cd00338,SM00857,IPR025827,IPR038109,IPR006118, PF13408,G3DSA:3.40.50.1390,PF07508,Coil
MAKKVMRKSAESTDPIRTGAAYIRVSTDDQLEYSPESQLEEIKRYCLQHNILLPSEFIFVEEDGRSGRKSSNRYAFQNMIATAKTKPKPFDVIVLWKFSRFARNQDESTFYKSMLRKKLGIDVVSVSEPLIDGMYGRLIEMIIEWQDEFYSVNLSGEVRRSMLSRARKGLYNGKMPLGYTKAPNENPVIEEQEAAIVRKIFDMYATGSDINYITRDLNDHGYKTKTGNHFDQEGVIYILENPFYIGKVRYNMRESSATSTLRDPEEWIISDSHHEPIIDMDTWNIVQERREHSKRLMQRYEHPVSHTKHWLSGLVKCPVCGKSLSHKEGYPRKSTHGGSYISGEGFQCLGYMKGLHTGSQYISAKKLTSAVITSLHEVLESVTDVSFELVRTYEPTVELDRQRYQRELASLDRKLERIKEAYLNEIDTLEDYKRNKEMIEKRRADLEILLSELTTAASGPENYKEQFLSRVQSVLDIIESDAPNDLKAEAIRGIVRKIVFYKDTNTLEFHYYLMVE

SEQ ID NO: 4720 - protein, 516 aa, Unknown
  Description of Unknown: Integrase B4721 sequence
  PTHR30461:SF3,cd00338,SM00857,G3DSA:1.10.10.2600,IPR036162, PF13408,IPR025827,G3DSA:3.40.50.1390,PS51737,IPR006119, IPR038109,PF07508,IPR011109,SSF53041,PTHR30461, Coil,PF00239
MSQETKEKVYLYARVSTTSEEQLTSFNTQSNYKSSDYEIIEVFADYGKTATKVFNRPNFIEMLKRCNVLVEKHKGNIIFVSGDSKPQVNKIIVSHSSRFMRNQILMKQCLLALQQNNVEVIFLDMGRSSFDNDIDFILNVFFLLDEQESRNTQYKVKKGLEKAREQRNYLPPCQKMLGFDYINGENKLIQNQYAPKAKYIFEAYSEGKSMREIAKEMDMKPNRIMEIIRNERYCGYVGYQKYYYDEKSETNKKAREYDIVPNDRIEAIISKELWDKCQEIRKSRTLRGKGVKNGVYAMSGKIRCSVCGKNFFHKGTNKKGDLWECSSKKNNGDCNSACFNEDTLKKFLLSPRGINEFKLTIEQIIDEILSKYKVKDKSSLETKLERNIGILDRTKELYMDGEISKENYNTRSTKLKAEIKDIEEEIKNIDNFNSYYDETHRLKDDYIDILNSLKIKLENGESEDVFKNHIEYIVVGRAYDEEKEKIIPTVEEVKFKDFTSLYKILEKAVFTTTGVF

SEQ ID NO: 4721 - protein, 516 aa, Unknown
  Description of Unknown: Integrase B4722 sequence
  PTHR30461:SF3,SM00857,G3DSA:1.10.10.2600,IPR036162,PF13408, IPR025827,PS51737,G3DSA:3.40.50.1390,IPR006119,IPR038109, PF07508,IPR011109,SSF53041,PTHR30461,Coil, PS51736,cd00338,PF00239
MQRAVIYARYSPGPNQTEQSIEGQVRECTKYAELHDLRIVGTYIDRKISGKTDNRREFQRMIDDSEKHIFDIIILYHTDRFARNRYDSAIYKHKLKENGVELRYATTDIPKGPEGIILESIMEGWAEYYSAELSRKIKRGMRESALKCHSTGAGRCLGYRTAEDKSLVIEPEGAKAVQTVFDMYIKGKSHADICRYLNDCGFRTAQGKLFNKNSVTHIIRNKRYIGVYTYDDITIEDGIPAIISKDTFHLAQLEAARRKTAKRPKEPKAEYLLSGKAFCGHCQKPLVGVSGTGKSGNKWYYYYCQESRAKRGCTKKPVKRAWLEREVVKRTVAEVLQPEVIQHIAKKCYDLQMEYRQDNSDVLFYELKLKDVRKAIKNTMHAIESGVKTKTLPARLQELENEEEALEAELAIAKASDFVITADQIEFLLTQFAEPWECESEEEYHRRIIKCFVHKVFLFDDKLLIYYNVSRDGKTREQSEAELLEEALGEGFDKRSSGSTMQKRHPIWDGVFAWLR

SEQ ID NO: 4722 - protein, 516 aa, Unknown
  Description of Unknown: Integrase B4723 sequence
  PTHR30461:SF3,SM00857,G3DSA:1.10.10.2600,IPR036162,PF13408, IPR025827,PS51737,G3DSA:3.40.50.1390,IPR006119,IPR038109, PF07508,IPR011109,SSF53041,PTHR30461,Coil, PS51736,cd00338,PF00239
MARRKKVSPGNRLVAYYRYSGGSQQTEQSIEGQRRDCEAYARQHGLTIVHEYIDRHISGRGVESRLAFQQMIADSSKHLFDLVICWKTDRFARNRYDSAVYKKKLRDNGVRILYAAESSVEGPEGIILEGLMESLAEYYSAELAQKMRRGMRESALKGKAINPNRPLGLTTDEHKRFIIDEKNAPTIRFIFEHYAAGESSASIVDQLNAAGLRTSKGNSFNKCSIPRIIQNEAYHGVYICKAYDVRIDGAIPAIIDDDLWKRAQKMLTLNKQHRAPHSSHADYLLSGKLFCGCCHSLMRGISGHNCRNDVYYYYACGNKADGGTCKKKNIPKDVAENLVVNAICENILRPDTLEDLADAIAAAQQADVNQPDPERAMLEQNLADVRRKINNIIESIENGTASSRLSARLADLEQQESTLNYQLESLKEVHPPVLDRERILFLLEQFLISPNERTEDYNRRIIDTFVNRIEITDTEMLIYFNLSEASASEKQKNSQPNSCSTGNHLVRVARIELTAS

SEQ ID NO: 4723 - protein, 516 aa, Unknown
  Description of Unknown: Integrase B4724 sequence
  PTHR30461:SF3,SM00857,G3DSA:1.10.10.2600,IPR036162,PS51737, G3DSA:3.40.50.1390,IPR006119,IPR038109,PF07508,SSF53041, IPR011109,PTHR30461,Coil,PS51736,cd00338, PF00239
MSYCIYLRKSRKDLEAEQHGEGETLARHERALLSLAKKNNLIISNIYREVVSGETIAARPVMQQLLHEVEQNLWDGVLVMEVERLARGDTIDQGVVQRAFQYSNTLIITPSKTYDPANEFDEEYFEFGLFMSRREYKTIKRRMQNGRYAAISEGKWPYNSAPYGFRRMKLEKEKGWTLAFDENEAPVVRLIFSMFTGPERVGIRSITRTLNSYGTKPRNSKLWSESTVRGILSNVVYDQCVKIGERKVVRTVENGVLTTARPRTSDYTIVSGRHPRLIDHDVFAEAQSYLGCGSPKPAGSNIIKNPLAGIIVCSECKKKMIRRPPSGTASRVPYDLMLCSTYDCPTIGSPLDLVEREVYNALSGWVEGYRLSGQMPSKSLIPEKEVLLESAQQTLDQLLRQKGTMYDLLEQGVYSTEVFLERSDSLQNRISEAESNVAQLKLELDKERQREANIEQFLPACEDLLSCYWDLSIPERNRLLKLLIESIEYKKLTKNKSGHLNEPNFELTIKPRIPRK

SEQ ID NO: 4724 - protein, 516 aa, Unknown
  Description of Unknown: Integrase B4725 sequence
  PTHR30461:SF3,SM00857,G3DSA:1.10.10.2600,IPR036162,PS51737, G3DSA:3.40.50.1390,IPR006119,IPR038109,PF07508,IPR011109, SSF53041,PTHR30461,Coil,PS51736,cd00338, PF00239
MSYCIYLRKSRKDLEAEQHGEGETLARHERALLSLAKKNNLIISNIYREVVSGETIAARPVMQQLLHEVEQNLWDGVLVMEVERLARGDTIDQGVVQRAFQYSNTLIITPSKTYDPANEFDEEYFEFGLFMSRREYKTIKRRMQNGRYAAISEGKWPYNSAPYGFRRTKLEKEKGWTLAFDENEAPVVRLIFSMFTGPERVGIRSITRTLNSYGTKPRNSKLWSESTVRGILSNVVYDQCVKIGERKVVRTVENGVLTTTRPRTSDYTIVSGRHPRLIDHDVFAEAQSYLGCGSPKPAGSNIIKNPLAGIIVCSECKKKMIRRPPSGTASRVPYDLMLCSTYDCPTIGSPLDLVEREVYNALSDWVEGYRLSGQTPSKSLIPEKEVLLESAQQTLDQLLRQKGTMYDLLEQGVYSTEVFLERSASLQSRISEAQSNVAQLKLELDKERQREANIEQFLPACEDLLSCYWDLSIPERNRLLKLLIESIEYKKLTKNKRGHLNEPNFELTIKPRIPRK

SEQ ID NO: 4725 - protein, 516 aa, Unknown
  Description of Unknown: Integrase B4726 sequence
  SM00857,IPR006118,G3DSA:1.10.10.2600,IPR036162,PS51737, G3DSA:3.40.50.1390,PS00397,IPR006119,IPR038109,PF07508, IPR011109,SSF53041,PTHR30461,Coil,PS51736, cd00338,PF00239
MSKKVMRKSTESTDRIRTGAAYIRVSTDDQLEYSPESQLEEIKKYCLQHNILLPSEFIFVEEDGRSGRKSNNRYAFQNMIAMAKTKPKPFDVIVLWKFSRFARNQDESTFYKSMLRKKLGIDVVSVSEPLIDGMYGRLIEMIIEWQDEFYSVNLSGEVRRSMLSRARKGLYNGKMPLGYTKAPNENPVIEEQEAAIVRKIFDMYASGSDINYITRDLNDHGYKTKTGKKFDQEGVIYILENPFYIGKVRYNMRESSATSALRDPDEWIVADSFHEPIIDMETWNIVQERRERSKKLAGRYEHPVSHAKHWLSGLVKCPVCGKSLSHKEGYPRKSTNGITYLSGEGFQCLGYMKGLHSGSQFISAKKLTDSVITSLRDVLESATDVSFELVRTYEPTIELDRQRYQRELASLDRKLERIREAYMNEIDTLEDYKRNKEMIEKRRADLEALLDDMTTAASGPENYKEQFLNRVQSVLDIIESDAPNDLKAEALRGIVRKIVFYKDTNTLEFHYYLMVE

SEQ ID NO: 4726 - protein, 516 aa, Unknown
  Description of Unknown: Integrase B4727 sequence
  PTHR30461:SF3,SM00857,G3DSA:1.10.10.2600,IPR036162,PS51737, G3DSA:3.40.50.1390,IPR006119,IPR038109,PF07508,IPR011109, SSF53041,PTHR30461,Coil,PS51736,cd00338, PF00239
MSYCIYLRKSRKDLEAEQHGEGETLARHERALLSLAKKNNLIISNIYREVVSGETIAARPVMQQLLHEVEQNLWDGVLVMEVERLARGDTIDQGVVQRAFQYSNTLIITPSKTYDPANEFDEEYFEFGLFMSRREYKTIKRRMQNGRYAAISEGKWPYNSAPYGFRRVKLEKEKGWTLAFDENEAPVVRLIFSMFTGPERVGIRSITRTLNSYGTKPRNSKLWSESTVRGILSNVVYDQCVKIGERKVVRTVENGVLTTTRPRTSDYTIVSGRHPRLIDHDVFAEAQSYLGCGSPKPAGSNIIKNPLAGIIVCSECKKKMIRRPPSGTASRVPYDLMLCSTYDCPTIGSPLDLVEREVYNALSDWVEGYRLSGQMPSKSLIPEKEVLLESAQQTLDQLLRQKGTMYDLLEQGVYSTEVFLERSDSLQNRISEAESNVAQLKLELDKERQREANIEQFLPACEDLLSCYWDLSIPERNRLLKLLIESIEYKKLTKNKRGHLNEPNFELTIKPRIPRK

SEQ ID NO: 4727 - protein, 516 aa, Unknown
  Description of Unknown: Integrase B4728 sequence
  PTHR30461:SF3,SM00857,IPR006118,G3DSA:1.10.10.2600,IPR036162, PS51737,G3DSA:3.40.50.1390,Coil,IPR006119,IPR038109, PF07508,IPR011109,SSF53041,PTHR30461,PS00397, PS51736,cd00338,PF00239
MSKKVMRKSTESTDRIRTGAAYIRVSTDDQLEYSPESQLEEIKKYCLQHNILLPSEYIFVEEDGRSGRKSSNRYAFQNMIATAKTKPKPFDVVVLWKFSRFARNQDESTFYKSMLRKKLGIDVVSVSEPLIDGMYGRLIEMIIEWQDEFYSVNLSGEVRRSMLSRARKGLYNGKMPLGYTKAPNENPVIEEQAAAIVRKIFDMYASGSDINYITRDLNDHGYKTKTGKRFDQEGVIYILENPFYIGKVRYNMRESSATSTLRDPEEWIISDSHHPPIIDQNTWDIVQERRERSKKIMQRYEHPVSHTKHWLSGLVKCPICGKSLSHKEGYPRKAPNGSTYISGEGFQCLGYMKGLHTGSQYISAKKLTGAVISSLHEVLESVTDVSFELVRTYEPTVELDRQRYQRELASLDRKLERIKEAYLNEIDTLEDYKRNKEMIEKRRADLEVLLSELTTAASGPENYKERFLSRVQSVLDIIESDAPNDLKAEALRGIVRKIVFYKDTNTLEFHYYLMVE

SEQ ID NO: 4728 - protein, 516 aa, Unknown
  Description of Unknown: Integrase B4729 sequence
  PTHR30461:SF3,cd00338,SM00857,IPR036162,PF13408, IPR025827,PS51737,G3DSA:3.40.50.1390,IPR006119,PF07508, IPR011109,SSF53041,PTHR30461,PS51736,Coil, PF00239
MKAIYVRQSLDKKDSLSIDAQIEDCINLCKRNGWNDYKVYKDKGWSAKNLDRPAFRQLNQDVQNGLIDGVICYKIDRISRSIRDFVNLIVDYQDLGVHFISFADNINTAAPGGMMMATLFVSLAQMEREAIITRVTDNYYYRCELGFWGGGPAPYGFRLVKTTENGQKHTILEPVPEEAEVIRTFFAWYLDPGATVRSIMNRAHLAGMQTRSGADWTSRVLSDMLSKPLYAPNSMDIYNFYASQGVRVKISPEQCDGKQSLNIFGMRDRNSAHPKRSRPVSEMTLAIAKHKPIVDSDTYLKVQYKKKSRLAVTPRAGTSRTAVLSGLVRCGYCGRAMSPSGAKNGRYFTCSGRRNYAKGVCQGKSVKMDFLDDYVLNDLADFISQPDIKSMFKDGKAQRIPSSEQAKINEYKQRIATIDIDIQKLLDACLTSGDVAVKYLNERIDLLDTEKQNLQAEILAIQNKSNRKLELEGLDINSAPTALAGGEFDTKKYLCNFFIEQIIFYDRDNVQIRYKM

SEQ ID NO: 4729 - protein, 516 aa, Unknown
  Description of Unknown: Integrase B4730 sequence
  PTHR30461:SF3,SM00857,G3DSA:1.10.10.2600,IPR036162,PF13408, IPR025827,PS51737,G3DSA:3.40.50.1390,IPR006119,IPR038109, PF07508,SSF53041,IPR011109,PTHR30461,Coil, PS51736,cd00338,PF00239
MARRKKVSPGNRLVAYYRYSGGSQQTEQSIEGQRRDCEAYARQHGLTIVHEYIDRHISGRGVESRLAFQQMIADSSKHLFDLVICWKTDRFARNRYDSAVYKKKLRDNGVRILYAAESSVEGPEGIILEGLMESLAEYYSAELAQKMRRGMRESAFKGKAINPNRPLGLTTDEHKRFIIDEKNAPTIRFIFEHYAAGESSASIVDQLNAAGLRTSKGNSFNKCSIPRIIQNEAYHGVYICKAYDVRIDGAIPAIIDDDLWKRAQKMLTLNKQHRAPHSSHADYLLSGKLFCGCCHSLMRGISGHNCRNDVYYYYACGNKADGGTCKKKNIPKDVAENLVVNAICENILRPDTLEDLADAIAAAQQADVNKPDPERAMLEQNLADVRRKINNIIESIENGTASSRLSARLADLEQQESTLNYQLESLKEVHPPVLDRERILFLLEQFLISPNERTEDYNRRIIDTFVNRIEITDTEMLIYFNLSEASASEKQKNSQPNNCSTGNHLVRVARIELTAS

SEQ ID NO: 4730 - protein, 516 aa, Unknown
  Description of Unknown: Integrase B4731 sequence
  PTHR30461:SF3,IPR036162,PS51737,IPR011109,PTHR30461, PS00397,PF00239,G3DSA:1.10.10.2600,IPR006119,SSF53041, cd00338,SM00857,IPR025827,IPR038109,PS51736, IPR006118,PF13408,G3DSA:3.40.50.1390,PF07508,Coil
MAKKVIRKSAESTDRIRTGAAYIRVSTDDQLEYSPESQLEEIKRYCLQHNILLPSEYIFVEEDGRSGRKSSNRYAFQNMIATAKTKPKPFDVVVLWKFSRFARNQDESTFYKSMLRKKLGIDVVSVSEPLIDGMYGRLIEMIIEWQDEFYSVNLSGEVRRSMLSRARKGLYNGKMPLGYTKAPNENPVIEEQEAAIVRKIFDMYASGSDINYITRDLNDHGYKTKTGKRFDQEGVIYILENPFYIGKVRYNMRESSATSTLRDPEEWIISDSYHPPIIDQNTWDIVQERRERSKKIMQRYEHPVSHTKHWLSGLVKCPICGKSLSHKEGYPRKAPNGSTYISGEGFQCLGYIKGLHAGSQYISAKKLTGAVISSLHEVLESVTDVSFELVRTYEPTVELDRQRYQRELASLDRKLERIKEAYLNEIDTLEDYKRNKEMIEKRRADLEALLSELTTAASGPENYKEQFLSRVQSVLDIIESDAPNDLKAEALRGIVRKIVFYKDTNTLEFHYYLMVE

SEQ ID NO: 4731 - protein, 516 aa, Unknown
  Description of Unknown: Integrase B4732 sequence
  PTHR30461:SF3,SM00857,IPR006118,G3DSA:1.10.10.2600,IPR036162, PS51737,G3DSA:3.40.50.1390,Coil,IPR006119,IPR038109, PF07508,IPR011109,SSF53041,PTHR30461,PS00397, PS51736,cd00338,PF00239
MSKKVMRKSSEVTEQIRTGAAYIRVSTDDQLEYSPESQLEEIKKYCLQHNILLPSEFIFVEEDGRSGRKSSNRYAFQNMIATAKTKPKPFDVIVLWKFSRFARNQDESTFYKSMLRKKLGIDVVSVSEPLIDGMYGRLIEMIIEWQDEFYSVNLSGEVRRSMLSRARKGLYNGKMPLGYTKAPNENPVIEEQESAIVRKIFDMYATGSDINYITRDLNNHGYKTKTGNHFDQEGVIYILENPFYIGKVRYNMRESSATSTLRDPEEWIISDSFHDPIIDMDTWNIVQERRERSKKLMQRYEHPVSHTKHWLSGLVKCPVCGKSLSHKEGYPRKSAHGESYISGEGFQCLGYMKGLHTGSQYISAKKLTCAVISSLHEVLESVTDASFELVRTYEPTVELDRQRYQRELASLDRKLERIKDAYLNEIDTLEDYKRNKDMIEKRRADLEALLSELTTAASGPENYKEQFLNRVQSVLDIIESDAPNDLKAEALRGIVRKIVFYKDTNTLEFHYYLMVE

SEQ ID NO: 4732 - protein, 516 aa, Unknown
  Description of Unknown: Integrase B4733 sequence
  SM00857,IPR006118,G3DSA:1.10.10.2600,IPR036162,PS51737, G3DSA:3.40.50.1390,PS00397,IPR006119,IPR038109,PF07508, IPR011109,SSF53041,PTHR30461,Coil,PS51736, cd00338,PF00239
MAKKVMRKSAESTDRIRTGAAYIRVSTDDQLEYSPESQLEEIKRYCLQHNILLPSEYIFVEEDGRSGRKSSNRYAFQNMIAMAKTKPKPFDVIVLWKFSRFARNQDESTFYKSMLRKKLGIDVVSVSEPLIDGMYGRLIEMIIEWQDEFYSVNLSGEVRRSMLSRARKGLYNGKMPLGYTKAPNENPVIEEHEAAIIRKIFDMYASGSDINYITRDLNDHGYKTKTGKRFDQEGVIYILENPFYIGKVRYNMRESSATSTLRDPEEWIISDSHHPPIIDQNTWDIVQERRERSKKIMQRYEHPVSHTKHWLSGLVKCPICGKSLSHKEGYPRKAPNGSTYISGEGFQCLGYIKGLHTGSQYISAKKLTCAVISSLHEVLESVTDVSFELVRTYEPTVELDRQRYQRELASLDRKLERIKEAYLNEIDTLEDYKRNKEMIEKRHADLEVLLSELTTAASGPENYKEQFLSRVQSVLDIIESDAPNDLKAEALRGIVRKIVFYKDTNTLEFHYYLMVE

SEQ ID NO: 4733 - protein, 516 aa, Unknown
  Description of Unknown: Integrase B4734 sequence
  PTHR30461:SF3,SM00857,G3DSA:1.10.10.2600,IPR036162,PF13408, PS51737,G3DSA:3.40.50.1390,IPR025827,IPR006119,IPR038109, PF07508,IPR011109,SSF53041,PTHR30461,Coil, PS51736,cd00338,PF00239
MARKKKVSPGNRLVAYYRYSGGSQQTEQSIEGQRRDCEAYARQHGLTIVHEYIDRHISGRGVESRLAFQQMIADSSKHLFDLVICWKTDRFARNRYDSAVYKKKLRDNGVRILYAAESSVEGPEGIILEGLMESLAEYYSAELAQKMRRGMRESALKGRAINPSRPLGLTTDEHKRFIIDEKNAPTIRFIFEHYAAGESSAFIVEQLNAAGLRTSKGNAFNKCSIPRIIQNEAYHGVYICKAYDVRIDGAIPAIIDDDLWKRAQKMLTLNKQHRAPHSSHADYLLSGKLFCGCCHSLMRGISGHNCRNDVYYYYACGNKVDGGTCKKKNIPKDVAENLVVNAICENVLRPDTLEDLADAIAAAQQADVNQPDPERAMLEQGLADVRRKINNIIESIENGTASSRLSARLADLEQQESTLNYQLESMKEIHPPVLDRERILFLLEQFLISPNERTEDYNRRIIDTFVNRIEITDTEMLIYFNLSEASASEKQKNSQSNSCSTGNHLVRVARIELTAS

SEQ ID NO: 4734 - protein, 516 aa, Unknown
  Description of Unknown: Integrase B4735 sequence
  cd00338,SM00857,G3DSA:1.10.10.2600,IPR036162,PF13408, PS51737,G3DSA:3.40.50.1390,IPR025827,IPR006119,IPR038109, PF07508,IPR011109,SSF53041,PTHR30461,PS51736, Coil,PF00239
MPKGTRAAIYARFSSHNQRSESIDIQVEKSREYCAENGLDVVRVYSDYAQTGRDVKRVEFQRMMEDAKLGIFDYVVIYKVTRIMRNRDEMALARIRLRKAGVEILYAGESLGEGSTRVLNLGMLEVLAEWESAIDSERIRDGIQKNAARGMANGRTHYGWDIVDGYYQINEREAAVMRRMKNMLCSGSTVAEITRAVAGERGKRGKPLTHNTISKLLKREQNCGVYDYAGVRIEGGMPELWSREEQDMINSILKTNGRKHSKTATTDDYPLSGKLWCPECGQFYTGTSGTSKTGRVYHYYRCKKCRRTLRRDVIEDAVLDAIYETVKQEDMRKRIIEGMVLYNDEREEEIEPASKQIEREIKRIDAAFERIWQAIEDGIAPPGGKERVDMLREQKAALETDLREAQAREGATLTEEALTSWLDHLAEEPDTEQIIDMFVRMIEVDGEQLNLYFAFDFWDDDFMPQKKTNPEKGSSNNPMVEPQIICSNPTIAANGREIKVSHNWFCIITLISTQKS

SEQ ID NO: 4735 - protein, 516 aa, Unknown
  Description of Unknown: Integrase B4736 sequence
  PTHR30461:SF3,SM00857,G3DSA:1.10.10.2600,IPR036162,PS51737, G3DSA:3.40.50.1390,IPR006119,IPR038109,PF07508,IPR011109, SSF53041,PTHR30461,Coil,PS51736,cd00338, PF00239
MSYCIYLRKSRKDLEAEQHGEGETLARHERALLSLAKKNNLIISSIYREVVSGETIAARPVMQQLLREVEQNLWDGVLVMEVERLARGDTIDQGVVQRAFQYSNTLIITPSKTYDPANEFDEEYFEFGLFMSRREYKTIKRRMQNGRYAAISEGKWPYNSAPYGFRRTKLEKEKGWTLAFDENEAPVVRLIFSMFTGPERVGIRSITRTLNSYGTKPRNSKLWSESTVRGILSNVVYDQCVKIGERKVVRTVENGVLTTTRPRTSDYTIVSGRHPRLIDHDVFAEAQSYLGCGSPKPAGSNIIKNPLAGIIVCSECKKKMIRRPPSGTASRVPYDLMLCSTYDCPTIGSPLDLVEREVYNALSDWVEGYRLSGQMPSKSLIPEKEVLLESAQQTLDQLLRQKGTMYDLLEQGIYSTEVFLERSDSLQNRISEAESNVAQLKLELDKERQREANIEQFLPACEDLLSCYWDLSIPERNRLLKLLIESIEYKKLTKNKRGHLNEPNFELTIKPRIPRK

SEQ ID NO: 4736 - protein, 516 aa, Unknown
  Description of Unknown: Integrase B4737 sequence
  SM00857,G3DSA:1.10.10.2600,IPR036162,PF13408,PS51737, IPR025827,G3DSA:3.40.50.1390,IPR006119,IPR038109,PF07508, IPR011109,SSF53041,PTHR30461,Coil,PS51736, cd00338,PF00239
MKDAVIYARYSSDRQREESIEGQIRVCQDYAKRNGFHIINIYTDRALTGRSDKRPGFQMMIRDAATHTFQYVIVYKLNRFSRDRYDSANYKHKLKKQGVKLLSAMENISDDPAGILLESVIEGISEYYSAELSENVIRGMTQSALEGKWPGGNIPLGYKLDEENRLMIDEGKAPIVRAVFQMFLDGMSVPRIVQELNDKKYTTNAGKEFSRSRVYYILHNERYIGVFMWKDIRKDDLIPPIVSKDTFYLAQAKVKKMKKHPYRTNGKYLLSGKIFCAACGSKVTGTSGKSCMGAKYYYYACSHHHKSSRYPYCETKNIRADVLEDLIYSKTNEIISNKAAVQAIARQAVKLQGNTSASLEVQALENRISDVSKKVQNCVRAIESGIISDAVSVSLSENERILAALSDELAKAKLLQESGSLTEEKICYFFEKIGQKAKETEKYKNILLTSLVRAVFVCNDYIEIQYNYAEQLPILTNPVRIENSSCESTNGGHILHTHELNNLIFYERYFCIRIAV

SEQ ID NO: 4737 - protein, 516 aa, Unknown
  Description of Unknown: Integrase B4738 sequence
  SM00857,IPR006118,G3DSA:1.10.10.2600,IPR036162,PS51737, G3DSA:3.40.50.1390,Coil,IPR006119,IPR038109,PF07508, SSF53041,IPR011109,PTHR30461,PS00397,PS51736, cd00338,PF00239
MSGKKKLAEDAEPLRTGAAYIRVSTDDQLEYSPESQLEEIKKYCSQHNIILPSEYIFVEEDGRSGRKSDNRYAFQNMIATAKSKPKPFEVIVLWKFSRFARNQDESTFYKSMLRKKLGIDVVSVSEPLIDGMYGRLIEMIIEWQDEFYSVNLSGEVRRSMLSRARKGLYNGKMPFGYTKVPGENPQIEEQEATVVRRVFDMYAAGNDITSIARDLNAHGLVTRSGKQFDQEGIIYMLDNPFYIGKIRYNMRVSSSTSTLRDPEEWIISDSYHEPIIDSATWELVQNRRTRSKQLKRRYEHPVSHTKHWLSGMIKCPICGKSLSHKEGYPRHQPNGKSYISGEGFQCLGYMKGLHSGSQFVSAKKVVGAVTSSLRGMLDSTSNISFDLVRTCAPTIELDQQRYQRELLSLDKKLNRCREAYINEVDTLEDYKRNKAMIEKRRGELLALLDGLTTAAAKPNPEDYKEQFLRQVKSVLDVLEDDVPNNLKAEALRSIIRDIVFYKNEDSFEFHYYLMID

SEQ ID NO: 4738 - protein, 516 aa, Unknown
  Description of Unknown: Integrase B4739 sequence
  PTHR30461:SF3,SM00857,G3DSA:1.10.10.2600,IPR036162,PF13408, PS51737,IPR025827,G3DSA:3.40.50.1390,IPR006119,IPR038109, PF07508,IPR011109,SSF53041,PTHR30461,PS51736, cd00338,PF00239
MQRAVIYARFSSDMQREESIDAQVRACKTYAKNKGYIVVDTYADEAKSGRDVTKRDAYNQMLADAMEDKFDIIIFHKIDRNSRNELNYFTFKDKLEKLGIRYEYAAQPIDALSPEGQMMETMMVGMAAYYSRNLAKETKKGLNENAYKALFNGGCPPLGYKIVDKKYVIDEQEAAAVRLIFELYLNGYGYAAICMELSAKGYTTKAGKAFAKNSLHDILCNEKYIGTYTFNKIPRKKGGRNSHAAERPEDFISIENAFPAIISKDDWALVRAKMDRNRHRAASYTAKEKYLLSGKVFCGHCGSAMVGHRIRKRYCYYGCTRKEQTPTSKCPQKMIRAEILEHWVLQILERVVFTVGGMRRIADAIVDAYEAEQKEQAGSQATLLQRKAVAEKRLNNLYKIFEEGNADEFDRQRLNQIKAELREINKSICETSVKPAKLLSKQKIAAILAAMKDEIFVKKNSYYVQQAVDLLVDHVTITDKVLKITLSTQNVCAYLVPRTRIAVSSDTWKISANLAA

SEQ ID NO: 4739 - protein, 516 aa, Unknown
  Description of Unknown: Integrase B4740 sequence
  PTHR30461:SF3,SM00857,G3DSA:1.10.10.2600,IPR036162,PF13408, PS51737,IPR025827,G3DSA:3.40.50.1390,IPR006119,IPR038109, PF07508,IPR011109,SSF53041,PTHR30461,PS51736, cd00338,PF00239
MNRAVIYARYSSDMQREESVEAQIRACKYYAQQNGIDIIGIYADRAKSGMYHSEKREEFQALLNAAPRKEYDIVLVHKLNRFGRAGVKALNDRDYLERLGIEIISVTERLENTPEGRLMLYVITGMNEYYSRNLAGEVLKGLRENAYKGITTGGTPALGYNLGADKKLVINEQEAAAVRLIFKMYISGAGYGEIIDELNSRGFRTKRGAKFGKNSIYDILRNERYTGRFTYGKTKTVNGHRSQHKKEKEYISIEGGCPAIISADEWERVQRLMDVKKHDAASGKAKELYILSGKLFCGHCGARMVGNSRVSRGERYLYYDCNAKLRKKTCTKHAVKKNEIEQAVIQKLNQLAFSDDLIERFVDEAYKAQDNEMPDISGKIADIDKKISNLVTAIESGADIGPIKQRMADLSAQKDALLSSNVPKGDFLTRDEIRSRFKKFLNIADLPPAQQKFIISEYVTRIDVFDSDGGGHFCRITLSNNTSVDTDVLGSSAPKGSICGCCFFPKLRGTSSRFHM

SEQ ID NO: 4740 - protein, 516 aa, Unknown
  Description of Unknown: Integrase B4741 sequence
  PTHR30461:SF3,SM00857,G3DSA:1.10.10.2600,IPR036162,PS51737, G3DSA:3.40.50.1390,IPR006119,IPR038109,PF07508,IPR011109, SSF53041,PTHR30461,Coil,PS51736,cd00338, PF00239
MSYCIYLRKSRKDLEAEQHGEGETLARHERALLSLAKKNNLIISNIYREVVSGETIAARPVMQQLLHEVEQNLWDGVLVMEVERLARGDTIDQGVVQRAFQYSNTLIITPSKTYDPANEFDEEYFEFGLFMSRREYKTIKRRMQNGRYAAISEGKWPYNSAPYGFRRVKLEKEKGWTLAFDENEAPVVRLIFSMFTGPERVGIRSITRTLNSYGTKPRNSKLWSESTVRGILSNVVYDQCVKIGERKVVRTVENGVLTTTRPRTSDYTIVSGRHPRLIDHDVFAEAQSYLGCGFPKPAGSNIIKNPLAGIIVCSECKKKMIRRPPSGTASRVPYDLMLCSTYDCPTIGSPLDLVEREVYNALSDWVEGYRLSGQMPSKSLIPEKEVLLESAQQTLDQLLRQKGTMYDLLEQGVYSTEVFLERSDSLQNRISEAESNVAQLKLELDKERQREANIEQFLPACEDLLSCYWDLSIPERNRLLKLLIESIEYKKLTKNKRGHLNEPNFELTIKPRIPRK

SEQ ID NO: 4741 - protein, 516 aa, Unknown
  Description of Unknown: Integrase B4742 sequence
  SM00857,G3DSA:1.10.10.2600,IPR036162,PF13408,PS51737, G3DSA:3.40.50.1390,IPR025827,IPR006119,IPR038109,PF07508, IPR011109,SSF53041,PTHR30461,Coil,PS51736, cd00338,PF00239
MKDAVIYARYSSDRQREESIEGQIRVCQDYAKRNGFNIINIYTDRALTGRSDKRPGFQMMIRDAATHTFQYVIVYKLNRFSRDRYDSANYKHKLKKQGVKLLSAMENISDDPAGILLESVIEGISEYYSAELSENVIRGMTQSALEGKWPGGNIPLGYKLDEENRLIIDEEKAPIVRAVFQMFLDGMSVPRIVQELNNKKYTTNAGKEFSRSRVYYILHNERYIGVFMWKDIRKDDLIPPIVSKDTFYLAQEKVRKMKKHPYRTSGKYLLSGKIFCATCGSKVTGTSGKSCMGAKYYYYACSHHHKSSRYPYCETKNIRADVLEDLIYSKTNEIISNKAAVQAIARQAVKLQGSTSASLEVQALENRISDVSKKVQNCVRAIESGIISDAVSVSLSENERILAALRDELAKEKLLQESGSLTEEKICYFFEKIGQKAKETEKYKNILLTSLVRAVFICNDYIEIQYNYAEQLPILTNPVRIENSSCESTNGGHILHTHELNNLIFFDKYFCIRIAV

SEQ ID NO: 4742 - protein, 516 aa, Unknown
  Description of Unknown: Integrase B4743 sequence
  PTHR30461:SF3,IPR036162,PS51737,IPR011109,PTHR30461, PS00397,PF00239,G3DSA:1.10.10.2600,IPR006119,SSF53041, cd00338,SM00857,IPR025827,IPR038109,PS51736, IPR006118,PF13408,G3DSA:3.40.50.1390,PF07508,Coil
MVKKVIRKSAESTDRIRTGAAYIRVSTDDQLEYSPESQLEEIKRYCLQHNILLPSEYIFVEEDGRSGRKSSNRYAFQNMIATAKTKPKPFDVIVLWKFSRFARNQDESTFYKSMLRKKLGIDVVSVSEPLIDGMYGRLIEMIIEWQDEFYSVNLSGEVRRSMLSRARKGLYNGKMPLGYTKAPNENPVIEEQEAAIVRKIFDMYATGSDINYITRDLNDHGYKTKTGNHFDQEGVIYILENPFYIGKVRYNMRESSATSTLRDPEEWIISDSFHEPIIDMDTWNIVQERREHSKKLMQRYEHPVSHTKHWLSGLVKCPVCGKSLSHKEGYPRKSTHGGSYISGEGFQCLGYMKGLHTGSQYISAKKLTSAVITSLHEVLESVTDVSFELVRTYEPTVELDRQRYQRELTSLDRKLERIREAYMNEIDTLEDYKRNKEMIEKRRADLEVLLSELTTAASGPENYKEQFLSRVQSVLDIIESDAPNDLKAEALRGIVRKIVFYKDTNTLEFHYYLMVE

SEQ ID NO: 4743 - protein, 516 aa, Unknown
  Description of Unknown: Integrase B4744 sequence
  PTHR30461:SF3,SM00857,IPR006118,G3DSA:1.10.10.2600,IPR036162, PS51737,G3DSA:3.40.50.1390,PS00397,IPR006119,IPR038109, PF07508,SSF53041,IPR011109,PTHR30461,Coil, PS51736,cd00338,PF00239
MVKKVIRKSAESTDRIRTGAAYIRVSTDDQLEYSPESQLEEIKRYCLQHNILLPSEYIFVEEDGRSGRKSSNRYAFQNMIATAKTKPKPFDVIVLWKFSRFARNQDESTFYKSMLRKKLGIDVVSVSEPLIDGMYGRLIEMIIEWQDEFYSVNLSGEVRRSMLSRARKGLYNGKMPLGYTKAPNENPVIEEQEAAIVRKIFDMYATGSDINYITRDLNDHGYKTKTGNHFDQEGVIYILENPFYIGKVRYNMRESSATSTLRDPEEWIISDSFHPPIIDQNTWDIVQERREHSKKLMQRYEHPVSHTKHWLSGLVKCPVCGKSLSHKEGYPRKSTHGGSYVSGEGFQCLGYMKGLHTGSQYISAKKLTGAVISSLHEVLESVTDVSFELVRTYEPTVELDRQRYQRELASLDRKLERIKEAYLNEIDTLEDYKRNKEMIEKRRADLEVLLSELTTAASGSENYKEQFLNRVHSVLDIIESDAPNDLKAEALRGIVRKIVFYKDTNTLEFHYYLMVE

SEQ ID NO: 4744 - protein, 516 aa, Unknown
  Description of Unknown: Integrase B4745 sequence
  PTHR30461:SF3,SM00857,G3DSA:1.10.10.2600,IPR036162,PF13408, PS51737,G3DSA:3.40.50.1390,IPR025827,IPR006119,IPR038109, PF07508,IPR011109,SSF53041,PF00239,PTHR30461, PS51736,Coil,cd00338
MARKKIKKGDGQRLVAYYRYSGGSGQTEQSIEGQRRDCEAYARLHGMTIQHEYIDRHISGKTDDRGAFQQMIADSDKGAFDYVICWKTDRFARNRYDSAVYKKRLRDNGVEILYAAESNISGSEGIIIEGLMEALAEYYSAELSEKMRRGMRESALKGRAISRCRALGLTTDSDKRFVIDPKTAPIVRFIFERYAAGDSSMSIVEQLNAKGLRTSQGNQFNKCSIPRIIQNEAYRGVYVSKAYNVRIEGAIPAIIDDELWERAQTMLKLNQQKRTKNAAKADYFLSGKLFCKECGSPMKGVSGHSSTNGEVYRYYACSNPECHKHNIPKDDLEGKVVQSICDHLLQPESMDALADAMIEVQKQDAVKPNAERLAVEENLADVRRRSKNILDAIENGTANPQLYARLDELTERENTLSYQLATLQNEKAIVFTKEQFLFLLEQFCIEPSERSEEYGRRLINTFVTNMEVSNSELFIYFNVSEETVNKTKNAPQKNFQKESSSEMRLVRVARIELTAS

SEQ ID NO: 4745 - protein, 516 aa, Unknown
  Description of Unknown: Integrase B4746 sequence
  IPR036162,PS51737,IPR011109,PTHR30461,PS00397, PF00239,G3DSA:1.10.10.2600,IPR006119,SSF53041,cd00338, SM00857,IPR025827,IPR038109,PS51736,IPR006118, PF13408,G3DSA:3.40.50.1390,PF07508,Coil
MAKKVMRKSAESTDRIRTGAAYIRVSTDDQLEYSPESQLEEIKRYCLQHNILLPSEYIFVEEDGRSGRKSSNRYAFQNMIAMAKTKPKPFDVIVLWKFSRFARNQDESTFYKSMLRKKLGIDVVSVSEPLIDGMYGRLIEMIIEWQDEFYSVNLSGEVRRSMLSRARKGLYNGKMPLGYTKAPNENPVIEEHEAAIIRKIFDMYASGSDINYITRDLNDHGYKTKTGKRFDQEGVIYILENPFYIGKVRYNMRESSATSTLRDPEEWIISDSHHPPIIDQNTWDIVQERRERSKKIMQRYEHPVSHTKHWLSGLVKCPICGKSLSHKEGYPRKAPNGSTYISGEGFQCLGYMKGLHTGSQYISAKKLTSAVITSLHEVLESVTDVSFELVRTYEPTVELDRQRYQRELTSLDRKLERIREAYMNEIDTLEDYKRNKEMIEKRRADLEVLLSELTTAASGPENYKEQFLSRVQSVLDIIESDAPNDLKAEALRGIVRKIVFYKDTNTLEFHYYLMVE

SEQ ID NO: 4746 - protein, 516 aa, Unknown
  Description of Unknown: Integrase B4747 sequence
  PTHR30461:SF3,SM00857,G3DSA:1.10.10.2600,IPR036162,PF13408, PS51737,IPR025827,G3DSA:3.40.50.1390,IPR006119,IPR038109, PF07508,IPR011109,SSF53041,PTHR30461,Coil, PS51736,cd00338,PF00239
MARKKKVSPGNRLVAYYRYSGGSQQTEQSIEGQRRDCEAYARQHGLTIVHEYIDRHISGRGVESRLAFQQMIADSSKHLFDLVICWKTDRFARNRYDSAVYKKKLRDNGVRILYAAESSVEGPEGIILEGLMESLAEYYSAELAQKMRRGMRESALKGRAINPSRPLGLTTDEHKRFIIDEKNAPTIRFIFEHYAAGESSASIVEQLNAAGLRTSKGNAFNKCSIPRIIQNEAYHGVYICKAYDVRIDGAIPAIIDDDLWKRAQKMLTLNKQHRAPHSFHADYLLSGKLFCGCCHSLMRGISGHNCRNDVYYYYACGNKADGGTCKKKNIPKDVAENLVVNAICENILRPDTLEDLADAIAAAQQTDVNQPDPERAMLEQNLADVHRKINNIIESIENGTASSRLSARLADLEQQESTLNYQLESLKEVHPPVLDRERILFLLEQFLISPNERTEDYNRRIIDTFVNRIEITDTEMLIYFNLSEASASEKQKNSQPNSCSTGNHLVRVARIELTAS

SEQ ID NO: 4747 - protein, 516 aa, Unknown
  Description of Unknown: Integrase B4748 sequence
  PTHR30461:SF3,cd00338,SM00857,G3DSA:1.10.10.2600,IPR036162, PF13408,PS51737,G3DSA:3.40.50.1390,IPR025827,IPR006119, IPR038109,PF07508,IPR011109,SSF53041,PTHR30461, PS51736,Coil,PF00239
MYAVYLRKSRADLEAEAMGQGETLARHRAALREYAQSHGMEIGAVYEEIVSGESIDARPKMKQLLREVEQGRWAGVLCMDIDRLARGDSSDQARVSNTFRISGTLIITPSKVYDQSRESDEEYVDFELFMARREYKAISRRIMRGRIASVKEGHFIGSTPPYGYDKVRVEKGRGYTLSPNSESDTVKQIYSMCNSGMGCNAIAGRLNMMGIEPRKGKSWSGASVQDILRNPVYCGKIRWQYRKEEKSLADGIVTTHRRENPDCIIAQGLHPALISEEEFNNAQQFLNSRRIPHKKENTELRNPLSGLVYCGLCGSMMTRLGTGSRNSSDILRCPNRDCNNVSAKLALVESALVEGVARWLNDYRVNVSRKPAADTAKAERTAAEKVRAELAKLDSQRERIYLFLEQGVYSAGEFRERMEALEKRRTQLSENLRQAEQAVSEAEGDRQLYARIIPRAERVMDIYAQSTPEEKNRLLKTIISRAEYIKTERNTRGNADRGNFTLNVIPLFPEIKTGAE

SEQ ID NO: 4748 - protein, 516 aa, Unknown
  Description of Unknown: Integrase B4749 sequence
  PTHR30461:SF3,IPR036162,PS51737,IPR011109,PTHR30461, PS00397,PF00239,G3DSA:1.10.10.2600,IPR006119,SSF53041, cd00338,SM00857,IPR025827,IPR038109,PS51736, IPR006118,PF13408,G3DSA:3.40.50.1390,PF07508,Coil
MAKKVIRKSAESTDRIRTGAAYIRVSTDDQLEYSPESQLEEIKRYCLQHNILLPSEYIFVEEDGRSGRKSSNRYAFQNMIATAKTKPKPFDVIVLWKFSRFARNQDESTFYKSMLRKKLGIDVVSVSEPLIDGMYGRLIEMIIEWQDEFYSVNLSGEVRRSMLSRARKGLYNGKMPLGYTKAPNENPVIEEQEAAIVRKIFDMYATGSDINYITRDLNDHGYKTKTGNHFDQEGVIYILENPFYIGKVRYNMRESSATSTLRDPEEWIISDSFHEPIIDMDTWNIVQERREHSKKLMQRYEHPVSHTKHWLSGLVKCPVCGKSLSHKEGYPRKSTHGGSYISGEGFQCLGYMKGLHTGSQYISAKKLTSAVITSLHEVLESVTDVSFELVRTYEPTVELDRQRYQRELTSLDRKLERIREAYMNEIDTLEDYKRNKEMIEKRRADLEVLLSELTTAASGPENYKEQFLSRVQSVLDIIESDAPNDLKAEALRGIVRKIVFYKDTNTLEFHYYLMVE

SEQ ID NO: 4749 - protein, 516 aa, Unknown
  Description of Unknown: Integrase B4750 sequence
  PTHR30461:SF3,SM00857,G3DSA:1.10.10.2600,IPR036162,PS51737, G3DSA:3.40.50.1390,IPR006119,IPR038109,PF07508,IPR011109, SSF53041,PTHR30461,Coil,PS51736,cd00338, PF00239
MSYCIYLRKSRKDLEAEQHGEGETLARHERALLSLAKKNNLIISNIYREVVSGETIAARPVMQQLLREVEQNLWDGVLVMEVERLARGDTIDQGVVQRAFQYSNTLIITPSKTYDPANEFDEEYFEFGLFMSRREYKTIKRRMQNGRYAAISEGKWPYNSAPYGFRRTKLEKEKGWTLAFDENEAPVVRLIFSMFTGPERVGIRSITRTLNSYGTKPRNSKLWSESTVRGILSNVVYDQCVKIGERKVVRTVENGVITTARPRTSDYTIVSGRHPRLINHDVFAEAQSYLGCGSPKPAGSNIIKNPLAGIIVCSECKKKMIRRPPSGTASRVPYDLMLCSTYDCPTIGSPLDLVEREVYNALSDWVEGYRLSGQMPSKSLIPEKEVLLESAQQTLDQLLRQKGTMYDLLEQGVYSTEVFLERSASLQSRISEAQSNVAQLKLELDKERQREANIEQFLPACEDLLSCYWDLSIPERNRLLKLLIESIEYKKLTKNKRGHLNEPNFELTIKPRIPRK

SEQ ID NO: 4750 - protein, 516 aa, Unknown
  Description of Unknown: Integrase B4751 sequence
  PTHR30461:SF3,SM00857,G3DSA:1.10.10.2600,IPR036162,PF13408, IPR025827,PS51737,G3DSA:3.40.50.1390,IPR006119,IPR038109, PF07508,IPR011109,SSF53041,PF00239,PTHR30461, PS51736,Coil,cd00338
MQQAVIYARYSPGPNQTEQSIEGQVRECTKYAELHDLRIVGTYIDRKISGKTDNRREFQRMIDDSEKHIFDVIILYHTDRFARNRYDSAIYKHKLKENGVELRYATTDIPKGPEGIILESIMEGWAEYYSAELSRKIKRGMRESALKCHSTGAGRCLGYRTAEDKSLVIEPEGAKAVQTVFDMYIKGKSHADICRYLNDCGFRTAQGKLFNKNSVTHIIRNKRYIGVYTYDDITIEDGIPAIISKDTFHLAQLEAARRKTAKRPKEPKAEYLLSGKAFCGHCQKPLVGVSGTGKSGNKWYYYYCQESRAKRGCTKKPVKRDWLEREVVKRTVAEVLQPEVIQHIAKKCYDLQMEYRQDNSDVLFYELKLKDVRKAIKNTMHAIESGVKTKTLPARLQELENEEEALEAELAIAKASDFVITADQIEFLLTQFAEPWECESEEEYHRRIIKCFVHKVFLFDDKLLIYYNVSRDGKTREQSEAELLEEALGEGFDKRSSGSTMQKRHPIWDGVFAWLR

SEQ ID NO: 4751 - protein, 516 aa, Unknown
  Description of Unknown: Integrase B4752 sequence
  PTHR30461:SF3,SM00857,G3DSA:1.10.10.2600,IPR036162,PS51737, G3DSA:3.40.50.1390,IPR006119,IPR038109,PF07508,IPR011109, SSF53041,PTHR30461,Coil,PS51736,cd00338, PF00239
MSYCIYLRKSRKDLEAEQHGEGETLARHERALLSLAKKNNLIISNIYREVVSGETIAARPVMQQLLHEVEQNLWDGVLVMEVERLARGDTIDQGVVQRAFQYSNTLIITPSKTYDPANEFDEEYFEFGLFMSRREYKTIKRRMQNGRYAAISEGKWPYNSAPYGFRRTKLEKEKGWTLAFDENEAPVVRLIFSMFTGPERVGIRSITRTLNSYGTKPRNSKLWSESTVRGILSNIVYDQCVKIGERKVVRTVENGVLTTTRPRTSDYTIVSGRHPRLIDHDVFAEAQSYLGCGSPKPAGSNIIKNPLAGIIVCSECKKKMIRRPPSGTASRVPYDLMLCSTYDCPTIGSPLDLVEREVYNALSDWVEGYRLSGQMPSKSLIPEKEVLLESAQQTLDQLLRQKGTMYDLLEQGVYSTEVFLERSDSLQNRISEAESNVAQLKLELDKERQREANIEQFLPACEDLLSCYWDLSIPERNRLLKLLIESIEYKKLTKNKRGHLNEPNFELTIKPRIPRK

SEQ ID NO: 4752 - protein, 516 aa, Unknown
  Description of Unknown: Integrase B4753 sequence
  PTHR30461:SF3,SM00857,IPR006118,G3DSA:1.10.10.2600,IPR036162, PS51737,G3DSA:3.40.50.1390,Coil,IPR006119,IPR038109, PF07508,SSF53041,IPR011109,PTHR30461,PS00397, PS51736,cd00338,PF00239
MAKKVIRKSAESTDRIRTGAAYIRVSTDDQLEYSPESQLEEIKRYCLQHNILLPSEYIFVEEDGRSGRKSSNRYAFQNMIATAKTKPKPFDVVVLWKFSRFARNQDESTFYKSMLRKKLGIDVVSVSEPLIDGMYGRLIEMIIEWQDEFYSVNLSGEVRRSMLSRARKGLYNGKMPLGYTKAPNENPVIEEQEAAIVRKIFDMYASGSDINYITRDLNDHGYKTKTGKRFDQEGVIYILENPFYIGKVRYNMRESSATSTLRDPEEWIISDSHHPPIIDQNTWDIVQERRERSKKIMQRYEHPVSHTKHWLSGLVKCPICGKSLSHKEGYPRKAPNGSTYISGEGFQCLGYIKGLHTGSQYISAKKLTCAVISSLHEVLESVTDVSFELVRTYEPTVELDRQRYQRELASLDRKLERIKEAYLNEIDTLEDYKRNKEMIEKRRADLEVLLSELTTAASGPENYKEQFLSRVQSVLDIIESDAPNDLKAEALRGIVRKIVFYKDTNTLEFHYYLMVE

SEQ ID NO: 4753 - protein, 516 aa, Unknown
  Description of Unknown: Integrase B4754 sequence
  PTHR30461:SF3,SM00857,G3DSA:1.10.10.2600,IPR036162,PF13408, PS51737,IPR025827,G3DSA:3.40.50.1390,IPR006119,IPR038109, PF07508,IPR011109,SSF53041,PTHR30461,Coil, PS51736,cd00338,PF00239
MARKKKVSPGNRLVAYYRYSGGSQQTEQSIEGQRRDCEAYARQHGLTIVHEYIDRHISGRGVESRLAFQQMIADSSKHLFDLVICWKTDRFARNRYDSAVYKKKLRDNGVRILYAAESSVEGPEGIILEGLMESLAEYYSAELAQKMRRGMRESALKGRAINPSRPLGLTTDEHKRFIIDEKNAPTIRFIFEHYAAGESSASIVEQLNAAGLRTSKGNAFNKCSIPRIIQNEAYHGVYICKAYDVRIDGAIPAIIDDDLWKRAQKMLTLNKQHRAPHSSHADYLLSGKLFCGCCHSLMRGISGHNCRNDVYYYYACGNKADGGTCKKKNIPKDVAENLVVNAICENILRPDTLEDLADAIAAAQQADVNQPDPERAMLEQNLADVHRKINNIIESIENGTASSRLSARLADLEQQESTLNYQLESLKEVHPPVLDRERILFLLEQFLISPNERTEDYNRRIIDTFVNRIDITDTEMLIYFNLSEASASEKQKNSQSNSCSTGNHLVRVARIELTAS

SEQ ID NO: 4754 - protein, 516 aa, Unknown
  Description of Unknown: Integrase B4755 sequence
  SM00857,G3DSA:1.10.10.2600,IPR036162,PS51737,G3DSA:3.40.50.1390, IPR006119,IPR038109,PF07508,IPR011109,SSF53041, PF00239,PTHR30461,PS51736,Coil,cd00338
MLENINTNMEYYAAYLRKSRKDAEAELQGQGETLIRHQKRLEEYAASVGIKISKFYKEVVSGETIASRPVMQQLLADVENGMWTGILVIEVERLARGNTLDQGIVSNAFQFSNTKIITPLKTYDPNNEYDEEYFEFGLFMSRREYKKINQRLHAGILSSVNEGKFIASVAPYGYNKYKLKSKGYSLEINPEESKMIRLIFQLYVDGKGLSYISNKLKELGFKPRKSLTFSKSTITNILTNPVYIGKIQYIDKATTKKVVNSKIVRVPNENKNIIYVNGLHEPIIDLNTWNKVQNIRENNLSNRTKVDYTLKNPMSSILKCGLCGKSLERVTYSSRDDVRILCRRCKENVGSNIEIVEDRLLQSLQLLLNEYKISLTNNDNSDIDELLALNQQSINSYCEELEKTKMQLTKTYDLLEQDIYTKEVFVERSNILKNQIKEITQNITNLENERKKILNNKNSKEILVPKIENVIDAYYETNNIELKNQLLKSVIEKVTYEKINPQSKDDFKLTIYPKIY

SEQ ID NO: 4755 - protein, 516 aa, Unknown
  Description of Unknown: Integrase B4756 sequence
  PTHR30461:SF3,cd00338,SM00857,IPR036162,PF13408, PS51737,G3DSA:3.40.50.1390,IPR025827,IPR006119,PF07508, IPR011109,SSF53041,PTHR30461,PS51736, Coil,PF00239
MKAIYVRQSLDKKDSLSIDAQIEDCINLCKRSGWNDYKVYKDKGWSAKNLDRPAFRQLNQDVQNGLIDGVICYKIDRISRSIRDFVNLIVDYQDLGVHFISFADNINTAAPGGMMMATLFVSLAQMEREAIITRVTDNYYYRCELGFWGGGPAPYGFRLVKTTENGQKHTILEPVPEEAEVIRTFFAWYLEPGATVRSIMNRAHLARMQTRSGSDWTSRVLSDMLSKPLYAPNSMDIYNFYASQGVRVKISPEQCDGKQSLNIFGMRDRNSAHPKRSRPVSEMTLAIAKHKPIVDSDTYLKVQYKKKSRLAVTPRAGTSRTAVLSGLVKCGYCGRAMSPSGSKNGRYFTCSGRRNYAKGVCQGKSVKMDFLDDYVLNDLADFISQPEIKSMFKDGKAQRIPSSEQAKINEYKQRIATIDIDIQKFLDACLTSGDVAVKYLNERIDLLDTEKQNLQAEILAVQNKSNRKLELEGLDINSAPTALAGGEFDTKKYLCNFFIEQIIFYDRDNVQIRYKI

SEQ ID NO: 4756 - protein, 516 aa, Unknown
  Description of Unknown: Integrase B4757 sequence
  PTHR30461:SF3,SM00857,G3DSA:1.10.10.2600,IPR036162,PF13408, PS51737,IPR025827,G3DSA:3.40.50.1390,IPR006119,IPR038109, PF07508,IPR011109,SSF53041,PTHR30461,Coil, PS51736,cd00338,PF00239
MARKKKVSPGNRLVAYYRYSGGSQQTEQSIEGQRRDCEAYARQHGLTIVHEYIDRHISGRGVESRLAFQQMIADSSKHLFDLVICWKTDRFARNRYDSAVYKKKLRDNGVRILYAAESSVEGPEGIILEGLMESLAEYYSAELAQKMRRGMRESALKGRAINPSRPLGLTTDEHKRFIIDEKNAPTIRFIFEHYAAGESSASIVEQLNAAGLRTSKGNAFNKCSIPRIIQNEAYHGVYICKAYDVRIDGAIPAIIDDDLWKRAQKMLTLNKQHRAPHSFHADYLLSGKLFCGCCHSLMRGISGHNCRNDVYYYYACGNKADGGTCKKKNIPKDVAENLVVNAICENILRPDTLEDLADAIAAAQQADVNQPDLERAMLEQNLADVHRKINNIIESIENGTASSRLSARLADLEQQESTLNYQLESLKEVHPPVLDRERILFLLEQFLISPNERTEDYNRRIIDTFVNRIEITDTEMLIYFNLSEASASEKQKNSQPNSCSTGNHLVRVARIELTAS

SEQ ID NO: 4757 - protein, 516 aa, Unknown
  Description of Unknown: Integrase B4758 sequence
  PTHR30461:SF3,SM00857,G3DSA:1.10.10.2600,IPR036162,PS51737, G3DSA:3.40.50.1390,IPR006119,IPR038109,PF07508,IPR011109, SSF53041,PTHR30461,Coil,PS51736,cd00338, PF00239
MSYCIYLRKSRKDLEAEQHGEGETLARHERALLSLAKKNNLIISSIYREVVSGETIAARPVMQQLLHEVEQNLWDGVLVMEVERLARGDTIDQGVVQRAFQYSSTLIITPSKTYDPANEFDEEYFEFGLFMSRREYKTIKRRMQNGRYAAISEGKWPYNSAPYGFRRTKLEKEKGWTLAFDENEAPVVRLIFSMFTGPERVGIRSITRTLNSYGTKPRNSKLWSESTVRGILSNVVYDQCVKIGERKVVRTVENGVLTTTRPRTSDYTIVSGRHPRLIDHDVFAEAQSYLGCGSPKPAGSNIIKNPLAGIIVCSECKKKMIRRPPSGTASRVPYDLMLCSTYDCPTIGSPLDLVEREVYNALSDWVEGYRLSGQMPSKSLIPEKEVLLESAQQTLDQLLRQKGTMYDLLEQGVYSTEVFLERSSSLQNRISEAESNVAQLKLELDKERQREANIEQFLPACEDLLSCYWDLSIPERNRLLKLLIESIEYKKLTKNKRGHLNEPNFELTIKPRIPRK

SEQ ID NO: 4758 - protein, 516 aa, Unknown
  Description of Unknown: Integrase B4759 sequence
  PTHR30461:SF3,SM00857,G3DSA:1.10.10.2600,IPR036162,PS51737, G3DSA:3.40.50.1390,IPR006119,IPR038109,PF07508,IPR011109, SSF53041,PTHR30461,Coil,PS51736,cd00338, PF00239
MSYCIYLRKSRKDLEAEQHGEGETLARHERALLALAKKNNLIISNIYREVVSGETIAARPVMQQLLREVEQNLWDGVLVMEVERLARGDTIDQGVVQRAFQYSNTLIITPSKTYDPANEFDEEYFEFGLFMSRREYKTIKRRMQNGRYAAISEGKWPYNSAPYGFRRVKLEKEKGWTLAFDENEAPVVRLIFSMFTGPERVGIRSITRTLNSYGTKPRNSKLWSESTVRGILSNVVYDQCVKIGERKVVRTVENGVLTTTRPRTSDYTIVSGRHPCLIDHDVFAEAQSYLGCGSPKPAGSNIIKNPLAGIIVCSECKKKMIRRPPSGTASRVPYDLMLCSTYDCPTIGSPLDLVEREVYNALSDWVEGYRLSGQTPSKSLIPEKEVLLESAQQTLDQLLRQKGTMYDLLEQGVYSTEVFLERSASLQSRISEAQSNVAQLKLELDKERQREANIEQFLPACEDLLSCYWDLSIPERNRLLKLLIESIEYKKLTKNKRGHLNEPNFELTIKPRIPRK

SEQ ID NO: 4759 - protein, 516 aa, Unknown
  Description of Unknown: Integrase B4760 sequence
  PTHR30461:SF3,SM00857,G3DSA:1.10.10.2600,IPR036162,PS51737, G3DSA:3.40.50.1390,IPR006119,IPR038109,PF07508,IPR011109, SSF53041,PTHR30461,Coil,PS51736,cd00338, PF00239
MSYCIYLRKSRKDLEAEQHGEGETLARHERALLSLAKKNNLIISNIYREVVSGETIAARPVMQQLLREVEQNLWDGVLVMEVERLARGDTIDQGVVQRAFQYSNTLIITPSKTYDPANEFDEEYFEFGLFMSRREYKTIKRRMQNGRYAAISEGKWPYNSAPYGFRRTKLEKEKGWTLAFDENEAPVVRLIFSMFTGPERVGIRSITRTLNSYGTKPRNSKLWSESTVRGILSNVVYDQCVKIGERKVVRTVENGILTTTRPRTSDYTIVSGRHPRLIDHDVFAEAQSYLGCGSPKPAGSNIIKNPLAGIIVCSECKKKMIRRPPSGTASRVPYDLMLCSTYDCPTIGSPLDLVEREVYNALSDWVEGYRLSGQTPSKSLIPEKEVLLESAQQTLDQLLRQKGTMYDLLEQGVYSTEVFLERSASLQSRISEAQSNVAQLKLELDKERQREANIEQFLPACEDLLSCYWDLSIPERNRLLKLLIESIEYKKLTKNKRGHLNEPNFELTIKPRIPRK

SEQ ID NO: 4760 - protein, 516 aa, Unknown
  Description of Unknown: Integrase B4761 sequence
  PTHR30461:SF3,cd00338,SM00857,IPR036162,PF13408, PS51737,G3DSA:3.40.50.1390,IPR025827,IPR006119,PF07508, IPR011109,SSF53041,PTHR30461,PS51736,Coil, PF00239
MKAIYVRQSLDKKDSLSIDAQIEDCINLCKRSGWNDYKVYKDKGWSAKNLDRPAFRQLNQDVQNGLIDGVICYKIDRISRSIRDFVNLIVDYQDLGVHFISFADNINTAAPGGMMMATLFVSLAQMEREAIITRVTDNYYYRCELGFWGGGPAPYGFRLAKTTENGQKHTILEPVPEEAEVIRTFFAWYLEPGATVRSIMNRAHLAGMQTRSGSDWTSRVLSDMLSKPLYAPNSMDIYNFYASQGVRVKISPEQCDGKQSLNIFGMRDRNSAHPKRSRPVSEMTLAIAKHKPIVDSATYLKVQYKKKSRLAVTPRAGTSRTAVLSGLVKCGYCGRAMSPSGAKNGRYFTCSGRRNYAKGVCQGKSVKMDFLDDYVLNDLADFISQPEIKSMFKDGKAQRIPSSEQAKINEYKQRIATIDIDIQKLLDACLTSGDVAVKYLNERIDLLDTEKQNLQAEILAIQNKSNRKLELEGLDINSAPTALAGGEFDTKKYLCNFFIEQIIFYDRDNVQIRYKM

SEQ ID NO: 4761 - protein, 516 aa, Unknown
  Description of Unknown: Integrase B4762 sequence
  PTHR30461:SF3,IPR036162,PS51737,IPR011109,PTHR30461, PS00397,PF00239,G3DSA:1.10.10.2600,IPR006119,SSF53041, cd00338,SM00857,IPR025827,IPR038109,PS51736, IPR006118,PF13408,G3DSA:3.40.50.1390,PF07508,Coil
MVKKVIRKSAESTDRIRTGAAYIRVSTDDQLEYSPESQLEEIKRYCLQHNILLPSEYIFVEEDGRSGRKSSNRYAFQNMIATAKTKPKPFDVIVLWKFSRFARNQDESTFYKSMLRKKLGIDVVSVSEPLIDGMYGRLIEMIIEWQDEFYSVNLSGEVRRSMLSRARKGLYNGKMPLGYTKAPNENPVIEEQAAAIVRKIFDMYASGSDINYITRDLNDHGYKTKTGKRFDQEGVIYILENPFYIGKVRYNMRESSATSTLRDPEEWIISDSHHPPIIDQNTWDIVQERRKRSKKIMQRYEHPVSHTKHWLSGLVKCPICGKSLSHKEGYPRKAPNGSTYISGEGFQCLGYMKGLHTGSQYISTKKLTDAVISSLHEVLESVTDVSFELVRTYEPTVELDRQRYQRELASLDRKLERIKEAYLNEIDTLEDYKRNKEMIEKRRADLEALLSELTTATSGPENYKEQFLSRVQSVLDIIESDAPNDLKAEALRGIVRKIVFYKDTNTLEFHYYLMVE

SEQ ID NO: 4762 - protein, 516 aa, Unknown
  Description of Unknown: Integrase B4763 sequence
  PTHR30461:SF3,SM00857,G3DSA:1.10.10.2600,IPR036162,PS51737, G3DSA:3.40.50.1390,IPR006119,IPR038109,PF07508,IPR011109, SSF53041,PF00239,PTHR30461,PS51736,Coil, cd00338
MSYCIYLRKSRKDLEAEQHGEGETLARHERALLSLAKKNNLIISNIYREVVSGETIAARPVMQQLLHEVEQNLWHGVLVMEVERLARGDTIDQGVVQRAFQYSNTLIITPSKTYDPANEFDEEYFEFGLFMSRREYKTIKRRMQNGRYAAISEGKWPYNSAPYGFRRTKLEKEKGWTLAFDENEAPVVRLIFSMFTGPERVGIRSITRTLNSYGTKPRNSKLWSESTVRGILSNVVYDQCVKIGERKVVRTVENGVITTARPRTSDYTIVSGRHPRLIDHDVFAEAQSYLGCGSPKPAGSNIIKNPLAGIIVCSECKKKMIRRPPSGTASRVPYDLMLCSTYDCPTIGSPLDLIEREVYNALSDWVEGYRLSGQTPSKSLIPEKEVLLESAQQTLDQLLRQKGAMYDLLEQGVYSTEVFLERSDSLQNRISEAESNVAQLKLELDKERQREANIEQFLPACEDLLSCYWDLSIPERNRLLKLLIESIEYKKLTKNKRGHLNEPNFELTIKPRIPRK

SEQ ID NO: 4763 - protein, 516 aa, Unknown
  Description of Unknown: Integrase B4764 sequence
  PTHR30461:SF3,cd00338,SM00857,G3DSA:1.10.10.2600,IPR036162, PF13408,IPR025827,G3DSA:3.40.50.1390,PS51737,IPR006119, IPR038109,PF07508,SSF53041,IPR011109,PTHR30461, PS51736,Coil,PF00239
MKAEEVLIYLRKSRSDSPDETVEEVLARHERQLQEYAVRSYGLPVPEQNIYREVVSGETIEDRPEVQKVLARIENPDIKGVLIIEPQRLSRGDWEDGGRILSSFRYSYTLIITPHKTYDLQDKFDYKFFKMELSQGNDYLEYTKEILNRGRIASVREGNFIGSIAPFGYKKAVIDKSHTLVPDPQEAPGVEMIFNLFVHDNIGWAKIGYALDNAGIKPRKSKFWNPSQVKTILVNPVYTGKVTWNHYKTITIVENGKLKKCRPTSDDYLIAEGKHQALISEDLFQKAQEKLGRNTREPFSRELVNPLAGLLYCKNCGTAMTRRTYRHSDGSVRSAPRLLCNNQVRCGTKSSSFDDVYSALISALREMISDFSFKLSHDQSRSLFEIQTNIINNLNNELENLEKKQDELYDLLEDGIYSKEVFLKRNEKLAESRSELEQKIKKAKENTARPINYQERIIKFEQVLQALQDDDIPPKEKNRLLKQIIQRIDYSRDSTNRTRWDTSKPTLEIHLKDFQN

SEQ ID NO: 4764 - protein, 516 aa, Unknown
  Description of Unknown: Integrase B4765 sequence
  SM00857,G3DSA:1.10.10.2600,IPR036162,PF13408,PS51737, G3DSA:3.40.50.1390,IPR025827,IPR006119,IPR038109,PF07508, IPR011109,SSF53041,PTHR30461,Coil,PS51736, cd00338,PF00239
MKDAVIYARYSSDRQREESIEGQIRVCQDYAKRNGFNIINIYTDRALTGRSDKRPGFQMMIRDAATHTFQYVIVYKLNRFSRDRYDSANYKHKLKKQGVKLLSAMENISDDPAGILLESVIEGISEYYSAELSENVIRGMTQSALEGKWPGGNIPLGYKLDEENRLIIDEEKAPIVRAVFQMFLDGMSVPRIVQELNDKKYTTNAGKEFSRSRVYYILHNERYIGVFMWKDIRKDDLIPPIVSKDTFYLAQAKVKKMKKHPYRTNGKYLLSGKIFCATCGSKVTGTSGKSCMGAKYYYYACSHHHKSSRYPYCETKNIRADVLEELIYSKTNEIISNKAAVQAIARQAVKLQGSTSASLEVQALENRISDVSKKVQNCVRAIESGIISDAVSVSLSENERILTALRDELAKAKLLQESGSLTEEKICYFFEKIGQKAKETEKYKNILLTSLVRAVFICNEYIEIQYNYAEQLPILTNPVRIENSSCESTNGGRILHIYELNKLIFHERYFCIRIAV

SEQ ID NO: 4765 - protein, 516 aa, Unknown
  Description of Unknown: Integrase B4766 sequence
  PTHR30461:SF3,SM00857,G3DSA:1.10.10.2600,IPR036162,PS51737, G3DSA:3.40.50.1390,IPR006119,IPR038109,PF07508,IPR011109, SSF53041,PTHR30461,Coil,PS51736,cd00338, PF00239
MSYCIYLRKSRKDLEAEQHGEGETLARHERALLSLAKKNNLIISNIYREVVSGETIAARPVMQQLLHEVEQNLWDGVLVMEVERLARGDTIDQGVVQRAFQYSNTLIITPSKTYDPANEFDEEYFEFGLFMSRREYKTIKRRMQNGRYAAISEGKWPYNSAPYGFRRVKLEKEKGWTLAFDENEAPVVRLIFSMFTGPERVGIRSITRTLNSYGTKPRNSKLWSESTVRGILSNVVYDQCVKIGERKVVRTVENGVLTTARPRTSDYTIVSGRHPRLIDHDVFAEAQSYLGCGSPKPAGSNIIKNPLAGIIVCSECKKKMIRRPPSGTASRVPYDLMLCSTYDCPTIGSPLDLVEREVYNALSDWVEGYRLSGQMPSKSLIPEKEVLLESAQQTLDQLLRQKGTMYDLLEQGVYSTEVFLERSDSLQNRISEAESNVAQLKLELDKERQREANIEQFLPACEDLLSCYWDLSIPERNRLLKLLIESIEYKKLTKNKRGHLNEPNFELTIKPRIPRK

SEQ ID NO: 4766 - protein, 516 aa, Unknown
  Description of Unknown: Integrase B4767 sequence
  PTHR30461:SF3,SM00857,G3DSA:1.10.10.2600,IPR036162,PS51737, G3DSA:3.40.50.1390,IPR006119,IPR038109,PF07508,IPR011109, SSF53041,PTHR30461,Coil,PS51736,cd00338, PF00239
MSYCIYLRKSRKDLEAEQHGEGETLARHERALLSLAKKNNLIISNIYREVVSGETIAARPVMQQLLHEVEQNLWHGVLVMEVERLARGDTIDQGVVQRAFQYSNTLIITPSKTYDPANEFDEEYFEFGLFMSRREYKTIKRRMQNGRYAAISEGKWPYNSAPYGFRRTKLEKEKGWTLAFDENEAPVVRLIFSMFTGPERVGIRSITRTLNSYGTKPRNSKLWSESTVRGILSNVVYDQCVKIGERKVVRTIENGVLTTARPRTNDYTIVSGRHPRLIDHDVFAEAQSYLGCGSPKPAGSNIIKNPLAGIIICSECKKKMIRRPPSGTASRVPYDLMLCSTYDCPTIGSPLDLVEREVYNALSDWVEGYRLSGQMPSKSLIPEKEVLLESAQQTLDQLLRQKGTMYDLLEQGVYSTEVFLERSDSLQNRISEAESNVAQLKLELDKERQREANIEQFLPACEDLLSCYWDLSIPERNRLLKLLIESIEYKKLTKNKRGHLNEPNFELTIKPRIPRK

SEQ ID NO: 4767 - protein, 516 aa, Unknown
  Description of Unknown: Integrase B4768 sequence
  PTHR30461:SF3,SM00857,G3DSA:1.10.10.2600,IPR036162,PF13408, IPR025827,G3DSA:3.40.50.1390,PS51737,IPR006119,IPR038109, PF07508,SSF53041,IPR011109,PTHR30461,Coil, PS51736,cd00338,PF00239
MKAVIYARYSSHKQNEESIEGQLRECYQFAEKNGFTVTHEYIDRAISGKTADRPSFQELIADSSKGKFEAVIMYTLDRFARNRYDSAMYKAKLKKNGVKLYYAKQPMPDTPEGIILESVLEGYAEYYSENLSRGVKRGMHEVALQGRVTGKAPLGYVADENKKYQIDPETAQAVKYIFQMYSEGITQREISLYLNSHGYRTATGKKFGKSSYHSILTNEKYMGIYRYGDVVIENGIPPIISKELFTKVQERMRCENHKGARNKAKETYLLSGKLYCGHCGKPMIGESGTSRHGNIYRYYKCSCRKANPMSCDKKPEKKEPLEDLVVRKTITRVFTDENIEIISDKVIDLLKEDLEQVSHVKQLENTLEETKNKIQNILSAIEQGIIVKSTLERLHELEKEKDEIESNLSIEKSRYSNLPTKNQIMFYLYSLKNGNVDNGHFRRQLVRSIINSIFVYDNPDGGKKIVVNFNLLNNEIDTLSLSDSDMNLLGAPIPTNPNIFVNKDWFTIVFDIKEIG

SEQ ID NO: 4768 - protein, 516 aa, Unknown
  Description of Unknown: Integrase B4769 sequence
  PTHR30461:SF3,SM00857,G3DSA:1.10.10.2600,IPR036162,PF13408, PS51737,IPR025827,G3DSA:3.40.50.1390,IPR006119,IPR038109, PF07508,IPR011109,SSF53041,PTHR30461,PS51736, cd00338,PF00239
MNRAVIYARYSSDMQREESVEAQIRACKYYAQQNGIDIIGIYADRAKSGMYHSEKREEFQALLNAAPRKEYDIVLVHKLNRFGRAGVKALNDRDYLERIGIEIISVTERLENTPEGRLMLYVITGMNEYYSRNLAGEVLKGLRENAYKGITTGGTPALGYNLGADKKLVINEQEAAAVRLIFKMYISGAGYGEIIDELNSRGFRTKRGAKFGKNSIYDILRNERYTGRFTYGKTKTVNGHRSQHKKEKEYISIEGGCPAIISADEWERVQRLMDVKKHDAASGKAKELYILSGKLFCGHCGARMVGNSRVSRGERYLYYDCNAKLRKKTCTKHAVKKNEIEQAVIQKLNQLAFSDDLIERFVDEAYKAQDNEMPDISGKIADIDKKISNLVTAIESGADIGPIKQRMADLSAQKDALLSSNVPKGDFLTRDEIRSRFKKFLNIADLPPAQQKFIISEYVTRIEVFDYDGGGHFCRITLSNNTSVDTDVLGSSAPKGSICGCCFFPKSRGTSSRFHM

SEQ ID NO: 4769 - protein, 516 aa, Unknown
  Description of Unknown: Integrase B4770 sequence
  PTHR30461:SF3,SM00857,G3DSA:1.10.10.2600,IPR036162,PS51737, G3DSA:3.40.50.1390,IPR006119,IPR038109,PF07508,IPR011109, SSF53041,PTHR30461,Coil,PS51736,cd00338, PF00239
MSYCIYLRKSRKDLEAEQHGEGETLARHERALLSLAKKNNLIISNIYREVVSGETIAARPVMQQLLHEVEQNLWDGVLVMEVERLARGDTIDQGVVQRAFQYSNTLIITPSKTYDPANEFDEEYFEFGLFMSRREYKTIKRRMQNGRYAAISEGKWPYNSAPYGFRRVKLEKEKGWTLAFDENEAPVVRLIFSMFTGPERVGIRSITRTLNSYGTKPRNSKLWSESTVRGILSNVVYDQCVKIGERKVVRTVENGVLTTARPRTSDYTIVSGRHPRLIDHDVFAEAQSYLGCGSPKPAGSNIIKNPLAGIIVCSECKKKMIRRPPSGTASRVPYDLMLCSTYDCPTIGSPLDLVEREVYNALSDWVEGYRLSGQMPSKSLIPEKEVLLESAQQTLDQLLRQKGTMYDLLEQGVYSTEVFLERSDSLQNRISEAESNVTQLKLELDKERQREANIEQFLPACEDLLSCYWDLSIPERNRLLKLLIESIEYKKLTKNKRGHLNEPNFELTIKPRIPRK

SEQ ID NO: 4770 - protein, 516 aa, Unknown
  Description of Unknown: Integrase B4771 sequence
  PTHR30461:SF3,SM00857,G3DSA:1.10.10.2600,IPR036162,PF13408, PS51737,IPR025827,G3DSA:3.40.50.1390,IPR006119,IPR038109, PF07508,IPR011109,SSF53041,PTHR30461,PS51736, cd00338,PF00239
MQRAVIYARFSSDMQREESIDAQVRACKAYAKNKGYIVVDTYADEAKSGRDVTKRDAYNQMLADAMEDKFDIIIFHKIDRNSRNELNYFTFKDKLEKLGIRYEYAAQPIDALSPEGQMMETMMVGMAAYYSRNLAKETKKGLNENAYKALFNGGCPPLGYKIVDKKYVIDEQEAAAVRLIFELYLNGYGYAAICRELSAKGYTTKAGKAFAKNSLHDILCNEKYIGTYTFNKIPRKKGGRNSHAAERPEDFISIENAFPAIISKDDWALVRAKMDRNRHRAASYTAKEKYLLSGKVFCGHCGSAMVGHRIRKRYCYYGCTRKEQTPTSKCPQKMIRAEVLEHWVLQILERVVFTVGGMRRIADAIVDAYEAEQKEQAGSQATLLQRKAVAEKKLNNLYKIFEEGNADEFDRQRLNQIKAELREINKSICETSVKPAKLLSKQKIAAILAAMKDEIFVKKNSYYVQQAVDLLVDHVTITDKVLKITLSTQNVCAYLVPRNRNGMSVYTFTIAINLAA

SEQ ID NO: 4771 - protein, 516 aa, Unknown
  Description of Unknown: Integrase B4772 sequence
  PTHR30461:SF3,SM00857,G3DSA:1.10.10.2600,IPR036162,PF13408, PS51737,IPR025827,G3DSA:3.40.50.1390,IPR006119,IPR038109, PF07508,IPR011109,SSF53041,PTHR30461,PS51736, cd00338,PF00239
MNRAVIYARYSSDMQREESVEAQIRACKYYAQQNGIDIIGIYADRAKSGMYHSEKREEFQALLNAAPRKEYDIVLVHKLNRFGRAGVKALNDRDYLERLGIEIISVTERLENTPEGRLMLYVITGMNEYYSRNLAGEVLKGLRENAYKGITTGGTPALGYNLGADKKLVINEQEAAAVRLIFKMYISGAGYGEIIDELNSRGFRTKRGAKFGKNSIYDILRNERYTGRFTYGKTKTVNGHRSQHKKEKEYISIEGGCPAIISADEWERVQRLMDVKKHDATSGKAKELYILSGKLFCGHCGARMVGNSRVSRGERYLYYDCNAKLRKKTCTKHAVKKNEIEQAVIQKLNQLAFSDDLIERFVDEAYKAQDNEMPDISGKIADIDKKISNLVTAIESGADIGPIKQRMADLSAQKDALLSSNVPKGDFLTRDEIRSRFKKFLNIADLPPAQQKFIISEYVTRIEVFDYDGGGHFCRITLSNNTSVDTDVLGSSAPKGSICGCCFFPKLRGTSSRFHM

SEQ ID NO: 4772 - protein, 516 aa, Unknown
  Description of Unknown: Integrase B4773 sequence
  PTHR30461:SF3,SM00857,G3DSA:1.10.10.2600,IPR036162,PF13408, PS51737,IPR025827,G3DSA:3.40.50.1390,IPR006119,IPR038109, PF07508,SSF53041,IPR011109,PF00239,PTHR30461, PS51736,Coil,cd00338
MKACLYLRYSSSSQTEQSIEGQQRVCLDYCKRQGITVVATYIDRATSASKHTEKRHEFLRMIKDAEKGLFDAVIVYKLDRFARNRYDSANYKYRLKKVGVRLISATENLTDSPESIILESVLEGMAEFYSAELAQKVSRGMQESAYKCQVTGGTIPLGYKIENKHFVIDPRTAPIVQEAFRLYDEGKSISMISEIFNNKGYRTTRGYAFNKNSFKSMFRNEKYIGVYQYKEHRVEGGVPAIVDKALFDRVQEKLKLTASAPARGKAKVDYLLSGKLFCGHCGEQMNGDTGTNAQGVTYNYYSCYGHKQHRCQKKSIRKELIEDVVVQDALTLLTPDIMNLIADATMQEYYKEIQIEGKIPALEEHLQELDAALKNITAAIERGVVPETLLNRMVELEKEKKSCLKELEYEKQKKDAITKQDVLEFLTRIAQGNIKTEAAKKRIINLFVNSVTLWDEPDGWFKITTAYNVTDIPSKTYRIKSDTGKGSDLERNGGPLGVNPNFIIFNLLLIQTKRHR

SEQ ID NO: 4773 - protein, 516 aa, Unknown
  Description of Unknown: Integrase B4774 sequence
  IPR036162,PS51737,IPR011109,PTHR30461,PS00397, PF00239,G3DSA:1.10.10.2600,IPR006119,SSF53041,cd00338, SM00857,IPR025827,IPR038109,PS51736,IPR006118, PF13408,G3DSA:3.40.50.1390,PF07508,Coil
MSKKVMRKSTESTDRIRTGAAYIRVSTDDQLEYSPESQLEEIKKYCLQHNILLPSEYIFVEEDGRSGRKSSNRYAFQNMIAMAKTKPKPFDVIVLWKFSRFARNQDESTFYKSMLRKKLGIDVVSVSEPLIDGMYGRLIEMIIEWQDEFYSVNLSGEVRRSMLSRARKGLYNGKMPLGYTKAPNENPVIEEQEAAIVRKIFDMYATGSDINYITRDLNDHGYKTKTGNHFDQEGVIYILENPFYIGKVRYNMRESSATSTLRDPEEWIISDSFHEPIIDMDTWNIVQERREHSKKLMQRYEHPVSHTKHWLSGLVKCPVCGKSLSHKEGYPRKSTHGGSYISGEGFQCLGYMKGLHTGSQYISAKKLTSAVITSLHEVLENVTDVSFELVRTYEPTIELDRQRYQRELASLDRKLERIREAYMNEIDTLEDYKRNKEMIEKRRADLEALLDDMTTAASGPENYKEQFLNRVQSVLDIIESDAPNDLKAEALRGIVRKIVFYKDTNTLEFHYYLMVE

SEQ ID NO: 4774 - protein, 516 aa, Unknown
  Description of Unknown: Integrase B4775 sequence
  cd00338,SM00857,G3DSA:1.10.10.2600,IPR036162,PF13408, PS51737,G3DSA:3.40.50.1390,IPR025827,IPR006119,IPR038109, PF07508,IPR011109,SSF53041,PTHR30461,PS51736, Coil,PF00239
MKDAVIYARYSSDRQREESIEGQIRVCQDYAKRNGFHIINIYTDRALTGRSDKRPGFQMMIRDAATHTFQYVIVYKLNRFSRDRYDSANYKHKLKKQGVKLLSAMENISDDPAGILLESVIEGISEYYSAELSENVIRGMTQSALEGKWPGGNIPLGYKLDKENRLIIDEEKAPIVRAVFQMFLDGMSVPRIVQELNNKKYTTNAGKEFSRSRVYYILHNERYIGVFMWKDIRKDDLIPPIVSKDTFYLAQAKVKKMKKHPYRTNGKYLLSGKIFCAACGSKVAGTSGKSCMGAKYYYYACSHHHKSSRYPYCETKNIRADVLEDLIYSKTNEIISNKAAVQAIARQAVKLQGSTSASLEVQALENRISDVSKKVQNCVRAIESGIISDAVSVSLSENERILAALKDELAKAKLLQESGSLTEEKICYFFEKIGQKAKETEKYKNILLTSLVRAVFICNDYIEIQYNYAEQLPILTNPVRIENSSCESTNGGHILHTHELNNLIFYERYFCIRIAV

SEQ ID NO: 4775 - protein, 516 aa, Unknown
  Description of Unknown: Integrase B4776 sequence
  PTHR30461:SF3,SM00857,G3DSA:1.10.10.2600,IPR036162,PF13408, IPR025827,PS51737,G3DSA:3.40.50.1390,IPR006119,IPR038109, PF07508,IPR011109,SSF53041,PF00239,PTHR30461, PS51736,Coil,cd00338
MARKKKVSPGNRLVAYYRYSGGSQQTEQSIEGQRRDCEAYARQHGLTIVHEYIDRHISGRGVESRLAFQQMIADSSKHLFDLVICWKTDRFARNRYDSAVYKKKLRDNGVRILYAAESSVEGPEGIILEGLMESLAEYYSAELAQKMRRGMRESALKGKAINPNRPLGLTTDEHKRFIIDEKNAPTIRFIFEHYAAGESSASIVDQLNAAGLRTSKGNSFNKCSIPRIIQNEAYHGVYICKAYDVRIDGAVPAIIDDDLWKRAQKMLTLNKQHRAPHSSHADYLLSGKLFCGCCHSLMRGISGHNCRNDVYYYYACGNKADGGTCKKKNIPKDVAENLVVNAICENILRPDTLEDLADAIAAAQQADVNQPDPERAMLEQNLADVRRKINNIIESIENGTASSRLSARLADLEQQESTLNYQLESLKEVHPPVLDRERILFLLEQFLISPNERTEDYNRRIIDTFVNRIEITDTEMLIYFNLSEASASEKQKNSQPNSCSTGNHLVRVARIELTAS

SEQ ID NO: 4776 - protein, 516 aa, Unknown
  Description of Unknown: Integrase B4777 sequence
  PTHR30461:SF3,cd00338,SM00857,G3DSA:1.10.10.2600,IPR036162, PF13408,PS51737,G3DSA:3.40.50.1390,IPR025827,IPR006119, IPR038109,PF07508,IPR011109,SSF53041,PTHR30461, PS51736,Coil,PF00239
MKTAVIYARYSSDKQTEQSIEGQLYDCYNYAKQHGITVVQEYIDRAMTGKNDDRPAFQQMLHDSAQHKWDSVLVWKLDRFARNTIDSAVNRQILAKNGVRLLSVMESFGDDASGQMMTHIIEAINEYYSADLREKTIRGMRQSAMKAQTTGHIPLGYKVVDKKLVIDDETRIIPETVFRMYAEGERLTDIANHLNSQGYRNRRGRLFTTNSFYNMLANEKYIGIYKYDDIVIEGGIPQMIPNEVFDAVREKLITNRKRAAKNTAKADYYLSGKLYCGHCGEPMSGLSGTGRNGVKHYYYRCNGVQKKSGCHKKLEKKYLIEDEVCRAARSAFEQMDKAETAETIYQMYLQTVRNEYAPAELEKELTECTKQAENVVNAIAQTGGNQLLYDKVRELEERKEQLGSALRLSQAMTDNVPSVEQITVFIDDILATDINTTEGKKAIADIMISKVYVYDDKLTVIFKDKDGKSVDIPLSAVSDSSSADCAPSALGSQIIVKVTLLNRNESNVCKALFYVI

SEQ ID NO: 4777 - protein, 516 aa, Unknown
  Description of Unknown: Integrase B4778 sequence
  cd00338,SM00857,G3DSA:1.10.10.2600,IPR036162,PF13408, PS51737,IPR025827,G3DSA:3.40.50.1390,IPR006119,IPR038109, PF07508,IPR011109,SSF53041,PTHR30461,PS51736, Coil,PF00239
MKDAVIYARYSSDRQREESIEGQIRVCQDYAKRNGFHIINIYTDRALTGRSDKRPGFQMMIRDAATHTFQYVIVYKLNRFSRDRYDSANYKHKLKKQGVKLLSAMENISDDPAGILLESVIEGISEYYSAELSENVIRGMTQSALEGKWPGGNIPLGYKLDEENRLMIDEGKAPIVRAVFQMFLDGMSVPRIVQELNDKKYTTNAGKEFSRSRVYYILHNERYIGVFMWKDIRKDDLIPPIVSKDTFYLAQAKVKKMKKHPYRTNGKYLLSGKIFCAACGSKVTGTSGKSCMGAKYYYYACSHHHKSSRYPYCETKNIRADVLEDLIYSKTNEIISNKAAVQAIARQAVKLQGSTSASLEVQALENRISDVSKKVQNCVRAIESGIISDAVSVSLSENERILAALKDELAKAKLLQESGSLTEEKICYFFEKIGQKAKETEKYKNILLTSLVRAVFICNDYIEIQYNYAEQLPILTNPVRIENSSCESTNGGRILHIYELNKLIFHERYFCIRIAV

SEQ ID NO: 4778 - protein, 516 aa, Unknown
  Description of Unknown: Integrase B4779 sequence
  PTHR30461:SF3,SM00857,G3DSA:1.10.10.2600,IPR036162,PF13408, PS51737,G3DSA:3.40.50.1390,IPR025827,IPR006119,IPR038109, PF07508,IPR011109,SSF53041,PF00239,PTHR30461, PS51736,Coil,cd00338
MKAVIYARFSSHNQREESIEGQVRACQRFAKEHDMTVIEIYADRGLSGLHADNRPEFQRMIADSDRHKFQALIMWNLDRFSRDKYDTAVYKSRLKKNGVTLYYSDQNIPDTPEGIILESLLEGFAQYYSANLSRNAKRGLQENARKCLWNGGGLPLGYTIDETKHFVIDPAGAACVRLIFQMYADNHSIKEIVSTLNEKGYRTVKGNKFRLGSIQGVLRNRKYIGEYHASGITVPNGVPAIVDVELFNAVQEKIGVVSAAKARNKAEIPYLLTTKVFCGHCGSPMIGESGTGKGGSTYRYYKCSCRKNRKGQCDKRTEQKEWLEETVVAQTVEKFLHPDVIEDVSNACAAVLEQDCQNNALLKALNAQLADVEKSSRNLIKAIEAGVFTASMRERLAELEQQKEDITVQIAREQLRKPQLSAEQIAFFLRSFLDGDARDPNFQERIIESLVRRVDVYDEGPGNRKLTVFYNLKKNNHSSVSVKCSDSESVGLPKGRLRKQPIFFFASCRRTRIGRQ

SEQ ID NO: 4779 - protein, 516 aa, Unknown
  Description of Unknown: Integrase B4780 sequence
  PTHR30461:SF3,cd00338,SM00857,IPR036162,PF13408, IPR025827,G3DSA:3.40.50.1390,PS51737,IPR006119,PF07508, SSF53041,IPR011109,PTHR30461,PS51736,Coil, PF00239
MKAIYVRQSLDKKDSLSIAAQIDDCINLCKRNGWNDYKVYKDKGWSAKNLERPAFQKLNRDVQSGLIDGVVCYKIDRISRSIRDFVNLIVDYQELGVHFISFADNINTAAPGGMMMATLFVSLAQMEREAIITRVTDNYYYRCELGFWGGGPAPYGFHLKKIVDNGQKHTVLEPDPEEADTVRRLYDWYLEPGATIRSIMNRAHLAGMRTRGGGHWTSRVLSELLSRPLYAPNTMDIFNYFASQGVRVRVSPDQCDGKQSFNLFGLRDRNSAHPKRSRPVNEMTFAISKHESIIDSDTFLKVQFKKKAKLAVTPRAGTSHHTVLSGLVKCGYCGRAMSPSGSKGGRYFTCSGRRNYALGVCKGKSVKIDTLDQIVLHDLADYISRPDIKAKFKNGKTQSLEASEQAKINTYQQDIAAIDISIQKLVDACTTSGDVAVKYLNERIEQMDAEKQKLQAEIFQIKNKSFRKLELDGMNIDNAPASLESGSFEEKKYLCNFFIEKIIFTAKDDVQIKYTV

SEQ ID NO: 4780 - protein, 516 aa, Unknown
  Description of Unknown: Integrase B4781 sequence
  IPR036162,PS51737,IPR011109,PTHR30461,PS00397, PF00239,G3DSA:1.10.10.2600,IPR006119,SSF53041,cd00338, SM00857,IPR025827,IPR038109,PS51736,IPR006118, PF13408,G3DSA:3.40.50.1390,PF07508,Coil
MSKKVMRKSTESTDRIRTGAAYIRVSTDDQLEYSPESQLEEIKKYCLQHNILLPSEYIFVEEDGRSGRKSSNRYAFQNMIAMAKTKPKPFDVIVLWKFSRFARNQDESTFYKSMLRKKLGIDVVSVSEPLIDGMYGRLIEMIIEWQDEFYSVNLSGEVRRSMLSRARKGLYNGKMPLGYTKAPNENPVIEEQEAAIVRKIFDMYASGSDINYITRDLNDHGYKTKTGKRFDQEGVIYILENPFYIGKVRYNMRESSATSTLRDPEEWIISDSHHPPIIDQNTWDIVQERRERSKKIMQRYEHPVSHTKHWLSGLVKCPICGKSLSHKEGYPRKAPNGSTYISGEGFQCLGYIKGLHAGSQYISAKKLTGAVISSLHEVLESVTDVSFELVRTYEPTVELDRQRYQRELASLDRKLERIKEAYLNEIDTLEDYKRNKEMIEKRRADLEALLDDMTTAASGPENYKEQFLNLVQSVLDIIESDAPNDLKAEALRGIVRKIVFYKDTNTLEFHYYLMVE

SEQ ID NO: 4781 - protein, 516 aa, Unknown
  Description of Unknown: Integrase B4782 sequence
  PTHR30461:SF3,IPR036162,PS51737,IPR011109,PTHR30461, PF00239,G3DSA:1.10.10.2600,IPR006119,SSF53041,cd00338, SM00857,IPR025827,IPR038109,mobidb-lite,PS51736, PF13408,G3DSA:3.40.50.1390,PF07508,Coil
MYEDIKTACLYVRFSSHNQTEQSIEGQTRVCRDFCKRHNIRIVEIYADRATSASKDIEKRVQFLKMIKDSEKGLFDAVIVYKLDRFARSRYDSATYKYRLKRNGVQLISATENISNDPEGIILESVLEGMAEFYSAELSQKINRGMRESAYKHNSIGGAIPLGYKIEDKKLVIDPKTAPIVKEAFEKYADGETVAEICRQFNARGYKTSKGTAFGKSSFTKIFRNERYIGVYTFHDYRAEDAIPAIIDKDLWDRVQLRVGKIKNAPARNKAKVVYLLSGKIFCGHCGSKMNGNCNAGNYCYYQCYGKKNGNVDCKKKNIRKEFIERLVAQDALSLLTDEYIEQIATIACEKNQHEIELDSALPTIRDRIHQVDLSLNHLLKAIESGSAPDMLVKRMGELEKEKKDLQAQAKKESEDIVELDKAQVIYWLEQFRGGSIEDEEFCRMLIDLFVNSVTVWDEDDNTYKVTVAYNLTSLPTKTYRLNKGGTLSDFASNAPASDARNPRSVLPSVRRAGQR

SEQ ID NO: 4782 - protein, 516 aa, Unknown
  Description of Unknown: Integrase B4783 sequence
  PTHR30461:SF3,SM00857,G3DSA:1.10.10.2600,IPR036162,PS51737, G3DSA:3.40.50.1390,IPR006119,IPR038109,PF07508,SSF53041, IPR011109,PTHR30461,Coil,PS51736,cd00338, PF00239
MSYCIYLRKSRKDLEAEQHGEGETLARHERALLSLAKKNNLIISNIYREVVSGETIAARPVMQQLLREVEQNLWDGVLVMEVERLARGDTIDQGVVQRAFQYSNTLIITPSKTYDPANEFDEEYFEFGLFMSRREYKTIKRRMQNGRYAAISEGKWPYNSAPYGFRRTKLEKEKGWTLAFDENEAPVVRLIFSMFTGPERVGIRSITRTLNSYGTKPRNSKLWSESTVRGILSNVVYDQCVKIGERKVVRTVENGVLTTTRPRTSDYTIVSGRHPRLIDHDVFAEAQSYLGCGSPKPAGSNIIKNPLAGIIVCSECKKKMIRRPPSGTASRVPYDLMLCSTYDCPTIGSPLDLVEREVYNALSDWVEGYRLSGQTPSKSLIPEKEVLLESAQQTLDQLLRQKGTMYDLLEQGVYSTEVFLERSASLQSRISEAQSNVAQLKLELDKERQREANIEQFLPACEDLLSCYWDLSIPERNRLLKLLIESIEYKKLTKNKRGHLNEPNFELTIKPRIPRK

SEQ ID NO: 4783 - protein, 516 aa, Unknown
  Description of Unknown: Integrase B4784 sequence
  PTHR30461:SF3,SM00857,IPR006118,G3DSA:1.10.10.2600,IPR036162, PS51737,G3DSA:3.40.50.1390,Coil,IPR006119,IPR038109, PF07508,SSF53041,IPR011109,PTHR30461,PS00397, PS51736,cd00338,PF00239
MSKKVMRKSTESTDRIRTGAAYIRVSTDDQLEYSPESQLEEIKRYCLQHNILLPSEYIFVEEDGRSGRKSSNRYAFQNMIATAKTKPKPFDVIVLWKFSRFARNQDESTFYKSMLRKKLGIDVVSVSEPLIDGMYGRLIEMIIEWQDEFYSVNLSGEVRRSMLSRARKGLYNGKMPLGYTKAPNENPVIEEQAAAIVRKIFDMYASGSDINYITRDLNDHGYKTKTGKRFDQEGVIYILENPFYIGKVRYNMRESSATSTLRDPEEWIISDSHHPPIIDQNTWDIVQERRERSKKIMQRYEHPVSHTKHWLSGLVKCPICGKSLSHKEGYPRKAPNGSTYISGEGFQCLGYMKGLHTGSQYISAKKLIGAVISSLHEVLESVTDVSFELVRTYEPTVELDRQRYQRELASLDRKLERIKEAYLNEIDTLEDYKRNKEMIEKRRADLEILLSELTTAASGPENYKEQFLSRVQSVLDIIESDAPNDLKAEALRGIVRKIVFYKDTNTLEFHYYLMVE

SEQ ID NO: 4784 - protein, 516 aa, Unknown
  Description of Unknown: Integrase B4785 sequence
  PTHR30461:SF3,SM00857,G3DSA:1.10.10.2600,IPR036162,PS51737, G3DSA:3.40.50.1390,IPR006119,IPR038109,PF07508,SSF53041, IPR011109,PF00239,PTHR30461,PS51736,Coil, cd00338
MTMDRSAHSRLAVTYRRISSLNQVDNNSMCAQEQAIKDYAKKNHLKIVEAFHDLAKSGTSVQNRTGYQQMMEYLEKHPEVTCVLLHHLDRLHRNVRNQLNDIYTLKCKGIAVVTTDGLNSMDEDCMSEILDEAASAEKYSRRLSKETMKGLRVNAEQMLHNGGLPPYGYTVGSDKKLYIDEAKAPAVRKMFEMYAAGMSYKQIAQWLDDNGFTTVKGGNFKSTSIKTILENEKYCGTYFWNKRASKDFRGMRNSHQQKEDYYQVHGAIEPIVSEELFDKVQERLHDNKNRICNYNGKNYYPFNGKVFCGKCGKKLSGHVQYSRTNKNNDLVKQYRFSCSCPAVKTVNEKYLDDMVINGLRACIFSPENYEELVDKLNAYGKIQERVIDLQIEVLRSDKENAEKRCSNLMDIAENGDGTKSIVDKIKKLDKRMAKIDRRISEYEAAKKVFKAEDIDRIRDRFTEYVMENRNEDVLGFLEDTVDRIEVDDTVRVHLKKNICVDRETKKGFRQERSIKK

SEQ ID NO: 4785 - protein, 516 aa, Unknown
  Description of Unknown: Integrase B4786 sequence
  PTHR30461:SF3,SM00857,G3DSA:1.10.10.2600,IPR036162,PF13408, PS51737,IPR025827,G3DSA:3.40.50.1390,IPR006119,IPR038109, PF07508,IPR011109,SSF53041,PTHR30461,Coil, PS51736,cd00338,PF00239
MARKKKVSPGNRLVAYYRYSGGSQQTEQSIEGQRRDCEAYARQHGLTIVHEYIDRHISGRGVESRLAFQQMIADSSKHLFDLVICWKTDRFARNRYDSAVYKKKLRDNGVRILYAAESSVEGPEGIILEGLMESLAEYYSAELAQKMRRGMRESALKGRAINPSRPLGLTTDEHKRFIIDEKNAPTIRFIFEHYAAGESSASIVEQLNAAGLRTSKGNAFNKCSIPRIIQNEAYHGVYICKAYDVRIDGAIPAIIDDDLWKRAQKMLTLNKQHRAPHSSHADYLLSGKLFCGCCHSLMRGISGHNCRNDVYYYYACGNKADGGTCKKKNIPKDVAENLVVNAICENILRPDTLEDLADAIAAAQQADVNQPDPERAMLEQNLADVHRKINNIIESIENGTASSRLSARLADLEQQESALNYQLESLKEVHPLVLDRERILFLLEQFLISPNERTEDYNRRIIDTFVNRIEITDTEMLIYFNLSEASASEKQKNSQPNSCSTGNHLVRVARIELTAS

SEQ ID NO: 4786 - protein, 516 aa, Unknown
  Description of Unknown: Integrase B4787 sequence
  PTHR30461:SF3,cd00338,SM00857,IPR036162,PF13408, IPR025827,G3DSA:3.40.50.1390,PS51737,IPR006119,PF07508, SSF53041,IPR011109,PTHR30461,PS51736,Coil, PF00239
MKAIYVRQSLDKKDSLSIDAQIEDCINLCKRNGWNDYKVYKDKGWSAKNLDRPAFRQLNQDVQNGLIDGVICYKIDRISRSIRDFVNLIVDYQDLGVHFISFADNINTAAPGGMMMATLFVSLAQMEREAIITRVTDNYYYRCELGFWGGGPAPYGFRLVKTTENGQKHTILEPVPEEAEVIRTFFAWYLEPGATVRSIMNRAHLAGMQTRSGSDWTSRVLSDMLSKPLYAPNSMDIYNFYASQGVRVKISPEQCDGKQSLNIFGMRDRNSAHPKRSRPVSEMTLAIAKHKPIVDSDTYLKVQYKKKSRLAVTPRAGTSRTAVLSGLVKCGYCGRAMSPSGAKNGRYFTCSGRRNYAKGVCQGKSVKMDFLDDYVLNDLADFISQPEIKSMFKDGKAQRIPSSEQAKINEYKQRIATIDIDIQKLLDACLTSGDVAVKYLNERIDLLDTEKQNLQAEILAIQNKSNRKLELEGLDINSAPTALAGGEFDTKKYLCNFFIEQIIFYDRDNVQIRYKM

SEQ ID NO: 4787 - protein, 516 aa, Unknown
  Description of Unknown: Integrase B4788 sequence
  IPR036162,PS51737,IPR011109,PTHR30461,PS00397, PF00239,G3DSA:1.10.10.2600,IPR006119,SSF53041,cd00338, SM00857,IPR025827,IPR038109,PS51736,IPR006118, PF13408,G3DSA:3.40.50.1390,PF07508,Coil
MSKKVMRKSTESTDRIRTGAAYIRVSTDDQLEYSPESQLEEIKKYCLQHNILLPSEYIFVEDEGRSGRKSSNRYAFQNMIATAKTKPKPFDVVVLWKFSRFARNQDESTFYKSMLRKKLGIDVVSVSEPLIDGMYGRLIEMIIEWQDEFYSVNLSGEVRRSMLSRARKGLYNGKMPLGYTKAPNENPVIEEQEAAIVRKIFDMYASGSDINYITRDLNDHGYKTKTGKRFDQEGVIYILENPFYIGKVRYNMRESSATSTLRDPEEWIISDSHHPPIIDQNTWDIVQERRERSKKIMQRYEHPVSHTKHWLSGLVKCPICGKSLSHKEGYPRKAPNGSTYISGEGFQCLGYIKGLHAGSQYISAKKLTGAVISSLHEVLESVTDVSFELVRTYEPTVELDRQRYQRELTSLDRKLERIREAYMNEIDTLEDYKRNKEMIEKRRADLEVLLSELTTAASGPENYKEQFLSRVQSVLDIIESDAPNDLKAEALRGIVRKIVFYKDTNTLEFHYYLMVE

SEQ ID NO: 4788 - protein, 516 aa, Unknown
  Description of Unknown: Integrase B4789 sequence
  PTHR30461:SF3,cd00338,SM00857,G3DSA:1.10.10.2600,IPR036162, PF13408,IPR025827,G3DSA:3.40.50.1390,PS51737,IPR006119, IPR038109,PF07508,IPR011109,SSF53041,PTHR30461, PS51736,Coil,PF00239
MLRAALYARFSSENQREESILAQFRDSTEYCKKHNYAIVAKYADEAKSGTTTIGREQYKLMLKDAQKGKFDVVVFHKIDRNARNELDYYITKHKLEEAGVKYAYSRQDIDSTSPEGQMMESMLVGMAAYYSRNLSNEIKKGLRENAIQGKCTGGRPPYGFSVDPDKKLIIDEKEAAAVRMIFDWYSAGVHYGVIRKRLFNAGYRNRAGKEFTIASIYEILRNRKYVGDLYLGKTLFRKGKRNTHQTSDNVQYFENVIPAIVSREIFEEVQVKLDQNKRRSGAGNAKAIYALSGLIHCGQCGSAMVAHSTKNSRGIKNYYYRCPKGRLLGEEKCPQKFINRDDIESTVYQLIRKLFTAPDAHDQIKRIIAKNNMTVKVPDYTEQIKRLKKQESDASKRLDKLYDLYMTDREDEFTSAKMAQIKEEILRLRTQIKEAENRQAIAQSTTFDIDKIIDTFQKQLKQKQSPEFIKTLFELAVKNVIVYPDKIKVVLLVTQEKSCRLPLILQFKIPLIKKAI

SEQ ID NO: 4789 - protein, 516 aa, Unknown
  Description of Unknown: Integrase B4790 sequence
  PTHR30461:SF3,SM00857,G3DSA:1.10.10.2600,IPR036162,PF13408, IPR025827,G3DSA:3.40.50.1390,PS51737,IPR006119,IPR038109, PF07508,SSF53041,IPR011109,PF00239,PTHR30461, PS51736,Coil,cd00338
MRVSVNLNAQKPDTTTNAVIYARYSSHGQTEQSIEGQLAKGHEYAAAQGYTVVHEYIDRAMTGRNDNREAFQKMLSDTGKHQFQVVIVWKVDRFGRNREEIAFNKHTCKKNGVRVEYVAESLPNSPEAVILESVLEGMAEYYSIQLSQNIRRGQLESAKKCQCVGGSVPLGYTLDSDKHFVIDPQTAPVVKKIFDLYAEGATISEITGQLNEQGIRTARKQLFTKNSLTKLLKNEKYIGVYTYKDIVRVEGGVPAIVDKSTFDRVQELLKINRRAPSHTWTKVEYLLTDKLFCGHCGSPMVGESGFSHTGAKYSYYGCIKRRREKACDKKPVRQDWIEALVLDETVKLLHDDELMEYIIDRTWEYYQVTDKVQEEKAVLEAQLAEVDKAINNLVRAIEAGIFNAATKSRMDELDAQKAALTASLADLELTSGIRITRDHIEYFLLRLRDLDVKDRECQKRLVQTFVNAVFIYDDGRVKITYNYSGQSSTITLNQIASAEKGKGFVCCLPCSTDGQG

SEQ ID NO: 4790 - protein, 516 aa, Unknown
  Description of Unknown: Integrase B4791 sequence
  PTHR30461:SF3,SM00857,G3DSA:1.10.10.2600,IPR036162,PS51737, G3DSA:3.40.50.1390,IPR006119,IPR038109,PF07508,SSF53041, IPR011109,PF00239,PTHR30461,PS51736,Coil, cd00338
MSYCIYLRKSRKDLEAEQHGEGETLARHERALLSLAKKNNLIISNIYREVVSGETIAARPVMQQLLHEVEQNLWHGVLVMEVERLARGDTIDQGVVQRAFQYSNTLIITPSKTYDPANEFDEEYFEFGLFMSRREYKTIKRRMQNGRYAAISEGKWPYNSAPYGFRRTKLEKEKGWTLAFDENEAPVVRLIFSMFTGPERVGIRSITRTLNSYGTKPRNSKLWSESTVRGILSNVVYDQCVKIGERKVVRTVENGVITTARPRTSDYTIVSGRHPRLIDHDVFAEAQSYLGCGSPKPAGSNIIKNPLAGIIVCSECKKKMIRRPPSGTASRVPYDLMLCSTYDCPTIGSPLDLIEREVYNALSDWVEGYRLSGQTPSKSLIPEKEVLLESAQQTLDQLLRQKGTMYDLLEQGVYSTEVFLERSDSLQNRISEAESNVAQLKLELDKERQREANIEQFLPACEDLLSCYWDLSIPERNRLLKLLIESIEYKKLTKNKRGHLNEPNFELTIKPRIPRK

SEQ ID NO: 4791 - protein, 516 aa, Unknown
  Description of Unknown: Integrase B4792 sequence
  PTHR30461:SF3,cd00338,SM00857,G3DSA:1.10.10.2600,IPR036162, PF13408,PS51737,IPR025827,G3DSA:3.40.50.1390,IPR006119, IPR038109,PF07508,IPR011109,SSF53041,PTHR30461, PS51736,Coil,PF00239
MARKKIKKGDGQRLVAYYRYSGGSGQTEQSIEGQRRDCEAYARLHGMTIQHEYIDRHISGKTDDRGAFQQMIADSDKGAFDYVICWKTDRFARNRYDSAVYKKRLRDNGVEILYAAESNISGSEGIIIEGLMEALAEYYSAELSEKMRRGMRESALKGRAISRCRALGLTTDSDKRFVIDPKTAPIVRFIFERYAAGDSSMSIVEQLNAKGLRTSQGNQFNKCSIPRIIQNEAYRGVYVSKAYNVRIEGAIPAIIDDELWERAQIMLKLNQQKRTKNAAKADYFLSGKLFCKECGSPMKGVSGHSSTNGEVYRYYACSNPKCHKHNIPKDDLEGKVVQSICDHLLQPESMDALADAMIEVQKQDAVKPNAERLAVEENLADVRRRSKNILDAIENGTANPQLYARLDELTERENTLSYQLATLQNEKAIVFTKEQFLFLLEQFCIEPSERSEEYGRRLINTFVTNMEVSDSELFIYFNVSEETVNKTKNAPQKNFQKESSSEMRLVRVARIELTAS

SEQ ID NO: 4792 - protein, 516 aa, Unknown
  Description of Unknown: Integrase B4793 sequence
  PTHR30461:SF3,SM00857,G3DSA:1.10.10.2600,IPR036162,PF13408, IPR025827,G3DSA:3.40.50.1390,PS51737,IPR006119,IPR038109, PF07508,IPR011109,SSF53041,PF00239,PTHR30461, PS51736,Coil,cd00338
MARKKKVSPGNRLVAYYRYSGGSQQTEQSIEGQRRDCEAYARQHGLTIVHEYIDRHISGRGVESRLAFQQMIADSSKHLFDLVICWKTDRFARNRYDSAVYKKKLRDNGVRILYAAESSVEGPEGIILEGLMESLAEYYSAELAQKMRRGMRESALKGKAINPNRPLGLTTDEHKRFIIDEKNAPTIRFIFEHYAAGESSASIVDQLNAAGLRTSKGNSFNKCSIPRIIQNEAYHGVYICKAYDVRIDGAIPAIIDDDLWKRAQKMLTLNKQHRAPHSSHADYLLSGKLFCGCCHSLMRGISGHNCRNDVYYYYACGNKADGGTCKKKNIPKDVAENLVVNAICENILRPDTLEDLADAIAAAQQADVNQPDPERAMLEQNLADVHRKINNIIESIENGTASSRLSARLADLEQQESTLNYQLESLKEVHPPVLDRERILFLLEQFFISPNERTEDYNRRIIDTFVNRIEITDTEMLIYFNLSEASASEKQKNSQPNSCSTGNHLVRVARIELTAS

SEQ ID NO: 4793 - protein, 516 aa, Unknown
  Description of Unknown: Integrase B4794 sequence
  PTHR30461:SF3,SM00857,G3DSA:1.10.10.2600,IPR036162,PS51737, G3DSA:3.40.50.1390,IPR006119,IPR038109,PF07508,IPR011109, SSF53041,PF00239,PTHR30461,PS51736,Coil, cd00338
MSYCIYLRKSRKDLEAEQHGEGETLARHERALLSLAKKNNLIISSIYREVVSGETIAARPVMQQLLHEVEQNLWDGVLVMEVERLARGDTIDQGVVQRAFQYSNTLIITPSKTYDPANEFDEEYFEFGLFMSRREYKTIKRRMQNGRYAAISEGKWPYNSAPYGFRRTKLEKEKGWTLAFDENEAPVVRLIFSMFTGPERVGIRSITRTLNSYGTKPRNSKLWSESTVRGILSNVVYDQCVKIGERKVVRTVENGVLTTTRPRTSDYTIVSGRHPRLIDHDVFAEAQSYLGCGSPKPAGSNIIKNPLAGIIVCSECKKKMIRRPPSGTASRVPYDLMLCSTYDCPTIGSPLDLVEREVYNALSDWVEGYRLSGQMPSKSLIPEKEVLLESAQQTLDQLLRQKGTMYDLLEQGVYSTEVFLERSASLQSRISEAQSNVAQLKLELDKERQREANIEQFLPACEDLLSCYWDLSIPERNRLLKLLIESIEYKKLTKNKRGHLNEPNFELTIKPRIPRK

SEQ ID NO: 4794 - protein, 516 aa, Unknown
  Description of Unknown: Integrase B4795 sequence
  PTHR30461:SF3,IPR036162,PS51737,IPR011109,PTHR30461, PF00239,G3DSA:1.10.10.2600,IPR006119,SSF53041,cd00338, SM00857,IPR025827,IPR038109,mobidb-lite,PS51736, PF13408,G3DSA:3.40.50.1390,PF07508,Coil
MQKNNNIGNRCVIYARYSCSNQTEQSIEGQMHDCEQFAARNNLQIVNSYIDRATTATTDKRPQFLKMIADSKQCVFDVVLVWKLDRFSRNRYDSAMYKKKLKDNGVRVMSAMENITDSPEGVLMESVLEGFAEYFSKDLSQKVKRGMRETAAKHKITNRIPFGYCKSEEDTYIPDPHTANAVCKVFDMYITGFRKSDIADWLNSNGYKTSYGNQFTLTAITPLIKNTRYIGKYYYADNEYTDETQRIVTDDIFYKAQQKAIANQHGGSCKAIERYLLSNKLYCGYCHNKMIGECGKNQNGLAYHYYTCVGRKRKHICNRKNIKKKDIEQYVINAISCLLNDEYAINKIIETAINYQQNDVEHINEIKDIESTIKEIERKISNILSAIEAGIFTDSTKNRLQELENQKTRLTQELNYKNQSSTKIPRTTLKQILKNLDLSEAATNPEKQNIIDLLIHRVYLWQDKILIVFNQSNLCDNEISVDDTDVNTIIKTLSEPNASSSDSVEYGTPDQSRTGD

SEQ ID NO: 4795 - protein, 516 aa, Unknown
  Description of Unknown: Integrase B4796 sequence
  PTHR30461:SF3,IPR036162,PS51737,IPR011109,PTHR30461, PS00397,PF00239,G3DSA:1.10.10.2600,IPR006119,SSF53041, cd00338,SM00857,IPR025827,IPR038109,PS51736, IPR006118,PF13408,G3DSA:3.40.50.1390,PF07508,Coil
MSKKVMRKSSEVTEQIRTGAAYIRVSTDDQLEYSPESQLEEIKKYCLQHNILLPSEFIFVEEDGRSGRKSSNRYAFQNMIAMAKTKPKPFDVIVLWKFSRFARNQDESTFYKSMLRKKLGIDVVSVSEPLIDGMYGRLIEMIIEWQDEFYSVNLSGEVRRSMLSRARKGLYNGKMPLGYTKAPNENPVIEEQEAAIVRKIFDMYATGSDINYITRALNDHGHKTKTGNHFDQEGVIYILENPFYIGKVRYNMRESSATSTLRDPEEWIISDSFHEPIIDMDTWNIVQERRERSKKLMQRYEHPVSHTKHWLSGLVKCPVCGKSLSHKEGYPRKSAHGGSYISGEGFQCLGYMKGLHTGSQYISAKKLTSAVITSLHEVLESVTDVSFELVRTYDPTVELDRQRYQRELASLDRKLERIKEAYLNEIDTLEDYKRNKEMIEKRRADLEALLDDMTTAASGPENYKEQFLNRVQSVLDIIESDAPNDLKAEALRGIVRKIVFYKDTNTLEFHYYLMVD

SEQ ID NO: 4796 - protein, 516 aa, Unknown
  Description of Unknown: Integrase B4797 sequence
  SM00857,IPR006118,G3DSA:1.10.10.2600,IPR036162,PS51737, G3DSA:3.40.50.1390,Coil,IPR006119,IPR038109,PF07508, IPR011109,SSF53041,PTHR30461,PS00397,PS51736, cd00338,PF00239
MAKKVMRKSAESTDRIRTGAAYIRVSTDDQLEYSPESQLEEIKKYCLQHNILLPSEFIFVEEEGRSGRKSSNRYAFQNMIAMAKTKPKPFDVIVLWKFSRFARNQDESTFYKSMLRKKLGIDVVSVSEPLIDGMYGRLIEMIIEWQDEFYSVNLSGEVRRSMLSRARKGLYNGKMPLGYTKPPNENPVIEEQEAAIVRKIFDMYASGSDINYITRWLNDHGYKTKTGKKFDQEGVIYILENPFYIGKVRYNMRESSATSTLRDPDEWIIADSFHEPIIDMETWNIVQERRERSKKLAGRYEHPVSHAKHWLSGLVKCPVCGKSLSHKEGYPRKSTNGTTYLSGEGFQCLGYMKGLHSGSQFISAKKLTDSVITSLRDVLESTTDVSFELVRTYEPTIELDCQRYQRELASLDRKLERIREAYMNEIDTLEDYKRNKEMIEKRRADLEALLADMTTAASGPENYKEQFLNRVQSVLDIIESDAPNDLKAEALRGIVRKIVFYKDTNTLEFHYYLMVE

SEQ ID NO: 4797 - protein, 516 aa, Unknown
  Description of Unknown: Integrase B4798 sequence
  PTHR30461:SF3,SM00857,G3DSA:1.10.10.2600,IPR036162,PF13408, IPR025827,G3DSA:3.40.50.1390,PS51737,IPR006119,IPR038109, PF07508,SSF53041,IPR011109,PTHR30461,Coil, PS51736,cd00338,PF00239
MEERAKAVIYARFSSDKQREESIDGQIRECTAYAESQNLEVIGAYIDRALSARSDNRPDFLRMIADSARKTFQYVIVYQLDRFSRSRYDSAIYKNKLKKNGVRVLSAKEHIGDDPSSIILESMLEGYAEYYSAELSQKVKRGMTENILEGKWVGCRVPLGYKLTADKKLQIVPRDADAVRLIYKMYNSNERIIDIVRYLNAHRYKTAAGRTFNRSSLTKILGNKIYIGTYTWDSHVIEHFAPPILADGVWEAAQKRTKQHKQHPRPKRRSADYALTGLIYCGECGNPMTGQSGRSKNGSMYRYYRCSTKNNYHSRGKKQHIKCKSRNISREKVEDLVLDETVRILSSPKAVKIIAKQAANVQKIDPTAQEQARIAQERKTIQAKLENSIAAVEKGLCSKTIAENIERYESRISELDQQIDELKFAYAPIRIDAVAVEFFLKSLLDKKKDHDKYRLDMFRTFIRQVIIYSDKVEIRYNYTNCPPILKNPVSIALTGSPECSDKAFLVHQKNKKKLSH

SEQ ID NO: 4798 - protein, 516 aa, Unknown
  Description of Unknown: Integrase B4799 sequence
  SM00857,IPR006118,G3DSA:1.10.10.2600,IPR036162,PS51737, G3DSA:3.40.50.1390,PS00397,IPR006119,IPR038109,PF07508, IPR011109,SSF53041,PTHR30461,Coil,PS51736, cd00338,PF00239
MSKKVMRKSPEVTEQIRTGAAYIRVSTDDQLEYSPESQLEEIKRYCLQHNILLPSEFIFVEEEGRSGRKSSNRYAFQNMIAMAKTKPKPFDVIVLWKFSRFARNQDESTFYKSMLRKKLGIDVVSVSEPLIDGMYGRLIEMIIEWQDEFYSVNLSGEVRRSMLSRARKGLYNGKMPLGYTKPPNENPVIEEQEAAIVRKIFDMYASGSDINYITRGLNNHGYKTKTGKKFDQEGVIYILENPFYIGKVRYNMRESSATSTLRDPDEWIIADSFHEPIIDMETWNIVQERRERSKKLAGRYEHPVSHAKHWLSGLVKCPVCGKSLSHKEGYPRKSTNGTTYLSGEGFQCLGYMKGLHSGSQFISAKKLTDSVITSLRDVLESTTDVSFELVRTYEPTIELDCQRYQRELASLDRKLERIREAYMNEIDTLEDYKRNKEMIEKRRADLEALLADMTTAASGPENYKEQFLNRVQSVLDIIESDAPNDLKAEALRGIVRKIVFYKDTNTLEFHYYLMVE

SEQ ID NO: 4799 - protein, 516 aa, Unknown
  Description of Unknown: Integrase B4800 sequence
  PTHR30461:SF3,SM00857,G3DSA:1.10.10.2600,IPR036162,PF13408, IPR025827,G3DSA:3.40.50.1390,PS51737,IPR006119,IPR038109, PF07508,IPR011109,SSF53041,PTHR30461,Coil, PS51736,cd00338,PF00239
MARKKKVSPGNRLVAYYRYSGGSQQTEQSIEGQRRDCEAYARQHGLTIVHEYIDRHISGRGVESRLAFQQMIADSSKHLFDLVICWKTDRFARNRYDSAVYKKKLRDNGVRILYAAESSVEGPEGIILEGLMESLAEYYSAELAQKMRRGMRESALKGRAINPSRPLGLTTDEHKRFIIDEKNAPTIRFIFEHYAAGESSASIVDQLNAAGLRTSKGNSFNKCSIPRIIQNEAYHGVYICKAYDVRIDGAIPAIIDDDLWKRAQKMLTLNKQHRAPHSSHADYLLSGKLFCGCCHSLMRGISGHNCRNDVYYYYACGNKADGGTCKKKNIPKDVAENLVVNAICENILRPDTLEDLADAIAAAQQADVNQPDPERAMLEQNLADVHRKINNIIESIENGTASSRLSARLADLEQQESTLNYQLESLKEIHPPVLDRECILFLLEQFLISPNERTEDYNRRIIDTFVNRIEITDTEMLIYFNLSEASASEKQKNSQPNSCSTGNHLVRVARIELTAS

SEQ ID NO: 4800 - protein, 516 aa, Unknown
  Description of Unknown: Integrase B4801 sequence
  SM00857,IPR006118,G3DSA:1.10.10.2600,IPR036162,PS51737, G3DSA:3.40.50.1390,IPR006119,IPR038109,PF07508,IPR011109, SSF53041,PF00239,PTHR30461,PS00397,Coil, cd00338
MSKRIRYNIPDSEDQVRTGATYIRVSTDDQLECSPESQLEEIQRYCYEHNIILSQEFIFIEEDGKSGRKSKNRYAFQNMIALAKMKPRPFDVIVLWKFSRFARNQDESVFYKSILRKTLGIDVVSVSEPLIAGAYGRLVESIIEWQDEFYCINLSGEVRRSMLSRARKGLYNGKMPLGYSKAPDENPVIVPEEAAIVRKIFDMYAAGSDINYITRWLNEHEYKTKNGRKFTQEAVIYILENPFYIGKIRYNMRESSDTSTLRDPAEWIIVDSFHEPIIDMETWNIVQERRARSKQLQRPYEHPVSHAKHWLSGLVKCPICGKSLSHKEGYPRTEANGKIYISGEGFQCLGYMKGLHGGSQYVSAKKLTKAVIASLHSVLDSSTDVSYALVRKVEPTDVLDQQRWEHELSSLDRKMERIREAYLNEIDTLEDYKRNKEMLEKRRIDLQKLLDNLAASSSAAPADYKEQFLSQIQSVLNIIESDAPNTLKAEALRGVVQKIVFYKDTNTLEFHYYLMI

SEQ ID NO: 4801 - protein, 516 aa, Unknown
  Description of Unknown: Integrase B4802 sequence
  PTHR30461:SF3,SM00857,G3DSA:1.10.10.2600,IPR036162,PF13408, IPR025827,PS51737,G3DSA:3.40.50.1390,IPR006119,IPR038109, PF07508,SSF53041,IPR011109,PTHR30461,PS51736, cd00338,PF00239
MNGVIYARYSSENQREESIDGQLRECTAFAQHNDIQIVGEYIDRAFSAKTDNRPSFQKMIKDSAKGEFDVILVWKLDRFARNRYDSAHYKNILKKNGVKVVSATEAISSGAEGIILESVLEGMAEYYSAELAEKVSRGMKENALKCKYNGGSVPLGYYIDESKHFQIDPSVAPFVVECFEHYADGMTMKQLRDELNMKGVKNSRGGKISIDVISRMLTNRKYLGEYTFQDITIKDGIPAIISTSLFEKVQDRLAKTKKAPSSHKADDDYILTTKLFCGKCKSFMVGESGTNAQGKKYRYYKCVNHKKHQGCDMKSIRKDLIENMTIKYIQEFLNDEDLINTLIDLAYDAQHKENEQLPLLRKQLAQTEKGIKNIVDAIEQGISTKSTRERLLDLEQRKNDIEMSISKESIENPMLTKKQFKFWFDQLKKLDISKSEQRQKLVDLFVNSIIIYDDKIKFFFNYKKSTKTITFDELNNCSDLPDSPRPKIKDIREGVFYFLYNQTRLELAARQKKIRV

SEQ ID NO: 4802 - protein, 516 aa, Unknown
  Description of Unknown: Integrase B4803 sequence
  PTHR30461:SF3,IPR036162,PS51737,IPR011109,PTHR30461, PS00397,PF00239,G3DSA:1.10.10.2600,IPR006119,SSF53041, cd00338,SM00857,IPR025827,IPR038109,PS51736, IPR006118,PF13408,G3DSA:3.40.50.1390,PF07508,Coil
MAKKVMRKSAESTDRIRTGAAYIRVSTDDQLEYSPESQLEEIKKYCLQHNILLPSEFIFVEEDGRSGRKSSNRYAFQNMIAMAKTKPKPFDVIVLWKFSRFARNQDESTFYKSMLRKKLGIDVVSVSEPLIDGMYGRLIEMIIEWQDEFYSVNLSGEVRRSMLSRARKGLYNGKMPLGYTKAPNENPVIEEQEAAIIRKIFDMYASGSDINYITRDLNDHGYKTKTGKRFDQEGVIYILENPFYIGKVRYNMRESSATSTLRDPEEWIISDSFHEPIIDMDTWNIVQERRERSKKLMQRYEHPVSHTKHWLSGLVKCPVCGKSLSHKEGYPRKSTHGGSYISGEGFQCLGYMKGLHTGSQYISAKKLTSAVITSLHEVLESVTDVSFELVRTYEPTVELDRQRYQRELASLDRKLERIKEAYLNEIDTLEDYKRNKEMIEKRRADLEALLSELTTAASGPENYKEQFLSRVQSVLDIIESDAPNDLKAEALRGIVRKIVFYKDTNTLEFHYYLMVD

SEQ ID NO: 4803 - protein, 516 aa, Unknown
  Description of Unknown: Integrase B4804 sequence
  PTHR30461:SF3,SM00857,G3DSA:1.10.10.2600,IPR036162,PF13408, IPR025827,G3DSA:3.40.50.1390,PS51737,IPR006119,IPR038109, PF07508,IPR011109,SSF53041,PTHR30461,PS51736, cd00338,PF00239
MARAAKQDNNSEIIDGVIYARYSEGPNQTEASIEGQVRECKEYAKRNGIRIINVYSDSKHTGTNDNRAEFQKMLRDSRRGGFSVVVVWKIDRFGRNRAEMAQNKALLKLQGVKVVSAKEYIPDSPEGIILESVLEGMAEYYSANLSQNIKRGMKENALHCKSNGSGKSLGYIVDKDGYFEIEPNEATIVKTIFQKYDEGMKIADIWREIVASGAKTKRGKDFTQYGISRVLSNRAYIGEYRYGDIVTPGGMPRIIDDDLFNRVQERRALSKKAPASRRSNSDVDFLLTGKVFCGHCKGTMRGMSGTSKTGRKFYYYACHDKISKHNKCTKKNVKKEWLETEVTRITRDDILNKETIEFIADRVVEIQRLEQEDKSMLRYYEQQLRDTQSAINNIMKAIEAGIITSSTKSRLFELEEQKSIIEGEIEREKITTPVIEKEQVIFSLERFFGGDINNKEYQRNIIDMFVNKVILYDNKIIITYNISSQNEISVDVVEQAAFAALDECSSKLSLAPPAGA

SEQ ID NO: 4804 - protein, 516 aa, Unknown
  Description of Unknown: Integrase B4805 sequence
  PTHR30461:SF3,SM00857,G3DSA:1.10.10.2600,IPR036162,PF13408, IPR025827,G3DSA:3.40.50.1390,PS51737,IPR006119,IPR038109, PF07508,IPR011109,SSF53041,PTHR30461,Coil, PS51736,cd00338,PF00239
MARKKKVSPGNRLVAYYRYSGGSQQTEQSIEGQRRDCEAYARQHGLTIVHEYIDRHISGRGVESRLAFQQMIADSSKHLFDLVICWKTDRFARNRYDSAVYKKKLRDNGVRILYAAESSVEGPEGIILEGLMESLAEYYSAELAQKMRRGMRESALKGKAINPNRPLGLTTDEHKHFIIDEKNAPTIRFIFEHYAAGESSASIVDQLNAAGLRTSKGNSFNKCSIPRIIQNEAYHGVYICKAYDVRIDGAIPAIIDDDLWKRAQKMLTLNKQHRAPHSSHADYLLSGKLFCGCCHSLMRGISGHNCRNDVYYYYACGNKADGGTCKKKNIPKDVAENLVVNAICENILRPDTLEDLADAIAAAQQADVNQPDPERAMLEQNLADVRRKINNIIESIENGTASSRLSARLADLEQQESTLNYQLESLKEVHPPVLDRERILFLLEQFLISPNERTEDYNRRIIDTFVNRIEITDTEMLIYFNLSEASASEKQKNSQPNSCSTGNHLVRVARIELTAS

SEQ ID NO: 4805 - protein, 516 aa, Unknown
  Description of Unknown: Integrase B4806 sequence
  PTHR30461:SF3,IPR036162,PS51737,IPR011109,PTHR30461, PS00397,PF00239,G3DSA:1.10.10.2600,IPR006119,SSF53041, cd00338,SM00857,IPR025827,IPR038109,PS51736, IPR006118,PF13408,G3DSA:3.40.50.1390,PF07508,Coil
MVKKVIRKSAESTDRIRTGAAYIRVSTDDQLEYSPESQLEEIKRYCLQHNILLPSEYIFVEEDGRSGRKSSNRYAFQNMIATAKTKPKPFDVIVLWKFSRFARNQDESTFYKSMLRKKLGIDVVSVSEPLIDGMYGRLIEMIIEWQDEFYSVNLSGEVRRSMLSRARKGLYNGKMPLGYTKAPNENPVIEEQEAAIVRKIFDMYATGSDINYITRDLNDHGYKTKTGNHFDQEGVIYILENPFYIGKVRYNMRESSATSTLRDPEEWIISDSFHEPIIDMDTWNIVQERRKHSKKLMQRYEHPVSHTKHWLSGLVKCPVCGKSLSHKEGYPRKSTHGGSYISGEGFQCLGYMKGLHTGSQYISAKKLTSAVITSLHEVLESVTDVSFELVRTYEPTVELDRQRYQRELASLDRKLERIREAYMNEIDTLEDYKRNKEMIEKRRADLEVLLSELTTAASGPENYKEQFLSRVQSVLDIIESDAPNDLKAEALRGIVRKIVFYKDTNTLEFHYYLMVE

SEQ ID NO: 4806 - protein, 516 aa, Unknown
  Description of Unknown: Integrase B4807 sequence
  cd00338,SM00857,G3DSA:1.10.10.2600,IPR036162,PF13408, PS51737,G3DSA:3.40.50.1390,IPR025827,IPR006119,IPR038109, PF07508,SSF53041,IPR011109,PTHR30461,PS51736, Coil,PF00239
MKDAVIYARYSSDRQREESIEGQIRVCQDYAKRNGFNIINIYTDRAFTGRSDKRPGFQMMIRDAATHTFQYVIVYKLNRFSRDRYDSANYKHKLKKQGVKLLSAMENISDDPAGILLESVIEGISEYYSAELSENVIRGMTQSALEGKWPGGNIPLGYKLDEENRLIIDEEKAPIVRAVFQMFLDGMSVPRIVQELNNKKYTTNAGKEFSRSRVYYILHNERYIGVFMWKDIRKDDLIPPIVSKDTFYLAQSKVKKMKKHPYRTNGKYLLSGKIFCAACGSKVAGTSGKSCMGAKYYYYACSHHHKSSRYPYCETKNIRADVLEELIYSKTNEIISNKAAVQAIARQAVKLQGSTSASLEVQALENRISDVSKKVQNCVRAIESGIISDAVSVSLSENERILAALKDELAKAKLLQESGSLTEEKICYFFEKIGQKAKETEKYKNILLTSLVRAVFICNDYIEIQYNYAEQLPILTNPVRIENSSCECTNGGHILHTHELNNLIFYERYFCIRIAV

SEQ ID NO: 4807 - protein, 516 aa, Unknown
  Description of Unknown: Integrase B4808 sequence
  PTHR30461:SF3,SM00857,G3DSA:1.10.10.2600,IPR036162,PS51737, G3DSA:3.40.50.1390,IPR006119,IPR038109,PF07508,SSF53041, IPR011109,PTHR30461,Coil,PS51736,cd00338, PF00239
MSYCIYLRKSRKDLEAEQHGEGETLARHERALLSLAKKNNLIISNIYREVVSGETIAARPVMQQLLREVEQNLWDGVLVMEVERLARGDTIDQGVVQRAFQYSNTLIITPSKTYDPANEFDEEYFEFGLFMSRREYKTIKRRMQNGRYAAISEGKWPYNSAPYGFRRMKLEKEKGWTLAFDENEAPVVRLIFSMFTGPERVGIRSITRTLNSYGTKPRNSKLWSESTVRGILSNVVYDQCVKIGERKVVRTVENGVLTTARPRTSDYTIVSGRHPRLIDHDVFAEAQSYLGCGSPKPAGSNIIKNPLAGIIVCSECKKKMIRRPPSGTASRVPYDLMLCSTYDCPTIGSPLDLVEREVYNALSDWVEGYRLSGQTPSKSLIPEKEVLLESAQQTLDQLLRQKGTMYDLLEQGVYSTEVFLERSASLQSRISEAQSNVAQLKLELDKERQREANIEQFLPACEDLLSCYWDLSIPERNRLLKLLIESIEYKKLTKNKRGHLNEPNFELTIKPRIPRK

SEQ ID NO: 4808 - protein, 516 aa, Unknown
  Description of Unknown: Integrase B4809 sequence
  PTHR30461:SF3,SM00857,G3DSA:1.10.10.2600,IPR036162,PF13408, PS51737,G3DSA:3.40.50.1390,IPR025827,IPR006119,IPR038109, PF07508,IPR011109,SSF53041,PF00239,PTHR30461, PS51736,Coil,cd00338
MKAVIYARFSSHNQREESIEGQVRACQRFAKEHDMTVIEIYADRGLSGLHADNRPEFQRMIADSDRHKFQALIMWNLDRFSRDKYDTAVYKSRLKKNGVTLYYSDQNIPDTPEGIILESLLEGFAQYYSANLSRNAKRGLQENARKCLWNGGGLPLGYTIDETKHFVIDPAGAACVRLIFQMYADNHSIKEIVSTLNEKGYRTVKGNKFRLGSIQGVLRNRKYIGEYHASGITVPNGVPAIVDVELFNAVQEKIGVVSAAKARNKAEIPYLLTTKVFCGHCGSPMIGESGTGKGGSTYRYYKCSCRKNRKGQCDKRTEQKEWLEETVVAQTVEKFLHPDVIEDVSNACAAVLEQDCQNNALLKALNAQLADVEKSSRNLIKAIEAGVFTSSMRERLAELEQQKEDITVQIAREQLRKPQLSAEQIAFFLRSFLDGDAHDPNFQERIIESLVRRVDVYDEGPGNRKLTVFYNLKKNNHSSVSVKCSDSESVGLPKGRLRKQPIFLFASCRRTRIGRQ

SEQ ID NO: 4809 - protein, 516 aa, Unknown
  Description of Unknown: Integrase B4810 sequence
  PTHR30461:SF3,cd00338,SM00857,G3DSA:1.10.10.2600,IPR036162, PF13408,PS51737,IPR025827,G3DSA:3.40.50.1390,IPR006119, IPR038109,PF07508,IPR011109,SSF53041,PTHR30461, Coil,PF00239
MYEEIKTACLYLRYSSSNQTEQSIEGQMHVCQDFCKRHNIRIVEMYIDRATSASKDIEKRVEFLKMIKDSEKGNFNAVIVYKLDRFARSRYDSATYKYRLKRNGVQLISATENITQDPEGIILESVLEGMAEFYSAELSQKINRGMRESAMKHNSIGGAIPLGYKTVDKKLVIDETTAPIVREAFQMYADGESVAEICRTFNNRGYKTSKGTRFGKSSFTKIFRNEKYIGVYKYHDYRAEDVIPPIIDKDLWDRVQVRVGKIKKAPARNKARHTYLLTGKLFCGHCGSAMNADGNSQGYLYYRCYGKKNLDKQCNKRNMEKNLIERLVAQDAMSFLTDEYIEKIATIACDRNKQEIESDSPIPVIRDRIRQVDVSLNNLLKAIETGSAPDMLVKRMGELETEKKDMEVQLKKEMAHQVYIDKEQVIFWLEKFREGDINDEEFCQTVIDLFVNSVTVWDEPDDKFKITIAYNLTSIPQKTYRLSKDGRLSDYASNTPEIKDPITYPTPVNKVIDPAD

SEQ ID NO: 4810 - protein, 516 aa, Unknown
  Description of Unknown: Integrase B4811 sequence
  SM00857,G3DSA:1.10.10.2600,IPR036162,PF13408,PS51737, IPR025827,G3DSA:3.40.50.1390,IPR006119,IPR038109,PF07508, IPR011109,SSF53041,PTHR30461,Coil,PS51736, cd00338,PF00239
MKDAVIYARYSSDRQREESIEGQIRVCQDYAKRNGFHIINIYTDRALTGRSDKRPGFQMMIRDAATHTFQYVIVYKLNRFSRDRYDSANYKHKLKKQGVKLLSAMENISDDPAGILLESVIEGISEYYSAELSENVIRGMTQSALEGKWPGGNIPLGYKLDEENRLIIDEGKAPIVRAVFKMFLDGMSVHRIVQELNNKKYTTNAGKEFSRSRVYYILHNERYIGVFMWKDIRKDNLIPPIVSKDTFYLAQAKVKKMKKHPYRTNGKYLLSGKIFCAACGSKVAGTSGKSCMGTKYYYYGCSHHHKSSRYPYCDTKNIRADVLEDMVYSKTNEIISNKAAVQAIARQAVKLQGNSSASLEVQALENRIADVSKKVQNCVKAIERGIISDAVSVSLSENERVLAALKDELAKAKLLQESGSLTEEKICYFFEKIGQKAKETEKYKNILLTSLVRAVFVCNDYIEIQYNYAEQLPILTNPVRIENSSCESTNGGHILHTHELNNLIFFDKYFCIRIAV

SEQ ID NO: 4811 - protein, 516 aa, Unknown
  Description of Unknown: Integrase B4812 sequence
  PTHR30461:SF3,SM00857,G3DSA:1.10.10.2600,IPR036162,PF13408, PS51737,G3DSA:3.40.50.1390,IPR025827,IPR006119,IPR038109, PF07508,SSF53041,IPR011109,PTHR30461,PS51736, cd00338,PF00239
MQRAVIYARFSSDMQREESIDAQVRACKAYAKNKGYIVVDTYADEAKSGRDVTKRDAYNQMLADAMEDKFDVIIFHKIDRNSRNELNYFTFKDKLEKLGIRYEYAAQPIDALSPEGQMMETMMVGMAAYYSRNLAKETKKGLNENAYKALFNGGCPPLGYKIVDKKYVIDEQEAAAVRLIFELYLNGYGYAAICMELSAKGYTTKAGKAFAKNSLHDILCNEKYIGTYTFNKIPRKKGGRNSHAAERPEDFISIENAFPAIISKDDWALVRAKMDRNRHRAASYTAKEKYLLSGKVFCGHCGSAMVGHRIRKRYCYYGCTRKEQTPTSKCPQKMIRAEVLEHWVLQILERVVFTVGGMRRIADAIVDAYEAEQKEQAGSQATLLQRKAVAEKKLNNLYKIFEEGNADEFDRQRLNQIKAELREINKAICETSVKPARTLSKQKIAAILAAMKDEIFVKKNSYYVQQAVDLLVDHVTITDKVLKITLSTQNVCAYLVPRNRDGMSVYTFTIAINLAA

SEQ ID NO: 4812 - protein, 516 aa, Unknown
  Description of Unknown: Integrase B4813 sequence
  PTHR30461:SF3,SM00857,IPR006118,G3DSA:1.10.10.2600,IPR036162, PS51737,PS00397,G3DSA:3.40.50.1390,IPR006119,IPR038109, PF07508,IPR011109,SSF53041,PTHR30461,Coil, PS51736,cd00338,PF00239
MSKKVMRKSTESTDRIRTGAAYIRVSTDDQLEYSPESQLEEIKRYCLQHNILLPSEYIFVEEDGRSGRKSSNRYAFQNMIATAKTKPKPFDVIVLWKFSRFARNQDESTFYKSMLRKKLGIDVVSVSEPLIDGMYGRLIEMIIEWQDEFYSVNLSGEVRRSMLSRARKGLYNGKMPLGYTKAPNENPVIEEQAAAIVRKIFDMYASGSDINYITRDLNDHGYKTKTGKRFDQEGVIYILENPFYIGKVRYNMRESSATSTLRDPEEWIISDSHHPPIIDQNTWDIVQERRERSKKIMQRYEHPVSHTKHWLSGLVKCPICGKSLSHKEGYPRKAPNGSTYISGEGFQCLGYMKGLHTGSQYISAKKLTGAVISSLHEVLESVTDVSFELVRTYEPTVELGRQRYQRELASLDRKLERIKDAYLNEIDTLEDYKRNKDMIEKRRADLEALLSELTTAASGPENYKEQFLSRVQSVLDIIESDAPNDLKAEALRGIVRKIVFYKDTNTLEFHYYLMVE

SEQ ID NO: 4813 - protein, 516 aa, Unknown
  Description of Unknown: Integrase B4814 sequence
  PTHR30461:SF3,SM00857,G3DSA:1.10.10.2600,IPR036162,PF13408, IPR025827,G3DSA:3.40.50.1390,PS51737,IPR006119,IPR038109, PF07508,IPR011109,SSF53041,PF00239,PTHR30461, PS51736,Coil,cd00338
MKAVIYARFSSHNQREESIEGQVRACQRFAKEHDMTVIEIYADRGLSGLHADNRPEFQRMIADSDRHKFQALIMWNLDRFSRDKYDTAVYKSRLKKNGVTLYYSDQNIPDTPEGIILESLLEGFAQYYSANLSRNAKRGLQENARKCLWNGGGLPLGYTIDETKHFVIDPAGAACVRQIFQMYADNHSIKEIVSTLNEKGYRTVKGNKFRLGSIQGVLRNRKYIGEYHASGITVPNGVPAIVDVELFNAVQEKIGVVSAAKARNKAEIPYLLTTKVFCGHCGSPMIGESGTGKGGSTYRYYKCSCRKNRKGQCDKRTEQKEWLEETVVAQTVEKFLHPDVIEDVSNACVAVLEQDCQNNALLKALNAQLADVEKSSRNIIKAIEAGVFTASMRERLAELEQQKEDITVQIAREQLRKPQLSAEQIAFFLRSFLDGDAHDPNFQERIIESLVRRVDVYDEGPGNRKLTVFYNLKKNNHSSVSVKCSDSESVGLPKGRLQKQPIFLFASCRRTRIGRQ

SEQ ID NO: 4814 - protein, 515 aa, Unknown
  Description of Unknown: Integrase B4815 sequence
  SM00857,G3DSA:1.10.10.2600,IPR036162,PS51737,G3DSA:3.40.50.1390, IPR006119,IPR038109,PF07508,IPR011109,SSF53041, PF00239,PTHR30461,PS51736,Coil,cd00338
MQYLIYLRKSRADQEAELRGEGETLARHEKALLELARHQHLPIADIYREVVSGETIASRPMMQQLLSEVEQGVWDGVLVMEVERLARGDTIDQGIVAQAFKLSDTKIITPIKTYDPNNEFDEEYFEFGLFMSRREYKTIKRRLNNGRQASVKEGKYVGNRPPYGYERIKIENDKGFTLKPLEKEAQVLRMMFRWYAYGAHGISTIADQLNEMAIPSKTGKQWVYPTVRDILQNPVYVGKIRWGWRGQRKRVKNGSVSVSRPRSDDYLLADGIHPPIIDQQLFDQVQKKFSMHKPLPTSAREMKNPLAGLVICAKCGAKMQRRPYQRENIRTGLICPNNKCRNVSAPFDDVEQKLIEALAEYIKEEKLRISNGHTQIDDSVLQILQNQLADLREETVDLNKQNDNIHDFLEKGIYDVDTYLQRSQKISSRITEIEEKQKTLQQEIIEENKRIESATSIIPMTEQLLLQYENMSALEKNSMLKEVLRCVKYERECSIRDGGTADNFTLYLYPKISHK

SEQ ID NO: 4815 - protein, 515 aa, Unknown
  Description of Unknown: Integrase B4816 sequence
  PTHR30461:SF3,SM00857,G3DSA:1.10.10.2600,IPR036162,PF13408, IPR025827,G3DSA:3.40.50.1390,PS51737,IPR006119,IPR038109, PF07508,IPR011109,SSF53041,PF00239, PTHR30461,PS51736,Coil,cd00338
MNNLKAVIYARYSSDKQRDESIEGQIRECKAFAEREGIIITGIYTDKALSARTDNRPEFLQMIEDSKKHLFDYVLVYQLDRFSRSREDSAVYKAILKKNGVKVVSAKENITNDPAGIILESVLEGMAEYYSAELSQKVKRGMTDNALQGKVNGTPTPLGYDKTEDKRLIINEREARIVRTIFDLYIKGHSIPSICSHLNSKGYLSKHGSKFSYAVVRRILSNEKYIGTMRWNDIVIEDAIPSIISKEIFDKVQQQKGRIIKKKGARSEFYNLCGKLYCGKCGGHYTGNTATSHTGAKHHYYSCTNRRKHKTCTGKNIKRDILEDIIINKTIHILNEPNTIAQLAKMATEASSTMLGDAELELKRIDARIKELQSELENYMKAIAKGFISDTLQKQIENAEAELQDHMTRKTNHEIKAHPIKLTAEHIEFFLYKMAKENPTTNTGRARILDTFIHSATIYDDRVEITFNYNNDLPQFKGQVIDGSFSVDVVVQMTQKANLFKYVNHRYPLRLIMPL

SEQ ID NO: 4816 - protein, 515 aa, Unknown
  Description of Unknown: Integrase B4817 sequence
  SM00857,IPR036162,PF13408,IPR025827,G3DSA:3.40.50.1390, IPR006119,SSF53041,PTHR30461,Coil,PS51736, cd00338,PF00239
MVKRRAAIYARFSSHNQRSESIEIQVDAGTRYIAENGLELVKIYADYAKTGRNTDRREYKQMMNDARLGLFDYVVIYKVPRIMRNRDEMALTRIMLRKAGVEILYAGEEIASGSAGVLQLGMLEVLAEWESAIDSERIIDGIQKNAQRCMANGRTLYGWDIVEGRYVINDREAAVLHKMKNMVFAGSIIAEVVRAVANVRTRQGKPINHDRAKKLLLRPQNGGTYSYAGHVVEGGMPALWPKAEQDMLISILGNPRPRRRVDHAAEWPLTGKLYCAECGNTLAGTSGTSKGGTVYSYYKCKKCKRTFRRDILEDAIVDMTICALERPDVRKRIADGMATYEATMEDAPLESERLRKEIKRIDAAFERIWQAIEDGIAPPGGKERIEDLKARKDALETEYQIAKANENIEPGFSELMDWLDNVAEEMNPQEILTMFVRAVQIDKTEVRLYFAFDYYGDNFTPPKQDEHPAGEGCSSDSPMVEPSITKANTVISLETCYLQINRNWFAVIGNLQNTR

SEQ ID NO: 4817 - protein, 515 aa, Unknown
  Description of Unknown: Integrase B4818 sequence
  cd00338,SM00857,G3DSA:1.10.10.2600,IPR036162, PF13408,PS51737,G3DSA:3.40.50.1390,IPR025827, IPR006119,IPR038109,PF07508,IPR011109, SSF53041,PTHR30461,PS51736,Coil,PF00239
MSVDIKWQVPKAQPEASELAVVYARYSSHSQGEQSIEGQLSNARDYAAAHGYTIVHEYVDRAKSGRTDNRAEFQQMLKDTAKRQFSVIILWKVDRFGRNREEIAINKMKCRKNGVRVEYVAETIPDSPEGVILESVLEGFAEYYSLQLSQNIRRGRAESAEKCQSLGGNRPLGYKTGPDKKFVIDENTAPTVKMIFTMYADGKTVTEIVDKLNEMGLRTLRGGPFTKNSLHSILKNKKYIGVYEYQGREIKDGVPRIIEDDVFNKVQEMLKINKRAPAKTWSRADYILTDKLFCGKCGALMFGESGTSKTGVKHNYYICSNKKRFRSCDKKAVRQADIEDTVLNATHELLQDDELLDYIVDRTWEYYLAQDNSQEELRNLQRQLAQTDTAISNLIRAIEAGILTEETKKRMDELTQQKADLKASIADREIARGFHLQKSHIAFYLRSLRDADWSDKEAQKRLIQTFVNAVFVYDDHITLTYNFSGDKSTITLHDMQRFEDGKEFGCRASRSTNTI

SEQ ID NO: 4818 - protein, 515 aa, Unknown
  Description of Unknown: Integrase B4819 sequence
  cd00338,SM00857,G3DSA:1.10.10.2600,IPR036162,PS51737, G3DSA:3.40.50.1390,IPR006119,IPR038109,PF07508,SSF53041, IPR011109,PTHR30461,PS51736,Coil,PF00239
MQYLIYLRKSRADREAELRGEGETLARHEKALLELARRQHLPIADIYREVVSGETIASRPMMQQLLSEVEQGVWDGVLVMEVERLARGDTIDQGIVAQAFKLSDTKIITPIKTYDPNNEFDEEYFEFGLFMSRREYKTIKRRLNNGRQASVKEGKYVGNRPPYGYERIKIENDKGYTLKPLEKEAQVVRMMFRWYAYGAHGISTIAEQLNEMAIPSKTGKQWVYPTVRDILQNPVYVGKIRWGWRGQRKRVKNGSVSVSRPRSDDYLLADGIHPPIVDQQLFDQVQKKFSMHKPLPASAREMKNPLAGLVICAKCGAKMQRRPYQRENIRTGLICPNNKCRNVSAPFDDVEQMLIEVLAEYIKEEKLRISNGHTQIDDSVLQILQNQLADLREETVDLNKQNDNIHDFLEKGIYDVDTFLQRSQKISSRITEIEEKQKTLQQEIIEENKRIESATSIIPMTEQLLLQYENMSALEKNSMLKEVLRCVKYERECSIRDGGTADNFTLYLYPKISHK

SEQ ID NO: 4819 - protein, 515 aa, Unknown
  Description of Unknown: Integrase B4820 sequence
  PTHR30461:SF3,cd00338,SM00857,G3DSA:1.10.10.2600,IPR036162, PS51737,G3DSA:3.40.50.1390,IPR006119,IPR038109,PF07508, SSF53041,IPR011109,PTHR30461,Coil, PF00239
MKAVILARVSSKEQEDGYSLDAQISRLSDYANKKGLEVIKTFTLTESSTQGDRKKFQEVLKFCSSQKETIALIADAVDRVQRSFKESTYLDELRKKEKIELHFYREGMVVGKNASSSDLLRWDFLVIGAKSYVLALAENVKRSINFKIEHGEWCGKAPIGYLNRRNAHGKSEICLDPVRAPIIKKLFQEYSLGKTSFKELANLADKWDLKSNSPKARKLTSKTLYDTLTNPFYCGKMRIKGQLYPHIYEPLISEDLWNKCQEVRLGYKKQPVKYASKEFLYRGLITCYNTGKIVTTDQKRGHINYLICYDKTGKRIYCHEETITKQVQQILDSIIIPEPILTGLNQILRDSKKNEALLHEQAVTSLRKDLDITKKRIENLVDMYLDKKIDDEIYSSKINQLKNEKTSLENKIAAHSVSDDKFNETIINLFDIVNHAGKKFANSSNIEVKRRILKLIIRTMKLDRGNLGYELAWPFSELPKSDDCYLWRTLVDNLRTNHRDKILLIGQQLPNLLTF

SEQ ID NO: 4820 - protein, 515 aa, Unknown
  Description of Unknown: Integrase B4821 sequence
  PTHR30461:SF3,SM00857,G3DSA:1.10.10.2600,IPR036162,PF13408, IPR025827,G3DSA:3.40.50.1390,PS51737,IPR006119,IPR038109, PF07508,IPR011109,SSF53041,PTHR30461,Coil, PS51736,cd00338,PF00239
MPEIRYIPAVGAPENAKLPVAAYCRVSSDSDDQLNSLSAQVREYTKQITAEPDWEFAGIYADEGITGTSTKKRNEFKRLMRDCEAGKVKRVLVKSVSRFARNTTDCLQYLRQLSALGVTVYFEKEGIDTAKMSSDVILTMTGAFAQEESNALSTNMRWSYQKRMQAGMFVGNIAPYGYDWKNGTLIINEAEARIVRWIFHSYLDGLNRAEIAAQLNAMQNEPSNRPIWYKTTVNYILANERYIGDALLQKKYTVQGTIGLEKRNHGEMPQYYVEDTHPAIISEDTFRRAQAMRIRQTTYLGPHIGSHIFQKRIRCAECGRTLRRKPRKSGLVSWVCLSHDENKALCPTPPIFESNIEKAAIMMYRILRFGIKDILHPMLYQLEQLQGRTVSDSTAINELNQSIASLSEQRHMLNRLLSKGFMEPDTCQAQVNAISQQLADLNRRRRSLIEAQVEDDAIENTQLLIDILEDAPENLVSLEDGGVFDMIVDKVIIDKDKNITFRLINGLELGGDFDG

SEQ ID NO: 4821 - protein, 515 aa, Unknown
  Description of Unknown: Integrase B4822 sequence
  cd00338,SM00857,G3DSA:1.10.10.2600,IPR036162,PF13408, IPR025827,PS51737,G3DSA:3.40.50.1390,IPR006119,IPR038109, PF07508,IPR011109,SSF53041,PTHR30461,PS51736, Coil,PF00239
MSYLIYLRKSRKDLENPLMTTEEILNRHECILLDLAKKMNLSIGDIYREIVSGDSIAARPVMQKLLREVESGMWEGVLVVEVERLARGDTVDQGIVQRTFQYSETLIITPQKTYNPSSESDQTFFEFGLFMSRQEYKTIKRRLKSGVMSAVREGKWPYNSAPYGYRRYKLENQKGWSLEFDDQERPIAELIYHLFCDEKRGLGYISDYLEARNIKSRTGGRFTESFLREFLRNPVNDGKVFYGRRKVVTKIVNGSSVRTRPRADEYIEVAGLHDPLIPHDLFLKAQERFRVSTPRNPSSYTVKNPLSGLLVCSECGHKLQRRPASTSKRGAPYDVLMCKTRGCPTVGSAVEVIEGEVLYALEDIVRGYEADVPSVPSLVPQKEELLHNAILHRTDLNKQQERIYTLLEQGIYSTDVFLDRSKALEKQMQEVNHSIEVLKNELEEEKIKYNNWKSFVPTCKQLLEIYWTLTPDAKNSALKEVIDRIEYKKLTRNPKGMCDVATFELTLYPKIPMKS

SEQ ID NO: 4822 - protein, 515 aa, Unknown
  Description of Unknown: Integrase B4823 sequence
  SM00857,G3DSA:1.10.10.2600,IPR036162,PS51737,G3DSA:3.40.50.1390, IPR006119,IPR038109,PF07508,IPR011109,SSF53041, PF00239,PTHR30461,PS51736,Coil,cd00338
MYQSYEFKPEEILVYLRKSRSDDPYLSVEDVLQKHEEIIREWIGRNLVHDIPAKNFYREVVSGETIADRPEFCKVLRQVESPGIKGVLVVEVQRLSRGDLEDAGRLIKILRYTHTKVITPQKIYDIEDDYDRDFFERELKRGNEYLEYTKKILARGKYQSVKDGWYIASKPPFGFVRVTVQDGKRKRPTLDFGPDAPTVRYIFDRLNAGVLPYTVAKELKAMGANSPAGKPWTVQMLLDIAKNDHYDQMIAWKRRGDVSRVKDGEVVKSRPRSKDYELFPARHPRMIDHDVFVHVQELLKNRSRKRDSYEQVNPVAGIAYCGICGRAMMYHTGLRNGKFKYNPRLVCSGLTNCEAASCLFSEYSQALVSSLLCSIEDCKIELEEESDGREKEAQIQMLEKQVQTLELKELHLWEKYADGEMPKEIFDKLNLKNTESKGNAEKALEQLRSEKPQREHLQKKIAMLSDAIKAIESTSLSAKEKNAFLKTVIERIEYSRTHEEAKSHVPFRMSVKLRI

SEQ ID NO: 4823 - protein, 515 aa, Unknown
  Description of Unknown: Integrase B4824 sequence
  cd00338,SM00857,G3DSA:1.10.10.2600,IPR036162, PF13408,PS51737,IPR025827,G3DSA:3.40.50.1390, IPR006119,IPR038109,PF07508,IPR011109, SSF53041,PTHR30461,PS51736,Coil,PF00239
MSYLIYLRKSRKDLENPFMTTEEILNRHECILLDLAKKMNLSVGDIYREIVSGDSISARPVMQKLLREVESGMWEGVLVVEVERLARGDTVDQGIVQRTFQYSETLIITPQKTYNPSSESDQTFFEFGLFMSRQEYKTIKRRLKSGVMSAVREGKWPYNSAPYGYRRYKLANQKGWSLEFDDQERPIAELIYHLFCDEKRGFGYISDYLEARNIKSRTGGRFTESFLREFLRNPVNDGKVFYGRRKVVTKIVNGSSVRTRPRADEYIEVAGLHDPLIPHDLFLKAQERFRVSTPRNPSSYTVKNPLSGLLVCSECGRKLQRRPASTSKRGAPYDVLMCKTRGCPTVGSAVEVIEREVLHALEGIVRGYEADVPSVPSLVPQKEELLHNAVLHRADLNKQQERIYTLLEQGIYSTDVFLDRSKALEKQMQEVDHSIDVLKNELEEEKIKYNNWKSFVPTCKQLLEIYWTLTPDAKNSALKEVIDRIEYKKLTRNPKGMCDVATFELTLYPKVPMKS

SEQ ID NO: 4824 - protein, 515 aa, Unknown
  Description of Unknown: Integrase B4825 sequence
  SM00857,G3DSA:1.10.10.2600,IPR036162,PF13408,IPR025827, G3DSA:3.40.50.1390,PS51737,IPR006119,IPR038109,PF07508, SSF53041,IPR011109,PTHR30461,PS51736,cd00338, PF00239
MAFCMYLRKSRADMEAEAHGEGETLARHRATLEQLSRRLKKPIAEVYQEIVSGESIADRPQMQRLLADVSAKKWEGVYVMEVERLARGDTMDQGLVFHAFRYSDTLIITPMRTYNPCDPADEEYFEFSLFMSRREYKTTARRMQAGKIAAAREGKSFNGRAAYGYRTVKCADGRGVTFEQVDDEAPVLYQIRDWLLNGVDGEPCGLTRIARMLNDAHVPTRQHAAWTSAYLHHLITNPVYAGYIRMGARKTERVATPSGVQKRLVRQDDPQLFRGQHPPYFSDAEFDAMRAKLRTRCFPIRGDAEMINPFCGLLFCGECGRAMMVNRDAARNRTRIRCKTPGCGTVQSVLPPVEAALLETLRQWVDDPGSFVIPDAPPEENPVLLQSTADSLRVERGKVAQQIERAQDLLEQGVYTVEQYSERFAKHSARLREIDASLADLQHRIDARPQYCTLDEISPAIRALLDDYDAMSALQRNGLLKQCISRIVYHKSKSTATSGSSAPANFVLDVFPRLK

SEQ ID NO: 4825 - protein, 515 aa, Unknown
  Description of Unknown: Integrase B4826 sequence
  SM00857,G3DSA:1.10.10.2600,IPR036162,PS51737,G3DSA:3.40.50.1390, IPR006119,IPR038109,PF07508,SSF53041,IPR011109, PF00239,PTHR30461,PS51736,Coil,cd00338
MNIGKLKKSDQFCIYLRKSRADAEAEKLGEGETLARHERILTELAVKLGLPIGKIYRELVSGETISARKEIQSMINDCYAGMWKGILVVEVTRLSRGNQGDAQIIMDCLRYSNNNNGVLVVTPTKVYDIVQSSDDEEYMEFELFMSRREYKMIRKRMMRGKLQAVVEGNYMGSYRPYGYDILKTKTGRTLVPNPEEAPIVKNIFEWTVKEHLTPGKICKRLTSLGIPTYTGSAEWAIGTVKTILTNPTYTGKVRWNDRMQTKTMVDGKLVKSRPRSNHTEQYMLYDGKHEAIVDEITFHAAAARFHSDKTKANLKLMNPFAGILICAKCKKAMIYQGYNKRPNTPPRILHKSSQICNVKSAMLKDVMNAVAHALELYIDNFEMKIDNLPNIDENSILSRLESLQKELIKQEKKLPKLFDAWEDGILTDDEFTRRKLVNKERIESIQKQMDHLEDSIPTRDEYEEKIMCLSDALKSLLDPTLDADIKNTYLKSIISSIEYSRDNNTEFILDVFLKD

SEQ ID NO: 4826 - protein, 515 aa, Unknown
  Description of Unknown: Integrase B4827 sequence
  cd00338,SM00857,G3DSA:1.10.10.2600,IPR036162, PF13408,IPR025827,G3DSA:3.40.50.1390,PS51737, IPR006119,IPR038109,PF07508,IPR011109, SSF53041,PTHR30461,PS51736,Coil,PF00239
MSYLIYLRKSRKDLENPFMTTEEILNRHECILLDLAKKMNLSIGDIYREIVSGDSISARPVMQKLLREVESGMWEGVLVVEVERLARGDTVDQGIVQRTFQYSETLIITPQKTYNPSSESDQTFFEFGLFMSRQEYKTIKRRLKSGVMSAVREGKWPYNSTPYGYRRYKLENQKGWSLEFDDQERPIAELIYRLFVDEKKGFGYISDYLEAHNIKSRTGRRFTDSFLRDFIRNPVNDGKVFYGRRKVVTKIVNGSSVRTRPRADEYIEVDGLHDPLIPHDLFLKAQERFHTSTPRKPSTYTVKNPFSGLLVCSECGRKLQRRPASASKRGVPYDMLMCNTRGCPTIGSAVEVVEREVLRALEDIVRGYEADVPSVPSLVPQKEELLHNAILHRADLNKQQERIYALLEQGIYSTDVFLDRSKTLEKQMQEVEHSIEIFKKELEEEKIKYDNWKSFVPTCKQLLEIYWTLTPDARNAALKEVIDRIEYKKLTRNPKGMYDVAAFELTLYPKIPSKS

SEQ ID NO: 4827 - protein, 515 aa, Unknown
  Description of Unknown: Integrase B4828 sequence
  cd00338,SM00857,G3DSA:1.10.10.2600,IPR036162,PF13408, IPR025827,PS51737,G3DSA:3.40.50.1390,IPR006119,IPR038109, PF07508,SSF53041,IPR011109,PTHR30461,PS51736, Coil,PF00239
MSVDIKWQVPKAQPEASELAVVYARYSSHSQGEQSIEGQLSNARDYAAAHGYTIVHEYVDRAKSGRTDNRAEFQQMLKDTAKRQFSVIILWKVDRFGRNREEIAINKMKCRKNSVRVEYVAETIPDSPEGVILESVLEGFAEYYSLQLSQNIRRGRAESAEKCQSLGGNRPLGYKTGPDKKFVIDENTAPTVKMIFTMYADGKTVTEIVDKLNELGLRTLRGGPFTKNSLHSILKNKKYIGIYEYQGREIKDGVPRIIEDDVFNKVQEMLKINKRAPAKTWSRADYILTDKLFCGKCGALMFGESGTSKTGAKHNYYICSNKKRFRSCDKKAVRQADIEDTVLNATHELLQDDELLDYIVDRTWEYYLAQDNSQEELRNLQRQLAQTDTAISNLIRAIEAGILTEETKKRMDELTQQKADLKASIADREIARGFHLQKSHIAFYLRSLRDADWSDKEAQKRLIQTFVNAVFVYDDHITLTYNFSGDKSTITLHDMQRFEDGEEFGCRASRSTNTI

SEQ ID NO: 4828 - protein, 515 aa, Unknown
  Description of Unknown: Integrase B4829 sequence
  cd00338,SM00857,G3DSA:1.10.10.2600,IPR036162,PF13408, IPR025827,PS51737,G3DSA:3.40.50.1390,IPR006119,IPR038109, PF07508,IPR011109,SSF53041,PTHR30461,PS51736, Coil,PF00239
MSYLIYLRKSRKDLENPFMTTEEILNRHECILLDLAKKMNLSIGDIYREIVSGDSIAARPVMQKLLREVESGMWEGVLVVEVERLARGDTVDQGIVQRTFQYSETLIITPQKTYNPSSESDQTFFEFGLFMSRQEYKTIKRRLKSGVMSAIHEGKWPYNSAPYGYRRYKLENQKGWSLEFDDQERPIAELIYHLFCDEKRGLGYISDYLEARNIKSRTGGRFTESFLREFLRNPVNDGKVFYGRRKVVTKIVNGSSVRTRPRADEYIEVAGLHDPLIPHDLFLKAQERFRVSTPRNPSSYTVKNPLSGLLVCSECGRKLQRRPASTSKRGAPYDVLMCKTRGCPTVGSAVEVIEREVLHALEGIVRGYEADVPSVPSLVPQKEELLHNAVLHRADLNKQQERIYTLLEQGIYSTDVFLDRSKALEKQMQEVEHSIEIFKNELEEEKIKHDNWKSFVPTCKQLLDIYWTLTPDARNAALKEVIDRIEYKKLTRNPKGMCDVATFELTLYPKIPSKS

SEQ ID NO: 4829 - protein, 515 aa, Unknown
  Description of Unknown: Integrase B4830 sequence
  SM00857,G3DSA:1.10.10.2600,IPR036162,PF13408,IPR025827, PS51737,G3DSA:3.40.50.1390,IPR006119,IPR038109,PF07508, IPR011109,SSF53041,PF00239,PTHR30461,PS51736, Coil,cd00338
MSYLVYLRKSRKDLENPFMTTEEILNRHECILLDLAKKMNLSIGDIYREIVSGDSISARPVMQKLLREVESGMWEGVLVVEVERLARGDTVDQGIVQRTFQYSETLIITPQKTYNPSSESDQTFFEFGLFMSRQEYKTIKRRLKSGVMSAVREGKWPYNSAPYGYRRYKLANQKGWSLEFDDQERPIAELIYHLFCDEKRGLGYISDYLEARNIKSRTGGRFTESFLREFLRNPANDGKVFYGRRKVVTKIVNGSSVRTRPRADEYIEVAGLHDPLIPHDLFLKAQERFRVSTPRNPSSYAVKNPLSGILVCSECGHKLQRRPASTSKRGAPYDVLMCKTRGCPTIGSAVEVVEREVLRALEDIVRGYEADVPSVPSLIPQKEELLHNAILHRADLNKQQERIYTLLEQGIYSTDVFLDRSKAMESQMQEAEHSIEIFKKELEEEKIKYDNWKSFVPTCKQLLKLYWTLTPDARNAALKEVIDRIEYKKLTRNPKGMYDVATFELTLYPKIPSKS

SEQ ID NO: 4830 - protein, 515 aa, Unknown
  Description of Unknown: Integrase B4831 sequence
  cd00338,SM00857,G3DSA:1.10.10.2600,IPR036162,PF13408, PS51737,G3DSA:3.40.50.1390,IPR025827,IPR006119,IPR038109, PF07508,SSF53041,IPR011109,PTHR30461,PS51736, Coil,PF00239
MDQVGVIYARFSSHAQREESIEDQLRECHAFAERNGIRIVEEYCDQALTGKTDARPAFQRMVRDSAKGRFSIVITYKVDRFARNRYDSATYKARLKKNGVRVLYAKETIPDGPEGIILESVLEGYAEYYSANLAQNITRGLEGNALNCRTNGVVVLGYKKSDDDHYEIDETTAPIVREIFEKYAAGVKQMEICEELNARCLRTTRGGPFNKNSLVRILKNRKYIGEYHYMDVTVPGGMPAIISVELFEDVQQKLKRGRRAPSKDWSRADFLLTGKLFCGECGEPMVGTSGHGRSGRKYNYYICGAKKRRQGCKKENVAQDWIEEVVLTYTMEVVLQDDTIQEIADGVMDFLAREAADDGVLVSLEARLAEVKTSVKNLMKAIEAGIITKATTERMMELENERVELEDAIAIEKIKEPEIERDQVVFFLEKFRDGDLNDPAFRLRLVEAFVSSVYLWDDGRIDINYNYTGQGSKVSLDQAADIVSKIAGGDGSDLDSSGPLELNKITLCLLEFLLI

SEQ ID NO: 4831 - protein, 515 aa, Unknown
  Description of Unknown: Integrase B4832 sequence
  PTHR30461:SF3,SM00857,G3DSA:1.10.10.2600,IPR036162,PF13408, PS51737,G3DSA:3.40.50.1390,IPR025827,IPR006119,IPR038109, PF07508,IPR011109,SSF53041,PTHR30461,Coil, PS51736,cd00338,PF00239
MKIKKIEAQPQEVKKLRVAAYCRVSTDNDDQKESLEAQKAHYETWIKRHSNWDFAGIFYDFGITGTKADVRDGLQALMYECRIGRIDYVLTKSVSRFSRNTTDCLSLVRELLSYNIPVYFEKENLDTGSMESELILSIISGMAQEESESISKNVKWTVQKRIEAGKYKFGYPPYGYGRDENGMMVINPEEAKHVRQIFDWALSGIGTFKIAHMLEEQGVPTRKGSAWAASTVKGILTNEKYYGAAMFQKTYTDSSFQRHRNHGEADSYFVSGHHEAIVSEEEFHKVQEIIEMHIKEKCIVRGTGKYNNRYLFSGIITCGECGDTFKRQTISSGISWCCKTHLKNKAKCSMMFIHEEAFKAAFVTTLNKLVFGGKQVLYPYYEMLRITNSDENIQRIQGMKQELQRYAERKDTIRQLRAKGIIDSAVYNQEIGSIDKQCEELRSKITALQQSDASAVLNETEALLRFSDSAGMQTEFSEQLFASFVERIIVYTRKSVGFKLKCGLTLKEELCTDTK

SEQ ID NO: 4832 - protein, 515 aa, Unknown
  Description of Unknown: Integrase B4833 sequence
  SM00857,G3DSA:1.10.10.2600,IPR036162,PS51737,G3DSA:3.40.50.1390, IPR006119,IPR038109,PF07508,SSF53041,IPR011109, PF00239,PTHR30461,PS51736,Coil,cd00338
MQYLIYLRKSRADREAELRGEGETLARHEKALLELAKRQHLPIADIYREVVSGETIASRPMMQQLLSEVEQGIWNGVLVMEVERLARGDTIDQGIVAQAFKLSDTKIITPIKTYDPNNEFDEEYFEFGLFMSRREYKTIKRRLNNGRQASVKEGKYVGNRPPYGYERIKIENDKGFTLKPLEKEAQVVRMMFRWYAYGTHGISTIADQLNEMAIPSKTGKQWVYPTVRDILQNPVYVGKIRWGWRGQRKRVKNGSVSVSRPRSDDYLLADGIHPPIVVQQLFDQVQKKFSTHKPLPTSAREMKNPLAGLVICAKCGAKMQRRPYQRENIRTGLICPNNKCRNVSAPFDDVEQKLIEVLVEYIKEEKLRISNGHTQIDDSVLQILQNQLTDLQEETVDLNKQNDNIHDFLEKGIYDVDTFLQRSQKISSRITEIEEKQKTLQQDIIEENKRIESATSIIPMTEQLLLQYENMSALEKNSMLKEALRCVKYERECSIRDGGTADNFTLYLYPKISHK

SEQ ID NO: 4833 - protein, 515 aa, Unknown
  Description of Unknown: Integrase B4834 sequence
  PTHR30461:SF3,cd00338,SM00857,G3DSA:1.10.10.2600,IPR036162, PS51737,G3DSA:3.40.50.1390,IPR006119,IPR038109,PF07508, SSF53041,IPR011109,PTHR30461,PS51736, Coil,PF00239
MAYCIYLRKSRKDMEAEARGEGETLARHDRTLKELAQRMDYPIAKIYREIVSGESIANRPQMRQLLVDVAARKYEGVLVMEVERLARGDIHDQATVASTFKYSGTRIITPRETYDPSAANDEVHFEFMLFMSRCEYRTITRRIQTGRTSAAKEGRYIASRPPYGYRRIRRPDGVWTLEIIPEQAEIVRQIFCWYSHGEGGARIAARLNAMGVRTQMDKQWAQCTIARMIRNPIYKGYVTWAKRVDTVVGVDEHGAKQHKRVRNADPICVRGYHDPIVSDELFATANCTGREGSMPKRIGMPTQNPLAGLVHCALCGHHMVRTPGTLRPDGTRYPDRITCRTQGCTNYGCSIAALTEAVLNVLHSWSVSYPAAPEKAESREADIARDHARQHIAQLESQRAKLCDLLERGIYDDETYLQRSAALASQINAAREELKRIEAESEKPDPDALIRAIAPHCREALESFAVASSAEEKNRILRQLIDHITFRKSARGNNHDDKLSMVEITVHPFDASLSK

SEQ ID NO: 4834 - protein, 515 aa, Unknown
  Description of Unknown: Integrase B4835 sequence
  SM00857,G3DSA:1.10.10.2600,IPR036162,PF13408,IPR025827, G3DSA:3.40.50.1390,PS51737,IPR006119,IPR038109,PF07508, SSF53041,IPR011109,PTHR30461,Coil,PS51736, cd00338,PF00239
MSYLVYLRKSRKDLENPFMTTEEILNRHECILLDLAKKMNLSVGGIYREIVSGDSISARPVMQKLLREVESGMWEGVLVVEVERLARGDTVDQGIVQRTFQYSETLIITPQKTYNPSSESDQTFFEFGLFMSRQEYKTIKRRLKSGVMSAVHEGKWPYNSAPYGYRRYKLANQKGWSLEFDDQERPIAELIYHLFCDEKRGLGYISDYLEVRNIKSRTGGRFTESFLREFLRNPVNDGKVFYGRRKVVTKIVNGSSVRTRPRADEYIEVAGLHDPLIPHDLFLKAQERFRVSTPRNPSSYTVKNPLSGLLVCSECGRKLQRRPASTSKRGAPYDVLMCKTRGCPTVGSAVEVIEREVLHALEGIVRGYEADVPSVPSLVPQKEELLHNAVLHRADLNKQQERIYTLLEQGIYSTDVFLDRSKALEKQMQEVEHSIEIFKNELEEEKIKHDNWKSFVPTCKQLLDIYWTLTPDARNAALKEVIDRIEYKKLTRNPKGMCDVATFELTLYPKIPSKS

SEQ ID NO: 4835 - protein, 515 aa, Unknown
  Description of Unknown: Integrase B4836 sequence
  PTHR30461:SF3,cd00338,SM00857,G3DSA:1.10.10.2600,IPR036162, PF13408,IPR025827,G3DSA:3.40.50.1390,PS51737,IPR006119, IPR038109,PF07508,IPR011109,SSF53041,PTHR30461, PS51736,Coil,PF00239
MKKENEIRAVVYARYSSHSQTEQSIEGQISAAQIYAKAKGYTIVKEYVDRAKTGKNDNREAFQQMLSDTAKHEFSVIIVWKVDRFGRNREEITFNKYRCKKNDVRVEYIAEAVPDSPEGVILESVLEGMAEYYSLQLAQNIRRGIRASAEKCQAIGGHCSLGYAIDPKTKKYVIDPDTAPTVQLIFEKYAEGYTGMDIVRLLNEKGLRTVRGKPFTKNSLWTILKNERYTGVYLFKDEVRVEGGIPALVSRETFDKVQEMLEINHRSPVNTWNRATYLLTDKLFCGHCGSKMVGECGTSRTGATYNYYICAGKKRERNCSKKAVRQDWIEKVVLQQIRRVLFDQEFLEFIAHKAYTYYLEEKKKLDQSAAIKAQLSSVEKSIDNLIRAMEAGIFSASTKSRLDDLENQKAALTRTLAEIKLSEESFDLTEDRILFFLESMRGLDMDDVDSRKRLVKTFVNAVYLYDDKITLAFNFTDSCEKPEIIELADIADGIVEKFVHRASCSTRTKTLHGNV

SEQ ID NO: 4836 - protein, 515 aa, Unknown
  Description of Unknown: Integrase B4837 sequence
  PTHR30461:SF3,SM00857,G3DSA:1.10.10.2600,IPR036162,PS51737, G3DSA:3.40.50.1390,IPR006119,IPR038109,PF07508,SSF53041, IPR011109,PF00239,PTHR30461,PS51736,Coil, cd00338
MTMDRICMYLRKSRADEEAEKYGEGETLAKHKKILLKVAKEKGLNILRIREEIVSGESLVHRPEMLELLKEVKNKEYDAVLVMDMDRLGRGNMQEQGLILETFKESNTKIITPRKTYDLQDEFDEEYSEFEAFMARKELKIINRRLQRGRVRSIEDGNFLGPLPPFGYEIVCEGKTRTLTPHPEQAPIVKMIFDLYANHNMGGGKIANKLNELGYKTYTGKNWSSHLVLNIIKNEVYVGKIQWRKKVYKKSDNPEQIKEVKSLPREEWISVKGKHEPLISNDIFDKAQEILKKRSHVPYKTKITNPLAGIIICSKCGSSMVYRPYTNNIDPHIVCYNTSCNNKSSKFKFVEQRLLKGLEEWLEEYKAEWDNVEDKENKSKANNTLRMHKLSLSRLKNELEELEKQKNNLHDLLERGIYDVNTYLERSQLLAQRIDDTKFNIENTSKNIKNEEKRIDAQRNIIPKVKKVLDLYPKTDDPERKNKLLKSVLDSAVYEKEKEQRNDQFTLTLFPKLPK

SEQ ID NO: 4837 - protein, 515 aa, Unknown
  Description of Unknown: Integrase B4838 sequence
  SM00857,G3DSA:1.10.10.2600,IPR036162,PS51737,G3DSA:3.40.50.1390, IPR006119,IPR038109,PF07508,IPR011109,SSF53041, PF00239,PTHR30461,PS51736,Coil,cd00338
MQYLIYLRKSRADREAELRGEGETLARHEKALLELARHQHLPIADIYREVVSGETIASRPMMQQLLSEVEQGVWDGVLVMEVERLARGDTIDQGIVAQAFKLSDTKIITPIKTYDPNNEFDEEYFEFGLFMSRREYKTIKRRLNNGRQASVKEGKYVGNRPPYGYERIKIENDKGFTLKPLEKEAQVVRMMFRWYAYGAHGISTIADQLNEMAIPSKTGKQWVYPTVRDILQNPVYVGKIRWGWRGQHKRVKNGSVSVSRPRSDDYLLADGIHPPIIDQQLFDQVQKKFSMHKPLPTSAREMKNPLAGLVICAKCGAKMQRRPYQRENIRTGLICPNNKCRNVSAPFDDVEQKLIEVLAEYIKEEKLRISNGHTQIDDSILQILQNQLADLREETVDLNKQNDNIHDFLEKGIYDVDTFLQRSQKISSRITEIEEKQKTLQQEIIEENKRIESATSIIPMTEQLLLQYENMSALEKNSMLKEVLRCVKYERECSIRDGGTADNFTLYLYPKISHK

SEQ ID NO: 4838 - protein, 515 aa, Unknown
  Description of Unknown: Integrase B4839 sequence
  PTHR30461:SF3,SM00857,G3DSA:1.10.10.2600,IPR036162,PF13408, IPR025827,G3DSA:3.40.50.1390,PS51737,IPR006119,IPR038109, PF07508,IPR011109,SSF53041,PF00239, PTHR30461,PS51736,Coil,cd00338
MKGVIYARYSPGPNQTDQSIEGQLRECKQFAEENNITIVNTYADKKQTGRNDNRVQFQKMLQDSKKKQFDYVIVWKIDRFGRNREEIAKNKAILRMSGVKVLFAKEHIPDGPEGIILESVLEGLAEYYSANLSQNIIRGMRESAMKCKCNGSGLPLGYNVDKEHNYIRNDEEATLIKMIFKMYDDGSKINDICKYLNAHNYKTKRNSKFTHTGVSRILHNRQYIGEYRWKDIITPNGMPRIIDDELFERVAKRLERTKRAPSASRGDVKFLLTGKLFCGYCKSTMIGDSGTGKSGRKFYYYNCRIKKNKHTCKKKTVRKDWLEYEVARITANIVLQDKIIDYVSDKVVEIQKKEHEDKSNLNYYTVKLKETNSAIKNIMKVIESGIFTESMRERLLKLEDERSTYETEIAKEEIMRPTITKEQVVFFLKQFKNGNIEDKDYQAKLIDIFVNKVILYDDKIIITYNYSGEHNETSAKIIEEAAEELINEQEKCSDKLLSSPPQRYGSNDTNCYRTF

SEQ ID NO: 4839 - protein, 515 aa, Unknown
  Description of Unknown: Integrase B4840 sequence
  cd00338,SM00857,G3DSA:1.10.10.2600,IPR036162,PF13408, PS51737,G3DSA:3.40.50.1390,IPR025827,IPR006119,IPR038109, PF07508,IPR011109,SSF53041,PTHR30461,PS51736, Coil,PF00239
MSYLIYLRKSRKDLENPFMTTEEILNRHECILLDLAKKMNLSIGDIYREIVSGDSISARPVMQKLLREVESGMWEGVLVVEVERLARGDTVDQGIVQRTFQYSETLIITPQKTYNPSSESDQTFFEFGLFMSRQEYKTIKRRLKSGVMSAVHEGKWPYNSAPYGYRRYKLANQKGWSLEFDDQERPIAELIYHLFCDEKRGLGYISDYLEARNIKSRTGGRFTESFLREFLRNPANDGKVFYGRRKVVTKIVNGSSVRTRPRADEYIEVTGLHDPLIPHDLFLKSQERFRVSAPRNPSSYAVKNPLSGILVCSECGHKLQRRPASTSKRGASYDVLMCKTRGCPTIGSAVEVVEREVLRALEDIVRGYEADVPSVPSLIPQKEELLHNAILHRADLNKQQERIYTLLEQGIYSTDVFLDRSKAMESQMQEAEHSIEIFKKELEEEKIKYDNWKSFVPTCKQLLKLYWTLTPDARNAALKEVIDRIEYKKLTRNPKGMYDVATFELTLYPKIPSKS

SEQ ID NO: 4840 - protein, 515 aa, Unknown
  Description of Unknown: Integrase B4841 sequence
  PTHR30461:SF3,cd00338,SM00857,G3DSA:1.10.10.2600,IPR036162, PF13408,IPR025827,G3DSA:3.40.50.1390,PS51737,IPR006119, IPR038109,PF07508,SSF53041,IPR011109,PTHR30461, PS51736,Coil,PF00239
MYKRIGLYARYSDTKQDDGYSIEYQMSECQDYLNKQGLSLTKTYIDQAITGTKVAGREAFHELLNDVKNELIDVIVVYKFSRIFRNAYESHKYRKLFKKHNVRLISITQLMDDDTSAGRLMINVLADIDQFQSETISDFVKSSMREMAKQGYFTGGTVPYGYKLETVFDNGKKKKKRYTPDEFEKEVVKKLFELYADNYSLKYLQDYTKSIGASTRQGKPFGITSIARMLRNDFYIGVLRYNAQGHEPIVVYDVIPPIIDKVLWDRVQQRHKSQNYVKPRKRKDLYSLTGKIICGKCGKHFFGIRSASVQRGKKYDYKYYVCSTSKTYAECTCKRVRKDFLEKTVLNEIKKHILNEKAIYQIANEIIAKLGENPDSQKNKLKQLKKELSTVKSQISELLELRSLKLVNNAYVAEHMKKYEERAKEIDIQIMSIEQQTKMTISRAMIVDYLNKMMSISDTTDDEVLQTIFNNFVEKIVIDNEVIEVFLFTSPTTEQIGHKLPHGQPEWSLYTKTKR

SEQ ID NO: 4841 - protein, 515 aa, Unknown
  Description of Unknown: Integrase B4842 sequence
  SM00857,G3DSA:1.10.10.2600,IPR036162,PS51737,G3DSA:3.40.50.1390, IPR006119,IPR038109,PF07508,IPR011109,SSF53041, PF00239,PTHR30461,PS51736,Coil,cd00338
MYQSYEFKPEEILVYLRKSRSDDPYLSVEDVLQKHEEIIREWIGRNLVHDIPAKNFYREVVSGETIADRPEFCKVLRQVESPGIKGVLVVEVQRLSRGDLEDAGRLIKILRYTHTKVITPQKIYDIEDDYDRDFFERELKRGNEYLEYTKKILARGKYQSVKDGWYIASKPPFGFVRVTVQDGKRKRPTLDFGPDAPTVRYIFDRLNAGVLPYTVAKELKAMGANSPAGKPWTVQMLLDIAKNDHYDQMIAWKRRGDVSRVKDGEVVKSRPRSKDYELFPARHPRMIDHDVFVHVQELLKNRSRKRDSYEQVNPVAGIAYCGICGRAMMYHTGLRNGKFKYNPRLVCSGLTNCEAASCLFSEYSQALVSSLLCSIEDCKIELEEESDGREKEAQIQMLEKQVQTLELKELHLWEKYADGEMPKEIFDKLNLKNTESKGNAEKALEQLRSEKPQREHLQKKIAMLSDAIKAIESTSLSAKEKNAFLKTVIERIEYSRTHKEAKSHVPFRMSVKLRI

SEQ ID NO: 4842 - protein, 515 aa, Unknown
  Description of Unknown: Integrase B4843 sequence
  PTHR30461:SF3,cd00338,SM00857,G3DSA:1.10.10.2600,IPR036162, PF13408,PS51737,G3DSA:3.40.50.1390,IPR025827,IPR006119, IPR038109,PF07508,IPR011109,SSF53041, PTHR30461,PS51736,Coil,PF00239
MMQQALNAVIYARYSSHNQTEQSIEGQLRDCYAFAEREGLQVIGEYIDRAITGRTDERPDFQRMIADARKQEFQRVIVWKFDRFSRDRYDSAIYKHKLKQCGVRVLSAMENVGEGDVSIILEALLEASAEQYSLDLSKKVLRGQRESRLKGTFLGGLTPIGYKLENRKLVADERTAPIVRYIFEQYAKGTSKQDIINELATRGILNRHGKPLSHSTLQTILKNKKYIGVYTHGGQDVAGGCEALIDEKTFLKVQEQLSKRKHAPAASKAVIEYLLQGKLYLYCGYCGFNMFGDSGRGRNGSTYRYYACRRRKKERDCKKKNEKKDFIEWYVVEQTVEYVLTPERIEYIASELVAQYKKDCGIDRIKTYEKQLDRIKAEISRLVNTLAVCPAAARQPIFDKMEQLDAEKQEVELDLSKLRISAKIQISKEHIADWLKQFCNGDALDVDFQKRIIDTFINSVYLYDDKVIIYYNIEGGKQVSYIDMIDSTEEPPFSDDAPGSSGGSDLKRPALRLCC

SEQ ID NO: 4843 - protein, 515 aa, Unknown
  Description of Unknown: Integrase B4844 sequence
  PTHR30461:SF3,SM00857,G3DSA:1.10.10.2600,IPR036162,PF13408, PS51737,G3DSA:3.40.50.1390,IPR025827,IPR006119,IPR038109, PF07508,SSF53041,IPR011109,PTHR30461,Coil, PS51736,cd00338,PF00239
MQLNMRDTKTSNELQAARGVIYARYSSSGQREESIEGQIRECREYAKRHNIVIVGEYCDHAISGTSDKRPEFQRLIKDSAKGQFAFVITWKGDRFARNRYDSAVYKYRLQQNGVRILYAKESIPDGPEGIILESVMEGFAEYYSANLSQNVKRGMYDSALKLQTLGQYCYGLQKGADGKWEQNPAQAPIVKRIFEEYVAGRPATDIYRDLNNEGFRTWTGGLFNKNSLRRMLKNEKYCGVYQYADIRVEDGIPAIVNRETFDKAQKMLKAHHEKPASKKIDGGFLLTGKLFCGHCGELMTGDGGTSKTGRVYQYYTCNNRRLKKCDKERAPKQWIEDIVVQKLVEIANDDNVIEAFADRYMEWQEKQKKSSPSSGMEERLKKIETAIKNTMSLIDSGFITDSLKSHLVELESERVSVEQGIAKEQANSPSLKRSEVVYFLKKFRDGDIDDVSWRIYLVETFLQAAYLFDDGRLLLHLNYSGDNNEITAQVAEQVVKEGADLCSDFAPPSPPEKAP

SEQ ID NO: 4844 - protein, 515 aa, Unknown
  Description of Unknown: Integrase B4845 sequence
  PTHR30461:SF3,SM00857,G3DSA:1.10.10.2600,IPR036162,PF13408, IPR025827,G3DSA:3.40.50.1390,PS51737,IPR006119,IPR038109, PF07508,IPR011109,SSF53041,PF00239,PTHR30461, PS51736,Coil,cd00338
MELSKGVIYARYSSDKQRDESIEGQIRECKEYAEREGIVITHIYTDKALSARTDHRPEFRQMIDDAKKHNFEYVIVYQLDRFSRSREDSAVYKSILKRNGVKVISAKENISSDPAGIILESVLEGMAEYYSAELAQKVRRGMTDNALKGKMNGTPTPLGYDKTKENSLVINKREAKIVERIFDMYLKGHSIPSICSFLNSKGYLSKKGGKFSYAVIRRILSNEKYIGIMKWNDIIVEGAIPSIISKEIFDKVQSANSRRIKLKASRSEFYNLCGKLYCGKCNAHYVGSTATSRSGEKHYYYVCNNRRKHHTCDAPNLKREIVEDIVINQTLEILNQPSTIEQLAELAIKANKDMMSTSELELQAVNDRINQLQSELDNYMKAIAKGFISDTLQNQIEKTEAELQDHMTRRANHEMASNQIQLTAEHIEFFLHKMAKENPTTKRGRASIIDTFIKQATIFDDRVEIIFNYSNDLPQFKEQAITCSHSCDMVVHTTHCTNHFYIARSRYPIRLVITY

SEQ ID NO: 4845 - protein, 515 aa, Unknown
  Description of Unknown: Integrase B4846 sequence
  SM00857,G3DSA:1.10.10.2600,IPR036162,PF13408,IPR025827, G3DSA:3.40.50.1390,PS51737,IPR006119,IPR038109,PF07508, SSF53041,IPR011109,PTHR30461,Coil,PS51736, cd00338,PF00239
MQYLIYLRKSRADREAELRGEGETLARHEKALLELARRQHLPIADIYREVVSGETIASRPMMQQLLSEVEQGVWDGVLVMEVERLARGDTIDQGIVAQAFKLSDTKIITPIKTYDPNNEFDEEYFEFGLFMSRREYKTIKRRLNNGRQASVKEGKYVGNRPPYGYERIKIENDKGFTLKPLEKEAQVVRMMFRWYAYGAHGISTIADQLNEMAIPSKTGKQWVYPTVRDILQNPVYIGKIRWGWRGQRKRVKNGSVSVSRPRSDDYLLADGIHPPIVDQQLFDQVQKKFSTHKPLPTSAREMKNPLAGLVICAKCGAKMQRRPYQRQNIRTGLICPNNKCRNVSAPFDDVEQMLIEVLAEYIKEEKLRISNGHTQIDDSVLQILQNQLTDLQEETVDLNKQNDNIHDFLEKGIYDVDTFLQRSQKISSRITEIEEKQKTLQQEIIEENKRIESATSIIPMTEQLLLQYENMSALEKNSMLKEVLRCVKYERECSIRDGGTADNFTLYLYPKISHK

SEQ ID NO: 4846 - protein, 515 aa, Unknown
  Description of Unknown: Integrase B4847 sequence
  PTHR30461:SF3,SM00857,G3DSA:1.10.10.2600,IPR036162,PF13408, IPR025827,PS51737,G3DSA:3.40.50.1390,IPR006119,IPR038109, PF07508,IPR011109,SSF53041,PTHR30461,Coil, PS51736,cd00338,PF00239
MKAAIYARFSSHNQREESIEGQVRACKRFAKEHGMTVIEIYADRGLSGLHADNRPEFQRMIQDSDHHRFEALIMWNLDRFSRDKYDTAVYKTRLKKNGVSLYYSDQSIPDTPEGIILESLLEGFAQYYSANLARNAKRGLQENARKCLWNGGCVPLGYLIDEHQRFVLEPIGAACVRMIFELYASGQSIKSIVCTLNEKGYKTVKGNRFRLGSIQGILRNRKYIGEYHASGITVPNGIPAIVDVQLFNDVQARLGVVASAKAHNKADIPYLLTTKVFCGHCGSPMIGESGTGKGGATYRYYKCSCRKNRKGTCDKKTEPKDWLEENVVRQTVKNVLRPEVIKEISENCAAALKADASDESLVQALKAQLAETDKGLRNLLKAIEAGIISSTTRERMAELESQKSELEAQIAREQLRKPEITAEQISFWLESFLAGDIHDPKYQERIINALVRRVDVYDDGPEKQKLTIFYNITKNNHSSSKISISKCSDIECIALPKRSVAKAADFFSLLAEGRE

SEQ ID NO: 4847 - protein, 515 aa, Unknown
  Description of Unknown: Integrase B4848 sequence
  cd00338,SM00857,G3DSA:1.10.10.2600,IPR036162,PF13408, IPR025827,G3DSA:3.40.50.1390,PS51737,IPR006119,IPR038109, PF07508,SSF53041,IPR011109,PTHR30461,PS51736, Coil,PF00239
MSYLIYLRKSRKDLENPFMTTEEILNRHECILLDLAKKMNLSIGDIYREIVSGDSISARPVMQKLLREVESGMWEGVLVVEVERLARGDTVDQGIVQRTFQYSETLIITPQKTYNPSSESDQTFFEFGLFMSRQEYKTIKRRLKSGVMSAVREGKWPYNSTPYGYRRYKLENQKGWSLEFDDQERPIAELIYRLFVDEKKGFGYISDYLEAHNIKSRTGGRFTDSFLRDFIRNPVNDGKVFYGRRKVVTKIVNGSSVRTRPRADEYIEVDGLHDPLIPHDLFLKAQERFHTSTPRKPSTYTVKNPFSGLLVCSECGRKLQRRPASASKRGVPYDMLMCNTRGCPTIGSAVEVVEREVLRALEDIVRGYEADVPSVPSLVPQKEELLHNAILHRADLNKQQERIYTLLEQGIYSTDVFLDRSKALESQMQEVEHSIEIFKKELEEEKIKYDNWKSFVPTCKQLLEIYWTLTPDARNAALKEVIDRIEYKKLTRNPKGMYDVAAFELTLYPKIPSKS

SEQ ID NO: 4848 - protein, 515 aa, Unknown
  Description of Unknown: Integrase B4849 sequence
  PTHR30461:SF3,SM00857,G3DSA:1.10.10.2600,IPR036162,PS51737, G3DSA:3.40.50.1390,IPR006119,IPR038109,PF07508,IPR011109, SSF53041,PTHR30461,Coil,cd00338,PF00239
MKAVILARVSSKEQEDGYSLDAQISRLSDYANKKGLEVIKTFTLTESSTQGDRKKFQEVLKFCSSQKETIALIADAVDRVQRSFKESTYLDELRKKEKIELHFYREGMVVGKNASSSDLLRWDFLVIGAKSYVLALAENVKRSINFKIEHGEWCGKAPIGYLNRRNAHGKSEICLDPVRAPIIKKLFQEYSLGKTSFKELANLADKWDLKSNSPKARKLTSKTLYDTLTNPFYCGKMRIKGQLYPHIYEPLISEDLWNKCQEVRLGYKKQPVKYASKEFLYRGLITCYNTGKIVTTDQKRGHINYLICYDKTGKRIYCHEETITKQVQQILDSIIIPEPILTGLNQILRDSKKNEALLHEQAVTSLRKDLDITKKRIENLVDMYLDKKIDDEIYSSKINQLKNEKTSLENKIAAHSVSDDKFNETIINLFDIVNHAGKKFANSSNIEVKRRILKLIIRTMKLDRGNLGYELAWPFSELPKSDDCYLWRTLVDNLRTNHRDKILLIGQQLPYLLTF

SEQ ID NO: 4849 - protein, 515 aa, Unknown
  Description of Unknown: Integrase B4850 sequence
  PTHR30461:SF3,SM00857,G3DSA:1.10.10.2600,IPR036162,PF13408, PS51737,IPR025827,G3DSA:3.40.50.1390,IPR006119,IPR038109, PF07508,IPR011109,SSF53041,PTHR30461, Coil,PS51736,cd00338,PF00239
MNENKNAVLYARFSSDMQHETSIEAQEEAIRKYARENGYTIIAEYIDRAKSATTTAKRDRFNQMIEDSKDGGFSVVIVHKYDRFARNRLDSTVAKAILDKNGVRVISVLEPTDDTPEGELMEGMFELLAQYYSSNLGREVMKGFKVRAKKCLHNGGIAPLGYDVDPDSKKLIINENEAIIVRKIFDMYTSGYGYNTIIAHLNECGYVTKYGNEFAKNSLYSILRNKKYAGYYVYNQWDGKHNRHRAKPEDEVICIPDGVPAIISEEIYDKAAEIMAKHKLSPGANTAKTTYLLSGMIRCGHCGAIMTGNRRMNGKGYTYCSYRCQHKQSTECANKEIRHDRIEEYVLQVLEQNIFNEDYIPDIIAEIKEQAVQHNTSVIKELADLTMKLERIKTRRKNILNAIADGIAEDDCKEILSQLKSDEYSCIKRQKALSTTETDIDISTAELTERISELSIYIYERNIAECKKFIGQYVKSVVVYDTKVEVTVTIPSELLCGCEYSLTRSVGRKFLPMPR

SEQ ID NO: 4850 - protein, 515 aa, Unknown
  Description of Unknown: Integrase B4851 sequence
  PTHR30461:SF3,SM00857,G3DSA:1.10.10.2600,IPR036162,PF13408, IPR025827,G3DSA:3.40.50.1390,PS51737,IPR006119,IPR038109, PF07508,SSF53041,IPR011109,PF00239,PTHR30461, PS51736,Coil,cd00338
MRAFIYCRFSSHKQQELSIEGQRDICQEYADKHNITVVGQYADRARSGKTENRADFRRLMRDAATGVVDCVLVWRYDRFFRNRAESALYRKQLEAAGVHLISVTEYIPEGSAGIITQGMIETVAEYFSAKLSEDVSRGMNKAAQHCQIVGRAPLGYRAGPNKRWQIDPVGAELVRRIFEWYASGKAMGQLAAQLNEEGHRTTNGTLYTRSSFNSILRNEKYIGVYSYGGEVRIEGGCPRIIEDELFFTVQRRLSANRHRPGAYKAEVPYLLSGKLFCGLCGAPMTGTAGTSHTGARHYYYICNNRRAKTCEKKNVRLDLIEEAVLQSALDILTDENIAYISAEVERRCAENSDSAALLASLNAQLEEVQRRLKNIGNAIAQGIITETTKELLEEAEADRTALRQQIDRAKVQAALVVKAEAVACWLDGFRRGDRTDPDFRRQVFGALVHSVFVYDDYLKIIFNVDSAGAAVVPYEAAQAATPSEAPPGSYLDTLGAPKKAAMLIAAFSFICLSII

SEQ ID NO: 4851 - protein, 515 aa, Unknown
  Description of Unknown: Integrase B4852 sequence
  SM00857,G3DSA:1.10.10.2600,IPR036162,PF13408,IPR025827, PS51737,G3DSA:3.40.50.1390,IPR006119,IPR038109,PF07508, IPR011109,SSF53041,PF00239,PTHR30461,PS51736, Coil,cd00338
MSYLIYLRKSRKDLENPFMTTEEILNRHECILLDLAKKMNLSIGDIYREIVSGDSISARPVMQKLLREVESGMWEGVLVVEVERLARGDTVDQGIVQRTFQYSETLIITPQKTYNPSSESDQTFFEFGLFMSRQEYKTIKRRLKSGVMSAVREGKWPYNSAPYGYRRYKLANQKGWSLEFDDQERPIAELIYHLFCDEKRGLGYISDYLEARNIKSRTGGRFTESFLREFLRNPANDGKVFYGRRKVVTKIVNGSSVRTRPRADEYIEVAGLHDPLIPHDLFLKAQERFRVSTPRNPSSYAVKNPLSGILVCSECGHKLQRRPASTSKRGAPYDVLMCKTRGCPTIGSAVEVVEREVLRALEDIVRGYEADVPSVPSLIPQKEELLHNAILHRADLNKQQERIYTLLEQGIYSTDVFLDRSKAMESQMQEAEHSIEIFKKELEEEKIKYDNWKSFVPTCKQLLKLYWTLTPDARNAALKEVIDRIEYKKLTRNPKGMYDVATFELTLYPKIPSKS

SEQ ID NO: 4852 - protein, 515 aa, Unknown
  Description of Unknown: Integrase B4853 sequence
  cd03768,PTHR30461:SF3,SM00857,G3DSA:1.10.10.2600,IPR036162, PF13408,IPR025827,G3DSA:3.40.50.1390,PS51737,IPR006119, IPR038109,PF07508,IPR011109,SSF53041,PTHR30461, PS51736,Coil,PF00239
MKIGIYPRKSVYRDNSDSVAVQIKMCKDYAGIIFRGEELEFFIYDQDEGFSGKNTNRPSFQQLMQDVKANKLDVVMVYKLDRISRNVKEFSAMYDTMQDHDVSFVSVKESFDTSTPIGRTVMYILAAFAQLERENTSERVGDNMKQLGASGKWTGGHLPSGMTSIRKKVDGKEHSYLIVNQETIGRVKLLYQLILEGYPITRVERYCRDHSITSETGKFLNTSQIYGILTNPVYCQADLQAFYYLHGKGCTLPDKRLFDGTKGLIGYGRTQGTENKKKLDMDRWIIALGIHDYVIPANDWIAVQERLGQNKQVRTLKHEVGILRGILKCRCGRTMQNRVYIKNQRMFAYYFCPARDREGINYCDADFVKIDTIDNLFIDKLKAIRIDEEFVHPQHNQHSVTDINALKKDIRSTESALENLTRQLQENVTSTAAKYIVQQIENLDKKLNTLKNQLQLEELRDNKERSETEEREEIYKNICYLLDNFDDMEYKEKNELIRRTVKRCVLNDKNLEISF

SEQ ID NO: 4853 - protein, 515 aa, Unknown
  Description of Unknown: Integrase B4854 sequence
  cd00338,SM00857,G3DSA:1.10.10.2600,IPR036162,PS51737, G3DSA:3.40.50.1390,IPR006119,IPR038109,PF07508,SSF53041, IPR011109,PTHR30461,PS51736,Coil,PF00239
MQYLIYLRKSRADREAELRGEGETLARHEKALLELARRQHLPIADIYREVVSGETIASRPMMQQLLSEVEQGVWDGVLVMEVERLARGDTIDQGIVAQAFKLSDTKIITPIKTYDPNNEFDEEYFEFGLFMSRREYKTIKRRLNNGRQASVKEGKYVGNRPPYGYERIKIENDKGFTLKPLEKEAQVVKMMFRWYAYGAHGISTIADQLNEMAIPSKTGKQWVYPTVRDILQNPVYVGKIRWGWRGQRKRVKNGSVSVSRPRSDDYLLADGIHPPIIDQQLFDQVQKKFSMHKPLPTSAREMKNPLAGLVICAKCGAKMQRRPYQRENIRTGLICPNNKCRNVSAPFDDVEQKLIEALAEYIKEEKLRISNGHTQIDDSVLQILQNQLADLWEETVDLNKQNDNIHDFLEKGIYDVDTFLQRSQKISSRITEIEEKQKTLQQEIIEENKRIESATSIIPMTEQLLLQYENMSALEKNSMLKEVLRCVKYERECSIRDGGTADNFTLYLYPKISHK

SEQ ID NO: 4854 - protein, 515 aa, Unknown
  Description of Unknown: Integrase B4855 sequence
  PTHR30461:SF3,cd00338,SM00857,G3DSA:1.10.10.2600,IPR036162, PF13408,IPR025827,G3DSA:3.40.50.1390,PS51737,IPR006119, IPR038109,PF07508,IPR011109,SSF53041, PTHR30461,PS51736,Coil,PF00239
MNIEYSGLVADAYCRYSSKMQDDGNSIEYQIAEIEEFCIKNGIKIRKWHIDKAVSGKKVAGRDQFYNLIEDVKAKKINALIVWKTNRAFRNSYESHKYRKVLRKYGVKLISATQIIDEDTSTGRLTTNILSDIDQYQSEVIADHVKSAMREMVRRGFYTGQTIPYGYKVEDTNDNGKPRKKYIINEEEAVYVKRIFEEFANGLTIAHISRWMKAEGLKTRRGNVFDYDALRKMLKNDFYIGTRRYTVKELDTIEIENAVPPIIDERTFDAVQHVFLSRKKDTKPRSGKRTYGLTGKIVCAYCNEKFYGKAYANSPYYHCKNKVKKKTCDCKSIRKDKLEKKVLQEIKENILNAQSIEFIAEKVLKEIGSMPTQKVDRKELLKRKETLLREIKELVQLKLDGLINAEALRDMQMEKNGEIADIDLELALLEDREEKNIDKEFIVNYLNDLISYSNSDNDEILKVLFDKTVDKIVISNSGVELHLAVFFTKYTHKTDLAFPKFALSRDISRYDINKL

SEQ ID NO: 4855 - protein, 515 aa, Unknown
  Description of Unknown: Integrase B4856 sequence
  SM00857,G3DSA:1.10.10.2600,IPR036162,PF13408,IPR025827, G3DSA:3.40.50.1390,PS51737,IPR006119,IPR038109,PF07508, IPR011109,SSF53041,PF00239,PTHR30461,PS51736, Coil,cd00338
MSYLIYLRKSRKDLENPFMTTEEILNRHECILLDLAKKMNLSVGDIYREIVSGDSISARPVMQKLLREVESGMWEGVLVVEVERLARGDTVDQGIVQRTFQYSETLIITPQKTYNPSSESDQTFFEFGLFMSRQEYKTIKRRLKSGVMSAVREGKWPYNSAPYGYRRYKLANQKGWSLEFDDQERPIAELIYHLFCDEKQGLGYISDYLEARNIKSRTGGRFTESFLREFLRNPANDGKVFYGRRKVVTKIVNGSSVRTRPRADEYIEVAGLHDPLIPHDLFLKAQERFRVSTPRNPSSYTVKNPLSGLLVCSECGHKLQRRPASTSKRGAPYDVLMCKTRGCPTVGSAVEVIEREVLYALEDIVRGYEADVPSVPSLVPQKEELLHNAILHRTDLNKQQERIYTLLEQGIYSTDVFLDRSKALEKQMQEVDHSIEVLKNELEEEKIKYNNWKSFVPTCKQLLEIYWTLTPDAKNSALKEVIDRIEYKKLTRNPKGMCDVATFELTLYPKIPMKS

SEQ ID NO: 4856 - protein, 515 aa, Unknown
  Description of Unknown: Integrase B4857 sequence
  PTHR30461:SF3,cd00338,SM00857,G3DSA:1.10.10.2600,IPR036162, PF13408,PS51737,G3DSA:3.40.50.1390,IPR025827,IPR006119, IPR038109,PF07508,SSF53041,IPR011109,PTHR30461, Coil,PF00239
MYEEIKTACLYLRYSSSNQTEQSIEGQMHVCQDFCKRHNIRIVEMYIDRATSASKDIEKRVEFLKMIKDSEKGNFNAVIVYKLDRFARSRYDSATYKYRLKRNGVQLISATENITQDPEGIILESVLEGMAEFYSAELSQKINRGMRESAMKHNSIGGAIPLGYKTVDKKLVIDETTAPIVREAFQMYADGESVAEICRTFNNRGYKTSKGTRFGKSSFTKIFRNEKYIGVYKYHDYRAEDVIPPIIDKDLWDRVQVRVGKIKKAPARNKARHTYLLTGKLFCGHCGSAMNADGNSQGYLYYRCYGKKNLDKQCNKRNMEKNLIERLVAQDAMSFLTDEYIEKIATIACDRNKQEIESDSPIPVIRDRIRQVDVSLNNLLKAIETGSAPDMLVKRMGELETEKKDMEVQLKKEMAHQVYIDKEQVIFWLEKFREGDINDEEFCQTVIDLFVNSVTVWDEPDDKFKITIAYNLTSIPQKTYRLSKDGRLSDYASNTPNGETDKDNIILFHNLLIYM

SEQ ID NO: 4857 - protein, 515 aa, Unknown
  Description of Unknown: Integrase B4858 sequence
  SM00857,G3DSA:1.10.10.2600,IPR036162,PS51737,G3DSA:3.40.50.1390, IPR006119,IPR038109,PF07508,SSF53041,IPR011109, PF00239,PTHR30461,PS51736,Coil,cd00338
MQYLIYLRKSRADQEAELRGEGETLARHEKALLELARRQHLPIADIYREVVSGETIASRPMMQQLLSEVEQGVWDGVLVMEVERLARGDTIDQGIVAQAFKLSDTKIITPIKTYDPNNEFDEEYFEFGLFMSRREYKTIKRRLNNGRQASVKEGKYVGNRPPYGYERIKIENDKGFTLKPLEKEAQVVRMMFRWYAYGAHGISTIADQLNEMAIPSKTGKQWVYPTVRDILQNPVYVGKIRWGWRGQRKRVKNGSVSVSRPRSDDYLLADGIHPPIIDQQLFDQVQKKFSMHKPLPTSAREMKNPLAGLVICAKCGAKMQRRPYQRENIRTGLICPNNKCRNVSAPFDDVEQKLIEVLAEYIKEEKLRISNGHTQIDDSILQILQNQLADLREETVDLNKQNDNIHDFLEKGIYDVDTFLQRSQKISSRITEIEEKQKTLQQEIIEENKRIESATSIIPMTEQLLLQYENMSALEKNSMLKEVLRCVKYERECSIRDGGTADNFTLYLYPKISHK

SEQ ID NO: 4858 - protein, 515 aa, Unknown
  Description of Unknown: Integrase B4859 sequence
  cd00338,SM00857,G3DSA:1.10.10.2600,IPR036162, PF13408,IPR025827,G3DSA:3.40.50.1390,PS51737, IPR006119,IPR038109,PF07508,SSF53041, IPR011109,PTHR30461,PS51736,Coil,PF00239
MSYLIYLRKSRKDLENPFMTTEEILNRHECILLDLAKKMNLSIGDIYREIVSGDSISARPVMQKLLREVESGMWEGVLVVEVERLARGDTVDQGIVQRTFQYSETLIITPQKTYNPSSESDQTFFEFGLFMSRQEYKTIKRRLKSGVMSAVREGKWPYNSTPYGYRRYKLENQKGWSLEFDDQERPIAELIYRLFVDEKKGFGYISDYLEAHNIKSRTGGRFTDSFLRDFIRNPVNDGKVFYGRRKVVTKIVNGSSVRTRPRADEYIEVDGLHDPLIPHDLFLKAQERFHTSTPRKPSTYTVKNPFSGLLVCSECGRKLQRRPASASKRGVPYDMLMCNTRGCPTIGSAVEVVEREVLRALEDIVRGYEADVPSVPSLVPQKEELLHNAILHRADLNKQQERIYTLLEQGIYSTDVFLDRSKALESQMQEVEHSIEIFKKELEEEKIKYDNWKSFVPTCKQLLKLYWTLTPDARNAALKEVIDRIEYKKLTRNPKGMYDVATFELTLYPKIPSKS

SEQ ID NO: 4859 - protein, 515 aa, Unknown
  Description of Unknown: Integrase B4860 sequence
  SM00857,G3DSA:1.10.10.2600,IPR036162,PF13408,IPR025827, PS51737,G3DSA:3.40.50.1390,IPR006119,IPR038109,PF07508, SSF53041,IPR011109,PF00239,PTHR30461,PS51736, Coil,cd00338
MACNKRGYIYARFSSDNQREVSIDDQIKAGKDFCEANGIQVAGCYSDYALTGRNDNRPDFKRMMREIDGCDIVVIWNTDRLHRNMFNAFKYLGELIGAGKDFASVTQPELNGESEVRLLLYSIYTWKDQRYSEDLSANVSRGMRGKAERCEYLGYSKFGYGHEGNAITVNQDEAETVCKMHEMWQSGTTIAGIARMLKDMGVATSRGTDPGYNFVRAVLLDESYTGVYIWDDIRVEGGMPAIISRACYEKTLRRFQFRPRKKEARDYMLSGRLICGTCHEYMHGEKAKGGKAVYYCCKGKRKACQGNIRAEQLEDRVVEVVRGIFCDYDNCKRVVDFVLDAQSEEAPRTDIEGYEKQLKNIARKRQNLVKAIAEGLPMDDARETLDGLSRQAATIERRIEEAQKVNAHLDADALYEILDAVRRGEFTDAEVLETFVSEVYLYNDCIAIVTNLDGSNTEPMEVFAALEKEEPAPFEKGTGNIQMVGHRNPNTYLCSCTVVVLSTAIAMIAPLQKAS

SEQ ID NO: 4860 - protein, 515 aa, Unknown
  Description of Unknown: Integrase B4861 sequence
  PTHR30461:SF3,SM00857,G3DSA:1.10.10.2600,IPR036162,PF13408, PS51737,G3DSA:3.40.50.1390,IPR025827,IPR006119,IPR038109, PF07508,SSF53041,IPR011109,PF00239,PTHR30461, PS51736,Coil,cd00338
MSVDIKWQVPKAQPEANELAVVYARYSSHSQGEQSIEGQLSNARDYAAAHGYTIVHEYVDRAKSGRTDNRAEFQQMLKDTAKRQFSVIILWKVDRFGRNREEIAINKMKCRKNGVRVEYVAETIPDSPEGVILESVLEGFAEYYSLQLSQNIRRGRAESAEKCQSLGGNRPLGYKTGPDKKFVIDENTAPTVKIIFTMYADGKTVTEIVDKLNEMGLRTLRGGPFTKNSLHSILKNKKYIGIYEYQGHEIKDGVPRIIEDDVFNKVQEMLKINKRAPAKTWSRADYILTDKLFCGKCGALMFGESGTSKTGAKHNYYICSNKKRFRSCDKKAVRQADIEDTVLNATHELLQDDELLDYIVDRTWEYYLAQDNSQEELRNLQRQLAQTDTAISNLIRAIEAGILTEETKKRMDELTQQKADLKASIADREIARGFHLKKSHIAYYLRSLRDADWSDKETQKRLIQTFVNAVFVYDDHITLTYNFSGDKNTITLRDMQRFEDGEEFGCRASRSTKTI

SEQ ID NO: 4861 - protein, 515 aa, Unknown
  Description of Unknown: Integrase B4862 sequence
  cd00338,SM00857,G3DSA:1.10.10.2600,IPR036162,PS51737, G3DSA:3.40.50.1390,IPR006119,IPR038109,PF07508,SSF53041, IPR011109,PTHR30461,PS51736,Coil,PF00239
MQYLIYLRKSRADREAELRGEGETLARHEKALLELARRQHLPIADIYREVVSGETIASRPMMQQLLSEVEQGVWDGVLVMEVERLARGDTIDQGIVAQAFKLSDTKIITPIKTYDPNNEFDEEYFEFGLFMSRREYKTIKRRLNNGRQASVKEGKYVGNRPPYGYERIKIENDKGFTLKPLEKEAQVVRMMFRWYAYGAHGISTIADQLNEMAIPSKTGKQWVYPTVRDILQNPVYVGKIRWGWRGQRKKVKNGSVSVSRPRSDDYLLADGIHPPIIDQQLFDQVQKKFSMHKPLPTSAREMKNPLAGLVICAKCGAKMQRRPYQRENIRTGLICPNNKCRNVSAPFDDVEQKLIEVLAEYIKEEKLRISNGHTQIDDSVLQILQNQLADLREETVDLNKQNDNIHDFLEKGIYDVDTFLQRSQKISSRITKIEEKQKTLQQEIIEENKRIESATSIIPMTEQLLLQYENMSALEKNSMLKEVLRCVKYERECSIRDGGTADNFTLYLYPKISHK

SEQ ID NO: 4862 - protein, 515 aa, Unknown
  Description of Unknown: Integrase B4863 sequence
  PTHR30461:SF3,cd00338,SM00857,G3DSA:1.10.10.2600,IPR036162, PF13408,IPR025827,G3DSA:3.40.50.1390,PS51737,IPR006119, IPR038109,PF07508,IPR011109,SSF53041, PTHR30461,PS51736,Coil,PF00239
MYKRIGLYARYSDTKQDDGYSIEYQMSECQDYLNKQGLSLTKTYIDQAITGTKVAGREAFHELINDVKNELIDVIVVYKFSRIFRNAYESHKYRKLFKKHNVRLISITQLMDDDTSAGRLMINVLADIDQFQSETISDFVKSSMREMAKQGYFTGGTVPYGYKLETVFDNGKKKKKRYTPDEFEKEVVKKLFELYADNYSLKYLQDYTKSIGASTRQGKPFGITSIARMLRNDFYIGVLRYNAQGHEPIVVYDVIPPIIDKVLWDRVQQRHKSQNYVKPRKRKDLYSLTGKIICGKCGKHFFGIRSASVQRGKKYDYKYYVCSTSKTYAECTCKRVRKDFVEKTVLNEIKKHILNEKAIYQIANEIIAKLGENPDSQKNKLKQLKKELSTVKSQISELLELRSLKLVNNAYVAEHMKKYEERAKEIDIQIMSIEQQTKMTISHAMIVDYLNKMMSISDTTDDEVLQTIFNNFVDKIVIDNEVIEVFLFTSPTTEQIGHKLPHGQPEWSLYTKTKR

SEQ ID NO: 4863 - protein, 515 aa, Unknown
  Description of Unknown: Integrase B4864 sequence
  PTHR30461:SF3,cd00338,SM00857,G3DSA:1.10.10.2600,IPR036162, PF13408,IPR025827,G3DSA:3.40.50.1390,PS51737,IPR006119, IPR038109,PF07508,IPR011109,SSF53041,PTHR30461, PS51736,Coil,PF00239
MYKRIGLYARYSDTKQDDGYSIEYQMSECQDYLNKQGLSLTKTYIDQAITGTKVAGREAFHELINDVKNELIDVIVVYKFSRIFRNAYESHKYRKLFKKHNVRLISITQLMDDDTSAGRLMINVLADIDQFQSETISDFVKSSMREMAKQGYFTGGTVPYGYKLETVFDNGKKKKKRYTPDEFEKEVVKKLFELYADNYSLKYLQDYTKSIGASTRQGKPFGITSIARMLRNDFYIGVLRYNAQGHEPIVVYDVIPPIIDKVLWDRVQQRHKSQNYVKPRKRKDLYSLTGKIICGKCGKHFFGIRSASVQRGKKYDYKYYVCSTSKTYAECTCKRVRKDFLEKTVLNEIKKHILNEKAIYQIANEIIAKLGENPDSQKNKLKQLKKELSTVKSQISELLELRSLKLVNNAYVAEHMKKYEERAKEIDIQIMSIEQQTKMTISHAMIVDYLNKMMSISDTTDDEVLQTIFNNFVEKIVIDNEVIEVFLFTSPTTEQIGHKLPHGQPEWSLYTKTKR

SEQ ID NO: 4864 - protein, 515 aa, Unknown
  Description of Unknown: Integrase B4865 sequence
  cd00338,SM00857,G3DSA:1.10.10.2600,IPR036162,PF13408, IPR025827,G3DSA:3.40.50.1390,PS51737,IPR006119,IPR038109, PF07508,IPR011109,SSF53041,PTHR30461,PS51736, Coil,PF00239
MSYLIYLRKSRKDLENPFMTTEEILNRHECILLDLAKKMNLSIGDIYREIVSGDSISARPVMQKLLREVESGMWEGVLVVEVERLARGDTVDQGIVQRTFQYSETLIITPQKTYNPSSESDQTFFEFGLFMSRQEYKTIKRRLKSGVMSAVREGKWPYNSTPYGYRRYKLENQKGWSLEFDDQERPIAELIYRLFGDEKKGFGYISDYLEAHNIKSRTGGRFTDSFLRDFLRNPVNDGKVFYGRRKVVTKIVNGSSVRTRPRADEYIEVDGLHEPLIPHDLFLKAQERFHSSAPRKPSTYTVKNPFSGLLVCSECGRKLQRRPASASNRGVPYDMLMCNTRGCPTIGSAVEVVEREVLRALEDIVRGYEADVPSVPSLVPQKEELLHNAVLRRADLNKQQERIYTLLEQGIYSTDVFLDRSKALEKQMQEVEHSIEIFKNELEEEKIKHDNWKSFVPTCKQLLDIYWTLTPDARNAALKEVIDRIEYKKLTRNPKGMYDVATFELTLYPKIPSKS

SEQ ID NO: 4865 - protein, 515 aa, Unknown
  Description of Unknown: Integrase B4866 sequence
  cd00338,SM00857,G3DSA:1.10.10.2600,IPR036162,PS51737, G3DSA:3.40.50.1390,IPR006119,IPR038109,PF07508,IPR011109, SSF53041,PTHR30461,PS51736,Coil,PF00239
MQYLIYLRKSRADQEAELRGEGETLARHEKALLELARRQHLPIADIYREVVSGETIASRPMMQQLLSEVEQGIWNGVLVMEVERLARGDTIDQGIVAQAFKLSDTKIITPIKTYDPNNEFDEEYFEFGLFMSRREYKTIKRRLNNGRQASVKEGKYVGNRPPYGYERIKIENDKGFTLKPLEKEAQVVRMMFRWYAYGAHGISTIADQLNEMAIPSKTGKQWVYPTVRDILQNPVYVGKIRWGWRGQRKRVKNGSVSVSRPRSDDYLLADGIHPPIVDQQLFDQVQKKFSMHKPLPTSAREMKNPLAGLVICAKCGAKMQRRPYQRENIRTGLICPNNKCRNVSAPFDDVEQKLIEVLAEYIKEEKLRISNGHTQIDDSILQILQNQLADLREETVDLNKQNDNIHDFLEKGIYDVDTFLQRSQKISSRITEIEEKQKTLQQEIIEENKRIESATSIIPMTEQLLLQYESMSALEKNSMLKEVLRCVKYERECSIRDGGTADNFTLYLYPKISHK

SEQ ID NO: 4866 - protein, 515 aa, Unknown
  Description of Unknown: Integrase B4867 sequence
  PTHR30461:SF3,SM00857,G3DSA:1.10.10.2600,IPR036162,PF13408, PS51737,G3DSA:3.40.50.1390,IPR025827,IPR006119,IPR038109, PF07508,IPR011109,SSF53041,PTHR30461, Coil,PS51736,cd00338,PF00239
MSENKNAVLYARFSSDMQHETSIEAQEEAIRMYARENGYAIIAEYIDRAKSATTTAKRDRFNQMIEDSKDGGFSVVIVHKYDRFARNRLDSTVAKAILDKNGVRVISVLEPTDDTPEGELMEGMFELLAQYYSSNLGREVMKGFKVRAKKCLHNGGIAPLGYDVDPDSKKLIINENEAIIVRKIFDMYTSGYGYNTIIAHLNECGYVTKYGNEFAKNSLYSILRNKKYAGYYVYNQWDGKHNRHRAKPEDEVICIPDGVPAIISEEIYDKAAEIMAKHKLSPGANTAKTTYLLSGMIRCGHCGAIMTGNRRMNGKGYTYCSYRCQHKQSTECANKEIRHDRIEEYVLQVLEQNIFNEDYIPDIIAEIKEQAVQHNTSVIKELADLTIKLERIKTRRKNILNAIADGIAEDDCKEILSQFKADEYSCIKRQKALSTTETDIDISTAELTERISELSIYIYERNIAECKKFIGQYVKSVVVYDTKVEVAVTIPSELLCGCEYSLTRSMGRKFLPMPQ

SEQ ID NO: 4867 - protein, 514 aa, Unknown
  Description of Unknown: Integrase B4868 sequence
  PTHR30461:SF3,SM00857,G3DSA:1.10.10.2600,IPR036162,PF13408, PS51737,G3DSA:3.40.50.1390,IPR025827,IPR006119,IPR038109, PF07508,IPR011109,SSF53041,PF00239,PTHR30461, PS51736,Coil,cd00338
MYEDIKTACLYVRFSSHNQTEQSIEGQTRVCRDFCKRHNIRIVEIYADRATSASKDIEKRVQFLKMIKDSEKGLFDAVIVYKLDRFARSRYDSATYKYRLKRNGVQLISATENISNDPEGIILESVLEGMAEFYSAELSQKINRGMRESAYKHNSIGGAIPLGYKIEDKKLVIDPKTAPIVKEAFEKYADGETVAEICRQFNARGYKTSKGTAFGKSSFTKIFRNERYIGVYTFHDYRAEDAIPAIIDKDLWDRVQLRVGKIKNAPARNKAKVVYLLSGKIFCGHCGSKMNGNCNAGNYCYYQCYGKKNGNVDCKKKNIRKEFIERLVAQDALSLLTDEYIEQIATIACEKNQHEIELDSALPTIRDRIHQVDLSLNHLLKAIESGSAPDMLVKRMGELEKEKKDLQAQAKKESEDIVELDKAQVIYWLEQFRGGSIEDEEFCRMLIDLFVNSVTVWDEDDNTYKVTVAYNLTSLPTKTYRLNKGGTLSDFASNAPKSLEFCSLQSITYPMRLK

SEQ ID NO: 4868 - protein, 514 aa, Unknown
  Description of Unknown: Integrase B4869 sequence
  SM00857,G3DSA:1.10.10.2600,IPR036162,PS51737,G3DSA:3.40.50.1390, IPR006119,IPR038109,PF07508,IPR011109,SSF53041, PTHR30461,Coil,PS51736,cd00338,PF00239
MSTEYAIYLRKSRADLEAEAHGEGDTLARHEHILMELAKSRALPIGAIYREIVSGERIANRPVMQQLLSEVEDGRWKGVLVTETSRLARGDTIDQGIVAQAFKFSGTLIVTPSKTYDPTQEADEEWMEFGLFMSRQEYRMIRRRQLAGTRASKKEGHYVPGRPPYGYERYKLDGRGWSLRPVEPQAGVIRTIYDMYLSGKGFSEIANELNAMKIRTPLDKKWVPATTRAILQNPHYAGFIPSAMKVNTKIVQKGKLITKRPVNKNCELYEGIHEAIIPRDVWYSVQQRMKDTVTPRVPRKYQQMNPLAGLVYCDQCGKLMSRHPYRREDKVRFGCENPSCSTVSSLFEDVESLVLQSLREFLHKIELSSPALLDTKSEEIALQNIEKQLTDINHRLQRTYELLEDGVYSKETFLQRQSAISQDQTALLNTKHEIERKLHNKQTDIEAQKNSAPLIRHVLDVYPTLEDPKEQNLLLKQVIRRIDYHKTVRVYGKAKSDLHLTIHPKIAIPQTSNI

SEQ ID NO: 4869 - protein, 514 aa, Unknown
  Description of Unknown: Integrase B4870 sequence
  SM00857,G3DSA:1.10.10.2600,IPR036162,PS51737, G3DSA:3.40.50.1390,IPR006119,IPR038109,PF07508, IPR011109,SSF53041,PTHR30461,Coil, PS51736,cd00338,PF00239
MPTEYALYLRKSRADLEAEAHGEGDTLARHEHILMELAKSRALPIGAIYREIVSGERIANRPVMQQLLSEVEDGRWKGVLVTETSRLARGDTIDQGIVAQAFKFSGTLIVTPAKTYDPTQEADEEWMEFGLFMSRQEYRMIRRRQLAGTRASKKEGHYVPGRPPYGYERYKLDGRGWSLRPVEPQAGVIRTIYDMYLSGKGFSEIANELNAMKIRTPLDKKWVPATTRAILQNPHYAGFIPSAMKINTKIVQKGKLITKRPVNKNCELYEGIHEAIIPRDVWNSVQQRMKDTVTPRVPRKYQQMNPLAGLVYCDQCGKLMSRHPYRREDKVRFGCENPSCSTVSSLFEDVESLVLQSLREFLHEIELSSPALLDTKSEEIALQNIEKQLTDINHRLQRTYELLEDGVYSKETFLQRQSAISQDQTALLNTKHEIERKLHNKQTDIEAQKNSAPLIRHVLDVYPTLEDPKEQNLLLKQVIRRIDYHKTVRVYGKAKSDLHLTIHPKIAIPQTSNI

SEQ ID NO: 4870 - protein, 514 aa, Unknown
  Description of Unknown: Integrase B4871 sequence
  cd03768,PTHR30461:SF3,SM00857,G3DSA:1.10.10.2600,IPR036162, PF13408,PS51737,G3DSA:3.40.50.1390,IPR025827,IPR006119, IPR038109,PF07508,IPR011109,SSF53041,PTHR30461, PS51736,Coil,PF00239
MLRIGIYPRKSVYRDNSDSVQVQITACKDYARLMFKDQELDFRIYDKDEGFSGKNTHRPSFTELMADVKADELDIIIVYKLDRISRSVKDFSEIYETLQQHNVSFLSVKESFDTSTPMGRTVMYILSAFAQLERENTAERVADNMASLGEAGKWTGGTLPPGMTSVRKKIGDKTHSYLIVDEQQIKTVKYIFSLMLSGTSITKLERTLRTEGIRTERDAFYSCSKLYNLFTNPVYCANDMDAYYYFLEKGYKLPDPALFDGRHGLIGYGRTTQSNGTTVRKDTYSIAIGIHDPILSGTDWIAIQKRLGQNKSTRYAKYEAGILKGTLRCKCGVKMNIRTYKKNGSLFSYYYCPKMAREGVSACDTGYTRVDDIDDRFLQELKKIKLSPDSIELEENVSYVDTGKMRADLKKTTDSIRNLMNALSGSADSAAAKYIIAELEALDKEKSVLEKKLRTAEQRNRRAAVSAETKEFVYHRICNLLDNMDSMSYTEINELIRSIVKSCVFDGDHLDVTF

SEQ ID NO: 4871 - protein, 514 aa, Unknown
  Description of Unknown: Integrase B4872 sequence
  SM00857,IPR036162,PF13408,IPR025827,G3DSA:3.40.50.1390, IPR006119,SSF53041,PTHR30461,Coil,PS51736, cd00338,PF00239
MVKRRAAIYARFSSHNQRSESIEIQVDAGTRYIAENGLELVKVYADYAKTGRNTDRREYKHMMNDARLGLFDYVVIYKVPRIMRNRDEMALTRIMLRKAGVEILYAGEEIASGSAGVLQLGMLEVLAEWESAIDSERIIDGIQKNAQRCMANGRTLYGWDIVEGRYVVNDREAAVLHRMKNLLFSGSTVADIVRAVANERSRNGKPFNHDRTKKLLLRPQNGGTYSYAGHVVEDGMPAIWPKIEQDMIISMLGTPRPRRRVDHAAEWPLTGKLYCAECGNTLAGTSGTSKGGTVYSYYKCKKCKRTFRRDILEDAIVDMTICALERPDVRKRIADGMATYEATMEDAPLESERLRKEIKRIDAAFERIWQAIEDGIAPPGGKERIEDLKARKDALETEYQIAKANENIEPGFSELMDWLDNVAEEMNPQEILTMFVRAVQIDKTEVRLYFAFDYYGDNFTPPKKDEHPVDGCSSNSLMVEPSITKANTVISLETCYLQINRNWFAVIGNLQNTR

SEQ ID NO: 4872 - protein, 514 aa, Unknown
  Description of Unknown: Integrase B4873 sequence
  PTHR30461:SF3,SM00857,G3DSA:1.10.10.2600,IPR036162, PF13408,PS51737,G3DSA:3.40.50.1390,IPR025827, IPR006119,IPR038109,PF07508,IPR011109, SSF53041,PTHR30461,Coil,PS51736,cd00338,PF00239
MRKKKVKGGNRLVAYYRYSGGSGQTEQSIEGQRRDCENYAKLHGLTIVHEYIDRHISGKTDDRAAFQQMMNDGDKGAFDMVICWKTDRFARNRYDSAVYKKRLRDNGIEILYAAESNVEGAEGIIIEGLMEALAEYYSAELAEKMRRGMRESALKGQAINRCRSLGLTTDENKKYVIDEKTAPTVRFIFEHYAAGESSTSIVEQLNAKGLRTSQGNPFNKCSIPRIIQNEMYRGVYTSKAYNVRIEGAIPAIIDDDLWKRAQAMMKTNRQLKAKYEPKAEYLLSGKLFCAKCGCTMKGVSGHSGGNGEVYRYYACSNPQCRKRNIPKDDLEGKVIRSICDHLLQPETMELLAETMVEVQKADMEKPNAERDVLEQELRDVRRRSKNIMDAIETGSANPQLISRLDDLTQQENTLTYQLSTMEAEKPLLFTKEQYLFLLQQFYAQPTEQDDAYKRRLINTFVTNIEVSDSELLIYFNISEETENKNKNAPQLNFDKSSSTEKRLVRVARIELTAS

SEQ ID NO: 4873 - protein, 514 aa, Unknown
  Description of Unknown: Integrase B4874 sequence
  PTHR30461:SF3,cd00338,SM00857,G3DSA:1.10.10.2600,IPR036162, PF13408,IPR025827,G3DSA:3.40.50.1390,PS51737,IPR006119, IPR038109,PF07508,IPR011109,SSF53041,PTHR30461, PS51736,Coil,PF00239
MAKRKFNKGGEVRLVAYYRYSGGSGQTEQSIEGQRRDCEAYARLHNMTIQKEYVDRHISGKTDDRAAFQQMIADSDKGAFDMVICWKTDRFARNRYDSAVYKKRLRDNGVEIVYAAESNISGAEGIIIEGVMEALAEYYSAELAEKMRRGMRESALKGQAISRCRALGLKTDEHKRFVIDEKTAPTVRFIFEHYAAGESAMSIVEQLNAKGLRTSQGNPFNKSSIPRIIQNEAYRGVYISKSYDVRIEGAIPAIIDDELWERAQTMLKLNRQLKAKNEPKADYILSGKLYCSCGSLMRGMSGHSATGEVYRYYTCPNKDCHLRNIPKDDLEGKVMQSIVDHLLQPESMEALAEAMVEVQKADVEKPNAERVAIEQSLSDVRRRSKNILDAIENGTANAQLCARLDDLTEQEQTLSFQLSSLEKEKPVVFTKEQYLFLLEQFLMEPSERTPEYGRRLVNTFVTSMVVSGRELVINFNVSDETVNKNKKTSQTNLQKESSSGMRLVRVARIELTAS

SEQ ID NO: 4874 - protein, 514 aa, Unknown
  Description of Unknown: Integrase B4875 sequence
  SM00857,G3DSA:1.10.10.2600,IPR036162,PS51737,G3DSA:3.40.50.1390, IPR006119,IPR038109,PF07508,SSF53041,IPR011109, PTHR30461,Coil,PS51736,cd00338,PF00239
MSTEYALYLRKSRADLEAEAHGEGDTLARHEHILMELAKSRALPIGAIYREIVSGERIANRPVMQQLLSEVEDGRWKGVLVTETSRLARGDTIDQGIVAQAFKFSGTLIVTPAKTYDPTQEADEEWMEFGLFMSRQEYRMIRRRQLAGTRASKKEGHYVPGRPPYGYERYKLDGRGWSLRPVEPQAGVIRTIYDMYLSGKGFSEIANELNAMKIRTPLDKKWVPATTRAILQNPHYAGFIPSAMKVNTKIVQKGKLITKRPVNKNCELYEGIHEAIIPRDVWYSVQQRMKDTVTPRVPRKYQQMNPLAGLVYCDQCGKLMSRHPYRREDKVRFGCENPSCSTVSSLFEDVESLVLQSLREFLHEIELSSPTLLDTKSEEIALQNIEKQLTDINHRLQRTYELLEDGVYSKETFLQRQSAISQDQTALLNTKHEIERKLHNKQTDIEAQKNSAPLIRHVLDVYPTLEDPKEQNLLLKQVIRRIDYHKTVRVYGKAKSDLHLTIHPKIAIPQTSNI

SEQ ID NO: 4875 - protein, 514 aa, Unknown
  Description of Unknown: Integrase B4876 sequence
  PTHR30461:SF3,cd00338,SM00857,G3DSA:1.10.10.2600,IPR036162, PF13408,PS51737,IPR025827,G3DSA:3.40.50.1390,IPR006119, IPR038109,PF07508,IPR011109,SSF53041, PTHR30461,PS51736,Coil,PF00239
MTKAVIYARYSSHNQREESIEGQIRECQDFATRNDLTIVGEYIDRAISGKTDNRADFQRMIKDSERGHFQVVLVYAIDRFARNRYDSAIYKAKLKKNGVKVFYAKQHIPDTPEGIILESVMEGYAEYYSQNLAIHIKRGMKENALQCKVTGGTTPLGYRISENKTYEIDPAGAKIIREIFEMYAGGASATQIVTYCNEHGYRTARGGSFNKNSLRTILLNDKYIGVYRYEDVEIEDGVPAIIDKELFEKVQTMFHHNHAARARTKANADYLLTTKLFCGHCGSNMVGESGTSQNGEMHYYYKCSNRKRSHSCNKHTERKEWIEEFVVRHTVNTVLTDNNIEMIATKAAELMEKEFAESSVLTTLEQTKKDIEKRIKNMLDLMEQGIVTASTRERLLELESQKSDLEQRITRETMKKPPLSKERILHWLYSFKGGDINDMEYRQRVIDTLVNSIYIYDNDGGNSRKIVFTFNISGQNTSVVNCSDIACFAPPYGANPNTFFFVKNVFGFAIEVTV

SEQ ID NO: 4876 - protein, 514 aa, Unknown
  Description of Unknown: Integrase B4877 sequence
  cd00338,SM00857,G3DSA:1.10.10.2600,IPR036162,PS51737, G3DSA:3.40.50.1390,IPR006119,IPR038109,PF07508,IPR011109, SSF53041,PTHR30461,PS51736,Coil,PF00239
MSTEYAIYLRKSRADLEAEAHGEGDTLARHEHILMELAKSRALPIGAIYREIVSGERIANRPVMQQLLAEVEDGRWKGVLVTETSRLARGDTIDQGIVAQAFKFSGTLIVTPAKTYDPTQEADEEWMEFGLFMSRQEYRMIRRRQLAGTRASKKEGHYVPGRPPYGYERYKLDGRGWSLRPVEPQAGVIRTIYDMYLSGKGFSEIANELNAMKIRTPLDKKWVPATTRAILQNPHYAGFIPSAMKVNTKIVQKGKLITKRPVNKNCELYEGIHEAIIPRDVWYSVQQRMKDTVTPRVPRKYQQMNPLAGLVYCDQCGKLMSRHPYRREDKVRFGCENPSCSTVSSLFEDVESLVLQSLREFLHKIELSSPALLDTKSEENALQNIEKQLTDINRRLQRTYELLEDGFYSKETFLQRQSAISQDQTALLNIKHEIERKLHNKQTDIEAQKNSAPLIRHVLDVYPTLEDPKEQNLLLKQVIRRIDYHKTVRVYGKAKSDLHLTIHPKIAIPQTSNI

SEQ ID NO: 4877 - protein, 514 aa, Unknown
  Description of Unknown: Integrase B4878 sequence
  PTHR30461:SF3,SM00857,G3DSA:1.10.10.2600,IPR036162,PF13408, IPR025827,PS51737,G3DSA:3.40.50.1390,IPR006119,IPR038109, PF07508,SSF53041,IPR011109,PF00239, PTHR30461,PS51736,Coil,cd00338
MAKRKFNKGGEVRLVAYYRYSGGSGQTEQSIEGQRRDCETYARLHNMTIQKEYVDRHISGKTDDRAAFQQMIADSDKGAFDMVICWKTDRFARNRYDSAVYKKRLRDNGVEIVYAAESNIAGAEGIIIEGVMEALAEYYSAELAEKMRRGMRESALKGQAISRCRALGLKTDEHKRFVIDEKTAPTVRFIFEHYAAGESAMSIVEQLNAKGLRTSQGNPFNKSSIPRIIQNEAYRGVYVSKSYDVRIEGAIPAIIDDELWERAQTMLKLNRQLKAKNEPKADYILSGKLYCSCGSLMRGMSGHSATGEVYRYYTCPNKNCHLRNIPKDNLEGKVMQSISDHLLQPEAMEALAEAMVEVQKADAEKPNAERVAIEQSLADVRRRSKNILDAIENGTANAQLCARLDDLSEQERTLNFQLSALEKEKSVVFTKEQYLFLLEQFLVEPSERTPEYGRRLVNTFVTSMVVSDRELVINFNVSEETVNKNKKTSQTNLQKESSSGMRLVRVARIELTAS

SEQ ID NO: 4878 - protein, 514 aa, Unknown
  Description of Unknown: Integrase B4879 sequence
  PTHR30461:SF3,cd00338,SM00857,G3DSA:1.10.10.2600,IPR036162, PF13408,PS51737,IPR025827,G3DSA:3.40.50.1390,IPR006119, IPR038109,PF07508,IPR011109,SSF53041,PTHR30461, PS51736,Coil,PF00239
MSKIAVIYARYSSDRQREESIEGQIRECKAYAKKNGITVIRVYCDRAMTGKTDKRPEFQAMIKDAKKQDFDYVLVYKLNRFARSRYDSARYKNVLKQHGIRVISAMENIAEDSSGILLESVIEGLAEYYSAELAENVLRGMTENALECKWPGGIVPLGFKLDKNKHLVIDDDKAFIVREIFQSIIDGKRTSTIIDELNARHLKTAAGKPFRKNSLEKILKNERYTGTFVWKDIRKENALPAIITNDMFNAVQKILKNRKKTRSRVCSDNYLISGRLFCGLCHEKMIGMSGRSVTGLPYYYYACSNRRNRIGKCHTKNIRADKLEELVVDTTINILSNDTAIEYIAKQAIAAQEENRAQSSIPAIKEEIKELSKKLKNCIQAVENGIISQTIAENIPMYEKRLVELNSELSDELEKDNDLKVDEDMIRFFFERLVQRTKKETKFKSLLLSTMVRCVVIYDDYIEIQYNYKKELPILTNPVRINSSILFAVVECSGLQSNFIFYPEGFSYIVRRVA

SEQ ID NO: 4879 - protein, 514 aa, Unknown
  Description of Unknown: Integrase B4880 sequence
  cd00338,SM00857,G3DSA:1.10.10.2600,IPR036162,PF13408, PS51737,G3DSA:3.40.50.1390,IPR025827,IPR006119,IPR038109, PF07508,IPR011109,SSF53041,PTHR30461,PS51736, Coil,PF00239
MSTEYAIYLRKSRADLEAEAHGEGDTLARHEHILMELAKSRALPIGAIYREIVSGERIANRPVMQQLLSEVEDGRWKGVLVTETSRLARGDTIDQGIVAQAFKFSGTLIVTPSKTYDPTQEADEEWMEFGLFMSRQEYRMIRRRMTAGMQAAKREGRYISNVPPYGYERYKLEGRGWSLRPIESQAKVVRMIFDLYLSGLGYCEIEKRLNALHIPAPKSDKWSARTIPGILRNAHYIGCIPAAFRPGKKVVKDGQVKVTRPRVKSCELYKGLHEPIIDRAVWDQVQARLGKNAAVRTPGNRQQSNPLAGLIVCDCCGKRMQRRPQTGTGSQTQIQCTTRGCATVAHNADELEQLVLDSLRTFLAQIEVGTPVAPDLSAEQHALSEIEKQLTDLEARQRRTFELVEDGTYTREIFLSRQAELSTERERLTADRTAIQHKIEQAQHEYDARTGLAPAVRHVLDTYNTDLPAADRNKLLKQVIDRIDYHKRTRTRWTKESDLSLTLHPVVFSASANR

SEQ ID NO: 4880 - protein, 514 aa, Unknown
  Description of Unknown: Integrase B4881 sequence
  PTHR30461:SF3,cd00338,SM00857,G3DSA:1.10.10.2600,IPR036162, PF13408,PS51737,G3DSA:3.40.50.1390,IPR025827,IPR006119, IPR038109,PF07508,IPR011109,SSF53041,PTHR30461, PS51736,Coil,PF00239
MAKRKFNKGGEVRLVAYYRYSGGSGQTEQSIEGQRRDCEAYARLHNMTIQKEYVDRHISGKTDDRAAFQQMIADSDKGAFDMVICWKTDRFARNRYDSAVYKKRLRDNGVEIVYAAESNISGAEGIIIEGVMEALAEYYSAELAEKMRRGMRESALKGQAISRCRALGLKTDEHKRFVIDEKTAPTVRFIFEHYAAGESAMSIVEQLNAKGLRTSQGNPFNKSSIPRIIQNEAYRGVYISKSYDVRIEGAIPAIIDDELWERAQTMLKLNRQLKAKNEPKADYILSGKLYCSCGSLMRGMSGHSATGEVYRYYTCPNKDCHLRNIPKDDLEGKVMQFIVDHLLQPESMEALAEAMVEVQKADAEKPNAERVAIEQSLADVRRRSKNILDAIENGTANAQLCARLNDLTEQEQTLSFQLSSLEKEKPVAFTKEQYLFLLEQFLVEPSERTPEYGRRLVNTFVTSMVVSDRELVINFNVSDETVNKNKKASQTNLQKESSSGMRLVRVARIELTAS

SEQ ID NO: 4881 - protein, 514 aa, Unknown
  Description of Unknown: Integrase B4882 sequence
  cd03768,PTHR30461:SF3,SM00857,G3DSA:1.10.10.2600,IPR036162, PF13408,PS51737,G3DSA:3.40.50.1390,IPR025827,IPR006119, IPR038109,PF07508,IPR011109,SSF53041,PTHR30461, PS51736,Coil,PF00239
MLRIGIYPRKSVYRDNSDSVQVQITACKDYARLMFKDQELDFRIYDKDEGFSGKNTHRPSFTELMADVKADELDIIIVYKLDRISRSVKDFSEIYETLQQHNVSFLSVKESFDTSTPMGRTVMYILSAFAQLERENTAERVADNMASLGEAGKWTGGTLPPGMTSVRKKIGDKTHSYLIVDEQRIKTVKYIFSLMLSGTSITKLEHTLRQDGIRTERDAFYSCSKLYNLFTNPVYCANDMDAYYYFLEKGYKLPDPALFDGRHGLIGYGRTTQSNGTTVRKDTYSIAIGIHDPLLSGADWIAIQKRLGQNKSTRYAKYEAGILKGTLRCKCGVKMNIRTYKKNGSLFSYYYCPKMAREGVSACDTGYTRVDDIDDRFLQELKKIKLSPDSIELEENVSYVDTGKMRADLKKTTDSIRNLMNALSGSADSAAAKYIIAELESLDKEKSVLEKKLRTAEQRNRRAAVSAETKEFVYHRICNLLDNMDSMSYTEINELIRSIVKSCVFDGDHLDVTF

SEQ ID NO: 4882 - protein, 514 aa, Unknown
  Description of Unknown: Integrase B4883 sequence
  cd03768,PTHR30461:SF3,SM00857,G3DSA:1.10.10.2600,IPR036162, PF13408,IPR025827,PS51737,G3DSA:3.40.50.1390,IPR006119, IPR038109,PF07508,IPR011109,SSF53041,PTHR30461, PS51736,Coil,PF00239
MLRIGIYPRKSVYRDNSDSVQVQITACKDYARLMFKDQELDFRIYDKDEGFSGKNTHRPSFTELMADVKADELDIIIVYKLDRISRNVKDFSEIYETLQQHNVSFLSVKESFDTSTPMGRTVMYILSAFAQLERENTAERVADNMASLGEAGKWTGGTLPPGMTSVRKKIGDKTHSYLIVDEQRIKTVKYIFSLMLSGTSITKLEHTLRQEGIRTERDAFYSCSKLYNLFTNPVYCANDMDAYYYFLEKGYKLPDPALFDGRHGLIGYGRTTQSNGTTVRKDTYSIAIGIHDPILSGADWIAIQKRLGQNKSTRYAKYEAGILKGTLRCKCGVKMNIRTYKKNGSLFSYYYCPKMAREGVSACDTGYTRVDDIDDRFLQELKKIKLSPDSIELEENVSYVDTGKMRADLKKTTDSIRNLMNALSGSADSAAAKYIIAELEALDKEKAVLEKKLRTAEQRNRRAAVSAETKEFVYHQICNLLDNMDSMSYTEINELIRSIVKSCVFDGDHLDVTF

SEQ ID NO: 4883 - protein, 514 aa, Unknown
  Description of Unknown: Integrase B4884 sequence
  cd03768,PTHR30461:SF3,SM00857,G3DSA:1.10.10.2600,IPR036162, PF13408,IPR025827,PS51737,G3DSA:3.40.50.1390,IPR006119, IPR038109,PF07508,IPR011109,SSF53041,PTHR30461, PS51736,Coil,PF00239
MLRIGIYPRKSVYRDNSDSVQVQITACKDYARLMFKDQELDFRIYDKDEGFSGKNTHRPSFTELMADVKADELDIIIVYKLDRISRSVKDFSEIYETLQQHNVSFLSVKESFDTSTPMGRTVMYILSAFAQLERENTAERVADNMASLGEAGKWTGGTLPPGMTSVRKKIGDKTHSYLIVDEQRIKTVKYIFSLMLSGTSITKLEHTLRQDGIRTERDAFYSCSKLYNLFTNPVYCANDMDAYYYFLEKGYKLPDPALFDGRHGLIGYGRTTQSNGTTVRKDTYSIAIGIHDPILSGADWIAIQNRLGQNKSTRYAKYEAGILKGTLRCKCGVKMNIRTYKKNGSLFSYYYCPKMAREGISVCDTGYTRVDDVDDRFLQELKKIKLSPDSIELEENVSYVDTGKMRADLKKANDSIRNLMNALSGSADSSAAKYIITELESLDKEKAVLEKKLRTAEQRNRRAAVSAETKEYVYHRICNLLDNMDAMSYTEINELIRSIVKSCVFDGDHLDVMF

SEQ ID NO: 4884 - protein, 514 aa, Unknown
  Description of Unknown: Integrase B4885 sequence
  cd03768,PTHR30461:SF3,SM00857,G3DSA:1.10.10.2600,IPR036162, PF13408,PS51737,G3DSA:3.40.50.1390,IPR025827,IPR006119, IPR038109,PF07508,SSF53041,IPR011109,PTHR30461, PS51736,Coil,PF00239
MLRIGIYPRKSVYRDNSDSVQVQITACKDYARLMFKDQELDFRIYDKDEGFSGKNTHRPSFTELMADVKADELDIIIVYKLDRISRSVKDFSEIYETLQQHNVSFLSVKESFDTSTPMGRTVMYILSAFAQLERENTAERVADNMASLGEAGKWTGGTLPPGMTSVRKKIGDKTHSYLIVDEQRIKTVKYIFSLMLSGTSITKLEHTLRQDGIRTERDAFYSCSKLYNLFTNPVYCANDMDAYYYFLEKGYKLPDPALFDGRHGLIGYGRTTQSNGTTVRKDTYSIAIGIHDPILSGADWIAIQKRLGQNKSTRYAKYEAGILKGTLRCKCGVKMNIRTYKKNGSLFSYYYCPKMAREGVSACDTGYTRVDDIDDRFLQELKKIKLSPDSIELEENVSYVDTGKMRTDLKKTTDSIRNLMNALSGSADSAAAKYIIAELEALDKEKAVLEKKLRTAEQRNRRAAVSAETKEFVYHRICNLLDNMDSMSYTEINELIRSIVKSCVFDGDHLDVTF

SEQ ID NO: 4885 - protein, 514 aa, Unknown
  Description of Unknown: Integrase B4886 sequence
  SM00857,IPR036162,PF13408,IPR025827,G3DSA:3.40.50.1390, IPR006119,SSF53041,PTHR30461,Coil,PS51736, cd00338,PF00239
MVKRRAAIYARFSSHNQRSESIEIQVDAGTRYIAENGLELVKIYADYAKTGRNTDRREYKQMMNDARLGLFDYVVIYKVPRIMRNRDEMALTRIMLRKAGVEILYAGEEIASGSAGVLQLGMLEVLAEWESAIDSERIIDGIQKNAQRCMANGRTLYGWDIVEGRYVINDREAAVLHKMKNMVFAGSIIAEVVRAVANVRTRQGKPINHDRAKKLLLRPQNGGTYSYAGHVVEGGMPALWPKAEQDMLISILGNPRPRRRVDHAAEWPLTGKLYCAECGNTLAGTSGTGKSGTVYAYYKCKKCKRTFRRDILEDAIVDMTICALERPDVRKRIADGMATYEATMEDAPLESERLRKEIKRIDAAFERIWQAIEDGIAPPGGKERIEDLKARKDALETEYQIAKANENIEPGFSELMDWLDNVAEEMNPQEILTMFVRAVQIDKAEVRLYFAFDYYGDNFTPPKKDEHQLKRCSSNSPMVEPSITKANTVISLETCYLQINRNWFAVIGNLQNTR

SEQ ID NO: 4886 - protein, 514 aa, Unknown
  Description of Unknown: Integrase B4887 sequence
  cd03768,PTHR30461:SF3,SM00857,G3DSA:1.10.10.2600, IPR036162,PF13408,PS51737,IPR025827, G3DSA:3.40.50.1390,IPR006119,IPR038109,PF07508, SSF53041,IPR011109,PTHR30461,PS51736,Coil,PF00239
MLRIGIYPRKSVYRDNSDSVQVQITACKDYARLMFKDQELDFRIYDKDEGFSGKNTHRPSFTELMADVKADELDIIIVYKLDRISRSVKDFSEIYETLQQHNVSFLSVKESFDTSTPMGRTVMYILSAFAQLERENTAERVADNMASLGEAGKWTGGTLPPGMASVRKKIGDKTHSYLIVDEQRIKTVKYIFSLMLSGTSITKLEHTLRQEGIRTERNAFYSCSKLYNLFTNPVYCANDMDAYYYFLEKGYKLPDPALFDGRHGLIGYGRTTQSNGTTVRKDTYSIAIGIHDPILSGADWIAIQKRLGQNKSTRYAKYEAGILKGTLRCKCGVKMNIRTYKKNGSLFSYYYCPKMAREGVSACDTGYTRVDDIDDRFLQELKKIKLSPDSIELEENVSYVDTGKMRADLKKTTDSIRNLMNALSGSADSTAAKYIIAELEALDKEKSVLEKKLRTAEQRNRRAAVSAETKEFVYHRICNLLDNMDSMSYTEINELIRSIVKSCVFDGDHLDVTF

SEQ ID NO: 4887 - protein, 514 aa, Unknown
  Description of Unknown: Integrase B4888 sequence
  SM00857,IPR036162,G3DSA:3.40.50.1390,IPR006119,PF07508, SSF53041,IPR011109,PTHR30461,Coil,mobidb-lite, cd00338,PF00239
MRNEYNPIIIKYVAEYLRKSRGETTEDLIKHKTILEELCKSRGWVYVVYEEVETGESLFARPVMQQLLRDVEDNIYDAVVCVDLDRLGRGDLVDWGQIKRVFQKTNTYMVTPSSLYNLNDDNEEFAVDLQTLFARREYKKITHRLSMGKKVGAKLGAWTNGTPPMPYEYQEWIDPATNKRYYNEKGLVVNLQKLSIYRFMVDSFIKDKKSTNEIAWELNRRNIPSPRGGRWCNMTVRRLLVDETHLGKIISNKTKGDGHKNKSPNKPPFQKIPKEQWTVVENRHEAIKTQDEHEKILIGIQRNLKSPYRRSDHYYPLKGLIKCGLCGYGLPLEYKRGKDLIVKKCWHKDYLGNKCPNSSGKAQYIIDAIDEQLKEYEEQIRKEIESCEDQSTDLIQLQIKTIMDKLNKKDIALKRARIAYDEGVDTLDEYRSAKERILKEVDELENQLSIENLKLQKAQSITNHEKLHYIEEFRRSRWEDELDDKELNDLYKTIISSIIWTKQGDNIDIKVNFL

SEQ ID NO: 4888 - protein, 514 aa, Unknown
  Description of Unknown: Integrase B4889 sequence
  SM00857,G3DSA:1.10.10.2600,IPR036162,PS51737, G3DSA:3.40.50.1390,IPR006119,IPR038109,PF07508, SSF53041,IPR011109,PTHR30461,Coil, PS51736,cd00338,PF00239
MSTEYAIYLRKSRADLEAEAHGEGDTLARHEHILMELAKSRALPIGAIYREIVSGERIANRPVMQQLLSEVEDGRWKGVLVTETSRLARGDTIDQGIVAQAFKFSGTLIVTPAKTYDPTQEADEEWMEFGLFMSRQEYRMIRRRQLAGTRASKKEGHYVPGRPPYGYERYKLDGRGWSLRPVEPQAGVIRTIYDMYLSGKGFSEIANELNAMKIRTPLDKKWVPATTRAILQNPHYAGFIPSAMKVNTKIVQKGKLITKRPVNKNCELYEGIHEAIIPRDVWYSVQQRMKDTVTPRVPRKYQQMNPLAGLVYCDQCGKLMSRHPYRREDKVRFGCENPSCSTVSSLFEDVENLVLKSLREFLHEIELSSPALLDTKSEEIALQNIEKQLTDINHRLQRTYELLEDGVYSKETFLQRQSAISQDQTALLNTKHEIERKLHNKQTDIEAQKNSAPLIRHVLDVYPTLEDPKEQNLLLKQVIRRIDYHKTVRVYGKAKSDLHLTIHPKIAIPQTSNI

SEQ ID NO: 4889 - protein, 514 aa, Unknown
  Description of Unknown: Integrase B4890 sequence
  PTHR30461:SF3,SM00857,G3DSA:1.10.10.2600,IPR036162,PF13408, PS51737,G3DSA:3.40.50.1390,IPR025827,IPR006119,IPR038109, PF07508,IPR011109,SSF53041,PF00239,PTHR30461, PS51736,Coil,cd00338
MNKRTGIYGRYSDTKQDDGFSIEYQLTECQAYLDKNDMPLTKTYIDQAITGTKVAGREAFHELIRDVKNGMIDVVVVYKFSRIFRNAYESHKYRQLFKKHGVKLISVTQMVDDETSSGKLMIGVMANIDEYQSAVISDHVKSAMREMVSEGFFAGGTVPYGYKLEVVQHGKKTRKKYVPDEFESKIVNKIFELYADNYSLRYLQTYLKDNGAFTRRGKYFSIQTIARMLRNDFYIGVLRYSAQGHEPIIVHDIIPPIIDKELWDRVQYRHSTQKGVRPRKRKELYALTGKIRCANCGSHYFGIRSGSMQNGKKYDYKYYVCSQSKDYHTCSCKRIRKDYLEEITMKEIKRHILNEKSIYSIANEMLKILGENPTEQKDKLKQLKSRSSALKSEMKELIDLRAKRIVSDSFLAEHISEKENELQEVEQQIYNIERQTKLTLTHSMIVDYLNKMLSISDDTDDEVLKTIFDKFVESIIISDESIDITLIVSPNGDMEYNNSFRQPNVFFYAKINRQ

SEQ ID NO: 4890 - protein, 514 aa, Unknown
  Description of Unknown: Integrase B4891 sequence
  PTHR30461:SF3,SM00857,PS51736,IPR036162,G3DSA:3.40.50.1390, IPR006119,SSF53041,PF00239,PTHR30461,mobidb-lite, Coil,cd00338
MPKGTRAAIYARFSSHNQRSESIDIQVEKSREYCAENGLDVVRVYSDYAQTGRDVQRVEFQRMMNDAKLGLFDYVVIYKVTRIMRNRDEMALARIKLRKAGVEILYAGESLGEGSTRVLNLGMLEVLAEWESAIDSERIRDGINKNAQRGMANGRTHYGWDIVNGYYEVNEREAAVMHRMKNMLFAGSTVAEIKRAVAGERGKRGKPLTHGVITKLLRREQNCGVYDYAGVRIEDGMPALWSREDQDMINSILGSNGRKHNKTRDTNDYPLSGKMWCPECGQYYVGTCGTSKTGRVYHYYKCKKCRRTFRRDAVEEAVLDTVLETIKKPDVRQRIVDAMALYDEMNEEKEEPESKRIEREIKRIDAAFERIWQAIEDGIAPPGGKERVDMLREQKAALEADLRQAQASESAHLSGEDIAAWLDHIAQEPDAAEIIDTFVRLIEVDGEELKLYFAFDYWGDDFQPKQKKTNPEKGSSNNPMVEPQKIFANPTIAANGREIKVSNNWFCIITLIRT

SEQ ID NO: 4891 - protein, 514 aa, Unknown
  Description of Unknown: Integrase B4892 sequence
  cd03768,PTHR30461:SF3,SM00857,G3DSA:1.10.10.2600, IPR036162,PF13408,IPR025827,G3DSA:3.40.50.1390, PS51737,IPR006119,IPR038109,PF07508, SSF53041,IPR011109,PTHR30461,PS51736,Coil,PF00239
MLRIGIYPRKSVYRDNSDSVQVQITACKDYARLMFKDQELDFRIYDKDEGFSGKNTHRPSFTELMADVKADELDIIIVYKLDRISRSVKDFSEIYETLQQHNVSFLSVKESFDTSTPMGRTVMYILSAFAQLERENTAERVADNMASLGEAGKWTGGTLPPGMTSVRKKIGDKTHSYLIVDEQRIKTVKYIFSLMLSGTSITKLEHTLRQDGIRTERDAFYSCSKLYNLFTNPVYCANDMDAYYYFLEKGYKLPDPALFDGRHGLIGYGRTTQSNGTTVRKDTYSIAIGIHDPILSGADWIAIQKRLGQNKSTRYAKYEAGILKGTLRCKCGVKMNIRTYKKNGSLFSYYYCPKMAREGVSACDTGYTRVDDIDDRFLQELKKIKLSPDSIELEENVSYVDTGKMRADLKKANDSIRNLMNALSGSADSSAAKYIITELESLDKEKAVLEKKLRTAEQRNRRAAVSAETKEYVYHRICNLLDNMDAMSYTEINELIRSIVKSCVFDGDHLDVMF

SEQ ID NO: 4892 - protein, 514 aa, Unknown
  Description of Unknown: Integrase B4893 sequence
  PTHR30461:SF3,cd00338,SM00857,G3DSA:1.10.10.2600,IPR036162, PF13408,IPR025827,G3DSA:3.40.50.1390,PS51737,IPR006119, IPR038109,PF07508,IPR011109,SSF53041,PTHR30461, PS51736,Coil,PF00239
MAKRKFNKGGEVRLVAYYRYSGGSGQTEQSIEGQRRDCEAYARLHNMTIQKEYVDRHISGKTDDRAAFQQMIADSDKGAFDMVICWKTDRFARNRYDSAVYKKRLRDNGVEIVYAAESNISGAEGIIIEGVMEALAEYYSAELAEKMRRGMRESALKGQAISRCRALGLKTDEHKRFVIDEKTAPTVRFIFEHYAAGESAMSIVEQLNAKGLRTSQGNPFNKSSIPRIIQNEAYRGVYISKSYDVRIEGAIPAIIDDELWERAQTMLKLNRQLKAKNEPKADYILSGKLYCSCGSLMRGMSGHSATGEVYRYYTCPNKDCHLRNIPKDDLEGKVMQSIVDHLLQPESMEALAEAMVEVQKADVEKPNAERVAIEQSLADVRRRSKNILDAIENGTANAQLCARLNDLTEQEQTLSFQLSSLEKEKPVVFTKEQYLFLLEQFLMEPSERTPEYGRRLVNTFVTSMVVSGRELVINFNVSDETVNKNKKTSQTNLQKESSSGMRLVRVARIELTAS

SEQ ID NO: 4893 - protein, 514 aa, Unknown
  Description of Unknown: Integrase B4894 sequence
  cd03768,PTHR30461:SF3,SM00857,G3DSA:1.10.10.2600,IPR036162, PF13408,IPR025827,G3DSA:3.40.50.1390,PS51737,IPR006119, IPR038109,PF07508,IPR011109,SSF53041,PTHR30461, PS51736,Coil,PF00239
MLRIGIYPRKSVYRDNSDSVQVQITACKDYARLMFKDQELDFRIYDKDEGFSGKNTHRPSFTELMADVKADELDIIIVYKLDRISRSVKDFSEIYETLQQHNVSFLSVKESFDTSTPMGRTVMYILSAFAQLERENTAERVADNMASLGEAGKWTGGTLPPGMTSVRKKIGDKTHSYLIVDEQRIKTVKYIFSLMLSGTSITKLEHTLRQNGIRTERDAFYSCSKLYNLFTNPVYCANDMDAYYYFLEKGYKLPDPALFDGRHGLIGYGRTTQSNGTTVRKDTYSIAIGIHDPILSGADWIAIQKRLGQNKSTRYAKYEAGILKGTLRCKCGVKMNIRTYKKNGSLFSYYYCPKMAREGVSACDTGYTRVDDIDDRFLQELKKIKLSPDSIELEENVSYVDTGKMRADLKKTTDSIRNLMNALSGSADSAAAKYIIAELESLDKEKSVLEKRLRTAEQRNRRAAVSAETKEFVYHRICNLLDNMDSMSYTEINELIRSIVKSCVFDGDHLDVTF

SEQ ID NO: 4894 - protein, 514 aa, Unknown
  Description of Unknown: Integrase B4895 sequence
  PTHR30461:SF3,SM00857,G3DSA:1.10.10.2600,IPR036162,PF13408, IPR025827,G3DSA:3.40.50.1390,PS51737,IPR006119,IPR038109, PF07508,SSF53041,IPR011109,PTHR30461,Coil, PS51736,cd00338,PF00239
MRRKKNSDVIRLVAYYRYSGGSGQTEQSIEGQRRDCEAYAKLHGMTILHEYIDRHISGKTDDRAAFQQMMKDSDKGAFDMVICWKTDRFARNRYDSAVYKKRLRDNGVEIIYAAESNVQGAEGIIIEGLMEALAEYYSAELAEKMRRGMRESALKGQAISRCRALGLTTDENKKFVIDERTAPTVRFIFEHYAAGESSTSIIEQLNAKGLRTSQGGPFNKSSIPRIIQNEMYRGVYVSKAYNVRIEDAIPAIIDDDLWGRAQAMMKTNRQLKAKYEPKADYLLSGKLFCAECGGLMKGVSGHSGGNGEVYRYYACSNPECHKRNIPKADLEGKVIRSIRDHLLQPDTMEALADALVEVQEADATKPDAEREALEQELRDVRRRGKNIMDAIENGSVAPQLVARLNDLTQQENTLTYQLSTIAKETPLAFTREQYLLMLKMFCAHPDEQNEAYKHRLINTFVTSMKISDSELIIYFNISEETENKNKKAPQQNFTKESSTEMRLVRVARIELTAS

SEQ ID NO: 4895 - protein, 514 aa, Unknown
  Description of Unknown: Integrase B4896 sequence
  SM00857,G3DSA:1.10.10.2600,IPR036162,PS51737,G3DSA:3.40.50.1390, IPR006119,IPR038109,PF07508,SSF53041,IPR011109, PTHR30461,Coil,PS51736,cd00338,PF00239
MRTEYAIYLRKSRADLEAEAHGEGDTLARHEHILMELAKSRALPIGAIYREIVSGERIANRPVMQQLLSEVEDGRWKGVLVTETSRLARGDTIDQGIVAQAFKFSGTLIVTPSKTYDPTQEADEEWMEFGLFMSRQEYRMIRRRQLAGTRASKKEGHYVPGRPPYGYERYKLDGRGWSLRPVEPQAGVIRTIYDMYLSGKGFSEIANELNAMKIRTPLDKKWVPATTRAILQNPHYAGFIPSAMKVNTKIVQKGKLITKRPVNKNCELYEGIHEAIIPRDVWYSVQQRMKDTVTPRVPRKYQQMNPLAGLVYCDQCGKLMSRHPYRREDKVRFGCENPSCSTVSSLFEDVESLVLQSLREFLHEIELSSPDLLDTKSEEIALQNIEKQLTDINRRLQRTYELLEDGVYSKETFLQRQSAISQDQTALLNTKHEIERKLQNKQTDIEAQKNSAPLIRHVLDVYPTLEDPKEQNLLLKQVIRRIDYHKTVRVYGKAKSDLHLTIHPKIAIPQTSNI

SEQ ID NO: 4896 - protein, 514 aa, Unknown
  Description of Unknown: Integrase B4897 sequence
  cd03768,PTHR30461:SF3,SM00857,G3DSA:1.10.10.2600, IPR036162,PF13408,PS51737,IPR025827, G3DSA:3.40.50.1390,IPR006119,IPR038109,PF07508, IPR011109,SSF53041,PTHR30461,PS51736,Coil,PF00239
MLRIGIYPRKSVYRDNSDSVQVQITACKDYARLMFKDQELDFRIYDKDEGFSGKNTHRPSFTELMADVKADELDIIIVYKLDRISRSVKDFSEIYETLQQHNVSFLSVKESFDTSTPMGRTVMYILSAFAQLERENTAERVADNMASLGEAGKWTGGTLPPGMTSVRKKIGDKTHSYLIVDEQRIKTVKYIFSLMLSGTSITKLERTLRTEGIRTERDAFYSCSKLYNLFTNPVYCANDMDAYYYFLEKGYKLPDPALFDGRHGLIGYGRTTQSNGTTVRKDTYSIAIGIHDPVLSGADWIAIQKRLGQNKSTRYAKYEAGILKGILRCKCGVKMNIRTYKKNGSLFSYYYCPKMAREGVSACDTGYTRVDDIDDRFLQELKKIKLSPDSIELEENVSYVDTGKMRADLKKTTDSIRNLMNALSGSADSAAAKYIIAELEALDKEKSVLEKKLRTAEQRNRRAAVSAETKEFVYHRICNLLDNMDSMSYTEINELIRSIVKSCVFDGDHLDVTF

SEQ ID NO: 4897 - protein, 514 aa, Unknown
  Description of Unknown: Integrase B4898 sequence
  cd03768,PTHR30461:SF3,SM00857,G3DSA:1.10.10.2600,IPR036162, PF13408,PS51737,G3DSA:3.40.50.1390,IPR025827,IPR006119, IPR038109,PF07508,IPR011109,SSF53041,PTHR30461, PS51736,Coil,PF00239
MLRIGIYPRKSVYRDNSDSVQVQITACKDYARLMFKDQELDFRIYDKDEGFSGKNTHRPSFTELMADVKADELDIIIVYKLDRISRSVKDFSEIYETLQQHNVSFLSVKESFDTSTPMGRTVMYILSAFAQLERENTAERVADNMASLGEAGKWTGGTLPPGMTSVRKKIGDKTHSYLIVDEQRIKTVKYIFTLMLSGTSITKLEHTLRQEGIRTERDAFYSCSKLYNLFTNPVYCANDMDAYYYFLEKGYKLPDPALFDGRHGLIGYGRTTQSNGTTVRKDTYSIAIGIHDPILSGADWIAIQKRLGQNKSTRYAKYEAGILKGTLRCKCGVKMNIRTYKKNGSLFSYYYCPKMAREGVSACDTGYTRVDDIDDRFLQELKKIKLSPDSIELDGNVSYVDTGKMRADLKKTTDSIRNLMNALSGSADSAAAKYIIAELESLDKEKSVLEKKLRTAEQRNRRAAVSAETKEFVYHRICNLLDNMDSMSYTEINELIRSIVKSCVFDGDHLDVTF

SEQ ID NO: 4898 - protein, 514 aa, Unknown
  Description of Unknown: Integrase B4899 sequence
  PTHR30461:SF3,SM00857,G3DSA:1.10.10.2600,IPR036162,PF13408, IPR025827,G3DSA:3.40.50.1390,PS51737,IPR006119,IPR038109, PF07508,SSF53041,IPR011109,PF00239,PTHR30461, PS51736,Coil,cd00338
MYNQNELIMYLRKSRADRPDETVEEVLEKHEGILQDYASENFGFKIPENQILREVVSGETIADRPEIQRLLRQIESKKIKAVMVVDPQRLSRGDLEDCGRIVNAFRYSHTTIITQYREYNLEDKYDRKFFEMELGRGNDYLEYTKEILQRGRNASAKKGNFLGSVPPYGYKKVFVDKRPTLEIVPEEANVVRIIFDLYVNNNYGFMALANALDDLGIKPRKSKYWSAAALKNLIDNPVYIGKIRWNFRKTIYVIKDGEKQRTRPNAKNINDYILVDGNHEAILSEEMFNAAQAKKGKNIRVKQKVAVRNPFSGLLFCDCGRAMSYRTYRNKGVTIAMPRLVCEDQHHCRNKSVYYDEFEKYIVDVLYAAIADFKVKLENNNNTNSDYDLLIKKLEDKLERLHKKDDEQHDLLEEGFYTKEVFIRRNIKLQEDIEHTQLAIKNTKENMPKRIDYHERIATFQEAVDALQRNDVDASLKNMLLKKCIEKITYSRHLLANQSKFENPPFNVDIKLRL

SEQ ID NO: 4899 - protein, 514 aa, Unknown
  Description of Unknown: Integrase B4900 sequence
  cd03768,PTHR30461:SF3,SM00857,G3DSA:1.10.10.2600,IPR036162, PF13408,IPR025827,PS51737,G3DSA:3.40.50.1390,IPR006119, IPR038109,PF07508,IPR011109,SSF53041,PTHR30461, PS51736,Coil,PF00239
MLRIGIYPRKSVYRDNSDSVQVQITACKDYARLMFKDQELDFRIYDKDEGFSGKNTHRPSFTELMADVKADELDIIIVYKLDRISRSVKDFSEIYETLQQHNVSFLSVKESFDTSTPMGRTVMYILSAFAQLERENTAERVADNMASLGEAGKWTGGTLPPGMTSVRKKIGDKTHSYLIVDEQRIKTVKYIFSLMLSGTSITKLEHTLRQEGIRTERDAFYSCSKLYNLFTNPVYCANDMDAYYYFLEKGYKLPDPALFDGRHGLIGYGRTTQSNGTTVRKDTYSIAIGIHDPILSGADWIAIQKRLGQNKSTRYAKYEAGILKGTLRCKCGVKMNIRTYKKNGSLFSYYYCPKMAREGVSACDTGYTRVDDIDDRFLQELKKIKLSPDSIELEENVSYVDTGKMRADLKKLNDSIRNLMNALSGSADSAAAKYIIAELESLDKEKAVLEKKLRTAEQRNRRAAVSAETKEFVYHRICNLLDNMDSMSYTEINELIRSIVKSCVFDGDHLDVTF

SEQ ID NO: 4900 - protein, 514 aa, Unknown
  Description of Unknown: Integrase B4901 sequence
  SM00857,G3DSA:1.10.10.2600,IPR036162,PS51737,G3DSA:3.40.50.1390, IPR006119,IPR038109,PF07508,IPR011109,SSF53041, PF00239,PTHR30461,PS51736,Coil,cd00338
MSTEYAIYLRKSRADLEAEAHGEGDTLARHEHILMELAKSRALPIGAIYREIVSGERIANRPVMQQLLSEVEDGRWKGVLVTETSRLARGDTIDQGIVAQAFKFSGTLIVTPSKTYDPTQEADEEWMEFGLFMSRQEYRMIRRRQLAGTRASKKEGHYVPGRPPYGYERYKLDGRGWSLRPVEPQAGVIRTIYDMYLSGKGFSEIANELNAMKIRTPLDKKWVPATTRAILQNPHYAGFIPSAMKVNTKIVQKGKLITKRPVNKNCELYEGIHEAIIPRDVWNSVQQRMKDTVTPRVPRKYQQMNPLAGLVYCDQCGKLMSRHPYRREDKVRFGCENPSCSTVSSLFEDVESLVLQSLREFLHKIELSSPARLDTKSEENALQNIEKQLTDINRRLQRTYELLEDGFYSKETFLQRQSAISQDQTALLNTKHEIERKLHNKQKDIEAQKNSAPLIRHVLDVYPTLEDPKEQNLLLKQVIRRIDYHKTVRVYGKAKSDLHLTIHPKIAIPQTSNI

SEQ ID NO: 4901 - protein, 514 aa, Unknown
  Description of Unknown: Integrase B4902 sequence
  cd03768,PTHR30461:SF3,SM00857,G3DSA:1.10.10.2600, IPR036162,PF13408,PS51737,G3DSA:3.40.50.1390, IPR025827,IPR006119,IPR038109,PF07508, SSF53041,IPR011109,PTHR30461,PS51736,Coil,PF00239
MLRIGIYPRKSVYRDNSDSVQVQITACKDYARLMFKDQELDFRIYDKDEGFSGKNTHRPSFTELMADVKADELDIIIVYKLDRISRSVKDFSEIYETLQQHNVSFLSVKESFDTSTPMGRTVMYILSAFAQLERENTAERVADNMASLGEAGKWTGGTLPPGMTSVRKKIGDKTHSYLIVDEQRIKTVKYIFSLMLSGTSITKLERTLRTEGIRTERDAFYSCSKLYNLFTNPVYCANDMDAYYYFLEKGYKLPDPALFDGRHGLIGYGRTTQSNGTTVRKDTYSIAIGIHDPILSGADWIAIQKRLGQNKSTRYAKYEAGILKGTLRCKCGVKMNIRTYKKNGSLFSYYYCPKMAREGVSACDTGYTRVDDIDDRFLQELKKIKLSPDSIELEENVSYVDTGKMRADLKKTTDSIRNLMNALSGSADSAAAKYIIAELEALDKEKSVLEKKLRTAEQRNRRAAVSAETKEFVYHRICNLLDNMDSMSYTEINELIRSIVKSCVFDGDHLDVTF

SEQ ID NO: 4902 - protein, 514 aa, Unknown
  Description of Unknown: Integrase B4903 sequence
  cd00338,SM00857,G3DSA:1.10.10.2600,IPR036162,PF13408, PS51737,G3DSA:3.40.50.1390,IPR025827,IPR006119,IPR038109, PF07508,IPR011109,SSF53041,PTHR30461,PS51736, Coil,PF00239
MSMNAVIYARYSSHNQTEQSIEGQLRDCYDYAKRNDLTVIGEYIDRAISGKTDDRPDFQRMIEDAPKRQFERVLVWKFDRFARNMFDSVTYKHELKKHGVKVISAMENIGEGDESVLLEAMLEASAEYYSLDLKKKIARGMRESALKGKFVGGAVPWWCSVNAEHKLIVIDERAAIVKEAFARYDSGEGSKSIVDDFAKRGLRSNRGMPVTLSWLLSILKNRKTIGEYTYNGIEIPGGLPAVVDKPLFDRVQERIARKRRTGGGEATSKTEYLLQGKLFCGLCGSPITAECGQNRKGVVYNYYACSLKKKKHQCKKANERKDFLEWYVVEQTLDYVLTPDRTDYIAEAIVAEYERQFDKSGIKALEQKIALTEGEIQKTMDLCIQATTDAMRKRFMKRCEELDAKKADMEIDLSKLRVAASITYTKEEVRAWLRQFCAGDSFNPAFRRRIIDVFINTVYLYDDKLIIYYNLRDSRQVSYIEAIGASSEIENLRPVPDNKKTAVECSTADKNGGA

SEQ ID NO: 4903 - protein, 514 aa, Unknown
  Description of Unknown: Integrase B4904 sequence
  PTHR30461:SF3,SM00857,G3DSA:1.10.10.2600,IPR036162,PF13408, PS51737,IPR025827,G3DSA:3.40.50.1390,IPR006119,IPR038109, PF07508,IPR011109,SSF53041,PTHR30461,Coil, PS51736,cd00338,PF00239
MRRKKVKGGNRLVAYYRYSGGSGQTEQSIEGQRRDCENYAKLHGLTILHEYIDRHISGKTDDRAAFQQMMNDGDKGAFDMVICWKTDRFARNRYDSAVYKKRLRDNGIEILYAAESNVEGAEGIIIEGLMEALAEYYSAELAEKMRRGMRESALKGQAINRCRSLGLTTDENKKYVIDEKTAPTVRFIFEHYAAGESSTSIVDQLNAKGLRTSQGNLFNKCSIPRIIQNEMYRGVYTSKAYNVRIEGAIPAIIDDDLWKRAQAMMKTNRQLKAKYEPKAEYLLSGKLFCAKCGCTMKGVSGHSGGNDEVYRYYACSNPQCRKRNIPKDDLEGKVIRSICDHLLQPETMELLAETMVDVQKADMEKPNAERDVLEQELWDVRRRSKNIMDAIETGSANPQLVARLDDLTQQENTLTYQLSTMEAEKPLLFTKEQYLFLLQQFYAQPTEQDDAYKRRLINTFVTNIEVSDSELLIYFNISEETENKNKNASQLNFDKSSSTEKRLVRVARIELTAS

SEQ ID NO: 4904 - protein, 514 aa, Unknown
  Description of Unknown: Integrase B4905 sequence
  SM00857,G3DSA:1.10.10.2600,IPR036162,PF13408,PS51737, IPR025827,G3DSA:3.40.50.1390,IPR006119,IPR038109,PF07508, IPR011109,SSF53041,PTHR30461,Coil,PS51736, cd00338,PF00239
MSTEYALYLRKSRADLEAEAHGEGDTLARHEHILMELAKSRALPIGAIYREVVSGERIANRPVMQQLLAEVEDGRWKGVLVTETSRLARGDTIDQGIVAQAFKFSGTLIVTPSKTYDPTQEADEEWMEFGLFMSRQEYRMIRRRMTAGMQAAKREGRYISNVPPYGYERYKLDGRGWSLRPIEPQAKVVRMIFDLYLSGLGYCEIEKRLNALHIPAPKSDKWSARTIPGILRNAHYIGCIPAAFRPGKKVVKDGQVKVTRPRVKSCELYKGLHEPIIDRAVWDQVQARLGKNAAVRTPGNRQQSNPLAGLIVCDCCGKRMQRRPQTGTNSQTQIQCTTRGCATVAHNADELERLVLESLRTFLAQIEVGTPAAPDLSAERHALTEIEKQLTDLDTRLRRTFELVEDGTYTREIFLSRQAELTAERERLTADRAAIRQKIDQAQHEYDTRTGLAPAVRHVLDTYSTDLSAADRNKLLKQVIDHIDYHKRTRTRWTKESDLSLTLHPVVFSSLTNR

SEQ ID NO: 4905 - protein, 514 aa, Unknown
  Description of Unknown: Integrase B4906 sequence
  SM00857,G3DSA:1.10.10.2600,IPR036162,PS51737,G3DSA:3.40.50.1390, IPR006119,IPR038109,PF07508,IPR011109,SSF53041, PTHR30461,Coil,PS51736,cd00338,PF00239
MPTDYALYLRKSRADLEAEAHGEGDTLARHEHILMELAKSRALPIGAIYREIVSGERIANRPVMQQLLSEVEDGRWKGVLVTETSRLARGDTIDQGIVAQAFKFSGTLIVTPAKTYDPTQEADEEWMEFGLFMSRQEYRMIRRRQLAGTRASKKEGHYVPGRPPYGYERYKLDGRGWALRPVEPQAGVIRTIYDMYLSGKGFSEIANELNAMKIRTPLDKKWVPATTRAILQNPHYAGFIPSAMKVNTKIVQKGKLITKRPVNKNCELYEGIHEAIIPRDVWYSVQQRMKDTVTPRVPRKYQQMNPLAGLVYCDQCGKLMSRHPYRREDKVRFGCENPSCSTVSSLFEDVENLVLQSLREFLHEIELSSPTLLDTKSEEIALQNIEKQLTDINHRLQRTYELLEDGVYSKETFLQRQSAISQDQTALLNTKHEIERKLHNKQTDIEAQKDSAPLIRHVLDVYPTLEDPKEQNLLLKQVIRRIDYHKTVRVYGKAKSDLHLTIHPKIAIPQTSNI

SEQ ID NO: 4906 - protein, 514 aa, Unknown
  Description of Unknown: Integrase B4907 sequence
  cd03768,PTHR30461:SF3,SM00857,G3DSA:1.10.10.2600, IPR036162,PF13408,PS51737,G3DSA:3.40.50.1390, IPR025827,IPR006119,IPR038109,PF07508, IPR011109,SSF53041,PTHR30461,PS51736,Coil,PF00239
MLRIGIYPRKSVYRDNSDSVQVQITACKDYARLMFKDQELDFRIYDKDEGFSGKNTHRPSFTELMADVKADELDIIIVYKLDRISRSVKDFSEIYETLQQHNVSFLSVKESFDTSTPMGRTVMYILSAFAQLERENTAERVADNMASLGEAGKWTGGTLPPGMTSVRKKIGDKTHSYLIVDEQRIKTVKYIFSLMLSGTSITKLEHTLRQEGIRTERDAFYSCSKLYNLFTNPVYCANDMDAYYYFLEKGYKLPDPALFDGRHGLIGYGRTTQSNGTTVRKDTYSIAIGIHDPILSGTDWIAIQKRLGQNKSTRYAKYEAGILKGTLRCKCGVKMNIRTYKKNGSLFSYYYCPKMAREGVSACDTGYTRVDDIDDRFLQELKKIKLSPDSIELEENVSYVDTGKMRADLKKTTDSIRNLMNALSGSADSAAAKYIIAELEALDKEKSVLEKKLRTAEQRNRRAAVSAETKEFVYHRICNLLDNMDSMSYTEINELIRSIVKSCVFDGDHLDVTF

SEQ ID NO: 4907 - protein, 514 aa, Unknown
  Description of Unknown: Integrase B4908 sequence
  cd03768,PTHR30461:SF3,SM00857,G3DSA:1.10.10.2600,IPR036162, PF13408,IPR025827,PS51737,G3DSA:3.40.50.1390,IPR006119, IPR038109,PF07508,IPR011109,SSF53041,PTHR30461, PS51736,Coil,PF00239
MLRIGIYPRKSVYRDNSDSVQVQITACKDYARLMFKDQELDFRIYDKDEGFSGKNTHRPSFTELMADVKADELDIIIVYKLDRISRSVKDFSEIYETLQQHNVSFLSVKESFDTSTPMGRTVMYILSAFAQLERENTAERVADNMASLGEAGKWTGGTLPPGMTSVRKKIGDKTHSYLIVDEQRIKTVKYIFSLMLSGTSITKLEHTLRQEGIRTERDAFYSCSKLYNLFTNPVYCANDMDAYYYFLEKGYKLPDPALFDGRHGLIGYGRTTQSNGTTVRKDTYSIAIGIHDPILSGADWIAIQKRLGQNKSTRYAKYEAGILKGTLRCKCGVKMNIRTYKKNGSLFSYYYCPKMAREGVSACDTGYTRVDDIDDRFLQELKKIKLSPDSIELEENVSYVDTGKMRTDLKKTTDSIRNLMNALSGSADSAAAKYIIAELEALDKEKAVLEKKLRTAEQRNRRAAVSAETKEFVYHRICNLLDNMDSMSYTEINELIRSIVKSCVFDGDHLDVTF

SEQ ID NO: 4908 - protein, 514 aa, Unknown
  Description of Unknown: Integrase B4909 sequence
  SM00857,G3DSA:1.10.10.2600,IPR036162,PF13408,PS51737, G3DSA:3.40.50.1390,IPR025827,IPR006119,IPR038109,PF07508, IPR011109,SSF53041,PF00239,PTHR30461,PS51736, Coil,cd00338
MSTEYAIYLRKSRADLEAEAHGEGDTLARHEHILMELAKSRALPIGAIYREIVSGERIANRPVMQQLLSEVEDGRWKGILVTETSRLARGDTIDQGIVAQAFKFSGTLIVTPSKTYDPTQEADEEWMEFGLFMSRQEYRMIRRRMTAGMQAAKREGRYISNVPPYGYERYKLEGRGWSLRPIESQAKVVRMIFDLYLSGLGYCEIEKRLNALHIPAPKSDKWSARTIPGILRNAHYIGCIPAAFRPGKKVVKDGQVKVTRPRVKSCELYKGLHEPIIDRAVWDQVQARLGKNAAVRTPGNRQQSNPLAGLIVCDCCGKRMQRRPQTGTGSQTQIQCTTRGCATVAHNADELEQLVLDSLRTFLAQIEVGTPVAPDLSAEQHALSEIEKQLTDLEARQRRTFELVEDGTYTREIFLSRQAELSTERERLTADRTAIQHKIEQAQHEYDARTGLAPAVRHVLDTYNTDLPAADRNKLLKQVIDRIDYHKRTRTRWTKESDLSLTLHPVVFSSLTNR

SEQ ID NO: 4909 - protein, 514 aa, Unknown
  Description of Unknown: Integrase B4910 sequence
  PTHR30461:SF3,SM00857,G3DSA:1.10.10.2600,IPR036162,PF13408, IPR025827,G3DSA:3.40.50.1390,PS51737,IPR006119,IPR038109, PF07508,SSF53041,IPR011109,PTHR30461,PS51736, cd00338,PF00239
MNTVIYARYSAGPRQTDQSIEGQLRVCTDFCKQRGLTVIDTYCDRHISGRTDERPEFQRLIADAKRKKFEAVVVYKTDRFARNKYDSAVYKRELKRNGIQIFYAAEAIPDGPEGIILESLMEGLAEYYSAELAQKIKRGMHESALKCQSTGSGRPLGYRVDEQKHFQIDPESAQTVQTIFEQYIKGESNAAICELLNSRGLRTAQGKPFNKNSINRIIKNRKYIGEYRYHDIVVEGGMPAIISKDTFNLAQAEMERRRTRKAPKSPKAEYLLAGRLFCGHCKGPMQGVSGTGKSGNKWYYYYCGNTRGKNKTCDKKQVSRDRLERAVVDFTVRYILQEDILEELARKVHAAQEHQNDTASEIAFYEKKLADNKKSIANVLRAIESGAATQTLPARLQELENEQAVILGELSFLKGKHLAFTEDQILFALMKHLEPYPGESEQDYRRRIISDFVSEVYLYDDRLLIYFNISSEDGKLKSADLSNIEGGEFDEGLVSSTTSQKIRTLSSMVIRSDF

SEQ ID NO: 4910 - protein, 514 aa, Unknown
  Description of Unknown: Integrase B4911 sequence
  PTHR30461:SF3,SM00857,G3DSA:1.10.10.2600,IPR036162,PF13408, PS51737,G3DSA:3.40.50.1390,IPR025827,IPR006119,IPR038109, PF07508,IPR011109,SSF53041,PTHR30461,Coil, PS51736,cd00338,PF00239
MRRKKVKGGNRLVAYYRYSGGSGQTEQSIEGQRRDCENYAKLHGLTIVHEYIDRHISGKTDDRAAFQQMMNDGDKGAFDMVICWKTDRFARNRYDSAVYKKRLRDNGIEILYAAESNVEGAEGIIIEGLMEALAEYYSAELAEKMRRGMRESALKGQAINRCRSLGLTTDENKKYVIDEKTAPTVRFIFEHYAAGESSASIVEQLNAKGLRTSQGNPFNKCSIPRIIQNEMYRGVYTSKAYNVRIEGAIPAIIDDDLWKRAQAMMKTNRQLKAKYEPKAEYLLSGKLFCAKCGCTMKGVSGHSGGNDEVYRYYACSNPQCRKRNIPKDDLEGKVIRSICDHLLQPETMELLAETMVDVQKADMEKPNAERDVLEQELWDVRRRSKNIMDAIETGSANPQLVARLDDLTQQENTLTYQLSTMEAEKPLLFTKEQYLFLLQQFYAQPTEQDDAYKRRLINTFVTNIEVSDSELLIYFNVSEETENKNKNASQSNFDKSSSTEKRLVRVARIELTAS

SEQ ID NO: 4911 - protein, 514 aa, Unknown
  Description of Unknown: Integrase B4912 sequence
  SM00857,G3DSA:1.10.10.2600,IPR036162,PS51737,G3DSA:3.40.50.1390, IPR006119,IPR038109,PF07508,IPR011109,SSF53041, PF00239,PTHR30461,PS51736,Coil,cd00338
MQIEYAMYLRKSRADLEAEAHGEGDTLARHEHILMELAKSRALPIGAIYREIVSGERIANRPVMQQLLSEVEDGRWKGVLVTETSRLARGDTIDQGIVAQAFKFSGTLIVTPSKTYDPTQEADEEWMEFGLFMSRQEYRMIRRRQLAGTRASKKEGHYVPGRPPYGYERYKLDGRGWSLRPVEPQAGVIRTIYDMYLSGKGFSEIANELNAMKIRTPLDKKWVPATTRAILQNPHYAGFIPSAMKVNTKIVQKGKLITKRPVNKNCELYEGIHEAIIPRDVWNSVQQRMKDTVTPRVPRKYQQMNPLAGLVYCDQCGKLMSRHPYRREDKVRFGCENPSCSTVSSLFEDVESLVLQSLREFLHEIELSSPALLDTKSEEIALQNIEKQLTDINHRLQRTYELLEDGVYSKETFLQRQSAISQDQTALLNTKHEIERKLHNKQTDIEAQKNSAPLIRHVLDVYPTLEDPKEQNLLLKQVIRRIDYHKTVRVYGKAKSDLHLTIHPKIAIPQTSNI

SEQ ID NO: 4912 - protein, 514 aa, Unknown
  Description of Unknown: Integrase B4913 sequence
  PTHR30461:SF3,SM00857,G3DSA:1.10.10.2600,IPR036162,PF13408, PS51737,G3DSA:3.40.50.1390,IPR025827,IPR006119,IPR038109, PF07508,IPR011109,SSF53041,PF00239, PTHR30461,PS51736,Coil,cd00338
MRVVLYMRYSSDRQTEQSIEGQNRVCTAFCEQQGYEIVDRYIDRATSAFKDTNKRTEFQRMIRDSEKQLWEGIVVYKLDRFARNRYDSATYKARLKKNGVRVISATENISDNPEGVILEAVLEGMAEFYSKELSQKITRGMFESANKCHSIGGHIPLGYKIENKKLVIDEAGAAIVREAFDLYANGTTVAEICETFNTKGYRTAKNAEFNKNSFRSMFKNERYIGIYKYKDLRIEGGVPAIVDKDTFAIVQKKLSKNAEAPSRGKAKIDYLLSQKLFCGHCGSLMTGESGTGKGGTTYFYYTCGKRKREHTCDKKPLKKDFIERAVVEDALTLLTPETIDELADIAVNESIREMEENSIIPALKDQLHDTERSINNLVKMVEKGVESDTIADRLKELEKEKRAIEKRLVVAQDDYVILEKDHIVWWLSEFCNGDIEDEEFRRHIIDLLVNSVTVWDEPDGWYKITSVYNLTSNKTKTFRCSDLSGQAPPNSANPNSVFFIKHTFGFVYRIENAQ

SEQ ID NO: 4913 - protein, 514 aa, Unknown
  Description of Unknown: Integrase B4914 sequence
  PTHR30461:SF3,SM00857,G3DSA:1.10.10.2600,IPR036162,PF13408, IPR025827,G3DSA:3.40.50.1390,PS51737,IPR006119,IPR038109, PF07508,SSF53041,IPR011109,PF00239,PTHR30461, PS51736,Coil,cd00338
MAKRKFNKGGEVRLVAYYRYSGGSGQTEQSIEGQRRDCETYARLHNMTIQKEYVDRHISGKTDDRAAFQQMIADSDKGAFDMVICWKTDRFARNRYDSAVYKKRLRDNGVEIVYAAESNIAGAEGIIIEGVMEALAEYYSAELAEKMRRGMRESALKGQAISRCRALGLKTDERKRFVIDEKTAPTVRFIFEHYAAGESAMSIVEQLNAKGLRTSQGNPFNKSSIPRIIQNEAYRGVYVSKSYDVRIEGAIPAIIDNELWERAQTMLKLNRQLKAKNEPKADYILSGKLYCSCGSLMRGMSGHSATGEVYRYYTCPNKDCHLRNIPKDDLEGKVIQSIVDHLLQPESMEALAEAMVEVQKADAEKPNAERVAIEQSLADVRRRSKNILDAIENGTANAQLCARLNDLTEQEQTLSFQLSSLEKEKPVVFTKEQYLFLLEQFLVEPSERTPEYGRRLVNAFVTSMVVSDRELVINFNVSDETVNKNKKASQTNLQKESSSGMRLVRVARIELTAS

SEQ ID NO: 4914 - protein, 514 aa, Unknown
  Description of Unknown: Integrase B4915 sequence
  PTHR30461:SF3,cd00338,SM00857,G3DSA:1.10.10.2600,IPR036162, PF13408,PS51737,IPR025827,G3DSA:3.40.50.1390,IPR006119, IPR038109,PF07508,IPR011109,SSF53041,PTHR30461, PS51736,Coil,PF00239
MRVVLYMRYSSDRQTEQSIEGQNRVCTAFCEQQGYEIVDRYIDRATSAFKDTDKRTEFQRMIRDSEKQLWEGIVVYKLDRFARNRYDSATYKARLKKNGVRVISATENISDNPEGVILEAVLEGMAEFYSKELSQKITRGMFESANKCHSIGGHIPLGYKIENKKLVIDEAGAAIVREAFDLYANGATVAEICETFNTKGYRTAKNAEFNKNSFRSMFKNERYIGIYKYKDLRIEGGVPAIIDKDTFAIVQKKLSKNAEAPSRGKAKIDYLLSQKLFCGHCGSLMTGESGTGKGGTTYFYYTCGKRKREHTCDKKPLKKDFIERAVVEDALTLLTPETIDELADIAVKESIREMEENSIIPALKDQLHETERSINNLVKMVEKGVESDTIADRLKELEKEKRAIEKRLVVAQDDYVILEKDHIVWWLSEFCNGDIEDEEFRRHIIDLLVNSVTVWDEPDGWYKITSVYNLTSNKTKTFRCSDLSGQAPPNSANPNSVFFIKHTFGFVYRIENAD

SEQ ID NO: 4915 - protein, 514 aa, Unknown
  Description of Unknown: Integrase B4916 sequence
  PTHR30461:SF3,SM00857,G3DSA:1.10.10.2600,IPR036162,PF13408, PS51737,IPR025827,G3DSA:3.40.50.1390,IPR006119,IPR038109, PF07508,IPR011109,SSF53041,PTHR30461,PS51736, cd00338,PF00239
MNTVIYARYSAGPRQTDQSIEGQLRVCTDFCKQRGLTVIDTYCDRHISGRTDERPEFQRLIADAKRKKFEAVVVYKTDRFARNKYDSAVYKRELKRNGIQIFYAAEAIPDGPEGIILESLMEGLAEYYSAELAQKIKRGMHESALKCQSTGSGRPLGYRVDEQKRFQIDPESAQTVQTIFEQYIKGESNAAICELLNSHGLRTAQGKPFNKNSINRIIKNQKYIGEYRYHDIVVEGGMPAIISKDTFNLAQAEMERRRTRKAPKSPKAEYLLAGRLFCGHCKGPMQGVSGTGKSGNKWYYYYCGNTRGKNKTCDKKQVSRDRLERAVVDFTVRYILQEDILEELARKVHAAQEHQNDTASEIAFYEKKLADNKKSIANVLRAIESGAATQTLPARLQELENEQAVILGELSFLKGKRLAFTEDQILFALMKHLEPYPGESEQDYRRRIISDFVSEVYLYDDRLLIYFNISSEDGKLKSADLSNIEGGEFDEGLISSTTSQKIRTLSSMVIRSDF

SEQ ID NO: 4916 - protein, 514 aa, Unknown
  Description of Unknown: Integrase B4917 sequence
  PTHR30461:SF3,SM00857,G3DSA:1.10.10.2600,IPR036162,PF13408, PS51737,G3DSA:3.40.50.1390,IPR025827,IPR006119,IPR038109, PF07508,IPR011109,SSF53041,PF00239,PTHR30461, PS51736,Coil,cd00338
MYENIKTACLYVRFSSHNQTEQSIEGQTRVCRDFCKRHNIRIVEIYADRATSASKDIEKRVQFLKMIKDSEKGLFDAVIVYKLDRFARSRYDSATYKYRLKRNGVQLISATENISNDPEGIILESVLEGMAEFYSAELSQKINRGMRESAYKHNSIGGAIPLGYKIEDKKLVIDPKTAPIVKEAFEKYAEGETVAEICRQFNARGYKTSKGTAFGKSSFTKIFRNERYIGVYSFHDYRAEDAIPAIIDKDLWDRVQLRVGKIKNAPARNKAKVVYLLSGKIFCGHCGSKMNGNCNAGNYYYYQCYGKKNGNVDCKKKNIRKEFIERLVAQDALSLLTDEYIEQIATIACEKNQHEIELDSALPTIRDRIHQVDLSLNNLLKAIESGSAPDMLVKRMGELEKEKKDLQVQAKKESEDIVELDKAQVIYWLEQFRGGSIEDEEFCRMLIDLFVNSVTVWDEDDNTYKVTVAYNLTSLPTKTYRLNKGGTLSDFTSNAPGMKNADIPYISSQILCIF

SEQ ID NO: 4917 - protein, 514 aa, Unknown
  Description of Unknown: Integrase B4918 sequence
  PTHR30461:SF3,SM00857,G3DSA:1.10.10.2600,IPR036162,PS51737, G3DSA:3.40.50.1390,IPR006119,IPR038109,PF07508,IPR011109, SSF53041,PTHR30461,Coil,cd00338,PF00239
MNALENVPYNVYESIKFVAIYLRKSRNEEGISDEDVLLKHRSQLLDFCNRHGFDYDIFQEIGSSDTIEFRPEFKRLLERVQRKIYDAVLVIDFDRITRGDTYEYGYIKRIFAESNTPILTPYGDFIDLSDETNILIDVKASMGRYEYIQTKKRFKEGKKRSARLGRWSNGTPPIGYNYDRNTKSLVIDEEAAEMVRKIFEWYVNDDLPLQQIAFRLNRMGYRTRRGKFFQEIQIQRILTNETYIGTIIYGKTEGSGHKKKKTKPLRKKPEDEWIRVEGCHEPIIDKDIFYRAGTKLAKRQKIPRKARQEVYTLSGLIRCKRCGSLMRQYLRKRADGSKVLNVRICQHTDPFGNRCGNSGCNSEILLIALKEQIEEYRNKLLDSSGVVDMDSQKRLKEKIAIIREELAKLEEGLERIKTLFVDGYIDKEEMDKRTEEQSKKVETKRRELRSYEAEYNSVSNDTVEKKLKLVESIAEQLDVTNPFDKRLNRDLRKLVDYVSYERNGEKFNIKVEFY

SEQ ID NO: 4918 - protein, 514 aa, Unknown
  Description of Unknown: Integrase B4919 sequence
  SM00857,G3DSA:1.10.10.2600,IPR036162,PS51737, G3DSA:3.40.50.1390,IPR006119,IPR038109,PF07508, IPR011109,SSF53041,PTHR30461,Coil, PS51736,cd00338,PF00239
MSTDYALYLRKSRADLEAEAHGEGDTLARHEHILMELAKSRALPIGAIYREIVSGERIANRPVMQQLLSEVEDGRWKGVLVTETSRLARGDTIDQGIVAQAFKFSGTLIVTPAKTYDPTQEADEEWMEFGLFMSRQEYRMIRRRQLAGTRASKKEGHYVPGRPPYGYERYKLDGRGWSLRPVEPQAGVIRTIYDMYLSGKGFSEIANELNAMKIRTPLDKKWVPATTRAILQNPHYAGFIPSAMKVNTKIVQKGKLITKRPVNKNCELYEGIHEAIIPRDVWNSVQQRMKDTVTPRVPRKYQQMNPLAGLVYCDQCGKLMSRHPYRREDKVRFGCENPSCSTVSSLFEDVESLVLQSLREFLHKIELSSPALLDTKSEEIALQNIEKQLTDINHRLQRTYELLEDGVYSKETFLQRQSAISQDQTALLKTKHEIERKLHNKQTDIEAQKNSAPLIRHVLDVYPTLEDPKEQNLLLKQVIRRIDYHKTVRVYGKAKSDLHLTIHPRIAIPQTSNI

SEQ ID NO: 4919 - protein, 514 aa, Unknown
  Description of Unknown: Integrase B4920 sequence
  PTHR30461:SF3,SM00857,G3DSA:1.10.10.2600,IPR036162,PF13408, IPR025827,G3DSA:3.40.50.1390,PS51737,IPR006119,IPR038109, PF07508,SSF53041,IPR011109,PTHR30461,Coil, PS51736,cd00338,PF00239
MRRKKNSDVIRLVAYYRYSGGSGQTEQSIEGQRRDCEAYAKLHGMTILHEYIDRHISGKTDDRAAFQQMMKDSDKGAFDMVICWKTDRFARNRYDSAVYKKRLRDNGVEIIYAAESNVQGAEGIIIEGLMEALAEYYSAELAEKMRRGMRESALKGQAISRCRALGLTTDENKKFVIDERTAPTVRFIFEHYAAGESSTSIIEQLNAKGLRTSQGGPFNKSSIPRIIQNEMYRGVYVSKAYNVRIEDAIPAIIDDDLWGRAQAMMKTNRQLKAKYEPKADYLLSGKLFCAECGGLMKGVSGHSGGNGEVYRYYACSNPECHKRNIPKADLEGKVIRSIRDHLLQPDTMEALADALVEVQEADATKPDAEREALEQELRDVRRRGKNIMDAIENGSVAPQLVARLNDLTQQENTLTYQLSTIAKETPLAFTREQYLLMLKMFCAQPDEQNEAYKHRLINTFVTSMKISDSELIIYFNISEETENKNKKAPQQNFTKESSTEMRLVRVARIELTAS

SEQ ID NO: 4920 - protein, 514 aa, Unknown
  Description of Unknown: Integrase B4921 sequence
  SM00857,IPR036162,PF13408,IPR025827,G3DSA:3.40.50.1390, IPR006119,SSF53041,PTHR30461,Coil,PS51736, cd00338,PF00239
MVKRRAAIYARFSSHNQRSESIEIQVDAGTRYIAENGLELVKVYADYAKTGRNTDRREYKHMMNDARLGLFDYVVIYKVPRIMRNRDEMALTRIMLRKAGVEILYAGEEIASGSAGVLQLGMLEVLAEWESAIDSERIIDGIQKNAQRCMANGRTLYGWDIVEGRYVVNDREAAVLHRMKNLLFSGSTVADIVRAVANERSRNGKPFNHDRTKKLLLRPQNGGTYSYAGHVVEDGMPAIWPKIEQDMIISMLGTPRPRRRVDHTAEWPLTGKLYCAECGNTLAGTSGTSKGGTVYSYYKCKKCKRTFRRDILEDAIVDMTICALERPDVRKRIADGMATYEATMEDAPLESERLRKEIKRIDAAFERIWQAIEDGIAPPGGKERIEDLKARKDALETEYQIAKANENIEPGFSELMDWLDNVAEEMNPQEILTMFVRAVQIDKTEVRLYFAFDYYGDNFTPPKKDEHPVDGCSSNSLMVEPNITKANTVICLETCYLQINRNWFAVIGNLQNTR

SEQ ID NO: 4921 - protein, 514 aa, Unknown
  Description of Unknown: Integrase B4922 sequence
  PTHR30461:SF3,cd00338,SM00857,G3DSA:1.10.10.2600, IPR036162,PF13408,IPR025827,G3DSA:3.40.50.1390, PS51737,IPR006119,IPR038109,PF07508, SSF53041,IPR011109,PTHR30461,PS51736,Coil,PF00239
MAKRKFNKGGEVRLVAYYRYSGGSGQTEQSIEGQRRDCEAYARLHNMTIQKEYVDRHISGKTDDRAAFQQMIADSDKGAFDMVICWKTDRFARNRYDSAVYKKRLRDNGVEIVYAAESNISGAEGIIIEGVMEALAEYYSAELAEKMRRGMRESALKGQAISRCRALGLKTDEHKRFVIDEKTAPTVRFIFEHYAAGESAMSIVEQLNAKGLRTSQGNPFNKSSIPRIIQNEAYRGVYISKSYDVRIEGAIPAIIDDELWERSQTMLKLNRQLKAKNEPKADYILSGKLYCSCGSLMRGMSGHSATGEVYRYYTCPNKDCHLRNIPKDDLEGKVMQSIVDHLLQPESMEALAEAMVEVQKADVEKPNAERVAIEQSLSDVRRRSKNILDAIENGTANAQLCARLDDLTEQEQTLSFQLSSLEKEKPVVFTKEQYLFLLEQFLMEPSERTPEYGRRLVNTFVTSIVVSDRELVINFNVSEETVNKNKKTSQTNLQKESSSGMRLVRVARIELTAS

SEQ ID NO: 4922 - protein, 514 aa, Unknown
  Description of Unknown: Integrase B4923 sequence
  PTHR30461:SF3,cd00338,SM00857,G3DSA:1.10.10.2600,IPR036162, PF13408,PS51737,G3DSA:3.40.50.1390,IPR025827,IPR006119, IPR038109,PF07508,IPR011109,SSF53041,PTHR30461, PS51736,Coil,PF00239
MAKRKFNKGGEVRLVAYYRYSGGSGQTEQSIEGQRRDCETYARLHNMTIQKEYVDRHISGKTDDRAAFQQMITDSDKGAFDMVICWKTDRFARNRYDSAVYKKRLRDNGVEIVYAAESNIAGAEGIIIEGVMEALAEYYSAELAEKMRRGMRESALKGQAISRCRALGLKTDEHKRFVIDEKTAPTVRFIFEHYAAGESAMSIVEQLNAKGLRTSQGNPFNKSSIPRIIQNEAYRGVYISKSYDVRIEGAIPAIIDDELWERAQTMLKLNRQLKAKNEPKADYILSGKLYCSCGSLMRGMSGHSATGEVYRYYTCPNKNCHLRNIPKDDLEGKVMQSISDHLLQPEAMEALAEAMVEVQKADAEKPNAERVAIEQSLADVRRRSKNILDAIENGTANAQLCARLDDLTEQEQTLSFQLSSLEKEKPVVFTKEQYLFLLEQFLVEPSERTPEYGRRLVNTFVTSMVVSDRELVINFNVSDETVNKNKKTSQTNLQKESSSGMRLVRVARIELTAS

SEQ ID NO: 4923 - protein, 514 aa, Unknown
  Description of Unknown: Integrase B4924 sequence
  SM00857,G3DSA:1.10.10.2600,IPR036162,PS51737,G3DSA:3.40.50.1390, IPR006119,IPR038109,PF07508,SSF53041,IPR011109, PTHR30461,Coil,PS51736,cd00338,PF00239
MSTEYALYLRKSRADLEAEAHGEGDTLARHEHILMELAKSRALPIGAIYREIVSGERIANRPVMQQLLSEVEDGRWKGVLVTETSRLARGDTIDQGIVAQAFKFSGTLIVTPSKTYDPTQEADEEWMEFGLFMSRQEYRMIRRRQLAGTRASKKEGHYVPGRPPYGYERYKLDGRGWSLRPVEPQAGVIRTIYDMYLSGKGFSEIANELNAMKIRTPLDKKWVPATTRAILQNPHYAGFIPSAMKVNTKIVQKGKLITKRPVNKNCELYEGIHEAIIPRDVWYSVQQRMKDTVTPRVPRKYQQMNPLAGLVYCDQCGKLMSRHPYRREDKVRFGCENPSCSTVSSLFEDVESLVLQSLREFLHKIELSSPTLLDTKSEEIALQNIEKQLTDINHRLQRTYELLEDGVYSKETFLQRQSAISQDQTTLLNTKHEIERKLHNKQTDIEAQKNSAPLIRHVLDVYPTLEDPKEQNLLLKQVIRRIDYHKTVRVYGKAKSDLHLTIHPKIAIPQTSNI

SEQ ID NO: 4924 - protein, 514 aa, Unknown
  Description of Unknown: Integrase B4925 sequence
  cd03768,PTHR30461:SF3,SM00857,G3DSA:1.10.10.2600, IPR036162,PF13408,PS51737,IPR025827, G3DSA:3.40.50.1390,IPR006119,IPR038109,PF07508, IPR011109,SSF53041,PTHR30461,PS51736,Coil,PF00239
MLRIGIYPRKSVYRDNSDSVQVQITACKDYARLMFKDQELDFRIYDKDEGFSGKNTHRPSFTELMADVKADELDIIIVYKLDRISRSVKDFSEIYETLQQHNVSFLSVKESFDTSTPMGRTVMYILSAFAQLERENTAERVADNMASLGEAGKWTGGTLPPGMTSVRKKIGDKTHSYLIVDEQRIKTVKYIFSLMLSGTSITKLERTLRTEGIRTERDAFYSCSKLYNLFTNPVYCANDMDTYYYFLEKGYKLPDPALFDGRHGLIGYGRTTQSNGTTVRKDTYSIAIGIHDPVLSGADWIAIQKRLGQNKSTRYAKYEAGILKGILRCKCGVKMNIRTYKKNGSLFSYYYCPKMAREGVSACDTGYTRVDDIDDRFLQELKKIKLSPDSIELEENVSYVDTGKMRADLKKTTDSIRNLMNALSGSADSAAAKYIIAELEALDKEKSVLEKKLRTAEQRNRRAAVSAETKEFVYHRICNLLDNMDSMSYTEINELIRSIVKSCVFDGDHLDVTF

SEQ ID NO: 4925 - protein, 514 aa, Unknown
  Description of Unknown: Integrase B4926 sequence
  PTHR30461:SF3,SM00857,G3DSA:1.10.10.2600,IPR036162,PF13408, PS51737,G3DSA:3.40.50.1390,IPR025827,IPR006119,IPR038109, PF07508,IPR011109,SSF53041,PF00239,PTHR30461, PS51736,Coil,cd00338
MYEDIKTACLYVRFSSHNQTEQSIEGQTRVCRDFCKRHNIRIVEIYADRATSASKDIEKRVQFLKMIKDSEKGLFDAVIVYKLDRFARSRYDSATYKYRLKRNGVQLISATENISNDPEGIILESVLEGMAEFYSAELSQKINRGMRESAYKHNSIGGAIPLGYKIEDKKLVIDPKTAPIVKEAFEKYADGETVAEICRQFNARGYKTSKGTAFGKSSFTKIFRNERYIGVYTFHDYRAEDAIPAIIDKDLWDRVQLRVGKIKNAPARNKAKVVYLLSGKIFCGHCGSKMNGNCNAGNYCYYQCYGKKNGNVDCKKKNIRKEFIERLVAQDALSLLTDEYIEQIATIACEKNQHEIELDSALPTIRDRIHQVDLSLNNLLKAIESGSAPDMLVKRMGELEKEKKDLQAQAKKESEDIIELDKAQAIYWLEQFRGGSIEDEEFCRMLIDLFVNSVTVWDEDDNTYKVTVAYNLTSLPTKTYRLNKGGTLSDFASNAPGMGKYKAESVGAGHQGNP

SEQ ID NO: 4926 - protein, 514 aa, Unknown
  Description of Unknown: Integrase B4927 sequence
  PTHR30461:SF3,SM00857,G3DSA:1.10.10.2600,IPR036162,PF13408, IPR025827,G3DSA:3.40.50.1390,PS51737,IPR006119,IPR038109, PF07508,IPR011109,SSF53041,PTHR30461,Coil, PS51736,cd00338,PF00239
MTIIGEYCDKAISGKTDNRPSFQRLIKDSEKGQFEAVIMYTLDRFARNRYDSAIYKAKLKKNGVRVYYAKQPMPDTPEGIILESVLEGYAEYYSENLSRNIKRGMKENALQCIANGGAGMPLGYTVGEDRRYKIDPVGARIVQEIFQMYADGMSATQIINECNKRGYKTARGNAFNKNSLRTMLKNDRYIGVYRFADVVVEGGVPPIISRELFDKVQATLKHNYSARARNKAKDDYLLTAKLFCGHCGSSMVGESGTSKSGKLHHYYKCIERKRKHKCNKAVEKKDWMEELVVRFTVQKVLTDENIERIAVKAMEIIEKESADTTYIDGLRNELKEVKKKIKNLMTAIEQGIITPSTKERMDELELEKNEIEGRIASEEMKKPHLTKERIMYWLYSFKSGNIDDVEYKRRVIDTLVNSVYVYDEGDKGRRIVFTFNISGRNTATLSCSDIACFAPPKIRPSAFGRWPYFWASLARRAGTNLLDGVQEVLPGVVHGVTHVLHGAAHAGLHGPLPG

SEQ ID NO: 4927 - protein, 514 aa, Unknown
  Description of Unknown: Integrase B4928 sequence
  cd03768,PTHR30461:SF3,SM00857,G3DSA:1.10.10.2600,IPR036162, PF13408,PS51737,IPR025827,G3DSA:3.40.50.1390,IPR006119, IPR038109,PF07508,SSF53041,IPR011109,PTHR30461, PS51736,Coil,PF00239
MLRIGIYPRKSVYRDNSDSVQVQITACKDYARLMFKDQELDFRIYDKDEGFSGKNTHRPSFTELMADVKADELDIIIVYKLDRISRSVKDFSEIYETLQQHNVSFLSVKESFDTSTPMGRTVMYILSAFAQLERENTAERVADNMASLGEAGKWTGGTLPPGMTSVRKKIGDKTHSYLIVDEQRIKTVKYIFSLMLSGTSITKLERTLRAEGIRTERDAFYSCSKLYNLFTNPVYCANDMDAYYYFLEKGYKLPDPALFDGRHGLIGYGRTTQSNGTTVRKDTYSIAIGIHDPVLSGADWIAIQKRLGQNKSTRYAKYEAGILKGTLRCKCGVKMNIRTYKKNGSLFSYYYCPKMAREGVSACDTGYTRVDDIDDRFLQELKKIKLSPDSIELEENVSYVDTGKMRADLKKTTDSIRNLMNALSGSADSAAAKYIIAELEALDKEKSVLEKKLRTAEQRNRRAAVSAETKEFVYHRICNLLDNMDSMSYTEINELIRSIVKSCVFDGDHLDVTF

SEQ ID NO: 4928 - protein, 514 aa, Unknown
  Description of Unknown: Integrase B4929 sequence
  SM00857,G3DSA:1.10.10.2600,IPR036162,PS51737,G3DSA:3.40.50.1390, IPR006119,IPR038109,PF07508,IPR011109,SSF53041, PTHR30461,Coil,PS51736,cd00338,PF00239
MSTEYAIYLRKSRADLEAEAHGEGDTLARHEHILMELAKSRALPIGAIYREIVSGERIANRPVMQQLLAEVEDGRWKGVLVTETSRLARGDTIDQGIVAQAFKFSGTLIVTPSKTYDPTQEADEEWMEFGLFMSRQEYRMIRRRQLAGTRASKKEGHYVPGRPPYGYERYKLDGRGWSLRPVEPQAGVIRTIYDMYLSGKGFSEIANELNAMKIRTPLDKKWVPATTRAILQNPHYAGFIPSAMKINTKIVQKGKLITKRPVNKNCELYEGIHEAIIPRDVWYSVQQRMKDTVTPRVPRKYQQMNPLAGLVYCDQCGKLMSRHPYRREDKVRFGCENPSCSTVSSLFEDVESLVLQSLREFLHKIELSSPTLLDTKSEEIALQNIEKQLTDINHRLQRTYELLEDGFYSKETFLQRQSAISQDQTALLNTKHEIERKLHNKQTDIEAQKNSAPLIRHVLDVYPTLEDPKEQNLLLKQVIRRIDYHKTVRVYGKAKSDLHLTIHPKIAIPQTSNI

SEQ ID NO: 4929 - protein, 514 aa, Unknown
  Description of Unknown: Integrase B4930 sequence
  PTHR30461:SF3,cd00338,SM00857,G3DSA:1.10.10.2600,IPR036162, PF13408,IPR025827,G3DSA:3.40.50.1390,PS51737,IPR006119, IPR038109,PF07508,IPR011109,SSF53041, PTHR30461,PS51736,Coil,PF00239
MRKKKVKDGNRLVAYYRYSGGSGQTEQSIEGQRRDCENYAKLHGLTILHEYIDRHISGKTDDRAAFQQMMNDGDKGAFDMVICWKTDRFARNRYDSAVYKKRLRDNGIEIFYAAESNVEGAEGIIIEGLMEALAEYYSAELAEKMRRGMRESALKGQAINRCRSLGLTTDENKKYVIDEKTAPTVRFIFEHYAAGESSTSIVDQLNAKGLRTSQGNPFNKCSIPRIIQNEMYRGVYTSKAYNVRIEGAIPAIIDDDLWKRAQAMMKTNRQLKAKYEPKAEYLLSGKLFCAKCGCTMKGVSGHSGGNGEVYRYYACSNPQCRKRNIPKDDLEGKVIRSICDHLLQPETMELLAETMVEVQKADMEKPNAERDVLEQELRDVRRKSKNIMDAIETGSANPQLVARLDDLTQQENTLTYQLSTMEAEKPLLFTKEQYLFLLQQFYAQPTEQDDAYKRRLINTFVTNIEVSDSELLIYFNISEETENKNKNAPQLNFDKSSSTEKRLVRVARIELTAS

SEQ ID NO: 4930 - protein, 514 aa, Unknown
  Description of Unknown: Integrase B4931 sequence
  SM00857,G3DSA:1.10.10.2600,IPR036162,PS51737,G3DSA:3.40.50.1390, IPR006119,IPR038109,PF07508,SSF53041,IPR011109, PF00239,PTHR30461,PS51736,Coil,cd00338
MNQELFAIYLRKSRKDLELKEYDVLERHRRILLDFANSRNIKINKEDIYEEVVSGETIQDRPVVQELLKKIEAGYYKAVLVMEIERLARGNTIDQGIIAQTFQLTNTLIITPNKTYDTNNEYDNEFLEFGLFMSRREYKAISRRIQAGRIQSVKEGNFIGSVTPYGYDKEKLKGTKGYKLIPNQEEAENVKLIFKLFIESSCGTSNLAYKLNDLGIRSRTNSVWTPAMVRNILKNRVYIGFVSWGKRANVKKLNNNEINKSRPINTDYIEARGKHEPIIDDITFYKVQELLKSTSIKKVPYEKVLKNPLSGLIKCGKCNLNMIRRPYPQNKHEDLLICRNKYCDNISSSLHLVEKKLLNSLEEQLNEFYFYINNYEQEYIKSTKNYNLQIKKIDKEILKLKSQLSKACEFLELGAYSLELFKERSNSINLKVENLEKEKLKLEELSKNNIIERITQYIPLLEKCLNTYWTLDIEGKNSILKEIISEVYYTKNVKGSRWNLDNTDKFSLDIKLRV

SEQ ID NO: 4931 - protein, 514 aa, Unknown
  Description of Unknown: Integrase B4932 sequence
  PTHR30461:SF3,SM00857,G3DSA:1.10.10.2600,IPR036162,PF13408, PS51737,G3DSA:3.40.50.1390,IPR025827,IPR006119,IPR038109, PF07508,IPR011109,SSF53041,PTHR30461, Coil,PS51736,cd00338,PF00239
MPKKNPSGGKRLVAYYRYSGGSHQTEQSIEGQRRDCETYARIHGMVILHEYIDRHISGKTDDRPEFQQMIADAGKGMFDYVICWKTDRIARSRYDSIIYKKKLRDNGVELLYAAEANVEGSGGIIVEGLMEALAEYYSAELAEKVRRGMRESALKGKAIGSSRPLGLTVDKDKKYIIDPAGAAAVRYIFEQYAAGAASSAIVAHLNEQGLCTSRGNPFNKSSVVRIIQNEVYRGVYVSPKFDVRIEGAVPAIIDDDLWERAQKMFVRNRQSRSPRNDRADYILSGKLFCGECGTAMKGVSGHSSNGEVYFYYSCPCKDCHRRNIPKDELEGLVIRTVCNDVLQPDVMDRIADSVIEAQTAELNQPNPEKDALQHELADVQRKAKNLLAALENGTAGAMLTNRLAELEQQADTLSYQLSSLESEPKFPVFSKEEVLYLLEQFLIAPSEKTKAYRRRLIDTFVSKIEVSNTELTIYFNIAEEDCGKMKKAPQSNQPEGCSTEKQMVRVARIELTAS

SEQ ID NO: 4932 - protein, 514 aa, Unknown
  Description of Unknown: Integrase B4933 sequence
  PTHR30461:SF3,SM00857,G3DSA:1.10.10.2600,IPR036162,PF13408, IPR025827,G3DSA:3.40.50.1390,PS51737,IPR006119,IPR038109, PF07508,IPR011109,SSF53041,PTHR30461,Coil, PS51736,cd00338,PF00239
MRRKKNSDVIRLVAYYRYSGGSGQTEQSIEGQRRDCEAYAKLHGMTILHEYIDRHISGKTDDRAAFQQMMKDSDKGAFDMVICWKTDRFARNRYDSAVYKKRLRDNGVEIIYAAESNVQGAEGIIIEGLMEALAEYYSAELSEKMRRGMRESALKGQAISRCRALGLTTDENKKFVIDERTAPTVRFIFEHYAAGESSTSIIEQLNAKGLRTSQGGPFNKSSIPRIIQNEMYRGVYVSKAYNVRIEDAIPAIIDDDLWGRAQAMMKTNRQLKAKYEPKADYLLSGKLFCAECGSLMKGVSGHSGGNGEVYRYYACSNPECHKRNIPKVDLEGKVIRSIRDHLLQPDAMEALADALVEVQEADAAKPNAEREALEQELHDVRRRGKNIIDAIENGSAAPQLVARLNDLTQQENTLTYQLSTIAKETPLAFTREQYLLMLKMFCAQPDEQNEAYKHRLINTFVTSMKVSDSELVIYFNISEETENKNKKASQQNFTKESSTEMRLVRVARIELTAS

SEQ ID NO: 4933 - protein, 514 aa, Unknown
  Description of Unknown: Integrase B4934 sequence
  PTHR30461:SF3,SM00857,G3DSA:1.10.10.2600,IPR036162,PF13408, IPR025827,G3DSA:3.40.50.1390,PS51737,IPR006119,IPR038109, PF07508,SSF53041,IPR011109,PTHR30461,Coil, PS51736,cd00338,PF00239
MPTVTVIQPTIAEEKAVKIRCAAYCRVSSDSEDQLNSFMAQTRYYSQIFEDSETEELIDIYADEGITGTREDKRSEFQRLMKDCRKGKIDRIYTKSISRFARNTRDCLKNVRELKSLGITIYFEKENIDTANMTDEMMITIMGGLAQEESTSISQNMQWSIRKRMANGTYIVSHVPYGYTKSGGKMIVNPREAEIVKRIYEDFLNGKGLLRISNDLNAGSIPKNSKGEPWNKNVVRYVLTNEKYIGDCLWQKKFTENVFPFRKSKNQGQVDSYYITDAHEPIISREDFTKVQTLLKQRGEYYGNTEFKQYPLTMKIFCDNCGKIYRRKNINGKIYWVCRTHDNRAKDCPNKAIAQKLIYISFIRLCNKLWYNYKQILVPLQTSLQDLKLKRFSGNTNVMDIHKEIAKLKEQTHVLARLKTKGFLDEAKYIEQTTELTAKINKLQVELKKLSRSDDEDETLEQIEMLFDFFEKRDKPITEFEESTFESIVEKIVVIDQHELEFHLIGGLKFKENI

SEQ ID NO: 4934 - protein, 514 aa, Unknown
  Description of Unknown: Integrase B4935 sequence
  PTHR30461:SF3,cd00338,SM00857,G3DSA:1.10.10.2600,IPR036162, PF13408,IPR025827,G3DSA:3.40.50.1390,PS51737,IPR006119, IPR038109,PF07508,IPR011109,SSF53041,PTHR30461, PS51736,Coil,PF00239
MRVVLYMRYSSDRQTEQSIEGQNRVCTAFCEQQGYEIVDRYIDRATSAFKDTDKRTEFQRMIRDSEKQLWEGIVVYKLDRFARNRYDSATYKARLKKNGVRVISATENISDNPEGVILEAVLEGMAEFYSKELSQKITRGMFESANKCHSIGGHIPLGYKIENKKLVIDEAGAAIVREAFDLYANGATVAEICETFNTKGYRTAKNAEFNKNSFRSMFKNERYIGIYKYKDLRIEGGVPAIVDKDIFTIVQKKLSKNAEAPSRGKAKIDYLLSQKLFCGHCGSLMTGESGTGKGGTTYFYYTCGKRKREHTCDKKPLKKDFIERAVVEDALTLLTPETINELADIAVKESVREMEENSIIPALKNQLHETERSINNLVKMVEKGVESDTIADRLKELEKEKRAIEKRLVVAQDDYVILEKDHIVWWLSEFCNGDIEDEDFRRHIIDLLVNSVTVWDEPDGWYKITSVYNLTSNKTKTFRCSDLSGQAPPNSANPNSFFFVKHCVGFVFIVEDVG

SEQ ID NO: 4935 - protein, 514 aa, Unknown
  Description of Unknown: Integrase B4936 sequence
  PTHR30461:SF3,cd00338,SM00857,G3DSA:1.10.10.2600,IPR036162, PF13408,IPR025827,G3DSA:3.40.50.1390,PS51737,IPR006119, IPR038109,PF07508,IPR011109,SSF53041,PTHR30461, PS51736,Coil,PF00239
MARSKKTECLPLERIGVIYARYSSHNQKEESIEQQVEECTSFALLNGIKIVHVYADKALSGRTDKRPQFQRLMRDAEKRSFSVVVAYKSNRIARDMLNALKYEDRLGKYGIETLYAKEEFGNTAAGRFALRTMMNVNQFYSENMAEDIKRGMLDNAENCKVNGALPLGYVSGPDKRYAIEPKEAEIVRGIYDKVLEGVSFADIANDLNACGVRTKHGSLWNKCSFHRILTNDVYIGVYRHSGVVKEGGVPPILEREVFIAMQKYLETKKNPRGRHRENGDYLLTGKLRCGYCESFMVGVSGTSKTGDKHYYYTCNSRHAGSGCKKENVRRDTIEYTVAALTQQVVFKEDIIEWIATAAVKLAKEASGQNEIDAMEAELAEDRKATKNIMAAIEQGIFTATTKSRLLELEADIASLEQSIRDAKAISEGKLLEKERVVYFLTSLREGNLHSKTYQKRLIDTFVRAVYLWDDRIGIDYYYAGKDSMVKYSLSEIEADIGENIREVLKDSLTGHHII

SEQ ID NO: 4936 - protein, 514 aa, Unknown
  Description of Unknown: Integrase B4937 sequence
  PTHR30461:SF3,SM00857,IPR036162,PF13408,IPR025827, G3DSA:3.40.50.1390,IPR006119,PF07508,IPR011109,SSF53041, PTHR30461,Coil,PS51736,cd00338,PF00239
MYDSMPAEWLCCAYLRKSREDEEREKQGRYKTLERHKAILESLSSDNGHKIAQWYPEIVSGETIEGRPEVKKLLADLASGKWDAVYVVEASRLGRGGGSDQEKIVNAFRYTNTWLVTEEKVYDPSSKADMRQLKNDLRSSEDELDSITTRLTRGKYRSAQEGRWQATGRTPYGWRAVRIAGLWQLRPDENHCHMLRIYDLLESGLTPWDVANIYNAEGIPTPRGGDHWTAAIVRAIALNPANCGYVVFGKHKTMRIFDPVTFEAKKVRVKNDKPVMVKGLHYGTGGISEERFERITGHLVGSAHLRKGLELKNPLARLLKCGKCGYAMNHHRMSSGKSYGYFYQHPAKRNMTRACDGCRGARDDLVMDTLVASLRSLCNDIELRIKADNRASEHEAHIEALRKELEKVRAARSRAMEAYEAGAYTIAELKARKDEAEKRMESIERAIKDAKPPKYTPELVVSINKCIDMLLDDTVSVQVKNDFLKSVIGRIDYYNDTPPFVHDNKVHLEIFLRQ

SEQ ID NO: 4937 - protein, 514 aa, Unknown
  Description of Unknown: Integrase B4938 sequence
  PTHR30461:SF3,SM00857,G3DSA:1.10.10.2600,IPR036162,PF13408, PS51737,G3DSA:3.40.50.1390,IPR025827,IPR006119,IPR038109, PF07508,SSF53041,IPR011109,PF00239, PTHR30461,PS51736,Coil,cd00338
MAKRKFNKGGEVRLVAYYRYSGGSGQTEQSIQGQRRACETYARLHNMTIQKEYVDRHISGKTDDRAAFQQMIADSDKGAFDMVICWKTDRFARNRYDSAVYKKRLRDNGVEIVYAAESNIAGAEGIIIEGVMEALAEYYSAELAEKMRRGMRESALKGQAISRCRALGLKTDERKRFVIDEKTAPTVRFIFEHYAAGESAMSIVEQLNAKGLRTSQGNPFNKSSIPRIIQNEAYRGVYVSKSYDVRIEGAIPAIIDNELWERAQTMLKLNRQLKAKNEPKADYILSGKLYCSCGSLMRGMSGHSATGEVYRYYTCPNKDCHLRNIPKDDLEGKVIQSIVDHLLQPESMEALAEAMVEVQKADAEKPNAERVAIEQSLADVRRRSKNILDAIENGTANAQLCARLNDLTEQEQTLSFQLSSLEKEKPVAFTKEQYLFLLEQFLVEPSERTPEYGRRLVNAFVTSMVVSDRELVINFNVSDETVNKNKKASQTNLQKESSSGMRLVRVARIELTAS

SEQ ID NO: 4938 - protein, 514 aa, Unknown
  Description of Unknown: Integrase B4939 sequence
  PTHR30461:SF3,SM00857,G3DSA:1.10.10.2600,IPR036162,PF13408, PS51737,IPR025827,G3DSA:3.40.50.1390,IPR006119,IPR038109, PF07508,IPR011109,SSF53041,PTHR30461,Coil, PS51736,cd00338,PF00239
MRKKKVKDGNRLVAYYRYSGGSGQTEQSIEGQRRDCENYAKLHGLTILHEYIDRHISGKTDDRAAFQQMMNDGDKGAFDMVICWKTDRFARNRYDSAVYKKRLRDNGIEILYAAESNVEGAEGIIIEGLMEALAEYYSAELAEKMRRGMRESALKGQAINRCRSLGLTTDENKKYVIDEKTAPTVRFIFEHYAAGESSASIVEQLNAKGLRTSQGNPFNKCSIPRIIQNEMYRGVYTSKAYNVRIEGVIPAIIDDDLWKRAQAMMKTNRQLKAKYEPKAEYLLSGKLFCAKCGCTMKGVSGHSGGNDEVYRYYACSNPQCRKRNIPKDDLEGKVIRSICDHLLQPETMELLAETMVDVQKADMEKPNAERDVLEQELWDVRRRSKNIMDAIETGSANPQLVARLDDLTQQENTLTYQLSTMEAEKPLLFTKEQYLFLLQQFYAQPTEQDDVYKRRLINTFVTNIEVSDSELLIYFNISEETENKNKNAPQLNFDKSSSTEKRLVRVARIELTAS

SEQ ID NO: 4939 - protein, 514 aa, Unknown
  Description of Unknown: Integrase B4940 sequence
  SM00857,G3DSA:1.10.10.2600,IPR036162,PS51737,G3DSA:3.40.50.1390, IPR006119,IPR038109,PF07508,IPR011109,SSF53041, PF00239,PTHR30461,PS51736,Coil,cd00338
MQMEYAMYLRKSRADLEAEAHGEGDTLARHEHILMELAKSRALPIGAIYREIVSGERIANRPVMQQLLSEVEDGRWKGVLVTETSRLARGDTIDQGIVAQAFKFSGTLIVTPSKTYDPTQEADEEWMEFGLFMSRQEYRMIRRRQLAGTRASKKEGHYVPGRPPYGYERYKLDGRGWSLRPVEPQAGVIRTIYDMYLSGKGFSEIANELNAMKIRTPLDKKWVPATTRAILQNPHYAGFIPSAMKVNTKIVQKGKLITKRPVNKNCELYEGIHEAIIPRDVWYSVQQRMKDTVTPRVPRKYQQMNPLAGLVYCDQCGKLMSRHPYRREDKVRFGCENPSCSTVSSLFEDVESLVLQSLREFLHKIELSSPALLDTKSEENALQNIEKQLTDINRRLQRTYELLEDGFYSKETFLQRQSAISQDQTALLNTKHEIERKLHNKQTDIEAQKNSAPLIRHVLDVYPTLEDPKEQNLLLKQVIRRIDYHKTVRVYGKAKSDLHLTIHPKIAIPQTSNI

SEQ ID NO: 4940 - protein, 514 aa, Unknown
  Description of Unknown: Integrase B4941 sequence
  SM00857,IPR036162,PF13408,IPR025827, G3DSA:3.40.50.1390,IPR006119,SSF53041,PTHR30461, Coil,PS51736,cd00338,PF00239
MVKRRAAIYARFSSHNQRSESIEIQVDAGTRYIAENGLELVRVYADYAKTGRNTDRSDYKRMMNDARLGLFDYVVIYKVPRIMRNRDEMALTRIMLRKAGVEILYAGEEIASGSSGVLQLGMLEVLAEWESAVDSERIIDGIQKNAQRCMANGRTLYGWDIVEGRYVVNDREAAVLHRMKNLLFSGSTVADIVRAVANERSRNGKPFNHDRTKKLLLRPQNGGTYSYAGHVVEDGMPAIWPKIEQDMIISMLGKPRPRRRIDHAAEWPLTGKLYCAECGNTLAGTSGTSKGGTVYAYYKCKKCKRTFRRDILEDAIVDMTICALERPDVRKRIADGMATYEATMEDAPLESERLRKEIKRIDAAFERIWQAIEDGIAPPGGKERIEDLKARKDALETEYQIAKANENIEPGFSELMDWLDNVAEEMNPQEILTMFVRAVQIDKTEVRLYFAFDYYGDNFTPPKKDEHPVDGCSSNSPMVEPSINRANTVISLETCYLQINRNWFAVIGNLQNTR

SEQ ID NO: 4941 - protein, 514 aa, Unknown
  Description of Unknown: Integrase B4942 sequence
  PTHR30461:SF3,cd00338,SM00857,G3DSA:1.10.10.2600,IPR036162, PF13408,IPR025827,G3DSA:3.40.50.1390,PS51737,IPR006119, IPR038109,PF07508,IPR011109,SSF53041,PTHR30461, PS51736,Coil,PF00239
MAKRKFNKGGEVRLVAYYRYSGGSGQTEQSIEGQRRDCEAYARLHNMTIQKEYVDRHISGKTDDRAAFQQMIADSDKGAFDMVICWKTDRFARNRYDSAVYKKRLRDNGVEIVYAAESNISGAEGIIIEGVMEALAEYYSAELAEKMRRGMRESALKGQAISRCRALGLKTDEHKRFVIDEKTAPTVRFIFEHYAAGESAMSIVEQLNAKGLRTSQGNPFNKSSIPRIIQNEAYRGVYISKSYDVRIEGAIPAIIDDELWERAQTMLKLNRQLKAKNEPKADYILSGKLYCSCGSLMRGMSGHSATGEVYRYYTCPNKDCHLRNIPKDDLEGKVMQSIVDHLLQPESMEALAEAMVEVQKADVEKPNAERVAIEQSLSDVRRRSKNILDAIENGTANAQLCARLDDLTEQEQTLSFQLSSLEKEKPVVFTKEQYLFLLEQFLMEPSERTPEYGRRLVNTFVTSMVVSGRELVINFNVSDETVNKNKKASQTNLQKESSSGMRLVRVARIELTAS

SEQ ID NO: 4942 - protein, 514 aa, Unknown
  Description of Unknown: Integrase B4943 sequence
  SM00857,G3DSA:1.10.10.2600,IPR036162,PS51737,G3DSA:3.40.50.1390, IPR006119,IPR038109,PF07508,IPR011109,SSF53041, PF00239,PTHR30461,PS51736,Coil,cd00338
MPTEYALYLRKSRADLEAEAHGEGDTLARHEHILMELAKSRALPIGAIYREIVSGERIANRPVMQQLLSEVEDGRWKGVIVTETSRLARGDTIDQGIVAQAFKFSGTLIVTPAKTYDPTQEADEEWMEFGLFMSRQEYRMIRRRQLAGTRASKKEGHYVPGRPPYGYERYKLDGRGWSLRPVEPQAGVIRTIYDMYLSGKGFSEIANELNAMKIRTPLDKKWVPATTRAILQNPHYAGFIPSAMKVNTKIVQKGKLITKRPVNKNCELYEGIHEAIIPRDVWYSVQQRMKDTVTPRVPRKYQQMNPLAGLVYCDQCGKLMSRHPYRREDKVRFGCENPSCSTVSSLFEDVENLVLQSLREFLHEIELSSPALLDTKSEETALQNIEKQLTDINHRLQRTYELLEDGVYSKETFLQRQSAISQDQTALLNTKHEIERKLHNKQTDIEAQKNSAPLIRHVLDVYPTLEDPKEQNLLLKQVIRRIDYHKTVRVYGKAKSDLHLTIHPKIAIPQTSNI

SEQ ID NO: 4943 - protein, 514 aa, Unknown
  Description of Unknown: Integrase B4944 sequence
  SM00857,G3DSA:1.10.10.2600,IPR036162,PS51737, G3DSA:3.40.50.1390,IPR006119,IPR038109,PF07508, SSF53041,IPR011109,PTHR30461,Coil, PS51736,cd00338,PF00239
MPTDYALYLRKSRADLEAEAHGEGDTLARHEHILMELAKSRALPIGAIYREIVSGERIANRPVMQQLLSEVEDGRWKGVLVTETSRLARGDTIDQGIVAQAFKFSGTLIVTPAKTYDPTQEADEEWMEFGLFMSRQEYRMIRRRQLAGTRASKKEGHYVPGRPPYGYERYKLDGRGWSLRPVEPQAGVIRTIYDMYLSGKGFSEIANELNAMKIRTPLDKKWVPATTRAILQNPHYAGFIPSAMKVNTKIVQKGKLITKRPVNKNCELYEGIHEAIIPRDVWNSVQQRMKETVTPRVPRKYQQMNPLAGLVYCDQCGKLMSRHPYRREDKVRFGCENPSCSTVSSLFEDVESLVLQSLREFLHKIELSSPALLDTKSEEIALQNIEKQLTDINRRLQRTYELLEDGFYSKETFLQRQSAISRDQTALLNTKHEIERKLHNKQTDIEAQKNSAPLIRHVLDVYPTLEDPKEQNLLLKQVIRRIDYHKTVRVYGKAKSDLHLTIHPKIAIPQTSNI

SEQ ID NO: 4944 - protein, 514 aa, Unknown
  Description of Unknown: Integrase B4945 sequence
  cd03768,PTHR30461:SF3,SM00857,G3DSA:1.10.10.2600,IPR036162, PF13408,PS51737,G3DSA:3.40.50.1390,IPR025827,IPR006119, IPR038109,PF07508,IPR011109,SSF53041,PTHR30461, PS51736,Coil,PF00239
MLRIGIYPRKSVYRDNSDSVQVQITACKDYARLMFKDQELDFRIYDKDEGFSGKNTHRPSFTELMADVKADELDIIIVYKLDRISRSVKDFSEIYETLQQHNVSFLSVKESFDTSTPMGRTVMYILSAFAQLERENTAERVADNMASLGEAGKWTGGTLPPGMTSVRKKIGDKTHSYLIVDEQRIKTVKYIFSLMLSGTSITKLERTLRTEGIRTERDAFYSCSKLYNLFTNPVYCANDMDAYYYFLEKGYKLPDPALFDGRHGLIGYGRTTQSSGTTVRKDTYSIAIGIHDPILSGADWIAIQKRLGQNKSTRYTKYEAGILKGTLRCKCGVKMNIRTYKKNGSLFSYYYCPKMAREGVSACDTGYTRVDDIDDRFLQELKKIKLSPDSIELEENVSYVDTGKMRADLKKTTDSIRNLMNALSGSADSAAAKYIIAELEALDKEKAVLGKKLRTAEQRNRRAAVSAETKEFVYHRICNLLDNMDSMSYIEINELIRSIVKSCVFDGDHLDVTF

SEQ ID NO: 4945 - protein, 514 aa, Unknown
  Description of Unknown: Integrase B4946 sequence
  cd03768,PTHR30461:SF3,SM00857,G3DSA:1.10.10.2600,IPR036162, PF13408,IPR025827,PS51737,G3DSA:3.40.50.1390,IPR006119, IPR038109,PF07508,IPR011109,SSF53041,PTHR30461, PS51736,Coil,PF00239
MLRIGIYPRKSVYRDNSDSVQVQITACKDYARLMFKDQELDFRIYDKDEGFSGKNTHRPSFTELMADVKADELDIIIVYKLDRISRSVKDFSEIYETLQQHNVSFLSVKESFDTSTPMGRTVMYILSAFAQLERENTAERVADNMASLGEAGKWTGGTLPPGMTSVRKKIDDKTHSYLIVDEQRIKTVKYIFSLMLSGTSITKLERTLRTEGIRTERDAFYSCSKLYNLFTNPVYCANDMDAYYYFLEKGYKLPDPALFDGRHGLIGYGRTTQSNGTTVRKDTYSIAIGIHDPVLSGADWIAIQKRLGQNKSTRYAKYEAGILKGILRCKCGVKMNIRTYKKNGSLFSYYYCPKMAREGVSACDTGYTRVDDIDDRFLQELKKIKLSPDSIELEENVSYVDTGKMRADLKKTTDSIRNLMNALSGSADSAAAKYIIAELEALDKEKSVLEKKLRTAEQRNRRAAVSAETKEFVYHRICNLLDNMDSMSYTEINELIRSIVKSCVFDGDHLDVTF

SEQ ID NO: 4946 - protein, 514 aa, Unknown
  Description of Unknown: Integrase B4947 sequence
  cd03768,PTHR30461:SF3,SM00857,G3DSA:1.10.10.2600,IPR036162, PF13408,IPR025827,G3DSA:3.40.50.1390,PS51737,IPR006119, IPR038109,PF07508,SSF53041,IPR011109,PTHR30461, PS51736,Coil,PF00239
MLRIGIYPRKSVYRDNSDSVQVQITACKDYARLMFKDQELDFRIYDRDEGFSGKNTHRPSFTELMADVKADELDIIIVYKLDRISRSVKDFSEIYETLQQHNVSFLSVKESFDTSTPMGRTVMYILSAFAQLERENTAERVADNMASLGEAGKWTGGTLPPGMTSVRKKIGDKTHSYLIVDEQRIKTVKYIFSLMLSGTSITKLEHTLRQDGIRTERDAFYSCSKLYNLFTNPVYCANDMDAYYYFLEKGYKLPDPALFDGRHGLIGYGRTTQSSGTTVRKDTYSIAIGIHDPILSGADWIAIQKRLGQNKSTRYAKYEAGILKGTLRCKCGVKMNIRTYKKNGSLFSYYYCPKMAREGASAYDTGYTRVDDIDNRFLQELKKIKLSPDSIELEENVSYVDTGKMRTDLKKTTDSIRNLMNALSCSADSAAAKYIIAELEALDKEKAVLEKKLRTAEQRNRRAAVSAETKEFVYHQICNLLDNMDSMSYTEINELIRSIVKSCVFDGDHLDVTF

SEQ ID NO: 4947 - protein, 514 aa, Unknown
  Description of Unknown: Integrase B4948 sequence
  PTHR30461:SF3,SM00857,G3DSA:1.10.10.2600,IPR036162,PF13408, PS51737,IPR025827,G3DSA:3.40.50.1390,IPR006119,IPR038109, PF07508,IPR011109,SSF53041,PF00239,PTHR30461, PS51736,Coil,cd00338
MNRRTGIYGRYSDTKQDDGFSIEYQLTECQAYLDKNGMPLTKTYIDQAITGTKVAGREAFHELIRDVKNGMIDVVVVYKFSRIFRNAYESHKYRQLFKKHGVKLISVTQMVDDETSSGKLMIGVMANIDEYQSAVISDHVKSAMREMVSEGFFAGGTVPYGYKLEVVQHGKKTRKKYVPDEFESKIVNKIFELYADNYSLRYLQTYLKDNGAFTRRGKYFSIQTIARMLRNDFYIGVLRYSAQGHEPIIVHDIIPPIIDKELWDRVQYRHSTQKGVRPRKRKELYALTGKIRCANCGSHYFGIRSGSMQNGKKYDYKYYVCSQSKDYHTCSCKRIRKDYLEEITMKEIKRHILNEKSIYSIANEMLKILGENPTEQKDKLKQLKSRSSALKSEMKELIDLRAKRIVSDSFLAEHISEKENELQEVEQQIYNIERQTKLTLTHSMIVDYLNKMLSISDDTDDEVLKTIFDKFVESIIVSDESIDITLIVSPNGDIEYNESLRQPNVFFYAKINRQ

SEQ ID NO: 4948 - protein, 514 aa, Unknown
  Description of Unknown: Integrase B4949 sequence
  SM00857,G3DSA:1.10.10.2600,IPR036162,PS51737,G3DSA:3.40.50.1390, IPR006119,IPR038109,PF07508,IPR011109,SSF53041, PTHR30461,Coil,PS51736,cd00338,PF00239
MPTEYALYLRKSRADLEAEAHGEGDTLARHEHILMELAKSRALPIGAIYREIVSGERIANRPVMQQLLAEVEDGRWKGVLVTETSRLARGDTIDQGIVAQAFKFSGTLIVTPSKTYNPTQEADEEWMEFGLFMSRQEYRMIRRRQLAGTRASKKEGHYVPGRPPYGYERYKLDGRGWSLRPVEPQAGVIRTIYDMYLSGKGFSEIANELNAMKIRTPLDKKWVSATTRAILQNPHYAGFIPSAMKVNTKIVQKGKLITKRPVNKNCELYEGIHEAIIPRDVWYSVQQRMKDTVTPRVPRKYQQMNPLAGLVYCDQCGKLMSRHPYRREDKVRFGCENPSCSTVSSLFEDVESLVLQSLREFLHKIELSSPTLLDTKSEEIALQNIEKQLTDINRRLQRTYELLEDGVYSKETFLQRQSAISQDQTALLNTKHEIERKLHNKQTDIEAQKNSAPLIRHVLDVYPTLEDPKEQNLLLKQVIRRIDYHKTVRVYGKAKSDLHLTIHPKIAIPQTSNI

SEQ ID NO: 4949 - protein, 514 aa, Unknown
  Description of Unknown: Integrase B4950 sequence
  SM00857,G3DSA:1.10.10.2600,IPR036162,PS51737, G3DSA:3.40.50.1390,IPR006119,IPR038109,PF07508, IPR011109,SSF53041,PTHR30461,Coil, PS51736,cd00338,PF00239
MPTDYALYLRKSRADLEAEAHGEGDTLARHEHILMELAKSRALPIGAIYREIVSGERIANRPVMQQLLSEVEDGRWKGVLVTETSRLARGDTIDQGIVAQAFKFSGTLIVTPAKTYDPTQEADEEWMEFGLFMSRQEYRMIRRRQLAGTRASKKEGHYVPGRPPYGYERYKLDGRGWSLRPVEPQAGVIRTIYDMYLSGKGFSEIANELNAMKIRTPLDKKWVPATTRAILQNPHYAGFIPSAMKVNTKIVQKGKLITKRPVNKNCELYEGIHEAIIPRDVWYSVQQRMKDTVTPRVPRKYQQMNPLAGLVYCDQCGKLMSRHPYRREDKVRFGCENPSCSTVSSLFEDVENLVLQSLREFLHEIELSSPTLLDTKSEEIALQNIEKQLTDINHRLQRTYELLEDGVYSKETFLQRQSAISQDQTALLNTKHEIERKLHNKQTDIEAQKDSAPLIRHVLDVYPTLEDPKEQNLLLKQVIRRIDYHKTVRVYGKAKSDLHLTIHPKIAIPQTSNI

SEQ ID NO: 4950 - protein, 514 aa, Unknown
  Description of Unknown: Integrase B4951 sequence
  PTHR30461:SF3,SM00857,G3DSA:1.10.10.2600,IPR036162,PF13408, PS51737,IPR025827,G3DSA:3.40.50.1390,IPR006119,IPR038109, PF07508,IPR011109,SSF53041,PTHR30461,Coil, PS51736,cd00338,PF00239
MPKKNPSGGKRLVAYYRYSGGSHQTEQSIEGQRRDCETYARIHGMVILHEYIDRHISGKTDDRPEFQQMIADAGKGMFDYVICWKTDRIARSRYDSIIYKKKLRDNGVELLYAAEANVEGSGGIIVEGLMEALAEYYSAELAEKVRRGMRESALKGKAIGSSRPLGLTVDKDKKYIIDPAGAAAVRYIFEQYAAGAASSSIVAHLNEQGLCTSRGNPFNKSSVVRIIQNEVYRGVYVSPKFDVRIEGAVPAIIDDDLWERAQKMFIRNRQSRSPRNDRADYILSGKLFCGECGTAMKGVSGHSSNGEVYFYYNCPCKDCHRRNIPKDELEGLVIRTVCNDVLQPDVMDRIADSVIEAQTAELNQPNPEKEALQHELADVQRKAKNLLSALENGTAGAMLTNRLSELEQQADTLSYQLSSLESEPKFPVFSKEEVLYLLEQFLIAPSEKTKAYRRRLIDTFVSKIEVSNTELTIYFNIAEEDCGKMKKAPQSNQPEGCSTEKQMVRVARIELTAS

SEQ ID NO: 4951 - protein, 514 aa, Unknown
  Description of Unknown: Integrase B4952 sequence
  cd00338,SM00857,G3DSA:1.10.10.2600,IPR036162,PS51737, G3DSA:3.40.50.1390,IPR006119,IPR038109,PF07508,IPR011109, SSF53041,PTHR30461,PS51736,Coil,PF00239
MEQYAIYLRKSRADAEAEAHGEGETLARHQTALLALAKKLDLFVGAIYKEIVSGETIAARPMMQQLLAEVRQGLWAGVLVMEVERLARGNTMDQGYVAQSFAFRGTKIITPLKTYDPADEYDQEYFEFGLFMSRREYMTINRRIQRGRRASAQEGKYYANVAPYGYARKKLEKQKGFILEPTPEESNVVKMVFDWYLNGPDGVPIGISKIARRLNALHIPPPRIDVWTANTVRSMLQNPTYAGKITWGRRGGVKNVDKNGGVTCSRPRAKEYDLFDGLHTPLVSVETWERVQVRLADHKDMPTPWGRPVQNPLCGLIVCGLCGRKMRRKPGTSTPDFLICAEPQCSCVGSYLSVVEEALLKAMGYWIETHKVPMESAPACESFDNALKNISAERAKLQKQKNSLYDLLEQGLYTPEIFLERSKDISARLSALDADEEGFRAEIAKAQRATELQQRLIPKMSSAIELYRAATDPAEKNRVLKEVLDHVVYTRTAGGRWAPKNNFTLDLFPLYQKE

SEQ ID NO: 4952 - protein, 514 aa, Unknown
  Description of Unknown: Integrase B4953 sequence
  SM00857,IPR036162,PF13408,IPR025827, G3DSA:3.40.50.1390,IPR006119,SSF53041,PTHR30461, Coil,PS51736,cd00338,PF00239
MVKRRAAIYARFSSHNQRSESIEIQVDAGTRYIAENGLELVRVYADYAKTGRNTDRSDYKRMMNDARLGLFDYVVIYKVPRIMRNRDEMALTRIMLRKAGVEILYAGEEIASGSSGVLQLGMLEVLAEWESAVDSERIIDGIQKNAQRCMANGRTLYGWDIVEGRYVINDREAAVLHKMKNMVFAGSIIAEVVRAVANVRTRQGKPINHDRAKKLLLRPQNGGTYSYAGHVVEGGMPALWPKAEQDMLISILGNPRPRRRVDHAAEWPLTGKLYCAECGNTLAGTSGTSKSGTVYAYYKCKKCKRTFRRDILEDAIVDMTICALERPDVRKRIADGMATYEATMEDAPLESERLRKEIKRIDAAFERIWQAIEDGIAPPGGKERIEDLKARKDALETEYQIAKANENIEPGFSELMDWLDNVAEEMNPQEILTMFVRAVQIDKTEVRLYFAFDYYGDNFTPPKKDEHPVKGCSSNSPMVEPSITKANTVISLETCYLQINRNWFAVIGNLQNTR

SEQ ID NO: 4953 - protein, 514 aa, Unknown
  Description of Unknown: Integrase B4954 sequence
  PTHR30461:SF3,SM00857,G3DSA:1.10.10.2600,IPR036162,PF13408, IPR025827,G3DSA:3.40.50.1390,PS51737,IPR006119,IPR038109, PF07508,SSF53041,IPR011109,PTHR30461,Coil, PS51736,cd00338,PF00239
MPTVTVIQPIIAAEQNTKIRCAAYCRVSSDSEDQLNSFMAQTRYYSQVFKDSETEELIDIYADEGITGTREDKRDEFQRMLKDCRRGKIDRIYTKSISRFARNTKDCLKSVRELKALGITIFFEKENIDTANMTDEMMITIMGGLAQEESTSISQNMRWSIKKRMENGTFELSCPPYGYIKENGKLVVDPAQAQTVQNIFSWYLSGYGIISIVNRLNHFNTPCCKRSNKWHMFGVTYILTNEKYTGNTMFQKTYSGTTLPIQRYKNNGERNKYYAVNTHPAIVSQDDFDKVQALMSEKGEIFYKTEKQKCVLRKIMKCGQCGSTYIRKKSRDKYYWSCRKHDLKASECFSKRIPESDIYYAFIRICNKLISNYTQILIPLQTALQYLKLKKFSGQTQVMDIHKEVAKLKEQTHVLARLKTKGFLDEAKYIEQTTELTAKINKLQAELKKLTRSDDEDETLDQIDMLIDFFEKRENPMTEFEETAFESIVEKIVVIDQHELEFHLIGGLKFKENV

SEQ ID NO: 4954 - protein, 514 aa, Unknown
  Description of Unknown: Integrase B4955 sequence
  SM00857,IPR036162,G3DSA:3.40.50.1390,IPR006119,PF07508, SSF53041,IPR011109,PTHR30461,Coil,mobidb-lite, cd00338,PF00239
MRNEYNPIIIKYVAEYLRKSRGETTEDLIKHKTILEELCKSRGWIYVVYEEVETGESLFARPVMQQLLRDVEDNIYDAVVCVDLDRLGRGDLVDWGQIKRVFQKTNTYMVTPSSLYNLNDDNEEFAVDLQTLFARREYKKITHRLSMGKKVGAKLGAWTNGTPPMPYEYQEWIDPATNKRYYNEKGLVVNLQKLSIYRFMVDSFIKDKKSTNEIAWELNRRNIPSPRGGRWCNMTVRRLLVDETHLGKIISNKTKGDGHKNKSPNKQPFQKIPKEQWTVVENRHEAIKTQDEHEKILIGIQKNLKSPYRRSDHYYPLKGLIKCGLCGYGLPLEYKRGKDLVVKKCWHKDYLGNKCPNSSGKAQYIIDAIDEQLKEYEEQIRKEIESCEDQSTDLIQLQIKTIMDKLNKKDIALKRARIAYDEGVDTLDEYRSAKERILKEVDELESQLSIENLKLQKAQSITNHEKLHYIEEFRRSRWEDELDDKELNDLYKTIISSIIWTKQGDNIDIKVNFL

SEQ ID NO: 4955 - protein, 514 aa, Unknown
  Description of Unknown: Integrase B4956 sequence
  PTHR30461:SF3,SM00857,G3DSA:1.10.10.2600,IPR036162, PF13408,IPR025827,G3DSA:3.40.50.1390,PS51737, IPR006119,IPR038109,PF07508,SSF53041, IPR011109,PTHR30461,Coil,PS51736,cd00338,PF00239
MPKKNPSGGKRLVAYYRYSGGSHQTEQSIEGQRRDCETYARIHGMVILHEYIDRHISGKTDDRPEFQQMIADAGKGMFDYVICWKTDRIARSRYDSIVYKKKLRDNGVELLYAAEANVEGSGGIIVEGLMEALAEYYSAELAEKVRRGMRESALKGKAIGSSRPLGLTVDKDKKYIIDPAGAAAVRYIFEQYAAGAASSAIVAHLNEQGLCTSRGNPFNKSSVVRIIQNEVYRGVYVSPKFDVRIEGAVPAIIDDDLWERAQKMFIRNRQSRSPRNDRADYILSGKLFCGECGTAMKGVSGHSSNGEVYFYYNCPCKDCHRRNIPKDELEGLVIRTVCNDVLQPDVMDHIADSVIEAQTAELNQPNPEKEALQHELADVQRKAKNLLSALENGTAGAMLTNRLAELEQQADTLSYQLSSLESEPKFPVFSKEEVLYLLEQFLIAPSEKTKAYRRRLIDTFVSKIEVSNTELTIYFNISEEDCGKMKKAPQSNQPEGCSTEKQMVRVARIELTAS

SEQ ID NO: 4956 - protein, 514 aa, Unknown
  Description of Unknown: Integrase B4957 sequence
  cd03768,PTHR30461:SF3,SM00857,G3DSA:1.10.10.2600,IPR036162, PF13408,PS51737,G3DSA:3.40.50.1390,IPR025827,IPR006119, IPR038109,PF07508,SSF53041,IPR011109,PTHR30461, PS51736,Coil,PF00239
MLRIGIYPRKSVYRDNSDSVQVQITACKDYARLMFKDQELDFRIYDKDEGFSGKNTHRPSFTELMADVKADELDIIIVYKLDRISRSVKDFSEIYETLQQHNVSFLSVKESFDTSTPMGRTVMYILSAFAQLERENTAERVADNMASLGEAGKWTGGTLPPGMTSVRKKIGDKTHSYLIVDEQRIKTVKYIFSLMLSGTSITKLERTLRTEGIRTERDAFYSCSKLYNLFTNPVYCANDMDAYYYFLEKGYKLPDPALFDGRHGLIGYGRTTQSNGTTVRKDTYSIAIGIHDPILSGADWIAIQKRLGQNKSTRYAKYEAGILKGTLRCKCGVKMNIRTYKKNGSLFSYYYCPKMAREGVSACDTGYTRVDDIDDRFLQELKKIKLSPDSIELEENVSYVDTGKMRADLKKTIDSIRNLMNALSGSADSAAAKYIIAELESLDKEKSVLEKKLRAAEQRNRRAAVSAETKEFVYHRICNLLDNMDSMSYTEINELIRSIVKSCVFDGDHLDVTF

SEQ ID NO: 4957 - protein, 514 aa, Unknown
  Description of Unknown: Integrase B4958 sequence
  PTHR30461:SF3,SM00857,G3DSA:1.10.10.2600,IPR036162,PF13408, IPR025827,G3DSA:3.40.50.1390,PS51737,IPR006119,IPR038109, PF07508,SSF53041,IPR011109,PTHR30461,Coil, PS51736,cd00338,PF00239
MPKKNPSGGKRLVAYYRYSGGSHQTEQSIEGQRRDCETYARIHGMVILHEYIDRHISGKTDDRPEFQQMIADAGKGMFDYVICWKTDRIARSRYDSIIYKKKLRDNGVELLYAAEANVEGSGGIIVEGLMEALAEYYSAELAEKVRRGMRESALKGKAIGSSRPLGLTVDKDKKYIIDPAGAAAVRYIFEQYAAGAASSAIVAHLNEQGLCTSRGNPFNKSSVVRIIQNEVYRGVYVSPKFDVRIEGAVPAIIDDDLWERAQKMFVRNRQSRSPRNDRADYILSGKLFCGECGTAMKGVSGHSSNGEVYFYYNCPCKDCHRRNIPKDELEGLVIRTVCNDVLQPDVMNRIADSVIEAQTAELNQPNPEKEALRHELADVQRKAKNLLSALENGTAGAMLTSRLAELEQQADTLSYQLSSLESEPKFPVFSKEEVLYLLEQFLIAPSEKTKAYRRRLIDTFVSKIEVSNTELTIYFNIAEEDCGKMKKAPQSDQPEGCSTEKQMVRVARIELTAS

SEQ ID NO: 4958 - protein, 514 aa, Unknown
  Description of Unknown: Integrase B4959 sequence
  PTHR30461:SF3,SM00857,G3DSA:1.10.10.2600,IPR036162,PF13408, IPR025827,G3DSA:3.40.50.1390,PS51737,IPR006119,IPR038109, PF07508,SSF53041,IPR011109,PF00239,PTHR30461, PS51736,Coil,cd00338
MKTAVIYARYSSDKQTEQSIEGQLYDCYNYAKQHGITVVQEYIDRAMTGKNDDRPAFQQMLHESAMHKWDSVIVWKLDRFARNTIDSAVNRQILAKNGVKLLSVMESFGDDASGQMMTHIIEAINEYYSADLREKTIRGMRQSAMKAQTTGHIPLGYKVVDKKLVIDDETRIIPETVFRMYAEGERLTDIAEHLNAQGYRNRRGRPFTTNSFYNMLANEKYIGIYKYDDIVIEGGIPQMIPNEVFEAVREKLITNRKRAAKNTAKADYYLSGKLYCGHCGEPMSGLSGTGRNGVKHYYYRCNGVQKKSGCHKKLENKYLIEDEVCRAARSAFEQMDKAETAETIYQMYLQTVRNEYAPAELEKELTECTKQAENVVNAIAQTGGNQLLFDKVRELEERKEQLGSALRLSQAMTDNVPSVEQIAVFIDDILATDINTTEGKKAIADIMISKVYVYDDKLTVIFKDKDGKSVDIPLSAVSDSSSADCAPSALGSQNKSIQTVSIICGCMAVTKRRE

SEQ ID NO: 4959 - protein, 514 aa, Unknown
  Description of Unknown: Integrase B4960 sequence
  cd03768,PTHR30461:SF3,SM00857,G3DSA:1.10.10.2600,IPR036162, PF13408,IPR025827,PS51737,G3DSA:3.40.50.1390,IPR006119, IPR038109,PF07508,SSF53041,IPR011109,PTHR30461, PS51736,Coil,PF00239
MLRIGIYPRKSVYRDNSDSVQVQITACKDYARLMFKDQELDFRIYDKDEGFSGKNTHRPSFTELMADVKADELDIIIVYKLDRISRSVKDFSEIYETLQQHNVSFLSVKESFDTSTPMGRTVMYILSAFAQLERENTAERVADNMASLGEAGKWTGGTLPPGMTSIRKKIGDKTHSYLIVDKQRIKTVKYIFSLMLSGTSITKLEHTLRQDGIRTERDAFYSCSKLYNLFTNPVYCANDMDAYYYFLEKGYKLPDPALFDGRHGLIGYGRTTQSNGTTVRKDTYSIAIGIHDPILSGADWIAIQKRLGQNKSTRYAKYEAGILKGTLRCKCGVKMNIRTYKKNGSLFSYYYCPKMAREGVSACDTGYTRVDDIDDRFLQELKKIKLSPDSIELEENVSYVDTGKMRADLKKTTDSIRNLMNALSGSADSAAAKYIIAELEALDKEKSVLEKKLRTAEQRNRRAAVSAETKEFVYHRICNLLDNMDSMSYTEINELIRSIVKSCVFDGDHLDVTF

SEQ ID NO: 4960 - protein, 514 aa, Unknown
  Description of Unknown: Integrase B4961 sequence
  PTHR30461:SF3,cd00338,SM00857,G3DSA:1.10.10.2600,IPR036162, PF13408,IPR025827,G3DSA:3.40.50.1390,PS51737,IPR006119, IPR038109,PF07508,IPR011109,SSF53041,PTHR30461, PS51736,Coil,PF00239
MAKRKFNKGGEVRLVAYYRYSGGSGQTEQSIEGQRRDCETYARLHNMTIQKEYVDRHISGKTDDRAAFQQMITDSDKGAFDMVICWKTDRFARNRYDSAVYKKRLRDNGVEIVYAAESNIAGAEGIIIEGVMEALAEYYSAELAEKMRRGMRESALKGQAISRCRALGLKTDEHKRFVIDEKTAPTVRFIFEHYAAGESATSIVDKLNAKGLRTSQGNPFNKSSIPRIIQNEAYRGVYISKSYDVRIEGAIPAIIDDELWERAQTMLKLNRQLKAKNEPKADYILSGKLYCSCGSLMRGMSGHSATGEVYRYYTCPNKDCHLRNIPKDDLEGKVMQSIVDHLLQPESMEALAEAMVEVQKADVEKPNAERVAIEQSLSDVRRRSKNILDAIENGTANAQLCARLDDLTEQEQTLSFQLSSLEKEKPVVFTKEQYLFLLEQFLMEPSERTPEYGRRLVNTFVTSMVVSGHELVINFNVSDETVNKNKKTSQTNLQKESSSGMRLVRVARIELTAS

SEQ ID NO: 4961 - protein, 514 aa, Unknown
  Description of Unknown: Integrase B4962 sequence
  SM00857,G3DSA:1.10.10.2600,IPR036162,PS51737,G3DSA:3.40.50.1390, IPR006119,IPR038109,PF07508,IPR011109,SSF53041, PTHR30461,Coil,PS51736,cd00338,PF00239
MRTEYAIYLRKSRADLEAEAHGEGDTLARHEHILMELAKSRALPIGAIYREIVSGERIANRPVMQQLLSEVEDGRWKGVLVTETSRLARGDTIDQGIVAQAFKFSGTLIVTPAKTYDHPQEADEEWMEFGLFMSRQEYRMIRRRQLAGTRASKKEGHYVPGRPPYGYERYKLDGRGWSLRPVEPQAGVIRTIYDMYLSGKGFSEIANELNAMKIRTPLDKKWVPATTRAILQNPHYAGFIPSAMKVNTKIVQKGKLITKRPVNKNCELYEGIHEAIIPRDVWNSVQQRMKDTVTPRVPRKYQQMNPLAGLVYCDQCGKLMSRHPYRREDKVRFGCENPSCSTVSSLFEDVENLVLQSLREFLHEIELSSPTLLDTKSEEIALQNIEKQLTDINHRLQRTYELLEDGVYSKETFLQRQSAISQDQTALLNTKHEIERKLHNKQTDIEAQKNSAPLIRHVLDVYPTLEDPKEQNLLLKQVIRRIDYHKTVRVYGKAKSDLHLTIHPKIAIPQTSNI

SEQ ID NO: 4962 - protein, 514 aa, Unknown
  Description of Unknown: Integrase B4963 sequence
  PTHR30461:SF3,SM00857,G3DSA:1.10.10.2600,IPR036162,PF13408, PS51737,IPR025827,G3DSA:3.40.50.1390,IPR006119,IPR038109, PF07508,IPR011109,SSF53041,PF00239, PTHR30461,PS51736,Coil,cd00338
MARSKKTECLPLERIGVIYARYSSHNQKEESIEQQVEECTSFALLNGIKIVHVYADKALSGRTDKRPQFQRLMRDAEKRSFSVVVAYKSNRIARDMLNALKYEDRLGKYGIETLYAKEEFGNTAAGRFALRTMMNVNQFYSENMAEDIKRGMLDNAENCKVNGALPLGYVSGPDKRYAIEPKEAEIVRGIYDKVLEGVSFADIANDLNACGVRTKHGSLWNKCSFHRILTNDVYIGVYRHSGVVKEGGVPPILEREVFIAMQKYLETKKNPRGRHRENGDYLLTGKLRCGYCESFMVGVSGTSKTGDKHYYYTCNSRHAGSGCKKENVRRDTIEYTVAALTQQVVFKEDIIEWIATAAVKLAKEASGQNEIDAMEAELAEDRKATKNIMAAIEQGIFTATTKSRLLELEADIASLEQSIRDAKAISEGKLLEKERVVYFLTSLREGNLHSKTYQKRLIDTFVRAVYLWDDRIGIDYYYAGKDSMVKYSLSEIEADIGENIREVLKDSLTGHQVS

SEQ ID NO: 4963 - protein, 514 aa, Unknown
  Description of Unknown: Integrase B4964 sequence
  PTHR30461:SF3,SM00857,G3DSA:1.10.10.2600,IPR036162,PF13408, PS51737,G3DSA:3.40.50.1390,IPR025827,IPR006119,IPR038109, PF07508,IPR011109,SSF53041,PTHR30461,Coil, PS51736,cd00338,PF00239
MRRKKVEGGNRLVAYYRYSGGSGQTEQSIEGQRRDCENYAKLHGLTILHEYIDRHISGKTDDRAAFQQMMNDGDKGAFDMVICWKTDRFARNRYDSAVYKKRLRDNGIEILYAAESNVEGAEGIIIEGLMEALAEYYSAELAEKMRRGMRESALKGQAINRCRSLGLTTDENKKYVIDEKTAPTVRFIFEHYAAGESSTSIVEQLNAKGLRTSQGNPFNKCSIPRIIQNEMYRGVYTSKAYNVRIEGAIPAIIDDDLWKRAQAMMKTNRQLKAKYEPKAEYLLSGKLFCAKCGCTMKGVSGHSGGNGEVYRYYACSNPQCRKRNIPKDDLEGKVIRSICDHLLQPETMELLAETMVDVQKADMEKPNAERDVLEQELRDVRRRSKNIMDAIETGSANPQLVARLDDLTQQENTLTYQLSTMEAEKPLLFTKEQYLFLLQQFYAQPTEQDDAYKRRLINTFVTNIEVSDSELLIYFNISEETENKNKNAPQLNFDKSSSTEKRLVRVARIELTAS

SEQ ID NO: 4964 - protein, 514 aa, Unknown
  Description of Unknown: Integrase B4965 sequence
  PTHR30461:SF3,SM00857,G3DSA:1.10.10.2600,IPR036162,PF13408, IPR025827,G3DSA:3.40.50.1390,PS51737,IPR006119,IPR038109, PF07508,IPR011109,SSF53041,PTHR30461,Coil, PS51736,cd00338,PF00239
MPKKNPSGGKRLVAYYRYSGGSHQTEQSIEGQRRDCETYARIHGMVILHEYIDRHISGKTDDRPEFQQMIADSGKGMFDYVICWKTDRIARSRYDSIIYKKKLRDNGVELLYAAEANVEGSGGIIVEGLMEALAEYYSAELAEKVRRGMRESALKGKAIGSSRPLGLTVDKDKKYIIDPAGAAAVRYIFEQYAAGAASSAIVAHLNEQGLCTSRGNPFNKSSVVRIIQNEVYRGVYVSPKFDVRIEGAVPAIIDDDLWERAQKMFIRNRQSRSPRNDRADYILSGKLFCGECGTAMKGVSGHSSNGEVYFYYNCPCKDCHRRNIPKDELEGLVIRTVCNDVLQPDVMDRIADSVIEAQTAELNQPNPEKEALQHELADVQRKAKNLLSALENGTAGAMLTNRLAELEQQANTLSYQLSSLESEPKFPVFSKEEVLYLLEQFLIAPSEKTKAYRRRLIDTFVSKIEVSNTELTIYFNIAEEDCGKMKKAPQSNQPEGCSTEKQMVRVARIELTAS

SEQ ID NO: 4965 - protein, 514 aa, Unknown
  Description of Unknown: Integrase B4966 sequence
  PTHR30461:SF3,IPR036162,PS51737,IPR011109,PTHR30461, PF00239,G3DSA:1.10.10.2600,IPR006119,SSF53041,cd00338, SM00857,IPR025827,IPR038109,mobidb-lite,PS51736, PF13408,G3DSA:3.40.50.1390,PF07508,Coil
MAKKKKPAGGNAIIYARYSSHNQRDVSIEQQIEACRKHAAELGLTITDTYEDRAISGRTDNRPAFQRMMRDAEDGRFQYVLAWKSNRMGRNMMQAMVNESRLMDCGVKVFYAEEDFDDSAAGRFALRSMMNVNQFYSDNLAEDVRRGLMDNASKCMANGRQPLGYKRGEDGKVVVDEPAAAIVREIYTRIASGEMFMDIARDLNRRGIKTQSGSEWNKSSFKVLCRNERYRGIYIYGDTRIEGGIPPIVDDVLWYKVQEVLNVKKSKNRHHCPSDEDYLLTGKLRCGKCGGYMIGMSGRSKTGDVHHYYACQNRRVGHTCDKKNIRRDVIEPAVAQAIKQYCLTDDAIEWITDQTIAYWEDEDRKLQIDSIENDLSAVQSSISNVMKAIEMGVITETTRDRLIELERQQTDLKSKLALAKEEIVHVDRKDLISSLLAFRHGNVHDRAYQEKLFNAFLIAVYVYDDDHLKLVFNSFGKDDTVNIALDLGENDDNSGLSDVSKSSPILSNGQPKTT

SEQ ID NO: 4966 - protein, 514 aa, Unknown
  Description of Unknown: Integrase B4967 sequence
  PTHR30461:SF3,SM00857,G3DSA:1.10.10.2600,IPR036162,PF13408, PS51737,G3DSA:3.40.50.1390,IPR025827,IPR006119,IPR038109, PF07508,IPR011109,SSF53041,PTHR30461,Coil, PS51736,cd00338,PF00239
MRKKKVKGGNRLVAYYRYSGGSGQTEQSIEGQRRDCENYANLHGLTILHEYIDRHISGKTDDRAAFQQMMNDGDKGAFDMVICWKTDRFARNRYDSAVYKKRLRDNGIEILYAAESNVEGAEGIIIEGLMEALAEYYSAELAEKMRRGMRESALKGQAINRCRSLGLTTDENKKYVIDEKTAPTVRFIFEHYAAGESSTSIVDQLNAKGLRTSQGNPFNKCSIPRIIQNEMYRGVYTSKAYNVRIEGAIPAIIDDDLWKRAQAMMKTNRQLKSKYEPKAEYLLSGKLFCAKCGCTMKGVSGHSGGNGEVYRYYACSNPQCRKRNIPKDDLEGKVIRSICDHLLQPETMELLAETMVEVQKADMEKPNAERDVLEQELRDVRRRSKNIMDAIETGSANPQLVARLDDLTQQENTLTYQLSTMEAEKPLLFTKEQYLFLLQQFYAQPTEQDDAYKRRLINTFVTNIEVSDSELLIYFNISEETENKNKNASQLNFDKSSSTEKRLVRVARIELTAS

SEQ ID NO: 4967 - protein, 514 aa, Unknown
  Description of Unknown: Integrase B4968 sequence
  cd00338,SM00857,G3DSA:1.10.10.2600,IPR036162,PS51737, G3DSA:3.40.50.1390,IPR006119,IPR038109,PF07508,SSF53041, IPR011109,PTHR30461,PS51736,Coil,PF00239
MQMEYAMYLRKSRADLEAEAHGEGDTLARHEHILMELAKSRALPIGAIYREIVSGERIANRPVMQQLLAEVEDGRWKGVLVTETSRLARGDTIDQGIVAQAFKFSGTLIVTPAKTYDPTQEADEEWMEFGLFMSRQEYRMIRRRQLAGTRASKKEGHYVPGRPPYGYERYKLDGRGWSLRPVEPQASVIRTIYDMYLSGKGFSEIANELNAMKIRTPLDKKWVPATTRAILQNPHYAGFIPSAMKVNTKIVQKGKLITKRPVNKNCELYEGIHEAIIPRDVWYSVQQRMKDTVTPRVPRKYQQMNPLAGLVYCDQCGKLMSRHPYRREDKVRFGCENPSCSTVSSLFEDVESLVLQSLREFLHEIELSSPTLLDTKSEEIALQNIEKQLTDINHRLQRTYELLEDGVYSKETFLQRQSAISQDQTALLNTKHEIERKLHNKQTDIEAQKNSAPLIRHVLDVYPTLEDPKEQNLLLKQVIRRIDYHKTVRVYGKAKSDLHLTIHPKIAIPQTSNI

SEQ ID NO: 4968 - protein, 514 aa, Unknown
  Description of Unknown: Integrase B4969 sequence
  PTHR30461:SF3,cd00338,SM00857,G3DSA:1.10.10.2600,IPR036162, PF13408,PS51737,G3DSA:3.40.50.1390,IPR025827,IPR006119, IPR038109,PF07508,SSF53041,IPR011109, PTHR30461,PS51736,Coil,PF00239
MSVDIKWNVPQKGKEGDLAAVYARYSSHSQGEQSIEGQLAEAQKYAAAHGYTIVHEYVDRAKSGRTDNREEFQRMLKDTAKKQFNVIILWKVDRFGRNREEIAINKMKCRKNGVRVEYVAETIPNTPEGVILESVLEGFAEYYSLQLSQNIRRGIAESAEKCQVTGGNRPLGYKTGPDKKFEIDEDTAPTVRLIFKMYADGATVTEIVAKLNELGLRTLRGGKFTHNSLHTILKNEKYIGIYNNHGKHIEGGVPRLIDDELFYKAQEMLKVNKRAPAKTWARADYLLADKAFCGKCGAPMFGESGTSKTGARHNYYICSHKKRFKTCDKKAVRQADVEDLVIKATCDLLADTELLDFIIENTWQYYLAQDNSQEELRNLTRQLEQTDLAIKNLIRAIEAGILTDETKSRMDELTTQKAELKAAIADRELARGFHLQREHIAFYLYDLRNADRTDREVQKRLIQTFVNSVFVFDDCVKLTFNFSGNKSVVTLKMLQAAEAGEVFGCYASCSTNAR

SEQ ID NO: 4969 - protein, 514 aa, Unknown
  Description of Unknown: Integrase B4970 sequence
  SM00857,G3DSA:1.10.10.2600,IPR036162,PS51737,G3DSA:3.40.50.1390, IPR006119,IPR038109,PF07508,SSF53041,IPR011109, PTHR30461,Coil,PS51736,cd00338,PF00239
MSTEYAIYLRKSRADLEAEAHGEGDTLARHEHILMELAKTRALPIGAIYREIVSGERIANRPVMQQLLSEVEDGRWKGVLVTETSRLARGDTIDQGIVAQAFKFSGTLIVTPAKTYDPTQEADEEWMEFGLFMSRQEYRMIRRRQLAGTRASKKEGHYVPGRPPYGYERYKLDGRGWSLRPVEPQAGVIRTIYDMYLSGKGFSEIANELNAMKIRTPLDKKWVPATTRAILQNPHYAGFIPSAMKVNTKIVQKGKLITKRPVNKNCELYEGIHEAIIPRDVWYSVQQRMKDTVTPRVPRKYQQMNPLAGLVYCDQCGKLMSRHPYRREDKVRFGCENPSCSTVSSLFEDVESLVLQSLREFLHEIELSSPTLLDTKSEEIALQNIEKQLTDINHRLQRTYELLEDGVYSKETFLQRQSAISQDQTALLNTKHEIERKLHNKQTDIEAQKNSAPLIRHVLDVYPTLEDPKEQNLLLKQVIRRIDYHKTVRVYGKAKSDLHLTIHPKIAIPQTSNI

SEQ ID NO: 4970 - protein, 514 aa, Unknown
  Description of Unknown: Integrase B4971 sequence
  SM00857,IPR036162,G3DSA:3.40.50.1390,IPR006119, PF07508,IPR011109,SSF53041,PTHR30461, Coil,mobidb-lite,cd00338,PF00239
MRNEYNPIIIKYVAEYLRKSRGETTEDLIKHKTILEELCKSRGWVYVVYEEVETGESLFARPVMQQLLRDAEDNIYDAVVCVDLDRLGRGDLVDWGQIKRVFQKTNTYMVTPSSLYNLNDDNEEFAVDLQTLFARREYKKITHRLSMGKKVGAKLGAWTNGTPPMPYEYQEWIDPATNKRYYNEKGLVVNLQKSSIYRFMVDSFIKDKKSTNEIAWELNRRNIPSPRGGRWCNMTVRRLLVDETHLGKIISNKTKGDGHKNKSPNKQPFQKIPKEQWTVVENRHEAIKTQDEHEKILIGIQKNLKSPYRRSDHYYPLKGLIKCGLCGYGLPLEYKRGKDLIVKKCWHKDYLGNKCPNSSGKAQYIIDAIDEQLKEYEEQIRKEIESCEDQSTDLIQLQIKTIMDKLNKKDIALKRARIAYDEGVDTLDEYRSAKERILKEVDELESQLSIENLKLQKAQSITNHEKLHYIEEFRRSRWEDELGDKELNDLYKTIISSIIWTKQGDNIDIKVNFL

SEQ ID NO: 4971 - protein, 514 aa, Unknown
  Description of Unknown: Integrase B4972 sequence
  cd03768,PTHR30461:SF3,SM00857,G3DSA:1.10.10.2600,IPR036162, PF13408,IPR025827,G3DSA:3.40.50.1390,PS51737,IPR006119, IPR038109,PF07508,SSF53041,IPR011109,PTHR30461, PS51736,Coil,PF00239
MLRIGIYPRKSVYRDNSDSVQVQITACKDYARLMFKDQELDFRIYDKDEGFSGKNTHRPSFTELMADVKADELDIIIVYKLDRISRSVKDFSEIYETLQQHNVSFLSVKESFDTSTPMGRTVMYILSAFAQLERENTAERVADNMASLGEAGKWTGGTLPPGMTSVRKKIGDKTHSYLIVDEQRIKTVKYIFSLMLSGTSITKLERTLRTEGIRTERDAFYSCSKLYNLFTNPVYCANDMDAYYYFLEKGYKLPDPALFDGRHGLIGYGRTTQSNGTTVRKDTYSIAIGIHDPILSGADWIAIQKRLGQNKSTRYAKYEAGILKGTLRCKCGVKMNIRTYKKNGSLFSYYYCPKMAREGVSACDTGYTRADDIDDRFLQELKKIKLSPDSIELEENVSYVDTGKMRADLKKTTDSIRNLMNALSGSADSAAAKYIIAELEALDKEKSVLEKKLRTAEQRNRRAAVSAETKEFVYHRICNLLDNMDSMSYTEINELIRSIVKSCVFDGDHLDVTF

SEQ ID NO: 4972 - protein, 514 aa, Unknown
  Description of Unknown: Integrase B4973 sequence
  SM00857,G3DSA:1.10.10.2600,IPR036162,PF13408,IPR025827, PS51737,G3DSA:3.40.50.1390,IPR006119,IPR038109,PF07508, SSF53041,IPR011109,PTHR30461,Coil,PS51736, cd00338,PF00239
MQMEYAIYLRKSRADLEAEAHGEGDTLARHEHILMELAKSRALPIGAIYREIVSGERIANRPVMQQLLSEVEDGRWKGVLVTETSRLARGDTIDQGIVAQAFKFSGTLIVTPSKTYDPTQEADEEWMEFGLFMSRQEYRMIRRRMTAGMQAAKREGRYISNVPPYGYERYKLDGRGWSLRPIEPQAKVVRMIFDLYLSGLGYCEIEKRLNALHIPAPKSDKWSARTIPGILRNAHYIGCIPAAFRPGKKVVKDGQITVTRPRNHNCELYKGLHEPIIDRAVWDQVQARLGKNAAVRTPGNRQQSNPLAGLIVCDCCGKRMQRRPQTSTSSQTQIQCTTRGCATVAHNADELEQLVLDSLRTFLAQIEVGTPVALDLSAEQHALSEIEKSLTDLEARQRRTFELVEDGTYTREIFLSRQAELTAERERLTADRAAIQQRIEQAQHEYDARTGLAPAVRHVLDTYNTDLPAADRNKLLKQVIERIDYHKRTRTRWTKERDLSLTLHPVVFSSSTNR

SEQ ID NO: 4973 - protein, 514 aa, Unknown
  Description of Unknown: Integrase B4974 sequence
  SM00857,G3DSA:1.10.10.2600,IPR036162,PS51737,G3DSA:3.40.50.1390, IPR006119,IPR038109,PF07508,IPR011109,SSF53041, PTHR30461,Coil,PS51736,cd00338,PF00239
MSTEYALYLRKSRADLEAEAHGEGDTLARHEHILMELAKSRALPIGAIYREIVSGERIANRPVMQQLLSEVEDGRWKGVLVTETSRLARGDTIDQGIVAQAFKFSGTLIVTPSKTYDPTQEADEEWMEFGLFMSRQEYRMIRRRQLAGTRASKKEGHYVPGRPPYGYERYKLDGRGWSLRPVEPQAGVIRTIYDMYLSGKGFSEIANELNAMKIRTPLDKKWVPATTRAILQNPHYAGFIPSAMKVNTKIVQKGKLITKRPVNKNCELYEGIHEAIIPRDVWNSVQQRMKDTVTPRVPRKYQQMNPLAGLVYCDQCGKLMSRHPYRREDKVRFGCENPSCSTVSSLFEDVESLVLQSLREFLHEIELSSPTHLDTKSEEIALQNIEKQLTDINHRLQRTYELLEDGVYSKETFLQRQSAISQDQTALLNTKHEIERKLHNKQTDIEAQKNSAPLIRHVLDVYPTLEDPKEQNLLLKQVIRRIDYHKTVRVYGKAKSDLHLTIHPKIAIPQTSNI

SEQ ID NO: 4974 - protein, 514 aa, Unknown
  Description of Unknown: Integrase B4975 sequence
  SM00857,G3DSA:1.10.10.2600,IPR036162,PS51737, G3DSA:3.40.50.1390,IPR006119,IPR038109,PF07508, SSF53041,IPR011109,PTHR30461,Coil, PS51736,cd00338,PF00239
MSTEYAIYLRKSRADLEAEAHGEGDTLARHEHILMELAKSRALPIGAIYREIVSGERIANRPVMQQLLSEVEDGRWKGVLVTETSRLARGDTIDQGIVAQAFKFSGTLIVTPSKTYDPTQEADEEWMEFGLFMSRQEYRMIRRRQLAGTRASKKEGHYVPGRPPYGYERYKLDGRGWSLRPVEPQAGVIRTIYDMYLSGKGFSEIANELNAMKIRTPLDKKWVPATTRAILQNPHYAGFIPSAMKVNTKIVQKGKLITKRPVNKNCELYEGIHEAIIPRDVWYSVQQRMKDTVTPRVPRKYQQMNPLAGLVYCDQCGKLMSRHPYRREDKVRFGCENPSCSTVSSLFEDVESLVLQSLREFLHKIELSSPALLDTKSEEIALQNIEKQLTDINRRLQRTYELLEDGFYSKETFLQRQSAISQDQTALLNTKHEIERKLHNKQTDIEAQKNSAPLIRHVLDVYPTLEDPKEQNLLLKQVIRRIDYHKNVRVYGKAKSDLHLTIHPKIAIPQTSNI

SEQ ID NO: 4975 - protein, 514 aa, Unknown
  Description of Unknown: Integrase B4976 sequence
  SM00857,G3DSA:1.10.10.2600,IPR036162,PS51737,G3DSA:3.40.50.1390, IPR006119,IPR038109,PF07508,SSF53041,IPR011109, PTHR30461,Coil,PS51736,cd00338,PF00239
MSTEYAIYLRKSRADLEAEAHGEGDTLARHEHILMELAKSRALPIGAIYREIVSGERIANRPVMQQLLSEVEDGRWKGVLVTETSRLARGDTIDQGIVAQAFKFSGTLIVTPSKTYDPTQEADEEWMEFGLFMSRQEYRMIRRRQLAGTRASKKEGHYVPGRPPYGYERYKLDGRGWSLRPVEPQAGVIRTIYDMYLSGKGFSEIANELNAMKIRTPLDKKWVPATTRAILQNPHYAGFIPSAMKVNTKIVQKGKLITKRPVNKNCELYEGIHEAIIPRDVWYSVQQRMKDTVTPRVPRKYQQMNPLAGLVYCDQCGKLMSRHPYRREDKVRFGCENPSCSTVSSLFEDVESLVLQSLREFLHEIELSSPALLDTKSEEIALQNIEKQLTDINRRLQRTYELLEDGVYSKETFLQRQSAISQDQTALLNTKHEIERKLHNKQTDIEAQKNSAPLIRHVLDVYPTLEDPKEQNLLLKQVIRRIDYHKTVRVYGKAKSDLHLTIHPKIAIPQTSNI

SEQ ID NO: 4976 - protein, 514 aa, Unknown
  Description of Unknown: Integrase B4977 sequence
  SM00857,IPR036162,G3DSA:3.40.50.1390,IPR006119, PF07508,SSF53041,IPR011109,PTHR30461, Coil,mobidb-lite,cd00338,PF00239
MRNEYNPIIIKYVAEYLRKSRGETTEDLIKHKTILEELCKSRGWVYVVYEEVETGESLFARPVMQQLLRDVEDNIYDAVVCVDLDRLGRGDLVDWGQIKRVFQKTNTYMVTPSSLYNLNDDNEEFAVDLQTLFARREYKKITHRLSMGKKVGAKLGAWTNGTPPMPYEYQEWIDPATNKRYYNEKGLVVNLQKLSIYRFMVDSFIKDKKSTNEIAWELNRRNIPSPRGGRWCNMTVRRLLVDETHLGKIISNKTKGDGHKNKSPNKQPFQKIPKEQWTVVENRHEAIKTQDEHEKILIGIQKNLKSPYRRSDHYYPLKGLIKCGLCGYGLPLEYKRGKDLIVKKCWHKDYLGNKCPNSSGKAQYIIDAIDEQLKEYEEQIRKEIESCEDQSTDLIQLQIKTIMDKLNKKDIALKRARIAYDEGVDTLDEYRSAKERILKEVDELESQLSIENLKLQKAQSITNHEKLHYIEEFRRSRWEDELDDKELNDLYKTIISSIIWTKQGDNIDIKVNFL

SEQ ID NO: 4977 - protein, 514 aa, Unknown
  Description of Unknown: Integrase B4978 sequence
  PTHR30461:SF3,SM00857,G3DSA:1.10.10.2600,IPR036162,PF13408, PS51737,IPR025827,G3DSA:3.40.50.1390,IPR006119,IPR038109, PF07508,IPR011109,SSF53041,PTHR30461,Coil, PS51736,cd00338,PF00239
MRRKKVEGGNRLVAYYRYSGGSGQTEQSIEGQRRDCENYARLHGLTIVHEYIDRHISGKTDDRAAFQQMMNDGDKGAFDMVICWKTDRFARNRYDSAVYKKRLRDNGIEILYAAESNVEGAEGIIIEGLMEALAEYYSAELAEKMRRGMRESALKGHAINRCRSLGLTTDENKKYVIDEKTAPTVRFIFEHYAAGESSTSIVEQLNAKGLRTSQGNPFNKCSIPRIIQNEMYRGVYTSKAYNVRIEGAIPAIIDDDLWKRAQAMMKTNRQLKAKYEPKAEYLLSGKLFCAKCGCTMKGVSGHSGGNDEVYRYYACSNPQCRKRNIPKDDLEGKVIRSICDHLLQPETMELLAETMVDVQKADMEKPNAERDVLEQELWDVRRRSKNIMDAIETGSANPQLVARLDDLTQQENTLTYQLSTMEAEKPLLFTKEQYLFLLQQFYAQPTEQDDAYKRRLINTFVTNIEVSDSELLIYFNISEETENKNKNASQSNFDKSSSTEKRLVRVARIELTAS

SEQ ID NO: 4978 - protein, 514 aa, Unknown
  Description of Unknown: Integrase B4979 sequence
  PTHR30461:SF3,SM00857,G3DSA:1.10.10.2600,IPR036162,PF13408, IPR025827,G3DSA:3.40.50.1390,PS51737,IPR006119,IPR038109, PF07508,IPR011109,SSF53041,PF00239,PTHR30461, Coil,cd00338
MNTVIYARYSAGPRQTDQSIEGQLRVCTDFCKQRGLTVIDAYCDRHISGRTDERPEFQRLITDAKRKKFEAVVVYKTDRFARNKYDSAVYKRELKRNGIQIFYAAEAIPDGPEGIILESLMEGLAEYYSAELAQKIKRGMHESALKCQSTGSGRPLGYRVDEQKHFQIAPESAQTVQTIFEQYIKGESNAAICELLNSRGLRTAQGKPFNKNSINRIIKNRKYIGEYRYHDIVVEGGMPAIISKDTFNLAQAEMERRRTRKAPKSPKAEYLLAGRLFCGHCKGPMQGVSGTGKSGNKWYYYYCGNTRGENKTCDKKQVSRDRLERAVVDFTVRYILQEEVLEELARKVHAAQERQNDTASEIAFYEKKLADNKKSIANVLRAIESGAMTQTLPARLQELENEQAVILGEISFLKGKRLAFTEDQIFFALMKHLEPYPGESEQDYRRRIISDFVSEVYLYDDRLLIYFNISSEDGKLKSADLSNIEGGEFDEGLVSSTTSQKIRTLSSMVIRSDF

SEQ ID NO: 4979 - protein, 513 aa, Unknown
  Description of Unknown: Integrase B4980 sequence
  PTHR30461:SF3,SM00857,G3DSA:1.10.10.2600,IPR036162,PF13408, IPR025827,G3DSA:3.40.50.1390,PS51737,IPR006119,IPR038109, PF07508,IPR011109,SSF53041,PF00239,PTHR30461, PS51736,Coil,cd00338
MAKRLHGALICARYSTDNQNPDSIEVQVAKCTEWCHTHNIPVLGVYADEATSGMKDTRPRYAAMMRDLRDGVGDMVVIYDQSRMFRKMTSWFSFRDQLTQMGVDVVSVTQPMIGKDLRDPTNFLTEGSMALFNQIWALQSRQKVMEKMRFMAKNGQHTGGKPALGYEVVDGQLAICEAEAKIVRRIFEEYGSGKSYREIVAGLNADGIKTKRGSAFGANSLHDLLKNEKYIGTLVYGQRPYREDGTRNTHAAAADSIRIENAIPAIIDKELFAKVQDKMAANKRQQGGRPPTKRDYPLKGKVVCAECKSAMTISTSQKIYDYYKCSGKKRRHDCDGVNISVDVLERTVANAVRQVLGSPKNVERLITILRDQSGEIQAQAVDALRQLIAREREISRKLDNATDAILGGLSSPTLLARVKDLEQEKTEIDRQMRELKATVDASAIPETRLREIIDEISGDNPAGNAALLAIVCRVEVAKDTITIWTMLDTHPDGTFDWSEEGVLITPGTTSGVP

SEQ ID NO: 4980 - protein, 513 aa, Unknown
  Description of Unknown: Integrase B4981 sequence
  PTHR30461:SF3,cd00338,SM00857,G3DSA:1.10.10.2600,IPR036162, PF13408,PS51737,G3DSA:3.40.50.1390,IPR025827,IPR006119, IPR038109,PF07508,IPR011109,SSF53041,PTHR30461, PS51736,Coil,PF00239
MAKAKQKAATNDISKLAVIYARYSSHNQTEQSIEGQLAAGHRYADLKGYTVVHEYIDRAMTGRNDNRDDFQKMLSDTSKKQFGAIIVWKVDRFGRNREEITFNKYRCKKNGVRVEYVAENLPDSPEGVILESVLEGMAEYYSLQLSQNVQRGLLESAKKHQVIGGNVPLGLMMDAHKKYVPDLKTAPTVKLIFDMYAEGSTTSEIINHLNSIGMRTKAGKPFTKSSLTTVLKNEKYIGVYKYKDIIRDEGVIPPIVDKEIFYKVQELLKVNRRMPSHKWSYSDYILTDKLFCGKCGTAMVGESGFGKMGVKYSYYICAKRRKDKTCDKKPVRQEWIEEIVLQRVQGILQNEELLEFIAENTWQYYLAQDESMEKLKGLQTELDKVEKSAANLMKAIEAGIFNDMTKARMDELDDQRAVIKKAMAEIEIEKGFKLTKDHILYFLEQFKKLDYKDRDCQRRLIDVFVNSIFVYDDKLRIAFNFGGSDSTITLNEVDKADRGEGFVCCASCPVLRP

SEQ ID NO: 4981 - protein, 513 aa, Unknown
  Description of Unknown: Integrase B4982 sequence
  PTHR30461:SF3,cd00338,SM00857,G3DSA:1.10.10.2600,IPR036162, PF13408,IPR025827,G3DSA:3.40.50.1390,PS51737,IPR006119, IPR038109,PF07508,IPR011109,SSF53041,PTHR30461, PS51736,Coil,PF00239
MAQAKLISPVSRQAYERTKVAAYCRVSSNSADQLNSYAAQIRAYTKLIKSNDSWELVEIFADEGLSGMKAENRVEFQRMIEMCEHKQIDLIITKSVSRFARNVKEALEYVRKLKLLGIGVQFEKEGIYTLALGDEMLLNTFSAIAQEESKAISQNQRLSIVKRMERGEYVDSNAPYGFRLQDKKLEAFDREADVVRYIFQQYLSGWSTSEIARDLTEKGIQTKLGKEQWRSTKISYILSNERYVGDCRYQKTYRDTTVPFKQSKNRGQEDMFYASETHDPIIDRESFEKVQALLQDRKERFSKSEQLNIYPLTSRIRCSECGSVFRRKVRNGAIKWVCARHSADTHACPSGYYSEERIYDGFITMVNKLRFGEERILDQVIAKLETAAALYKRNNISAGKMSQSIAELNAKLVMLEQLRSKGYLAIEVYQSQTRDIQKQISSLKSERRSAFESTIQTMLDEVLKMRSLLNEIEEPLEEFNDKLFHELVKGIEINKQDEMTVTFLGGLKFTELI

SEQ ID NO: 4982 - protein, 513 aa, Unknown
  Description of Unknown: Integrase B4983 sequence
  PTHR30461:SF3,SM00857,G3DSA:1.10.10.2600,IPR036162,PF13408, IPR025827,PS51737,G3DSA:3.40.50.1390,IPR006119,IPR038109, PF07508,IPR011109,SSF53041,PTHR30461,Coil, PS51736,cd00338,PF00239
MMQQALNAVIYARYSSHNQTEQSIEGQLRDCYAFAEREGLQVVGEYIDRAITGRTDERPDFQRMIADARKQEFQRVIVWKFDRFSRDRYDSAIYKHKLKQCGVRVLSAMENVGEGDVSIILEALLEASAEQYSLDLSKKVLRGQRESRLKGTFLGGLTPIGYKLENRKLVADERTAPIVRYIFEQYAKGTSKQDIINELATRGILNRHGKPLSHSTLQTILKNKKYIGVYTHGGQDVAGGCEALIDEKTFLKVQEQLSKRKHAPAASKAVIEYLLQGKLYCGYCGFNMFGDSGRGRNGSTYRYYACRRRKKERDCKKKNEKKDFIEWYVVEQTVEYVLTPERIEYIASELVAQYKKDCGIDRIKAYEKQLDRIKAEISRLVDTLAVCPAAARQPIFDKMEQLDAEKQEAELDLSKLRISAKIQISKEHIADWLKQFCNGDALDVDFQKRIIDTFINSVYLYDDKVIIYYNIEGGKQVSYIDMIDSTEEPPFSDDAPGSSGGSDLKRPALHLCC

SEQ ID NO: 4983 - protein, 513 aa, Unknown
  Description of Unknown: Integrase B4984 sequence
  PTHR30461:SF3,cd00338,SM00857,G3DSA:1.10.10.2600,IPR036162, PF13408,PS51737,G3DSA:3.40.50.1390,IPR025827,IPR006119, IPR038109,PF07508,IPR011109,SSF53041,PTHR30461, PS51736,Coil,PF00239
MMQQALNAVIYARYSSHNQTEQSIEGQLRDCYAFAEREGLQVIGEYIDRAITGRTDERPDFQRMIADARKQEFQRVIVWKFDRFSRDRYDSAIYKHKLKQCGVRVLSAMENVGEGDVSIILEALLEASAEQYSLDLSKKVLRGQRESRLKGTFLGGLTPIGYKLENRKLVADERTAPIVRYIFEQYAKGTSKQDIINELATRGILNRHGKPLSHSTLQTILKNKKYIGVYTHGGQDVAGGCEALIDEKTFLKVQEQLSKRKHAPAASKAVIEYLLQGKLYCGYCGFNMFGDSGRGRNGSTYRYYACRRRKKERDCKKKNEKKDFIEWYVVEQTVEYVLTPERIEYIASELVAQYKKDCGIDRIKTYEKQLDRIKAEISRLVDTLAVCPAAARQPIFDKMEQLDAEKQEVELDLSKLRISAKIQISKEHIADWLKQFCNGDALDVDFQKRIIDTFINSVYLYDDKVIIYYNIEGGKQVSYIDMIDSTEEPPFSDDAPGSSGGSDLKRPALRLCC

SEQ ID NO: 4984 - protein, 513 aa, Unknown
  Description of Unknown: Integrase B4985 sequence
  PTHR30461:SF3,cd00338,SM00857,G3DSA:1.10.10.2600,IPR036162, PF13408,IPR025827,PS51737,G3DSA:3.40.50.1390,IPR006119, IPR038109,PF07508,IPR011109,SSF53041,PTHR30461, PS51736,Coil,PF00239
MKKQPTGGKRLVAYYRYSGGSHQTEQSIEGQRRDCETYARIHGMVILHEYIDRHISGKTDDRPEFQQMIADAGKGMFDYVICWKTDRIARSRYDSIVYKKKLRDNGVELLYAAEANVEGSGGIIVEGLMEALAEYYSAELAEKVRRGMRESALKGKAIGSSRPLGLTVDKDKKYIIDPAGAAAVRYIFEQYAAGAASSAIVAHLNEQGLCTSRGNPFNKSSVVRIIQNEVYRGVYVSPKFDVRIEGAVPAIIDDDLWERAQKMFIRNRQSRSPRNDRADYILSGKLFCGECGTAMKGVSGHSSNGEVYFYYNCPCKDCHRRNIPKDELEGLVIRTVCNDVLQPDVMDRIADSVIEAQTAELNQPNPEKEALQCELADVQRKAKNLLSALENGTAGAMLTNRLAELEQRADTLSYQLSSLESEPKFPVFSKEEVLYLLEQFLIAPSEKTKAYRRRLIDTFVSKIEVSNTELTIYFNIAEEDCGKMKKAPQSNQPEGCSTEKQMVRVARIELTAS

SEQ ID NO: 4985 - protein, 513 aa, Unknown
  Description of Unknown: Integrase B4986 sequence
  PTHR30461:SF3,cd00338,SM00857,G3DSA:1.10.10.2600,IPR036162, PF13408,PS51737,G3DSA:3.40.50.1390,IPR025827,IPR006119, IPR038109,PF07508,IPR011109,SSF53041,PTHR30461, PS51736,Coil,PF00239
MRVVLYMRYSSDRQTEQSIEGQNRVCTAFCEQQGYEIVGRYIDRATSAFKDTDKRTEFQRMIRDSEKQLWEGIVVYKLDRFARNRYDSATYKARLKKNGVRVISATENISDNPEGVILEAVLEGMAEFYSKELSQKITRGMFESANKCHSIGGHIPLGYKIENKKLVIDEAGAAIVREAFDLYANGATVAEICETFNTKGYRTAKNAEFNKNSFRSMFKNERYIGIYKYKDLRIEGGVPAIIDKDTFAIVQKKVSKNAEAPSRGKAKIDYLLSQKLFCGHCGSLMTGESGTGKGGTTYFYYTCGKRKREHTCDKKPLKKDFIERAVVEDALTLLTPETIDELADIAVKESIREMEENSIIPALKDQLHETERSINNLVKMVEKGVESDTIADRLKELEKEKRAIEKRLVVAQDDYVILEKDHIVWWLSEFCNGDIEDEDFRRHIIDLLVNSVTVWDEPDGWYKITSVYNLTSNKTKTFRCSDLSGQAPPLKDNPNTLFFIGTLFGQTTKHRVE

SEQ ID NO: 4986 - protein, 513 aa, Unknown
  Description of Unknown: Integrase B4987 sequence
  PTHR30461:SF3,SM00857,G3DSA:1.10.10.2600,IPR036162,PF13408, IPR025827,PS51737,G3DSA:3.40.50.1390,IPR006119,IPR038109, PF07508,SSF53041,IPR011109,PTHR30461,PS51736, cd00338,PF00239
MKRITKIEAADTGAVRKLRVAAYARVSTDSEEQLISLDAQKNHYEVLIRSRRDWEYAGLYYDEGISGTKMAKRDGLLSMLADCERGLIDYIIVKSISRFSRNTVESIETVRKLCSMGIYILFEKENIDTGKMEGELLLSILSSLAESESRSISENETWSIQKRFRNGTYKIAYPPYGYDYIDGEMVVNPEQSEIVKWIFAEVLSGSSTTHIANALNARGISTKRGGRWTGHTINGMIKNEKYTGDVIFQKTYSDDTFTRRRNNGERDRFFVQGHHEAIISHEDFDAANDMIARNAAEKGIYADSRKYQNRYAFSGKIICGDCGAVWKRRKISGYFGYACTTHLEDKDVCGMKSIREDSIMAAFATMMNKLIFARDKVLLPFSNALKTAERAEYLDEFTALEEGLEKNLQKRQQITQLFTKGYLDPAVYAQQNDELLSASARLTAEKDAIIAKISGGSRQKKALEDILHYTSGASMLTEFDEDLFTRFVDRVIVYSRTEIGFDMKFGPVFRERI

SEQ ID NO: 4987 - protein, 513 aa, Unknown
  Description of Unknown: Integrase B4988 sequence
  PTHR30461:SF3,SM00857,G3DSA:1.10.10.2600,IPR036162,PS51737, G3DSA:3.40.50.1390,IPR006119,IPR038109,PF07508,SSF53041, IPR011109,PTHR30461,Coil,PS51736,cd00338, PF00239
MKPSGDYAIYLRKSRKDLELEALGEGETLARHRTALMELADKKGLKISKIYEEMVSGESIAARPQMQQLLDDVCAGRFAGVLVMEVERLARGNTKDQGEVAEAFSMSNTLIVTPTKTYDPNNEFDEEYFEFGLFMARREYKTIRRRMQRGLIESIKEGNYVGSLPPYGYDIIRINKKERTLKLNDQSQYVKMMFDWFVNERLSSGQIANRLTEMGIPTQTGKSEWNRATVKDILQNTLYTGKIRWNRRKVSKEKGSDGRTVKRKRRLTPEDYMVVDGKHPAIVSQEIFDKAQTLFCGQVPLKAQTTITNPFARLMVCKHCGKGISYNTFAYRGGQTKGRMSHRTSLTCKVKSAPYDDVVAAVAAALRDYISDFEFKLNNDEEARKNKQHEEMLHSMDVELNKLKQKREKLFDFLESGIYTKQEFMERKGVLSERIEAMQGSIENIKKSLPPPVDYREKILRVSEALSALEDPDVPAKAKNDLLKTVVRKIEYDCVDFGRNKGGEVHLDVYLKE

SEQ ID NO: 4988 - protein, 513 aa, Unknown
  Description of Unknown: Integrase B4989 sequence
  PTHR30461:SF3,SM00857,G3DSA:1.10.10.2600,IPR036162,PF13408, IPR025827,G3DSA:3.40.50.1390,PS51737,IPR006119,IPR038109, PF07508,SSF53041,IPR011109,PTHR30461,Coil, PS51736,cd00338,PF00239
MKKQPTGGNRLVAYYRYSGGSHQTEQSIEGQRRDCETYARIHGMVILHEYIDRHISGKTDDRPEFQQMIADAGNGMFDYVICWKTDRIARSRYDSIIYKKKLRDNGVELLYAAEANVEGSGGIIVEGLMEALAEYYSAELAEKVRRGMRESALKGKAIGSSRPLGLTVDKDKKYIIDPTGAAAVRYIFEQYAAGAASSAIVAHLNEQGLCTSRGNPFNKSSVVRIIQNEVYRGVYVSPKFDVRIEGAVPAIIDDDLWERAQKMFIRNRQSRSPRNDRADYILSGKLFCGECGTAMKGVSGHSSNGEVYFYYNCPCKDCHRRNIPKDELEGLVIRTVCNDVLQPDVMERIANSVIEAQTAELNQPNPEKDALEHELADVQRKAKNLLSALENGTAGAMLTNRLAELEQQADTLSYQLSSLESEPKFPVFSKEEVLYLLEQFLIAPSEETKAYRRRLIDTFVSKIEVSNTELTIYFNIAEEDCGKIKKAPQSNQPEGCSTEKQMVRVARIELTAS

SEQ ID NO: 4989 - protein, 513 aa, Unknown
  Description of Unknown: Integrase B4990 sequence
  PTHR30461:SF3,SM00857,G3DSA:1.10.10.2600,IPR036162,PF13408, PS51737,IPR025827,G3DSA:3.40.50.1390,IPR006119,IPR038109, PF07508,IPR011109,SSF53041,PTHR30461,PS51736, cd00338,PF00239
MKRITKIEAADTGAVRKLRVAAYARVSTDSEEQLISLDAQKNHYEVLIRSRRDWEYAGLYYDEGISGTKMAKRDGLLSMLADCERGLIDYIIVKSISRFSRNTVESIETVRKLCSMGIYILFEKENIDTGKMEGELLLSILSSLAESESRSISENETWSIQKRFRNGTYKIAYPPYGYDYIDGEMVVNPEQSEIVKWIFAEVLSGSSTTHIANALNARGISTKRGGRWTGHTINGMIKNEKYTGDVIFQKTYSDDTFTRRRNNGERDRFFVQGHHEAIISHEDFDAANDMIARNATEKGIYADSRKYQNRYAFSGKIICGDCGAVWKRRKISGYFGYACTTHLEDKDVCGMKSIREDSIMAAFATMMNKLIFARDKVLLPFSNALKTAERAEYLDEFTALEEGLEKNLQKRQQITQLFTKGYLDPAVYAQQNDELLSASARLTAEKDAIIAKISGGSRQKKALEDILHYTSGASMLTEFDEDLFTRFVDRVIVYSRTEIGFDMKFGPVFRERI

SEQ ID NO: 4990 - protein, 513 aa, Unknown
  Description of Unknown: Integrase B4991 sequence
  PTHR30461:SF3,SM00857,G3DSA:1.10.10.2600,IPR036162,PS51737, G3DSA:3.40.50.1390,IPR006119,IPR038109,PF07508,SSF53041, IPR011109,PTHR30461,Coil,PS51736,cd00338, PF00239
MTRVILIRCRSAVKKLRAAAYCRVSTEKAEQAGSLSSQRLYFEQYITRSDNMELVGVFYDEGTSGTTTMHRVGFNKMLKLARKGEIDIILTKEVSRFARNTVDTLKITRELKQTGVGVIFINDNIDTRESDGELRLSIMATIAQEESRKISERVRWGQARKMEQGVVFGRNCLGYDVSGGKISIEKQGASIVQRIFNEYTLLLKGAGTIAKELNSEKVPAPCAGSWSASYIRRILRNEKYVGDLEQKKSCTPDYLTHKKKLNRGGRIYLRCHHEPIISRELWDMTQLEISRRTPTETSRNSDRYPYSGKVHCALCGCVMVSRVKKLNEGIYKALRCAGRIKGNGCDNDTLNVKVLTAGIKYMLDGIVTNKAAITDRVMKSLPMPITDKAALQRQKDIIREKKRRLVDMVLDGLITKEELAEQKQYYDSKLKELDRKADMGDAAEQSGKCIAGKIGEILRFDDECVWRAVERVEYSHKELAVYFKGVEKGFAARFTVSGRGEGYKAAFGEIFRR

SEQ ID NO: 4991 - protein, 513 aa, Unknown
  Description of Unknown: Integrase B4992 sequence
  PTHR30461:SF3,SM00857,G3DSA:1.10.10.2600,IPR036162,PF13408, IPR025827,PS51737,G3DSA:3.40.50.1390,IPR006119,IPR038109, PF07508,IPR011109,SSF53041,PTHR30461,Coil, PS51736,cd00338,PF00239
MMQQALNAVIYARYSSHNQTEQSIEGQLRDCYAFAEREGLQVVGEYIDRAITGRTDERPDFQRMIADARKQEFQRVIVWKFDRFSRDRYDSAIYKHKLKQCGVRVLSAMENVGEGDVSIILEALLEASAEQYSLDLSKKVLRGQRESRLKGTFLGGLTPIGYKLENRKLVADERTAPIVRYIFEQYAKGTSKQDIINELATRGILNRHGKPLSHSTLQTILKNKKYIGVYTHGGQDVAGGCEALIDEKTFLKVQEQLSKRKHAPAASKAVIEYLLQGKLYCGYCGFNMFGDSGRGRNGSTYRYYACRRRKKERDCKKKNEKKDFIEWYVVEQTVEYVLTPERIEYIASELVAQYKKDCGIDRIKAYEKQLDRIKAEISRLVDTLAVCPAAARQPIFDKMEQLDAEKQEAELDLSKLRISAKIQISKEHIADWLKQFCNGDALDVDFQKRIIDTFINSVYLYDDKVIIYYNIEGGKQVSYIDMIDSTEEPPFSDDAPGSSGGSDLKRPALRLCC

SEQ ID NO: 4992 - protein, 513 aa, Unknown
  Description of Unknown: Integrase B4993 sequence
  PTHR30461:SF3,SM00857,G3DSA:1.10.10.2600,IPR036162,PS51737, G3DSA:3.40.50.1390,IPR006119,IPR038109,PF07508,IPR011109, SSF53041,PTHR30461,Coil,PS51736,cd00338, PF00239
MKRPDDYAIYLRKSRKDLDLEALGEGETLARHRTALLELADKKGLKITRIYEEMVSGESIADRPQMQQLLDDVCAGRFAGVLVMEVERLARGNTKDQGEVAEAFSMSNTLIVTPTKTYDPNNEFDEEYFEFGLFMSRREYKTIRRRMQRGLIESIKEGNYVGSLPPYGYDIIRINKKERTLKLNDQSQYVKMMFDWFVNEGLSCGQIARRLSEMGIPTQTGKSEWNRATVKDILQNTLYTGKIRWNRRKVSKEKGSDGRTIKRKRRLTPEDYMVVDGKHPAIVSQEIFDKAQTLFCGQVPLKAQTTITNPFARLMVCKHCGKGISYNDFAHRGGQTKGRMSHRTSLTCKVKSAPYDDVVAAVAAALRDYISDFEFKLNNDEEAQKNKQQEEILRSMDVELKKLEQKREKLFDFLESGIYTKQEFMERKGVLSERIEAMQGSIENIKKSLPPPVDYREKILRVSEALSALEDPDVPAKAKNDLLKTVVRKIEYDCVDFGRNKGGEVHLDVYLKE

SEQ ID NO: 4993 - protein, 513 aa, Unknown
  Description of Unknown: Integrase B4994 sequence
  PTHR30461:SF3,SM00857,G3DSA:1.10.10.2600,IPR036162,PF13408, IPR025827,PS51737,G3DSA:3.40.50.1390,IPR006119,IPR038109, PF07508,IPR011109,SSF53041,PTHR30461,Coil, PS51736,cd00338,PF00239
MPTVTVIQPTISEEQNTKIRCAAYCRVSSDSEDQLNSFMAQMRYYSQVFDNSETEELIDIYADEGITGTREDKRDEFQRLMKDCRKGKIDRIYTKSISRFARNTRDCLKNVRELKSLGITIYFEKENIDTANMTDEMMITIMGGLAQEESTSISQNLRWGIKKRMENGTIKMCTPVFGYELVDGNLILKSDEAEIVRQIFDWYLNGYGLAAIAQMLNALKIERFGRTSHWTASTVGVMLRNEKYIGDQLFQKKYTTDTLPFRQVVNKGERDQYYYSDRHKPIISRDDFDKVQNILAEHKKSFKGLKQDHIFAKKIYCGECGSTFKFKCRKNKNYWVCRLHDAESDKCSNKQILEANAISAFIMLCNKLWYNYKQILLPCQAALQDLKLKKFSGKTQVMDIHKEIAKLREQAHVLARLKTKGFLDEAKYLEQTTELTAKINKLQTELKKLTRSDDEDEMLEQIEMLIDFFEKRENIMIDFDESAFENIVEKIVVIDQYELEFHLIGGLKFKENI

SEQ ID NO: 4994 - protein, 513 aa, Unknown
  Description of Unknown: Integrase B4995 sequence
  PTHR30461:SF3,IPR036162,PS51737,IPR011109,PTHR30461, PF00239,G3DSA:1.10.10.2600,IPR006119,PF14287,SSF53041, IPR025378,SM00857,IPR025827,cd03770,IPR038109, PS51736,PF13408,G3DSA:3.40.50.1390,PF07508,Coil
MQENKQNIRFTALYCRLSSDDELKGDSNSIIHQKQILQDYALKNSLTPTEVYVDDGFTGTNFDRPDFKRLLSDVENDLVKTIIVKDLSRFGRNYLKVGYYTEILFPSKGVRFISVSDNLDTSAKDEINDFIPFKNIMNEWYAKDLSRKQRAVIKSKGNAGKRLSTRPIYGYKKAENGDWIIDEPAAIVVRKIFDLYLKGYGPASIANYLFANKVKIPSLTGLQISDKTRNPYRWSKDSVAHILTCQDYCGDMINFKRSDVDNLVIFPDKQEPIISREIFAEAQKLRLSKKPVRHSYSEPVLFSDFLRCADCKNRMYAQRRYKGSTSYTCSTARKVQGCSSHYINENRLSDCVKSEINKLIANKTKVVEFAKAKMHTDAKTAQCASVKNLKNAQTRISEIDAILKNLYEDKVRGNITLETFKKLENEFLREQANLNQTVINQSRIKVNIDSQSKKICEFLRKLEMYKVTIQELSRNVLIDLIDKIEICEAEKENNKRSQQVHIYYLGIGKIDLE

SEQ ID NO: 4995 - protein, 513 aa, Unknown
  Description of Unknown: Integrase B4996 sequence
  PTHR30461:SF3,cd00338,SM00857,G3DSA:1.10.10.2600,IPR036162, PF13408,IPR025827,G3DSA:3.40.50.1390,PS51737,IPR006119, IPR038109,PF07508,SSF53041,IPR011109,PTHR30461, PS51736,Coil,PF00239
MPEVRLITPITRQNTKKMQVAAYCRVSSNSADQLNSYAAQIRAYKKCIGARDDWELVDIFADEGLTGMKSETRDEFQRMIRMCELKQIDLIITKSISRFARNTKDALAYVRKLKLLGVGVQFEKEGISTLSMGDEMLLNTFSALAQEESQSISMNQRLSIVKRMELGEYVDSNAPYGYRLVDKALAVYEPEAAVVRDIFDLYLRGFSISEIGRELKSRNIPTKAGKESWHPYRIAYMLKNERYIGDSFYQKTYRETTVPFNQHINRGQEDRFYAKGTHPGIIDKDVFNAVQQLIQKRKETFSRTTTQNIYPLTSRIQCSECGSFYRRRSVSGTVKWVCALHKDDSTACDSHYYSEERIYDGFITMVNKLRFSEDNILGQVISRLEMTLAAMKRNNLVARDLSNSIAELNAKLLMLEQLRSKGYLAPEVYQAQANEIGAELAKLKDVRQEKFNSKAASMLEEVKKLKMLIFELEEPLEAFDEKLFLEIVKSIQINKEDEMSVEFLGGLRFKERI

SEQ ID NO: 4996 - protein, 513 aa, Unknown
  Description of Unknown: Integrase B4997 sequence
  cd03768,PTHR30461:SF3,SM00857,IPR036162,PF13408, IPR025827,G3DSA:3.40.50.1390,PS51737,IPR006119,PF07508, IPR011109,SSF53041,PTHR30461,PS51736,Coil, PF00239
MIIGIYPRKSVYRDNSESIKVQIKLCKEYAKIVYKGQQIDFRIYGKDEGFSGKNTNRPSFQELMRDVKSNILNVVMVYRLDRISRNVSEFSEMYDIMHAHNVTFLSVKESFDTSTPIGRTVMYILAAFSQFERESTSERVADNMHSLGASGKWTGGKLPAGMSSIRKTVDGKEHSFLVVNDERIGLVKMLYSMYLEGYTITALERYCRDHGFRTESGKFLSTSQIHCILSNPVYCSNGTAAYDYFKGHGHTVPDKLFFDGTKGLVSYGKTKQSEKRIVNDKYTISVGIHEPVIAAEDWIAVQNRFGANKFYRSNKYKVGILKGVLKCNCGARMDIRTYVKNGNQFSYYYCARMAREGKKVCDTGYIRVDTIDDAFISKLMQIKSNPSMIKVRATELDFVDINKIEAELKSIDQAIENLTGALSENSSSTAASHIIKQIEKLDASKVRLESSLYSAMQNNKIAQSEKETKDIIYNYICCLLEKFESMSYQEKNELIKKAVKKCICSNDGLHIIF

SEQ ID NO: 4997 - protein, 513 aa, Unknown
  Description of Unknown: Integrase B4998 sequence
  PTHR30461:SF3,SM00857,G3DSA:1.10.10.2600,IPR036162,PS51737, G3DSA:3.40.50.1390,IPR006119,IPR038109,PF07508,IPR011109, SSF53041,PTHR30461,Coil,PS51736,cd00338, PF00239
MKRPDDYAIYLRKSRKDLDLEALGEGETLARHRTALLELADKKGLKITRIYEEMVSGESIADRPQMQQLLDDVCAGRFAGVLVMEVERLARGNTKDQGEVAEAFSMSNTLIVTPTKTYDPNNEFDEEYFEFGLFMSRREYKTIRRRMQRGLIESIKEGNYVGSLPPYGYDIIRINKKERTLKLNDQSQYVKMMFDWFVNEGLSCGQIANRLTEMGIPTQTGKSEWNRATVKDILQNTLYTGKIRWNRRKVSKEKGSDGRTVKRKRRLTPEDYMVVDGKHPAIVSQEIFDKAQTLFCGQVPLKAQTTITNPFARLMVCKHCGKGISYNTFAHRGGQTKGRMSHRTSLTCKVKSAPYDDVVAAVAAALRDYISDFEFKLNNDEEARKNKQHEEILRSMDVELKKLEQKREKLFDFLESGIYTKQEFMERKGVLSDRIEAMQASIENVKKSLPPPVDYREKILRVSEALSALEDPDVPAKAKNDLLKTVVRKIEYDCADFGRNKGGEVHLDVYLKE

SEQ ID NO: 4998 - protein, 513 aa, Unknown
  Description of Unknown: Integrase B4999 sequence
  PTHR30461:SF3,cd00338,SM00857,G3DSA:1.10.10.2600,IPR036162, PF13408,PS51737,G3DSA:3.40.50.1390,IPR025827,IPR006119, IPR038109,PF07508,IPR011109,SSF53041,PTHR30461, PS51736,Coil,PF00239
MLRAALYARYSSDNQRYESITAQLRASREYCKQRGYIVVKTYTDEAISGTSVAGRDAFQQMILDSSDDIFDVVIFHKIDRNARDEIDYYTNVDRLRKNGVRYEYSAEGIDVTTTNGKLTEGIKVAVAAWYSRNLAQEVRKGQKENALQAKFNGGRPPLGYKIVNQRYEIEPREAEAVRLIFDMYLHGSGYIDIAAELNRRGFVTRNGKPFAKNSLYEILGNERYTGTYIFNRIVTDDFGRRNNHKINDAAIKIPGAIPAIIDEETFAAVARRRELNKRRSSVFRAEERYLLSGKIICGECGSHLCGHRVKSRGQCYSYYCCSRRKLPVEVKCSMRMIQKKPLEDAVCEGILNMILLPDTRKTIIEEMQKGYGEFNDDIENKRRELSNEKVRAERKLSNLYRIIEDGDVDDFDLDRLKNAKAEVLAIRQELEKLPCEKFPPLAVQQINAAFDAFAVAVSNGEEKARQAVINFFLEQVVVMPENVEVFLNVSPCENFSVALPSPHLHQMLCSRTF

SEQ ID NO: 4999 - protein, 513 aa, Unknown
  Description of Unknown: Integrase B5000 sequence
  PTHR30461:SF3,cd00338,SM00857,G3DSA:1.10.10.2600,IPR036162, PF13408,IPR025827,G3DSA:3.40.50.1390,PS51737,IPR006119, IPR038109,PF07508,IPR011109,SSF53041,PTHR30461, PS51736,Coil,PF00239
MPEVRLITPITRQSTKKMQVAAYCRVSSNSADQLNSYAAQIRAYKKYIGARDDWELVDIFADEGLTGMKSETRDEFQRMIRMCELKQIDLIITKSISRFARNTKDALAYVRKLKLLGVGVQFEKEGISTLSMGDEMLLNTFSALAQEESQSISMNQRLSIVKRMELGEYVDSNAPYGYRLVDKALAVYEPEAAVVRDVFDLYLRGFSISEIGRELKSRNIPTKAGKESWHPYRIAYMLKNERYIGDSFYQKTYRETTVPFNQHINRGQEDRFYAKGTHPGIIDTDVFNAVQQLIQKRKETFSRTTTQNIYPLTSHIQCSECGSFYRRRSVSGTVKWVCALHKDDSTACDSHYYSEERIYDGFITMVNKLRFSEDNILGQVISRLEMTLAAIKRNNLAARDLSKSIAELNAKLLMLEQLRSKGYLAPEVYQAQANEIGAELARLKDVRQEKFNSKAASMLEEVKKFKMLIFELEEPLEAFDEKLFLEIVKSIQINKEDEMSVEFLGGLRFRERI

SEQ ID NO: 5000 - protein, 513 aa, Unknown
  Description of Unknown: Integrase B5001 sequence
  PTHR30461:SF3,SM00857,G3DSA:1.10.10.2600,IPR036162,PF13408, IPR025827,G3DSA:3.40.50.1390,PS51737,IPR006119,IPR038109, PF07508,SSF53041,IPR011109,PTHR30461,Coil, PS51736,cd00338,PF00239
MLKTDMTNEKSTAVIYARFSSDKQREESIEGQIRECTQFAKDQNLEIIATYIDRALSARSDNRPDFLRMIADSSKGLFQYVIVYQLDRFSRSRYDSAVYKHKLKKNGVRVLSAKERIGDDPSSIILESMLEGYAEYYSAELSQKVKRGMTENVLEHKWTGGYVPLGYSLAPDKTLQIDPSGAEAVKIIYEKWLSGYRIMDIIRYLNEHNYVTSRKSKFRYNSLNRILTNPIYTGLYRWGTIEVADYAPAIITQKQFALAQEKIHHIKAHPRAKRRSAAYALTGIIYCGVCGSPMTGQSGHSKSGALYHYYRCSTKNNYHDRGKKLNVKCTNRNISREKLEDLVLQTTINILMNPEAVRMIAKQAVAAQEKDPAATEIDRIKEDKKLIQKKLSNSIKAVEAGIISTTLAVNISQYEKEIADLDIKMEKIKLSSTPVKIDEIAVEFFLKNLLLQKKEHDKYRLDMFQTFIRRVIVYPDKVEIQYNYTATPILENPVIKMMTGNPGCSRCERLVTR

SEQ ID NO: 5001 - protein, 513 aa, Unknown
  Description of Unknown: Integrase B5002 sequence
  PTHR30461:SF3,SM00857,G3DSA:1.10.10.2600,IPR036162,PF13408, IPR025827,G3DSA:3.40.50.1390,PS51737,IPR006119,IPR038109, PF07508,IPR011109,SSF53041,PF00239,PTHR30461, PS51736,Coil,cd00338
MLYAIYLRKSRADLEAEAMGQGETLARHRAALLDYAAHHGLEIGAVYEEIISGESIDARPKMKQLLREVEQGRWAGVLCMDIDRLARGNSADQARVSNTFRISGTLIITPSKVYDQSRESDEEYVDFELFMARREYKAISRRIMRGRIASVKEGHFIGSTPPYGYDKVKVEKGRGFTLLPNSESDTVKQIYSMCISGMGCNAIARRLDMMGVTPRKGSSWSSASIQDILKNPVYCGKIRWQYRKEEKSLTDGIVTTHRRENPDCIIAQGLHPALISEEEFEKAQQFLNSRRIPHKKENTELRNPLSGLVYCGMCGSMMTRLGTGSRNHSDTLRCPNRNCGNVSAKLELVESALVEGVARWLNDCRVNVSRKPAADTAKAERTAAEKVRAELAKLDSQREKIYSFLEQGVYSAGEFRERMESLEKRRTQLSENLRQAEQAVSEAEGNRQLYAQIIPSVERVMDIYAQSTPEEKNRLLKTIISRAEYIKTERNTRGNADRCNFTLNVTPLFPETD

SEQ ID NO: 5002 - protein, 513 aa, Unknown
  Description of Unknown: Integrase B5003 sequence
  SM00857,G3DSA:1.10.10.2600,IPR036162,PF13408,IPR025827, G3DSA:3.40.50.1390,PS51737,cd03770,IPR006119,PF14287, PF07508,IPR011109,IPR038109,SSF53041,PTHR30461, PS51736,IPR025378,PF00239
MQENKQNLRFTALYCRLSSDDELKGDSNSIIHQKQILQDYALKHSLTPTEIYVDDGFTGTNFDRPDFKRLLSDVENDLVKTVIVKDLSRLGRNYLKVGYYTEVLFPEKGVRFISIADNLDTSVNDELNDFIPFKNIMNEWYAKDLSRKQRAVVKSKGNSGIRLATRPLYGYKKAENGDWLIDEPTAAVVQKIFDLYLKGYGPVSIANYLFANKVKIPSTIGLPKLNPEQNPYRWSKDTVAKILTCQDYCGDMINFKRSDVDSLVIFHDRQEPIISREIFAEAQKLRLDRKPVRHDYSEPVLFSDLLLCADCKSRMYAQRRYHGTTSYSCSKARKTQGCTSHYINENKLIDCVKSDINKLIKNKGIVIKLAKEKMHIDTKTAQCANSQNLKNAKKRILQIDTILKNLYEDKVLGNINLATFKKLESDYLREQAELNKVIFEQSKIKVNLENRSKSICGFLKKLESYNNPVSELSRDLLIDLIDKIEICEATKNGNERSQQVHIYYKEIGKINLE

SEQ ID NO: 5003 - protein, 513 aa, Unknown
  Description of Unknown: Integrase B5004 sequence
  PTHR30461:SF3,SM00857,G3DSA:1.10.10.2600,IPR036162,PF13408, IPR025827,PS51737,G3DSA:3.40.50.1390,IPR006119,IPR038109, PF07508,IPR011109,SSF53041,PF00239,PTHR30461, PS51736,Coil,cd00338
MLYAIYLRKSRADLEAEAMGQGETLARHRAALLDYAAHHGLEIGAVYEEIISGESIDARPKMKQLLREVEQGRWAGVLCMDIDRLARGNSADQARVSNTFRISGTLIITPSKVYDQSRESDEEYVDFELFMARREYKAISRRIMRGRIASVKEGHFIGSTPPYGYDKVKVEKGRGFTLLPNSESDTVKQIYSMCISGMGCNAIARRLDMMGVTPRKGSSWSSASIQDILKNPVYCGKIRWQYRKEEKSLTDGIVTTRRRENPDCIIAQGLHPALISEEEFEKAQQFLNSRRIPHKKESTELRNPLSGLVYCGMCGSMMTRLGTGSRNHSDTLRCPNRNCGNVSAKLELVESALVEGVARWLNDCRVNVSRKPAADTAKAERTAAEKVRAELAKLDSQREKIYSFLEQGVYSAGEFRERMESLEKRRTQLSENLRQAEQAVSEAEGNRQLYARIIPRVERVMDIYAQSTPEEKNRLLKTIISRAEYIKTERNTRGNADRCNFTLNVTPLFPETD

SEQ ID NO: 5004 - protein, 513 aa, Unknown
  Description of Unknown: Integrase B5005 sequence
  PTHR30461:SF3,SM00857,G3DSA:1.10.10.2600,IPR036162,PF13408, IPR025827,G3DSA:3.40.50.1390,PS51737,IPR006119,IPR038109, PF07508,IPR011109,SSF53041,PTHR30461,Coil, PS51736,cd00338,PF00239
MKKQPTGGNRLVAYYRYSGGSHQTEQSIEGQRRDCETYARIHGMVILHEYIDRHISGKTDDRPEFQQMIADAGKGMFDYVICWKTDRIARSRYDSIVYKKKLRDNGVELLYAAEANVEGSGGIIVEGLMEALAEYYSAELAEKVRRGMRESALKGKAIGSSRPLGLTVDKDKKYIIDPAGAAAVRYIFEQYAAGAASSAIVAHLNEQGLCTSRGNPFNKSSVVRIIQNEVYRGVYVSPKFDVRIEGAVPAIIDDDLWERAQKMFIRNRQSRSPRNDRADYILSGKLFCGECGTAMKGVSGHSSNGEVYFYYNCPCKDCHRRNIPKDELEGLVIRTVCNDVLQPDVMDRIADSVIEAQTAELNQPNPEKEALQHELADVQRKAKNLLAALENGTAGAMLTNRLAELEQQADTLSYQLSSLESEPKFPVFSKEEVLYLLEQFLIAPSEKTKTYRRRLIDTFVSKIEVSSTELTIYFNIAEEDCGKMKKAPQSNQPEGCSTEKQMVRVARIELTAS

SEQ ID NO: 5005 - protein, 513 aa, Unknown
  Description of Unknown: Integrase B5006 sequence
  PTHR30461:SF3,cd00338,SM00857,G3DSA:1.10.10.2600,IPR036162, PF13408,PS51737,G3DSA:3.40.50.1390,IPR025827,IPR006119, IPR038109,PF07508,IPR011109,SSF53041,PTHR30461, PS51736,Coil,PF00239
MAKAKQKAATNDISKLAVIYARYSSHNQTEQSIEGQLAAGHRYADLKGYTVVHEYIDRAMTGRNDNRDDFQKMLSDTSKKQFGAIIVWKVDRFGRNREEITFNKYRCKKNGVRVEYVAENLPDSPEGVILESVLEGMAEYYSLQLSQNVQRGLLESAKKHQVIGGNVPLGLMMDAHKKYVPDLKTAPTVKLIFDMYAEGSTTSEIINHLNSIGMRTKAGKPFTKSSLTTVLKNEKYIGVYKYKDIIRDEGVIPPIVDKEIFYKVQELLKVNRRMPSHKWSYSDYILTDKLFCGKCGTAMVGESGFGKMGVKYSYYICAKRRKDKTCDKKPVRQEWIEEIVLQRVQGILQNEELLEFIAENTWQYYLAQDESMEKLKGLQTELDKVEKSAANLMKAIEAGIFNDMTKARMDELDDQRAVIKKAMAEIEIEKGFKLTKDHILYFLEQFKKLDYKDRDCQRRLIDVFVNSIFVYDDKLRIAFNFGGSDSTITLNEVDKADRGEGFVCCASCPVIKP

SEQ ID NO: 5006 - protein, 513 aa, Unknown
  Description of Unknown: Integrase B5007 sequence
  cd00338,SM00857,G3DSA:1.10.10.2600,IPR036162,PF13408, IPR025827,PS51737,G3DSA:3.40.50.1390,IPR006119,IPR038109, PF07508,IPR011109,SSF53041,PTHR30461,PS51736, Coil,PF00239
MTQRTAVLYARYSSDKQREASIDDQLRVCRYYCKAEGIEVVAEYKDYALSGKTDHRPEFRRMIANAPESDYVVVYMFDRFSRDRYDSATYKKMLRECGVRVLSASEKVEDTPEGGLQEGMLELLSEYYVRDLARKVRRGMEGNALKARDNGYRIFGYSTDPETRCYVINEAEANAVREMFSMHISGNSVNSIAREMASRGWTTTTGKPVDYNWAWRVLNRRAYTGLYSWGGIEVPGGMPQIIDEVTFARSQAVVPRKRRKDENWDVYRLTGKLFCGFCGNPMHGTAGTGKKGKRYHYYACREGDGCKRPWVRRELLEDSIADAVLETCSDEGRMRMLARRIVEAYAEPGEEEAEMAAIEAQIASLEREQHNMTQAAMKGFVTDEMVARNDEIKVQMKNLHNRHGVLASQMCEITEDDIVGYMMHGFNRDDEDFIFGSIVREAYLFDDCVLLVFNFRDEVGDLTEIRVALQAQKKCEPGEGFALCSRGVPGEEFPEPISLPGGFGLIIPLRRAA

SEQ ID NO: 5007 - protein, 513 aa, Unknown
  Description of Unknown: Integrase B5008 sequence
  PTHR30461:SF3,SM00857,G3DSA:1.10.10.2600,IPR036162,PF13408, IPR025827,G3DSA:3.40.50.1390,PS51737,IPR006119,IPR038109, PF07508,SSF53041,IPR011109,PTHR30461,Coil, PS51736,cd00338,PF00239
MNKRTGIYGRYSDTKQDDGFSIEYQLTECQAYLDKNSMPLTKAYIDQAITGTKVAGREAFHELIHDVKNGLIDVVVVYKYSRIFRNAYESHKYRKLFKKHGVKLISVTQTVDDETSSGQLMIGVMANIDEYQSAVISDHVKSAMREMVSEGFFAGGTVPYGYKLEVIQHGKKVRKKYVPDEFESKIVNKIFELYADNYSLRYLQTYLKDNGAFTRRGKYFSIQTIARMLRNDFYIGILRYSAQGHEPIVVHDIIPPIIDKELWDRVQYRHSRQKDVRPRKRKDLYALTGKIKCANCGSHYFGIRSGSTQNGKKYDYKYYVCSQSKDYHTCSCKRIRKDYLEGITMREIKRHILNEKSIYSIANEMLKILGENPTEQKSKLKQLKSRSSSLKSEMKELIDLRAKKIVSDSFLAEHIKEKETELQEIEQQIYNIERQTKSTLTHSMIVDYLNKMLSISDDTDDEVLKTIFDKFVDSIVVSDESIDITLIVSPHGDLEYNASLRQPKLSYYSKMNR

SEQ ID NO: 5008 - protein, 513 aa, Unknown
  Description of Unknown: Integrase B5009 sequence
  PTHR30461:SF3,SM00857,G3DSA:1.10.10.2600,IPR036162,PF13408, IPR025827,G3DSA:3.40.50.1390,PS51737,IPR006119,IPR038109, PF07508,IPR011109,SSF53041,PF00239,PTHR30461, PS51736,Coil,cd00338
MYLVAYARYSSDNQREESITAQLRAIHNWANANGHVIVKEYVDEALSARTDKRPNFLKMIEDSKIEDWNGVVVHKLDRFSRNRYNSAVYKKTLKDNNKKLFSVLEKLDDSPESIIMEAMLEGLSEYYSANLAREVKKGLTENALDCKHNGGIPPLGYSVKDSHYVVDKRESEIIKLIFNMYKTNHSYVEICSELNLRGYKTKRNKNFSKNSIHDILVNEKYIGNYTFGYGNRAKKRGQPNPDMIKIEGGMPAIIDKDTFFIVQEKMKGRKHMGGSYKAKQVYLLSGLIKCGICNEKYVGARKNKYWSVYECSGHKKGMCENKAIKKEEIEKIVVDELKVKINGLFNNVELLEKVNTKYKELHNDTENNLKIEEEKLSNVQTQINNINNAILDGFYSPEMKDKMKLLQSEKEFIERSIYLIRNISEKDEITSADINNILNTDLLKLESDNLNNIKEIIQKYIKEIIITPENINIKVVLDNTNITGDRDVCGSPPPKFEKRTAIILNLAVLFFFI

SEQ ID NO: 5009 - protein, 513 aa, Unknown
  Description of Unknown: Integrase B5010 sequence
  PTHR30461:SF3,cd00338,SM00857,G3DSA:1.10.10.2600,IPR036162, PF13408,PS51737,IPR025827,G3DSA:3.40.50.1390,IPR006119, IPR038109,PF07508,IPR011109,SSF53041,PTHR30461, PS51736,Coil,PF00239
MRVVLYMRYSSDRQTEQSIEGQNRVCTAFCEQQGYEIVDRYIDRATSAFKDTDKRTEFQRMIRDSEKQLWEGIVVYKLDRFARNRYDSATYKARLKKNGVRVISATENISDNPEGVILEAVLEGMAEFYSKELSQKITRGMFESANKCHSIGGHIPLGYKIENKKLVIDEAGAAIVREAFNLYANGATVAEICETFNTKGYRTAKNAEFNKNSFRSMFKNERYIGIYKYKDLRIEGGVPAIVDKDTFAIVQKKLSKNAEAPSRGKAKIDYLLSQKLFCGHCGSLMTGESGTGKGGTTYFYYTCGKRKREHTCDKKPLRKDFIERAVVEDALTLLTPETIEELADIAVNESVREMEENSIIPALKDQLHETERSINNLVKMVEKGVESDTIADRLKELEKEKRAIEKRLVVAQDDCVILEKEHIVWWLSDFCNGDIDDEEFRRHIIDLLVNSVTVWDEPDGWYKITSVYNLTSNKTKTFRCSDLSGQAPPLKDNPNTLFFIGTLFGQTTKHRVE

SEQ ID NO: 5010 - protein, 513 aa, Unknown
  Description of Unknown: Integrase B5011 sequence
  PTHR30461:SF3,SM00857,G3DSA:1.10.10.2600,IPR036162,PF13408, IPR025827,G3DSA:3.40.50.1390,PS51737,IPR006119,IPR038109, PF07508,IPR011109,SSF53041,PTHR30461,Coil, PS51736,cd00338,PF00239
MMQQALNAVIYARYSSHNQTEQSIEGQLRDCYAFAEREGLQVVSEYIDRAITGRTDERPDFQRMIADARKQEFQRVIVWKFDRFSRDRYDSAIYKHKLKQCGVRVLSAMENVGEGDVSIILEALLEASAEQYSLDLSKKVLRGQRESRLKGTFLGGLTPIGYKLENRKLVADERTAPIVRYIFEQYAKGTSKQDIINELATRGILNRHGKPLSHSTLQTILKNKKYIGVYTHGGQDVAGGCEALIDEKTFLKVQEQLSKRKHAPAASKAVIEYLLQGKLYCGYCGFNMFGDSGRGRNGSTYRYYACRRRKKERDCKKKNEKKDFIEWYVVEQTVEYVLTPERIEYIASELVAQYKKDCGIDRIKAYEKQLDRIKAEISRLVDTLAVCPAAARQPIFDKMEQLDAEKQEAELDLSKLRISAKIQISKEHIADWLKQFCNGDALDVDFQKRIIDTFINSVYLYDDKVIIYYNIEGGKQVSYIDMIDSTEEPPFSDDAPGSSGGSDLKRPALRLCC

SEQ ID NO: 5011 - protein, 513 aa, Unknown
  Description of Unknown: Integrase B5012 sequence
  PTHR30461:SF3,cd00338,SM00857,G3DSA:1.10.10.2600,IPR036162, PF13408,PS51737,IPR025827,G3DSA:3.40.50.1390,IPR006119, IPR038109,PF07508,IPR011109,SSF53041,PTHR30461, PS51736,Coil,PF00239
MPEVRLITPITRQNTKKMQVAAYCRVSSNSADQLNSYAAQIRAYKKCIGARDDWELVDIFADEGLTGMKSETRDEFQRMIRMCELKQIDLIITKSISRFARNTKDALAYVRKLKLLGVGVQFEKEGISTLSMGDEMLLNTFSALAQEESQSISMNQRLSIVKRMELGEYVDSNAPYGYRLADKMLTVYEPEAGIVRNIFALYLQGFSTSEIARELNKLNIPTKAGKEIWRPSRVAYILKNERYIGDSFYQKTYRETTVPFNQHPNRGQEDRFYAKGTHPGIVEKDVFDAAQTLIEKRKDVFAKATTQNIYPLTSRIQCSECGSFYRRRIVSGTVKWVCSLHKDDSMACDSNYYSEERIYDGFISMVNKLRFSEDNILGQVISRLEMTLAAMKRNNLAARDLSKSIAELNAKLLMLEQLRSKGYLAPEVYQAQANEISAELAKLKDVRQEKFNSKAAIMLEEIKKLKMLIFELEEPLEAFDEKLFLEIVKSIQINKEDEMSVELLGGLRFRERI

SEQ ID NO: 5012 - protein, 513 aa, Unknown
  Description of Unknown: Integrase B5013 sequence
  PTHR30461:SF3,cd00338,SM00857,G3DSA:1.10.10.2600,IPR036162, PF13408,PS51737,IPR025827,G3DSA:3.40.50.1390,IPR006119, IPR038109,PF07508,IPR011109,SSF53041,PTHR30461, PS51736,Coil,PF00239
MPEVRLITPITRQSTKKMQVAAYCRVSSNSADQLNSYAAQIRAYKKCIGARDDWELVDIFADEGLTGMKSETRDEFQRMIRMCELKQIDLIITKSISRFARNTKDALAYVRKLKLLGVGVQFEKEGISTLSMGDEMLLNTFSALAQEESQSISMNQRLSIVKRMELGEYVDSNAPYGYRLVDKMLTVYEPEAGIVRNIFALYLQGFSTSEIARELNKLNIPTKAGKEIWRPSRVAYILKNERYIGDSFYQKTYRETTVPFNQHPNRGQEDRFYAKGTHPGIVEKDVFDAAQILIEKRKDVFAKATTQNIYPLTSRIQCSECGSFYRRRIVSGTVKWVCSLHKDDSTACDSNYYSEERIYDGFISMVNKLRFSEDNILGQVISRLEMTLAAMKRNNLAARDLSKSIAELNAKLLMLEQLRSKGYLAPEVYQAQANEISAELAKLKDVRQEKFNSKAAIMLEEVKKLKMLIFELEEPLDAFDEKLFLEIVKSIQINKEGEMSVELLGGLRFRERI

SEQ ID NO: 5013 - protein, 513 aa, Unknown
  Description of Unknown: Integrase B5014 sequence
  PTHR30461:SF3,cd00338,SM00857,G3DSA:1.10.10.2600,IPR036162, PF13408,IPR025827,G3DSA:3.40.50.1390,PS51737,IPR006119, IPR038109,PF07508,SSF53041,IPR011109,PTHR30461, PS51736,Coil,PF00239
MRVVLYMRYSSDRQTEQSIEGQNRVCTAFCEQQGYEIVDRYIDRATSAFKDTDKRTEFQRMIRDSEKQLWEGIVVYKLDRFARNRYDSATYKARLKKNGVRVISATENISDNPEGVILEAVLEGMAEFYSKELSQKITRGMFESANKCHSIGGHVPLGYKIENKKLVIDEAGAAIVREAFDLYANGATVAEICETFNTKGYRTAKNAEFNKNSFRSMFKNERYIGIYKYKDLRIEGGVPAIVDKDTYAIVQKKLSKNAEAPSRGKAKIDYLLSQKLFCGHCGSLMTGESGTGKGGTTYFYYTCGKRKREHTCDKKPLKKDFIERAVVEDALTLLTPETIDELADIAVNESIREMEENSIIPALKDQLHETERSINNLVKMVEKGVESDTIADRLKELEKEKRALEKRLVVAQDDYVILEKEHIVWWLSDFCNGDIEDEEFRRHIIDLLVNSVTVWDEPDGWYKITSVYNLTSNKTKTFRCSDLSGQAPPLKDNPNTLFFIGTLFGQTTKHRVE

SEQ ID NO: 5014 - protein, 513 aa, Unknown
  Description of Unknown: Integrase B5015 sequence
  PTHR30461:SF3,cd00338,SM00857,G3DSA:1.10.10.2600,IPR036162, PF13408,PS51737,IPR025827,G3DSA:3.40.50.1390,IPR006119, IPR038109,PF07508,IPR011109,SSF53041,PTHR30461, PS51736,Coil,PF00239
MCAKKKPAMLEPDMQDAVIYTRYSSHNQRDCSIEQQVADCEIFARQNNLRVVKVYADRHLSGTTDNRPQFQQMLKDASHGHWAYVICWKIDRFARNRYDSATYKFRLKKAGVRVLYAKESIPDGPEGILLESVLEGSAEYYSAALAQNIRRGMKYNAEQCKVNSGSIPFGYCKGPDGRFAIHEANAEVVREIFRKAAAGMPFVDIANDLNSRGLKTSRGGRWNKGSFRLLMNEAYIGVYHFSDTRIEGGMPALIDQGTFWAANERLKANSSVRGRHQDGGDYLLTGKLKCAHCGSYMIGFSGTGKSGELHYYYGCQKRRRERACKKANVPREWIERVVVKAALDYVLRPDVMEWIADAVMEYQEREAASAQLAALTAELEENQKATDNVMKAIEAGIITSTTKQRLLDLEAKAQDLKRAIELEKLSHVRLERDQVLFWLDRFRGGSLQSQEFRRKVIDAFVSVVYLSDDHLRIAFNYSGGPNAEADFDLVMDAEAAAGELSKKFAQGHVTSIQ

SEQ ID NO: 5015 - protein, 513 aa, Unknown
  Description of Unknown: Integrase B5016 sequence
  PTHR30461:SF3,SM00857,G3DSA:1.10.10.2600,IPR036162,PF13408, IPR025827,PS51737,G3DSA:3.40.50.1390,IPR006119,IPR038109, PF07508,IPR011109,SSF53041,PF00239,PTHR30461, PS51736,Coil,cd00338
MPTVTVIQPTLTEEKTAKIRCAAYCRVSSDSEDQLNSFMAQTRYYSQLFEDSKAEELIDIYADEGITGTREDKRGEFQRMMKDCRRGKIDRIYTKSISRFARNTKDCLKNVRELKSLGITIFFEKENIDTAKMTDEMMITIMGGLAQEESTSISQNLRWGIKKRMENGDFNPASLPFGYRRKNKTVVINKTEADIVREIFDKYLCGVGMESIADELNRKHIDKNNKGFIWCKNTIKYLLKNEKYTGKSIFRKFYTTESFPFKQRKNNGELEQYLVENTMPIIISEEKFNKVQKLIKGRKINCEIENISYILSGKMKCKSCGSAYRRKKINGDINWVCTKHNLNAKDCPQKAILQSTIYSSFIRLFNKLWYNYKDILLPLHTALQNLKLRKFSGQAQVMEVRKEIAKLREQSHVLARLKTKGFLDEAKYIEQTAELTAKINKLQTELKKLTRSDNEDETLNQIEMLIDFFEKQDDPITKFEESEFESIVDKIVVINQHELEFHLIGGLKFKEKI

SEQ ID NO: 5016 - protein, 513 aa, Unknown
  Description of Unknown: Integrase B5017 sequence
  PTHR30461:SF3,cd00338,SM00857,G3DSA:1.10.10.2600,IPR036162, PF13408,IPR025827,G3DSA:3.40.50.1390,PS51737,IPR006119, IPR038109,PF07508,SSF53041,IPR011109,PTHR30461, PS51736,Coil,PF00239
MPEVRLITPITRQSTKKMQVAAYCRVSSNSADQLNSYAAQIRAYKKCIGARDDWELVDIFADEGLTGMKSETRDEFQRMIRMCELKQIDLIITKSISRFARNTKDALAYVRKLKLLGVGVQFEKEGISTLSMGDEMLLNTFSALAQEESQSISMNQRLSIVKRMELGEYVDSNAPYGYRLVDKALAVYEPEAAVVRDIFDLYLRGFSISEIGRELKSRNIPTKAGKESWHPYRIAYMLKNERYIGDSFYQKTYRETTVPFNQHINRGQEDRFYAKGTHPGIIDKDVFNAVQQLIQKRKETFSRTTTQNIYPLTSRIQCSECGSFYRRRSVSGTVKWVCALHKDDSAACDSHYYSEERIYDGFITMVNKLRFSEDNILGQVISRLEMTLAAMKRNNLVARDLSNSIAELNAKLLMLEQLRSKGYLAPEVYQAQANEIGAELAKLKDVRQKKFNSKAASMLEEVKKLKMLIFELEEPLEAFDEKLFLEIVKSIQINKEDEMSVEFLGGLRFRERI

SEQ ID NO: 5017 - protein, 513 aa, Unknown
  Description of Unknown: Integrase B5018 sequence
  SM00857,G3DSA:1.10.10.2600,IPR036162,PF13408,PS51737, G3DSA:3.40.50.1390,IPR025827,IPR006119,IPR038109,PF07508, IPR011109,SSF53041,PF00239,PTHR30461,PS51736, Coil,cd00338
MLYAIYLRKSRADLEAEAMGQGETLARHRAALLDYAAHHGLEIGAVYEEIISGESIDARPKMKQLLREVEQGRWAGVLCMDIDRLARGNSADQARVSNTFRISGTLIITPSKVYDQSRESDEEYVDFELFMARREYKAISRRIMRGRIASVKEGHFIGSTPPYGYDKVKVEKGRGFTLLPNSESDTVKLIYSLCISGMGCNAIARRLDTMGVTPRKGSSWSSASIQDILKNPVYCGKIRWQYRKEEKSLTDGIVTTHRRENPDCIIAQGLHPALICEEEFDQAQQFLNSRRIPHKKESTELRNPLSGLVYCGMCGSMMTRLGTSSRNHSDTLRCPNRNCSNVSAKLELVESALVEGVARWLNDCRVNVSRKPAADTAKAERTAAEKVRAELAKLDSQREKIYSFLEQGVYSAGEFRERMESLEKRRTQLSENLRQAEQAVSEAEGNRQLYAQIIPSVERVMDIYAQSTPEEKNRLLKTIISRAEYIKTERNTRGNADRCNFTLNVTPLFPETD

SEQ ID NO: 5018 - protein, 513 aa, Unknown
  Description of Unknown: Integrase B5019 sequence
  PTHR30461:SF3,SM00857,G3DSA:1.10.10.2600,IPR036162,PF13408, PS51737,IPR025827,G3DSA:3.40.50.1390,IPR006119,IPR038109, PF07508,IPR011109,SSF53041,PTHR30461,Coil, PS51736,cd00338,PF00239
MMQQALNAVIYARYSSHNQTEQSIEGQLRDCYAFAEREGLQVVGEYIDRAITGRTDERPDFQRMIADARKQEFQRVIVWKFDRFSRDRYDSAIYKHKLKQCGVRVLSAMENVGEGDVSIILEALLEASAEQYSLDLSKKVLRGQRESRLKGTFLGGLTPIGYKLENRKLVADERTAPIVRYIFEQYAKGTSKQDIINELATRGILNRHGKPLSHSTLQTILKNKKYIGVYTHGGQDVAGGCEALIDEKTFLKVQEQLSKRKHAPAASKAVIEYLLQGKLYCGYCGFNMFGDSGRGRNGSTYRYYACRRRKKERDCKKKNEKKDFIEWYVVEQTVEYVLTPERIEYIASELVAQYKKDCGIDRIKAYEKQLDRIKAEISRLVDTLAVCPATARQPIFDKMEQLDAEKQEAELDLSKLRISAKIQISKEHIADWLKQFCNGDALDVDFQKRIIDTFINSVYLYDDKVIIYYNIEGGKQVSYIDMIDSTEEPPFSDDAPGSSGGSDLKRPALRLCC

SEQ ID NO: 5019 - protein, 513 aa, Unknown
  Description of Unknown: Integrase B5020 sequence
  PTHR30461:SF3,SM00857,G3DSA:1.10.10.2600,IPR036162,PF13408, PS51737,G3DSA:3.40.50.1390,IPR025827,IPR006119,IPR038109, PF07508,IPR011109,SSF53041,PTHR30461,Coil, PS51736,cd00338,PF00239
MPEALNAVIYARYSSDRQTEQSIEGQLRECYVFAKANDIAVIDTYIDRAISGKTDNRPAFQKMIEDSAKRQFQAVIVYRLDRFTRNRYDSAIYKARLKKNGVKVLSAMENLNGSPESIIMESLLEGMAEYYSVELSQKITRGMRENALKGKALGGQRVLGYKVNSDCYFEIDETTAPVVVDIFKLYSSGKTVKEICDILNARGVKTARGGAFNKNSLHTILTNKKYIGIYKTKYGEIVGGIPAIIDKELFEMVALRMEQNKKAPARAKAEINYLLSTKLFCGKCRSAMVGESGTSKTGKKYYYYACVKKKREKACDKSNVKKDWIEDLVIQRTVTDILKDDVIEKIADRLVELQKAEAAESGTMLYLQNSLADIQVSIKNIMTAIEKGIITESTKTRLTELEDEKRNVEIEIAKESIARRIISREQIIYWISSFKDGDISSEKYRQQLIDTFVHAVFVYDDKIVITYNYSGENNTATISDLDLSSPPSSCTKKDAAAKSLEVSTTSGLFCAHF

SEQ ID NO: 5020 - protein, 513 aa, Unknown
  Description of Unknown: Integrase B5021 sequence
  PTHR30461:SF3,cd00338,SM00857,G3DSA:1.10.10.2600,IPR036162, PF13408,IPR025827,G3DSA:3.40.50.1390,PS51737,IPR006119, IPR038109,PF07508,IPR011109,SSF53041,PTHR30461, PS51736,Coil,PF00239
MKKKPIEPEMQDAVIYTRYSSHNQRDCSIEQQVADCEIFARQNNLRVVKVYADRHLSGTTDNRPQFQQMLKDASHGHWAYVICWKIDRFARNRYDSATYKFRLKKAGVRVLYAKESIPDGPEGILLESVLEGSAEYYSAALAQNIRRGMKFNAEQCKVNSGSIPFGYCKGPDGRFAVHEANAEVVREIFRKAAAGMPFVDIANDLNSRGLKTSRGGRWNKGSFRLLMNEAYIGVYHFSDTRIEGGMPALIDQGTFWAANERLKANSSVRGRHQDGGDYLLTGKLKCAHCGSYMIGFSGTGKSGELHYYYGCQKRRRERACKKANVPREWIERVVVKAALDYVLRPDVMEWIADAVMEYQEREAASAQLAALTAELEENREATDNVMKAIEAGIITSTTKQRLLDLEAKAQDLKRAIELEKLSHVRLERDQILFWLDRFRGGSLQSQEFRRKVIDAFVSVVYLFDDHLRIAFNYSGGSNAEADFDLVMDAEAAAGELSKKFAQGHVASTSTKAI

SEQ ID NO: 5021 - protein, 513 aa, Unknown
  Description of Unknown: Integrase B5022 sequence
  PTHR30461:SF3,SM00857,G3DSA:1.10.10.2600,IPR036162,PF13408, IPR025827,PS51737,G3DSA:3.40.50.1390,IPR006119,IPR038109, PF07508,IPR011109,SSF53041,PTHR30461,Coil, PS51736,cd00338,PF00239
MIQQALNAVIYARYSSHNQTEQSIEGQLRDCYAFAEREGLQVIGEYIDRAITGRTDERPDFQRMIADARKQEFQRVIVWKFDRFSRDRYDSAIYKHKLKQCGVRVLSAMENVGEGDVSIILEALLEASAEQYSLDLSKKVLRGQRESRLKGTFLGGLTPIGYKLENRKLVADERTAPIVRYIFEQYAKGTSKQDIINELATRCILNRHGKPLSHSTLQTILKNKKYIGVYTHGGQDVAGGCEALIDEKTFLKVQEQLSKRKHAPAASKAVIEYLLQGKLYCGYCGFNMFGDSGRGRNGSTYRYYACRRRKKERDCKKKNEKKDFIEWYVVEQTVEYVLTPERIEYIASELVAQYKKDCGIDRIKTYEKQLDRIKAEISRLVDTLAVCPAAARQPIFDKMEQLDAEKQEVELDLSKLRISAKIQISKEHIADWLKQFCNGDALDVDFQKRIIDTFINSVYLYDDKVIIYYNIEGGKQVSYIDMIDSTEEPPFSDDAPGSSGGSDLKRPALRLCC

SEQ ID NO: 5022 - protein, 513 aa, Unknown
  Description of Unknown: Integrase B5023 sequence
  PTHR30461:SF3,cd00338,SM00857,G3DSA:1.10.10.2600,IPR036162, PF13408,PS51737,G3DSA:3.40.50.1390,IPR025827,IPR006119, IPR038109,PF07508,IPR011109,SSF53041,PTHR30461, PS51736,Coil,PF00239
MAKAKQKAATNDISKLAVIYARYSSHNQTEQSIEGQLAAGHRYADLKGYTVVHEYIDRAMTGRNDNRDDFQKMLSDTSKKQFGAIIVWKVDRFGRNREEITFNKYRCKKNGVRVEYVAENLPDSPEGVILESVLEGMAEYYSLQLSQNVQRGLLESAKKHQVIGGNVPLGLMMDAHKKYVPDLKTAPTVKLIFDMYAEGSTTSEIINHLNSIGMRTKAGKPFTKSSLTTVLKNEKYIGVYKYKDIIRDEGVIPPIVDKEIFYKVQELLKVNRRMPSHKWSYSDYILTDKLFCGKCGTAMVGESGFGKMGVKYSYYICAKRRKDKTCDKKPVRQEWIEEIVLQRVQGILQNEELLEFIAENTWQYYLAQDESMEKLKGLQTELDKVEKSAANLMKAIEAGIFNDMTKARMDELDDQRAVIKKAMAEIEIEKGFKLTKDHILYFLEQFKKLDYKDRDCQRRLIDVFVNSIFVYDDKLRIAFNFGGSDSTITLNEVDKADRGEGFVCCASCPIYKY

SEQ ID NO: 5023 - protein, 513 aa, Unknown
  Description of Unknown: Integrase B5024 sequence
  PTHR30461:SF3,SM00857,G3DSA:1.10.10.2600,IPR036162,PF13408, IPR025827,G3DSA:3.40.50.1390,PS51737,IPR006119,IPR038109, PF07508,SSF53041,IPR011109,PTHR30461,Coil, PS51736,cd00338,PF00239
MMQQALNAVIYARYSSHNQTEQSIEGQLRDCYAFAEREGLQVIGEYIDRAITGRTDERPDFQRMIADARKQEFQRVIVWKFDRFSRDRYDSAIYKHKLKQCGVRVLSAMENVGEGDVSIILEALLEASAEQYSLDLSKKVLRGQRESRLKGTFLGGLTPIGYKLENRKLVADERTAPIVRYIFEQYAKGTSKQDIINELATRGILNRHGKPLSHSTLQTILKNKKYIGVYTHGGQDVAGGCEALIDEKTFLKVQEQLSKRKHAPAASKAVMEYLLQGKLYCGYCGFNMFGDSGRGRNGSTYRYYACRRRKKERDCKKKNEKKDFIEWYVVEQTVEYVLTPERIEYIASELVAQYKKDCGIDRIKTYEKQLDRIKAEISRLVDTLAVCPAAARQPIFDKMEQLDAEKQEVELDLSKLRISAKIQISKEHIADWLKQFCNGDALDVDFQKRIIDTFINSVYLYDDKVIIYYNIEGGKQVSYIDMIDSTEEPPFSDDAPGSSGGSDLKRPALHLYC

SEQ ID NO: 5024 - protein, 513 aa, Unknown
  Description of Unknown: Integrase B5025 sequence
  PTHR30461:SF3,SM00857,G3DSA:1.10.10.2600,IPR036162,PF13408, IPR025827,G3DSA:3.40.50.1390,PS51737,IPR006119,IPR038109, PF07508,IPR011109,SSF53041,PTHR30461,Coil, PS51736,cd00338,PF00239
MRVVLYMRYSSDRQTEQSIEGQNRVCTAFCEQQGYEIVDRYIDRATSAFKDTNKRTEFQRMIRDSEKQLWEGIVVYKLDRFARNRYDSATYKARLKKNGVRVISATENISDNPEGVILEAVLEGMAEFYSKELSQKITRGMFESANKCHSIGGHIPLGYKIENKKLVIDEAGAAIVREAFDLYANGTTVAEICETFNTKGYRTAKNAEFNKNSFRSMFKNERYIGIYKYKDLRIEGGVPAIVDKDTFAIVQKKLSKNAEAPSRGKAKIDYLLSQKLFCGHCGSLMTGESGTGKGGTTYFYYTCGKRKREHTCDKKPLKKDFIERAVVEDALTLLTPETIDELADIAVNESIREMEENSIIPALKDQLHDTERSINNLVKMVEKGVESDTIADRLKELEKEKRAIEKRLVVAQDDYVILEKDHIVWWLSEFCNGDIEDEEFRRHIIDLLVNSVTVWDEPDGWYKITSVYNLTSNKTKTFRCSDLSGQAPPLKDNPNTLFFIGTLFGQTTKHRVE

SEQ ID NO: 5025 - protein, 513 aa, Unknown
  Description of Unknown: Integrase B5026 sequence
  PTHR30461:SF3,cd00338,SM00857,G3DSA:1.10.10.2600,IPR036162, PF13408,IPR025827,PS51737,G3DSA:3.40.50.1390,IPR006119, IPR038109,PF07508,SSF53041,IPR011109,PTHR30461, PS51736,Coil,PF00239
MCAKKKPAMLEPDMQDAVIYTRYSSHNQRDCSIEQQVADCEIFARQNNLRVVKVYADRHLSGTTDNRPQFQQMLKDAAHGHWAYVICWKIDRFARNRYDSATYKFRLKKAGVRVLYAKESIPDGPEGILLESVLEGSAEYYSAALAQNIRRGMKYNAEQCKVNSGSIPFGYCKGADGRFAIHEANAEVVREIFRKAAAGMPFVDIANDLNSRGLKTSRGGRWNKGSFRLLMNEAYIGVYHFSDTRIEGGMPALIDQGTFWAANERLKANSSVRGRHQDGGDYLLTGKLKCAHCGSYMIGFSGTGKSGELHYYYGCQKRRRERACKKANVPREWIERVVVKAALDYVLRPDVMEWIADAVMEYQEREAASAQLAALTAELEENQKATDNVMKAIEAGIITSTTKQRLLDLEAKAQDLKRAIELEKLSHVRLERDQVLFWLDRFRGGSLQSQEFRRKVIDAFVSVVYLSDDHLRIAFNYSGGPNAEADFDLVMDAETAAGELSKKFAQGHVTSTN

SEQ ID NO: 5026 - protein, 513 aa, Unknown
  Description of Unknown: Integrase B5027 sequence
  PTHR30461:SF3,SM00857,G3DSA:1.10.10.2600,IPR036162,PF13408, PS51737,IPR025827,G3DSA:3.40.50.1390,IPR006119,IPR038109, PF07508,SSF53041,IPR011109,PF00239,PTHR30461, PS51736,Coil,cd00338
MKKQPTGGKRLVAYYRYSGGSHQTEQSIEGQRRDCETYARIHGMVILHEYIDRHISGKTDDRPEFQQMIADAGKGMFDYVICWKTDRIARSRYDSIIYKKKLRDNGVELLYAAEANVEGSGGIIVEGLMEALAEYYSAELAEKVRRGMRESALKGKAIGSSRPLGLTVDKDKKYIIDPAGASAVRYIFEQYAAGAASSAIVAHLNEQGLCTSRGNPFNKSSVVRIIQNEVYRGVYVSPKFDVRIEGAVPAIIDDDLWERAQKMFIRNRQSRSPRNDRADYILSGKLFCGECGTAMKGVSGHSSNGEVYFYYNCPCKDCHRRNIPKDELEGLVIRTVCNDVLQPDVMERIANSVIEAQTSELNQPNPEKEALQHELADVQRKAKNLLSALENGTAGAMLTNRLAELEQQADTLSYQLSSLESEPKFPVFSKEEVLYLLEQFLIAPSEETKAYRRRLIDTFVSKIEVSNTELTIYFNIAEEDCGKMKKAPQSNQPEDCSTEKQMVRVARIELTAS

SEQ ID NO: 5027 - protein, 513 aa, Unknown
  Description of Unknown: Integrase B5028 sequence
  PTHR30461:SF3,SM00857,G3DSA:1.10.10.2600,IPR036162,PF13408, PS51737,G3DSA:3.40.50.1390,IPR025827,IPR006119,IPR038109, PF07508,IPR011109,SSF53041,PF00239,PTHR30461, PS51736,Coil,cd00338
MLYAIYLRKSRADLEAEAMGQGETLARHRAALLDYAAHHGLEIGAVYEEIISGESIDARPKMKQLLREVEQGRWAGVLCMDIDRLARGNSADQARVSNTFRISGTLIITPSKVYDQSRESDEEYVDFELFMARREYKAISRRIMRGRIASVKEGHFIGSTPPYGYDKVKVEKGRGFTLLPNSESDTVKQIYSMCISGMGCNAIARRLDMMGVTPRKGSSWSSASIQDILKNPVYCGKIRWQYRKEEKSLTDGIVTTHRRENPDCIIAQGLHPALISEEEFEKAQQFLNSRRIPHKKESTELRNPLSGLVYCGMCGSMMTRLGTGSRNHSDTLRCPNRNCGNVSAKLELVESALVEGVARWLNDCRVNVSRKPAADTAKAERTAAEKVRAELAKLDSQREKIYSFLEQGVYSAGEFRERMESLEKRRTQLSENLRQAEQAVSEAEGNRQLYAQIIPSVERVMDIYAQSTPEEKNRLLKTIISRAEYIKTERNTRGNADRCNFTLNVTPLFPETD

SEQ ID NO: 5028 - protein, 513 aa, Unknown
  Description of Unknown: Integrase B5029 sequence
  SM00857,G3DSA:1.10.10.2600,IPR036162,PF13408,PS51737, G3DSA:3.40.50.1390,IPR025827,IPR006119,IPR038109,PF07508, IPR011109,SSF53041,PTHR30461,Coil,PS51736, cd00338,PF00239
MLYAIYLRKSRADLEAEAMGQGETLARHRAALLDYAAHHGLEIGAVYEEIISGESIDARPKMKQLLREVEQGRWAGVLCMDIDRLARGNSADQARVSNTFRISGTLIITPSKVYDQSRESDEEYVDFELFMARREYKAISRRIMRGRIASVKEGHFIGSTPPYGYDKVKVEKGRGFTLLPNSESDTVKLIYSLCISGMGCNAIARRLDTMGVTPRKGSSWSSASIQDILKNPVYCGKIRWQYRKEEKSLTDGIVTTHRRENPDCIIAQGLHPALICEEEFDQAQQFLNSRRIPHKKESTELRNPLSGLVYCGMCGSMMTRLGTSSRNHSDTLRCPNRNCSNVSAKLEFVESALVEGVARWLNDCRVNVSRKPAADTAKAERTAAEKVRAELAKLDSQREKIYSFLEQGVYSAGEFRERMESLEKRRTQLSENLRQAEQAVSEAEGNRQLYAQIIPSVERVMDIYAQSTPEEKNRLLKTIISRAEYIKTERNTRGNADRCNFTLNVTPLFPETD

SEQ ID NO: 5029 - protein, 513 aa, Unknown
  Description of Unknown: Integrase B5030 sequence
  PTHR30461:SF3,SM00857,G3DSA:1.10.10.2600,IPR036162,PF13408, IPR025827,PS51737,G3DSA:3.40.50.1390,IPR006119,IPR038109, PF07508,SSF53041,IPR011109,PF00239,PTHR30461, PS51736,Coil,cd00338
MRVVLYMRYSSDRQTEQSIEGQNRVCTAFCEQQGYEIVDRYIDRATSAFKDTDKRAEFQRMIRDSEKQLWEGIVVYKLDRFARNRYDSATYKARLKKNGVRVISATENISDNPEGVILEAVLEGMAEFYSKELSQKITRGMFESANKCHSIGGHVPLGYKIENKKLVIDEAGAAIVREAFDLYANGATVAEICETFNTKGYRTAKNAEFNKNSFRSMFKNERYIGIYKYKDLRIEGGVPAIVDKDTFAIVQKKLSKNAEAPSRGKAKIDYLLSQKLFCGHCGSLMTGESGTGKGGTTYFYYTCGKRKREHTCDKKPLKKDFIERAVVEDALTLLTPATIDELADIAVKESVREMEENSIIPALKDQLHETERSINNLVKMVEKGVESDTIADRLKELEKEKRAIEKRLVVAQDDYVILEKDHIVWWLSEFCNGDIEDEEFRRHIIDLLVNSVTVWDEPDGWYKITSVYNLTSNKTKTFRCSDLSGQAPPLKDNPNTLFFIGTLFGQTTKHRVE

SEQ ID NO: 5030 - protein, 513 aa, Unknown
  Description of Unknown: Integrase B5031 sequence
  SM00857,G3DSA:1.10.10.2600,IPR036162,PF13408,IPR025827, G3DSA:3.40.50.1390,PS51737,IPR006119,IPR038109,PF07508, IPR011109,SSF53041,PTHR30461,Coil,PS51736, cd00338,PF00239
MPTDYALYLRKSRADLEAEAHGEGDTLARHEHILMELAKSRALPIGAIYREIVSGERIANRPVMQQLLSEVEDGRWKGVLVTETSRLARGDTIDQGIVAQAFKLSGTLIVTPSKTYDPTQEADEEWMEFGLFMSRQEYRMIRRRMTAGMNAAKREGRFIGNVAPYGYERFKLDGRGWSLRIVPEQAEIVRMIFDLYNSGLGYCRIEKRLNELHIPAPKGEKWTSATIPGIIQNPHYIGMIPAGRRPGRKVVKDGEVKLIRPRQKCELYPGMHEPIISRETWDKAQARIGKNREARVPAGRRQSNPLAGLLVCDCCGKNMQRRPQTGRGSQTQILCPTRGCPTVAHNADELEDMVIDSLRVFLAKLEAGKPAKTDVSVEYAALEECTKKLKDLEARQRRTFELVEDGTYTREIFLARQAELTAERVRIEQQKAELEEAVAKKKQEAEAQNNLAPAARQVLEAYNKQLSVEDRNRLLKKVIDHIDYHKRKRTRWNPESDLSITLHPVVTSSNPHR

SEQ ID NO: 5031 - protein, 513 aa, Unknown
  Description of Unknown: Integrase B5032 sequence
  PTHR30461:SF3,cd00338,SM00857,G3DSA:1.10.10.2600,IPR036162, PF13408,IPR025827,G3DSA:3.40.50.1390,PS51737,IPR006119, IPR038109,PF07508,IPR011109,SSF53041,PTHR30461, PS51736,Coil,PF00239
MRVVLYMRYSSDRQTEQSIEGQNRVCTAFCEQQGYEIVDRYIDRATSAFKDTDKRTEFQRMIRDSEKQLWEGIVVYKLDRFARNRYDSATYKARLKKNGVRVISATENISDNPEGVILEAVLEGMAEFYSKELSQKITRGMFESANKCHSIGGHIPLGYKIENKKLVIDEAGAAIVREAFDLYANGATVAEICETFNTKGYRTAKNAEFNKNSFRSMFKNERYIGIYKYKDLRIEGGVPAIVDKDIFTIVQKKLSKNAEAPSRGKAKIDYLLSQKLFCGHCGSLMTGESGTGKGGTTYFYYTCGKRKREHTCDKKPLKKDFIERAVVEDALTLLTPETINELADIAVKESVREMEENSIIPALKNQLHETERSINNLVKMVEKGVESDTIADRLKELEKEKRAIEKRLVVAQDDYVILEKDHIVWWLSEFCNGDIEDEEFRRHIIDLLVNSVTVWDEPDGWYKITSVYNLTSNKTKTFRCSDLSGQAPPLKDNPNTLFFIGTLFGQTTKHRVE

SEQ ID NO: 5032 - protein, 513 aa, Unknown
  Description of Unknown: Integrase B5033 sequence
  PTHR30461:SF3,SM00857,G3DSA:1.10.10.2600,IPR036162,PF13408, IPR025827,PS51737,G3DSA:3.40.50.1390,IPR006119,IPR038109, PF07508,IPR011109,SSF53041,PTHR30461,Coil, PS51736,cd00338,PF00239
MKKQPTVGKRLVAYYRYSGGSHQTEQSIEGQRRDCETYARIHGMVILHEYIDRHISGKTDDRPEFQQMIADAGKGMFDYVICWKTDRIARSRYDSIVYKKKLRDNGVELLYAAEANVEGSGGIIVEGLMEALAEYYSAELAEKVRRGMRESALKGKAIGSSRPLGLTVDKDKKYIIDPAGAAAVRYIFEQYAAGAASSSIVAHLNEQGLCTSRGNPFNKSSVVRIIQNEVYRGVYVSPKFDVRIEGAVPAIIDDDLWERAQKMFIRNRQSRSPRNDRADYILSGKLFCGECGTAMKGVSGHSSNGEVYFYYNCPCKDCHRRNIPKDELEGLVIRTVCNDVLQPDVMDRIADSVIEAQTAELNQPNPEKEALQHELADVQRKAKNLLAALENGTAGSMLTNRLAELEQQADTLSYQLSSLESEPKFPVFSKEEVLYLLEQFLIAPSEKTKAYRRRLIDTFVSKIEVSNTELTIYFNIAEEDCGKMKKAPQSNQPEGCSTEKQMVRVARIELTAS

SEQ ID NO: 5033 - protein, 513 aa, Unknown
  Description of Unknown: Integrase B5034 sequence
  PTHR30461:SF3,SM00857,G3DSA:1.10.10.2600,IPR036162,PF13408, PS51737,G3DSA:3.40.50.1390,IPR025827,IPR006119,IPR038109, PF07508,IPR011109,SSF53041,PF00239,PTHR30461, PS51736,Coil,cd00338
MQRAVIYARYSPGPNQTEQSIEGQVRECTKYAEQHGLRIVGTYVDRKISGKTDNRREFQRMIDDSEKHIFDVIILYHTDRFARNRYDSAIYKHKLKENGVELRYATTDIPKGPEGIILESIMEGWAEYYSAELSRKIKRGMRESALKCHSTGAGRCLGYRTAEDKSLVIEPEGAKAVQTVFDMYIKGKSHADICRYLNDCGFRTAQGKLFNKNSVTHIIRNKRYIGVYTYDDITIEDGIPAIISKDTFHLAQLEAARRKTAKRPKEPKAEYLLSGKAFCGHCQKPLVGVSGTGKSGNKWYYYYCQESRAKRGCTKRPVKRDWLEREVVERTVAEVLQPEVIQHIAKKCYDLQMEYRQDNSDVLFYELKLKDVRKAIKNTMRAIESGVKTKTLPARLQELENEEEALEAELAIAKASDFVITTDQIEFLLTQFAEPWECESEEEYHRRIIKCFVHKVFLFDDKLLIYYNVSRDGKTREQSEAELLEEVLGEGFDKRSSGSTKRWQQFGYFKRNA

SEQ ID NO: 5034 - protein, 513 aa, Unknown
  Description of Unknown: Integrase B5035 sequence
  PTHR30461:SF3,cd00338,SM00857,G3DSA:1.10.10.2600,IPR036162, PF13408,IPR025827,PS51737,G3DSA:3.40.50.1390,IPR006119, IPR038109,PF07508,SSF53041,IPR011109,PTHR30461, PS51736,Coil,PF00239
MCAKKKPAMLEPDMQDAVIYTRYSSHNQRDCSIEQQVADCEIFARQNNLRVVKVYADRHLSGTTDNRPQFQQMLKDAAHGHWAYVICWKIDRFARNRYDSATYKFRLKKAGVRVLYAKESIPDGPEGILLESVLEGSAEYYSAALAQNIRRGMKYNAEQCKVNSGSIPFGYRKGPDGRFAIHEANAEVVREIFRKAAAGMPFVDIANDLNSRGLKTSRGGRWNKGSFRLLMNEAYIGVYHFSDTRIEGGMPALIDQGTFWAANERLKANSSVRGRHQDGGDYLLTGKLKCAHCGSYMIGFSGTGKNGELHYYYGCQKRRRERACKKANVPREWIERVVVKAALDYVLRPDVMEWITDAVMEYQEREAASAQLAALTAELEENQKATDNVMKAIEAGIITSTTKQRLLDLEAKAQDLKRAIELEKLSHVRLERDQVLFWLDRFRGGSLQSQEFRRKVIDAFVSVVYLSDDHLRIAFNYSGGSNAEADFDLVMDAEAAAGELSKKFAQGHVTSTK

SEQ ID NO: 5035 - protein, 513 aa, Unknown
  Description of Unknown: Integrase B5036 sequence
  cd00338,SM00857,G3DSA:1.10.10.2600,IPR036162,PF13408, PS51737,G3DSA:3.40.50.1390,IPR025827,IPR006119,IPR038109, PF07508,IPR011109,SSF53041,PTHR30461,PS51736, Coil,PF00239
MAHKTAVLYARYSSDKQREASIDDQLRVCRDYCKAEGIDVVAEYKDYALSGKTDHRPEFRRMIANAPESDYVVVYMFDRFSRDRYDSATYKKMLRECGVRVLSASEKVEDTPEGGLQEGMLELLSEYYVRDLARKVRRGMEGNALKAKDNGYRIFGYSTDPETRCYVIDEAEANAVREMFSMHISGNSVNSIAREMARRGWTTTTGKPVDYNWAWRVLNRKAYTGLYSWGGIEVPGGMPQIIDEVTFARSQAVVPRKRRKDENWDVYRLTGKLFCGFCGKPMHGTAGTGKKGKRYHYYACKEGDGCKRPWVRRELLEDSIADAVLETCSDERRMRMLARRIVEAYVEPGEEEAEMASIEAQIVSLEREQHNMTQAAMKGFVTDEMVARNDEIKAQLKNLHNRHGVLASQMCEITEDDIVGYMMHGFNRDDEDFIFGSIVREAYLFDDCVLLVFNFRDEVGDLTEIRVALQTQKKCEPGGGFALCSRGVPGEVFPEPVSLPGGFGLIIPLRRAA

SEQ ID NO: 5036 - protein, 513 aa, Unknown
  Description of Unknown: Integrase B5037 sequence
  PTHR30461:SF3,SM00857,G3DSA:1.10.10.2600,IPR036162,PF13408, IPR025827,PS51737,G3DSA:3.40.50.1390,IPR006119,IPR038109, PF07508,IPR011109,SSF53041,PF00239,PTHR30461, PS51736,Coil,cd00338
MKKQPTGGKRLVAYYRYSGGSHQTEQSIEGQRRDCETYARIHGMVILHEYIDRHISGKTDDRPEFQQMIADAGKGMFDYVICWKTDRIARSRYDSIVYKKKLRDNGVELLYAAEANVEGSGGIIVEGLMEALAEYYSAELAEKVRRGMRESALKGKAIGSSRPLGLTVDKDKKYIIDPAGAAAVRYIFEQYAAGAASSAIVAHLNEQGLCTSRGNPFNKSSVVRIIQNEVYRGVYVSPKFDVRIEGAVPAIIDDDLWERAQKMFIRNRQSRSPRNDRADYILSGKLFCGECGTAMKGVSGHSSNGEVYFYYNCPCKDCHRRNIPKDELEGLVIRTVCNDVLQPDVMNRIADSVIETQTAELNQPNPEKEALQHELADVQRKAKNLLAALENGTAGAMLTNRLAELEQQADTLSYQLSSLESEPKFPVFSKEEVLYLLEQFLIAPSEKTKAYRRRLIDTFVSKIEVSNTELTIYFNIAEEDCGKIKKAPQSNQPEGCSTEKQMVRVARIELTAS

SEQ ID NO: 5037 - protein, 513 aa, Unknown
  Description of Unknown: Integrase B5038 sequence
  SM00857,G3DSA:1.10.10.2600,IPR036162,PF13408,PS51737, G3DSA:3.40.50.1390,IPR025827,IPR006119,IPR038109,PF07508, IPR011109,SSF53041,PTHR30461,Coil,PS51736, cd00338,PF00239
MQTEYALYLRKSRADLEAEAHGEGDTLARHEHILMELAKSRALPIGAIYREIVSGERIANRPVMQQLLSEEEDGRWKGVLVTETSRLARGDTIDQGIVAQAFKLSGTLIVTPSKTYDPTQEADEEWMEFGLFMSRQEYRMIRRRMTAGMNAAKREGRFIGNVAPYGYERFKLDGRGWSLRIVPERAEIVRMIFDLYNSGLGYCRIEKRLNELHIPAPKGEKWTSATIPGIIQNPHYIGMIPAGRRPGRKVVKDGEVKLIRPRQKCELYPGMHEPIISRETWDKAQARIGKNREARVPAGRRQSNPLAGLLVCDCCGKNMQRRPQIGRGSQTQILCPTRGCPTVAHNADELEDMVIDSLRVFLAKLEAGKPAKTDVSVEYAALEECAKKLKDLEARQRRTFELVEDGTYTREIFLARQAELTAERVKIEQQKTELEAAIRNKKQEAEAQNNLAPAARQVLEAYKKDMSAEDRNRLLKKVIDHIDYHKRKRTRWNPESDLSITLHPVVTSSSPHR

SEQ ID NO: 5038 - protein, 513 aa, Unknown
  Description of Unknown: Integrase B5039 sequence
  SM00857,G3DSA:1.10.10.2600,IPR036162,PF13408,IPR025827, PS51737,G3DSA:3.40.50.1390,IPR006119,IPR038109,PF07508, SSF53041,IPR011109,PTHR30461,Coil,PS51736, cd00338,PF00239
MAKPEVSELAVVYARYSSHSQGEQSIEGQLSNARDYAAAHGYTIVHEYVDRAKSGRTDNRAEFQQMLKDTAKRQFSVIILWKVDRFGRNREEIAINKMKCRKNGVRVEYVAETIPDSPEGVILESVLEGFAEYYSLQLSQNIRRGRAESAEKCQSLGGNRPLGYKTGPDKKFVIDENTAPTVKMIFTMYADGKTVTEIVDKLNEMGLRTLRGGPFTKNSLHSILKNKKYIGVYEYQGREIKDGVPRIIEDDVFNKVQEMLKINKRAPAKTWSRADYILTNKLFCGKCGALMFGESGTSKTGVKHNYYICSNKKRFRSCDKKAVRQADIEDTVLNATHELLQDDELLDYIVDRTWEYYLAQDNSQEELRNLQRQLAQTDTAISNLIRAIEAGILTEETKKRMDELTQQKADLKASIADREIARGFHLQKSHIAFYLRSLRDADWSDKEAQKRLIQTFVNAVFVYDDHITLTYNFSGDKSTITLHDMQRFEDGEEFGCRASRSSVCHCIRSVSYI

SEQ ID NO: 5039 - protein, 513 aa, Unknown
  Description of Unknown: Integrase B5040 sequence
  PTHR30461:SF3,SM00857,G3DSA:1.10.10.2600,IPR036162,PF13408, IPR025827,PS51737,G3DSA:3.40.50.1390,IPR006119,IPR038109, PF07508,IPR011109,SSF53041,PTHR30461,Coil, PS51736,cd00338,PF00239
MPTVTVIQPTISEEQNTKIRCAAYCRVSSDSEDQLNSFMAQMRYYSQVFDNSETEELIDIYADEGITGTREDKRDEFQRLMKDCRKGKIDRIYTKSISRFARNTRDCLKNVRELKSLGITIYFEKENIDTANMTDEMMITIMGGLAQEESTSISQNLRWGIKKRMENGTIKMCTPVFGYELVDGNLILKSDEAEIVRQIFDWYLNGYGLAAIAQMLNALKIKRFGRTSHWTASTVGVMLRNEKYIGDQLFQKKYTTDTLPFRQVVNKGERDQYYYSDRHKPIISRDDFDKVQNILAEHKKSFKGLKQDHIFAKKIYCGECGSTFKFKCRKNKNYWVCRLHDAESDKCSNKQILEANAISAFIMLCNKLWYNYKQILLPCQAALQDLKLKKFSGKTQVMDIHKEIAKLREQAHVLARLKTKGFLDEAKYLEQTTELTAKINKLQTELKKLTRSDDEDEMLEQIEMLIDFFEKRENIMIDFDESAFENIVEKIVVIDQYELEFHLIGGLKFKENI

SEQ ID NO: 5040 - protein, 513 aa, Unknown
  Description of Unknown: Integrase B5041 sequence
  PTHR30461:SF3,SM00857,G3DSA:1.10.10.2600,IPR036162,PF13408, PS51737,IPR025827,G3DSA:3.40.50.1390,IPR006119,IPR038109, PF07508,IPR011109,SSF53041,PTHR30461,Coil, PS51736,cd00338,PF00239
MLKTDMTNEKSTAVIYARFSSDKQREESIEGQIRECTQFAKDQNLEIIATYIDRALSARSDNRPDFLRMIADSAKGLFQYVIVYQLDRFSRSRYDSAVYKHKLKKNGVRVLSAKERIGDDPSSIILESMLEGYAEYYSAELSQKVKRGMTENVLEHKWTGGYVPLGYCLAPDKTLQIDPVGAEAVKIIYDKWLSGCRIMDIIRYLNDHNYVTSRKAKFRYSSLNRILTNPIYTGLYRWGSIEVADYAPPIISQKQFSLAQEKIHHIKAHPRAKRRSAAYALTGIIYCGVCGSPMTGQSGHSKSGALYHYYRCSTKNNYHDRGKKLNVKCTNRNISREKLEDLVLQTTINILMNPEAVHMIAKQAVAVQQKDPVSMELDRIKEDKKIIQKKLNNSIKAVEAGIISTTLAANISQYEKEIADLDIKMEKIKLSSTPVKIDEIAVEFFLKNLLLQKKEHDKYRLDMFQTFIRRVIVYPDKVEIQYNYTATPILENPVIKMMTGNPGCSRCERLVTR

SEQ ID NO: 5041 - protein, 513 aa, Unknown
  Description of Unknown: Integrase B5042 sequence
  PTHR30461:SF3,SM00857,G3DSA:1.10.10.2600,IPR036162,PF13408, IPR025827,PS51737,G3DSA:3.40.50.1390,IPR006119,IPR038109, PF07508,SSF53041,IPR011109,PTHR30461,Coil, PS51736,cd00338,PF00239
MKKQPSGGKRLVAYYRYSGGSHQTEQSIEGQRRDCETYARIHGMVILHEYIDRHISGKTDDRPEFQQMIADAGKGMFDYVICWKTDRIARSRYDSIIYKKKLRDNGVELLYAAEANVEGSGGIIVEGLMEALAEYYSAELAEKVRRGMRESALKGKAIGSSRPLGLTVDKDKKYIIDPAGAAAVRYIFEQYAAGAASSAIVAHLNEQGLCTSRGNPFNKSSVVRIIQNEVYRGVYVSPKFDVRIEGAVPAIIDDDLWERAQKMFIRNRQSRSPRNDRADYILSGKLFCGECGTAMKGVSGHSSNGEVYFYYNCPCKDCHRRNIPKDELEGLVIRTVCNDVLQPDVMDHIADSVIEAQTAELNQPNPEKEALQHELADVQRKAKNLLSALENGTAGAMLTNRLAELEQQADTLSYQLSSLESEPKFPVFSKEEVLYLLEQFLIAPSEKTKAYRRRLIDTFVSKIEVSNTELTIYFNISEEDCGKMKKAPQSNQPEGCSTEKQMVRVARIELTAS

SEQ ID NO: 5042 - protein, 513 aa, Unknown
  Description of Unknown: Integrase B5043 sequence
  PTHR30461:SF3,SM00857,G3DSA:1.10.10.2600,IPR036162,PF13408, IPR025827,PS51737,G3DSA:3.40.50.1390,IPR006119,IPR038109, PF07508,IPR011109,SSF53041,PTHR30461,Coil, PS51736,cd00338,PF00239
MKKAVIYARYSSDSQTEQSIEGQLRVVNQFASNNDYIIIDTYIDRATTGTNTNRPGFQKMIADSARRDFDYVLVYKLDRFARNRFDSAFNKKALKKNGVKVVSATENISDSPEGIILESMLEGMAEYYSAELSQKVKRGQFESLEKGTFLGGTMLYGYKVNNKIIEINEEQAYIVRKIFTAYANGKTALQIADMLKNDNILNNQGRLFCANSIMNLLKNKKYTGLLEYGDYVKENYYPRIIDDNTFEIVSKRIEDNKRSPARMKAYCLYRLSGKLYCGHCKSLMTGESGTSKQGKIHYYYKCFGKKKHNGCDKKSVKKEELENLVVALVLQHILAEDKILDTIEGVTSAYNESVKQSTELSILKQEQAQNEKYINNILTAIKNGIFSETTQKELIKLESRQTELKEAILVQEALQQNKLSKEQVLFFFKQFIQEELSDEEAKTSIIDTLVYKVILYDDKIRIILKNKDNITKDGSLEELEKMCSNLAQLSPPLSHNPNIYFTKDFIILDYVFK

SEQ ID NO: 5043 - protein, 513 aa, Unknown
  Description of Unknown: Integrase B5044 sequence
  PTHR30461:SF3,SM00857,G3DSA:1.10.10.2600,IPR036162,PF13408, IPR025827,PS51737,G3DSA:3.40.50.1390,IPR006119,IPR038109, PF07508,SSF53041,IPR011109,PTHR30461,Coil, PS51736,cd00338,PF00239
MGIIMPEALNAVIYARYSSDRQTEQSIEGQLRECYAFAKANDIAVIDTYIDRAISGKTDNRPAFQKMIEDSAKRQFQAVIVYRLDRFTRNRYDSAIYKARLKKNGVKVLSAMENLNGSPESIIMESLLEGMAEYYSVELSQKITRGMRENALKGKALGGQRVLGYKVNSDCYFEIDETTAPVVVDIFKLYSSGKTVKEICDILNARGVKTARGGAFNKNSLHTILTNKKYIGVYKTKYGEIVGGIPAIIDKELFEMVALRMEQNKKAPARAKAEKNYLLSTKLFCGKCRSAMVGESGTSKTGKKYYYYACVKKKREKACDKSNVKKDWIEDLVIQRTVTDILKDDVIEKIADRLVELQKAEAAESGTMLYLQNSLADIQVSIKNIMTAIEKGIITESTKTRLTELEDEKRNVEIEIAKESIARRIISREQIIYWISSFKDGDITSEKYRQQLIDTFVHAVFVYDEKIVITYNYSGENNTATISDLDLSSPPLQSNPNIFVTLDVFGLVVQIER

SEQ ID NO: 5044 - protein, 513 aa, Unknown
  Description of Unknown: Integrase B5045 sequence
  PTHR30461:SF3,SM00857,G3DSA:1.10.10.2600,IPR036162,PF13408, IPR025827,G3DSA:3.40.50.1390,PS51737,IPR006119,IPR038109, PF07508,IPR011109,SSF53041,PTHR30461,Coil, PS51736,cd00338,PF00239
MKKQPTGGNRLVAYYRYSGGSHQTEQSIEGQRRDCETYARIHGMVILHEYIDRHISGKTDDRPEFQQMIADAGKGMFDYVICWKTDRIARSRYDSIVYKKKLRDNGVELLYAAEANVEGSGGIIVEGLMEALAEYYSAELAEKVRRGMRESALKGKAIGSSRPLGLTVDKDKKYIIDPAGAAAVRYIFEQYAAGAASSAIVAHLNEQGLCTSRGNPFNKSSVVRIIQNEVYRGVYVSPKFDVRIEGAVPAIIDDDLWERAQKMFIRNRQSRSPRNDRADYILSGKLFCGECGTAMKGVSGHSSNGEVYFYYNCPCKDCHRRNIPKDELEGLVIRTVCNDVLQPDVMDRIADSVIEAQTAELNQPNPEKEALQHELADVQRKAKNLLAALENGTAGAMLTNRLAELEQQADTLSYQLSSLESEPKYPVFSKEEVLYLLEQFLIAPSEKTKAYRRRLIDTFASKIEVSNTELTIYFNIAEEDCGKMKKAPQSNQPEGCSTEKQMVRVARIELTAS

SEQ ID NO: 5045 - protein, 513 aa, Unknown
  Description of Unknown: Integrase B5046 sequence
  PTHR30461:SF3,SM00857,G3DSA:1.10.10.2600,IPR036162,PF13408, IPR025827,G3DSA:3.40.50.1390,PS51737,IPR006119,IPR038109, PF07508,SSF53041,IPR011109,PF00239,PTHR30461, PS51736,Coil,cd00338
MPEALNAVIYARYSSDRQTEQSIEGQLRECYAFAKANDIAVIDTYIDRAISGKTDNRPAFQKMIEDSAKRQFQAVIVYRLDRFTRNRYDSAIYKARLKKNGVKVLSAMENLNGSPESIIMESLLEGMAEYYSVELSQKITRGMRENALKGKALGGQRVLGYKVNSDCYFEIDETTAPVVVDIFKLYSSGKTVKEICDILNARGVKTARGGAFNKNSLHTILTNKKYIGIYKTKYGEIVGGIPAIIDKELFEMVALRMEQNKKAPARAKAEINYLLSTKLFCGKCRSAMVGESGTSKTGKKYYYYACVKKKREKACDKSNVKKDWIEDLVIQRTVTDILKDDVIDKIADRLVELQKAEAAESGTMLYLENSLAEIQVSIKNIMTAIEKGIITESTKTRLTELEDEKRNVEIEIAKESIARRIISREQIIYWISSFKDGDITSEKYRQQLIDTFVHAVFVYDDKIVITYNYSGENNTATISDLDLSSPPPKSPDNLGFLLICCMIDEAILCTFGL

SEQ ID NO: 5046 - protein, 513 aa, Unknown
  Description of Unknown: Integrase B5047 sequence
  PTHR30461:SF3,SM00857,G3DSA:1.10.10.2600,IPR036162,PS51737, G3DSA:3.40.50.1390,IPR006119,IPR038109,PF07508,SSF53041, IPR011109,PF00239,PTHR30461,PS51736,Coil, cd00338
MKRPDDYAIYLRKSRKDLDLEALGEGETLARHRTALLELADKKGLKITRIYEEMVSGESIADRPQMQQLLDDVCAGTYAGVLVMEVERLARGNTKDQGEVAEAFSMSNTLIVTPTKTYDPNNEFDEEYFEFGLFMSRREYKTIRRRMQRGLIESIKEGNYVGSLPPYGYDIIRINKKERTLKLNDQSQYVKMMFDWFVNEGLSCGQIARRLSEMGIPTQTGKSEWNRATVKDILQNTLYTGKIRWNRRKVSKEKGSDGRTVKRKRRLTPEDYMVVDGKHPAIVSQEIFDKAQTLFCGQVPLKAQTTITNPFARLMVCKHCGKGIGYNTFAHRGGQTKGRMSHGTSLTCKVKSAPYDDVVAAVAAALRDYISDFEFKLNNDEEARKNKQHEEMLHSMNVELNKLKQKREKLFDFLESGIYTKQEFMERKGVLSERIEAMQISIENIKKSLPPPVDYREKILRVSEALSALEDPDVPAKAKNDLLKTVVRKIEYDCVDFGRNKGGEVHLDVYLKE

SEQ ID NO: 5047 - protein, 513 aa, Unknown
  Description of Unknown: Integrase B5048 sequence
  PTHR30461:SF3,cd00338,SM00857,G3DSA:1.10.10.2600,IPR036162, PF13408,IPR025827,PS51737,G3DSA:3.40.50.1390,IPR006119, IPR038109,PF07508,IPR011109,SSF53041,PTHR30461, PS51736,Coil,PF00239
MRVVLYMRYSSDRQTEQSIEGQNRVCTAFCEQQGYEIVDRYIDRATSAFKDTDKRTEFQRMIRDSEKQLWEGIVVYKLDRFARNRYDSATYKARLKKNGVRVISATENISDNPEGVILEAVLEGMAEFYSKELSQKITRGMFESANKCHSIGGHIPLGYKIENKKLVIDEAGAAIVREAFDLYANGATVAEICETFNTKGYRTAKNAEFNKNSFRSMFKNERYIGIYKYKDLRIEGGVPAIVDKDTFAIVQKKLSKNAEAPSRGKAKIDYLLSQKLFCGHCGSLMTGESGTGKGGTTYFYYTCGKRKREHTCDKKPLKKDFIERAVVEDALTLLTPETIDELADIAVNESIREMEENSIIPALKDQLHDTERSINNLVKMVEKGVESDTIADRLKELEKEKRAIEKRLVVAQDDYVLLEKDHIVWWLSEFCNGDIEDEEFRRHIIDLLVNSVTVWDEPDGWYKITSVYNLTSNKTKTFRCSDLSGQAPPLKYNPNTLFFIGTLFGQTTKHRVE

SEQ ID NO: 5048 - protein, 513 aa, Unknown
  Description of Unknown: Integrase B5049 sequence
  PTHR30461:SF3,SM00857,G3DSA:1.10.10.2600,IPR036162,PF13408, PS51737,IPR025827,G3DSA:3.40.50.1390,IPR006119,IPR038109, PF07508,IPR011109,SSF53041,PTHR30461,Coil, PS51736,cd00338,PF00239
MMQQALNAVIYARYSSHNQTEQSIEGQLRDCYAFAEREGLQVVGEYIDRAITGRTDERPDFQRMIADARKQEFQRVIVWKFDRFSRDRYDSAIYKHKLKQCGVRVLSAMENVGEGDVSIILEALLEASAEQYSLDLSKKVLRGQRESRLKGTFLGGLTPIGYKLENRKLVADERTAPIVRYIFEQYAKGTSNQDIINELAARGILNRHGKPLSHSTLQTILKNKKYIGVYTHGGQDVAGGCEALIDEKTFLKVQEQLSKRKHAPAASKAVIEYLLQGKLYCGYCGFNMFGDSGRGRNGSTYRYYACRRRKKERDCKKKNEKKDFIEWYVVEQTVEYVLTPERIEYIASELVAQYKKDCGIDRIKTYEKQLDRIKAEISRLVDTLAVCPAAARQPIFDKMEQLDAENQEVELDLSKLRISAKIQISKDHIADWLKQFCNGDALDVDFQKRIIDTFINSVYLYDDKVIIYYNIEGGKQVSYIDMIDSTEEPPFSDDAPGSSGGSDLKRPALRLCC

SEQ ID NO: 5049 - protein, 513 aa, Unknown
  Description of Unknown: Integrase B5050 sequence
  PTHR30461:SF3,cd00338,SM00857,G3DSA:1.10.10.2600,IPR036162, PF13408,PS51737,IPR025827,G3DSA:3.40.50.1390,IPR006119, IPR038109,PF07508,IPR011109,SSF53041,PTHR30461, PS51736,Coil,PF00239
MQQAVIYARYSPGPNQTEQSIEGQVRECTKYAELHDLRIVGTYIDRKISGKTDNRREFQRMIDDSEKHIFDVIILYHTDRFARNRYDSAIYKHKLKENGVELRYATTDIPKGPEGIILESIMEGWAEYYSAELSRKIKRGMRESALKCHSTGAGRCLGYRTAEDKSLVIEPEGAKAVQTVFDMYIKGKSHADICRYLNDCGFRTAQGKLFNKNSVTHIIRNKRYIGVYTYDDITIEDGIPAIISKDTFHLAQLEAARRKTAKRPKEPKAEYLLSGKAFCGHCQKPLVGVSGTGKSGNKWYYYYCQESRAKRGCTKKPVKRDWLEREVVKRTVAEVLQPEVIQHIAKKCYDLQMEYRQDNSDVLFYELKLKDVRKAIKNTMHAIESGVKTKTLPARLQELENEEEALEAELAIAKASDFVITADQIEFLLTQFAEPWECESEEEYHRRIIKCFVHKVFLFDDKLLIYYNVSRDGKTREQSEAELLEEALGEGFDKRSSGSTMRKATPCGWLFAC

SEQ ID NO: 5050 - protein, 513 aa, Unknown
  Description of Unknown: Integrase B5051 sequence
  PTHR30461:SF3,SM00857,G3DSA:1.10.10.2600,IPR036162,PF13408, IPR025827,PS51737,G3DSA:3.40.50.1390,IPR006119,IPR038109, PF07508,SSF53041,IPR011109,PF00239,PTHR30461, PS51736,Coil,cd00338
MKKQPTGGKRLVAYYRYSGGSHQTEQSIEGQRRDCETYARIHGMVILHEYIDRHISGKTDDRPEFQQMIADAGKGMFDYVICWKTDRIARSRYDSIVYKKKLRDNGVELLYAAEANVEGSGGIIVEGLMEALAEYYSAELAEKVRRGMRESALKGKAIGSSRPLGLTVDKDKKYIIDPAGAAAVRYIFEQYAAGAASSAIVAHLNEQGLCTSRGNPFNKSSVVRIIQNEVYRGVYVSPKFDVRIEGAVPAIIDDDLWERAQKMFVRNRQSRSPRNDRADYILSGKLFCGECGTAMKGVSGHSSNGEVYFYYNCPCKDCHRRNIPKDELEGLVIRTVCNDVLQPDVMDRIADSVIESQTAELNQPNPEKEALQHELADVQRKAKNLLSALENGTAGAMLTNRLAELEQQADTLSYQLSSLESEPKFPVFSKEEVLYLLEQFLIAPSEKTKAYRRRLIDTFVSKIEVSNTELTIYFNIAEEDCGKMKKAPQSNQPEGCSTEKQMVRVARIELTAS

SEQ ID NO: 5051 - protein, 513 aa, Unknown
  Description of Unknown: Integrase B5052 sequence
  PTHR30461:SF3,SM00857,G3DSA:1.10.10.2600,IPR036162,PF13408, IPR025827,G3DSA:3.40.50.1390,PS51737,IPR006119,IPR038109, PF07508,SSF53041,IPR011109,PF00239,PTHR30461, PS51736,Coil,cd00338
MRAFIYCRFSSHKQQELSIEGQRDICQEYADKHNITVVGQYADRARSGKTENRADFRRLMRDAATGVVDCVLVWRYDRFFRNRAESALYRKQLEAAGVHLISVTEYIPEGSAGIITQGMIETVAEYFSAKLSEDVSRGMNKAAQHCQIVGRAPLGYRAGPNKRWQIDPVGAELVRRIFEWYASGKAMGQLAAQLNEEGHRTTNGTLYTRSSFNSILRNEKYIGVYSYGGEVRIEGGCPRIIEDELFFTVQRRLSANRHRPGAYKAEVPYLLSGKLFCGLCGAPMTGTAGTSHTGARHYYYICNNRRAKACKKKNVRLDLIEEAVLQSALDILTDENIAYISAEVERRCAENSDSAALLASLNAQLEEVQRRLKNIGNAIAQGIITETTKELLEEAEADRTALRQQIDRAKVQAALVVKAEAVACWLDGFRRGDRTDPDFRRQVFGALVHSVFVYDDYLKIIFNVDSAGAAVVPYEAAQAATPSEAPPGSYLDTLGAPKNALHESVGHFFVALF

SEQ ID NO: 5052 - protein, 513 aa, Unknown
  Description of Unknown: Integrase B5053 sequence
  SM00857,G3DSA:1.10.10.2600,IPR036162,PF13408,PS51737, G3DSA:3.40.50.1390,IPR025827,IPR006119,IPR038109,PF07508, IPR011109,SSF53041,PTHR30461,Coil,PS51736, cd00338,PF00239
MKMMQNDNRTAITYYRYSSHRQGEQSIEGQRAEAERWAKANGYTIVREYADRAMTGTNDDREQFQLMLRELERLRPAVLILWKVDRMGRNKEEIAFNKYRCKKNGVKVIYTAESIPDTPEGVILESVLEGMAEYYSLQLSQNVRRGLRVSATKCQSTGGNRPLGYRTGPDKKFEIDPEGAAIVRQVFERYVRGETQAEIVHALNEQGLRTLHGRPFTHNSLRTVLQNEKYIGVYQYKDVRIEGGVPAIIDVETFQKAQRIRKRNRRINWKRWSVAEYLLTGKLFCGSCGDMMVGVSGTSKTGAKHHYYGCSSRYGDKRFRSTCRRKAVRKAWIEGIVLREISQLLQDDALLDFIAENTYRYYVEANTDTAYTDALQTNLQEVEKSLANIMRAVEAGIFNDTTKARMEELEMQKQQIQSSLNMAKLDNGLHLTKDHIFYFLRRFRELDIENIDCRRQLINTFVNAVFIYDDHITLTFNYSGDDRTISLAETDAAVEGDKFICDVSCPAKQKTTS

SEQ ID NO: 5053 - protein, 513 aa, Unknown
  Description of Unknown: Integrase B5054 sequence
  PTHR30461:SF3,SM00857,G3DSA:1.10.10.2600,IPR036162,PS51737, G3DSA:3.40.50.1390,IPR006119,IPR038109,PF07508,IPR011109, SSF53041,PTHR30461,Coil,PS51736,cd00338, PF00239
MKRPDDYAIYLRKSRKDLDLEALGEGETLARHRTALLELADKKGLKISRIYEEMVSGESIADRPQMQQLLDDVCAGIYAGVLVMEVERLARGNTKDQGEVAEAFSMSNTLIVTPTKTYDPNNEFDEEYFEFGLFMSRREYKTIRRRMQRGLIESIKEGNYVGSLPPYGYDIIRINKKERTLKLNDQSQYVKMMFDWFVNEGLSCGQIARRLSEMGIPTQTGKSEWNRATVKDILQNTLYTGKIRWNRRKVSKEKGSDGRTVKRKRRLTPEDYMVVDGKHPAIVSQEIFDKAQTLFCGQVPLKAQTTITNPFARLMVCKHCGKGIGYNTFAHRGGQTKGRMSHRTSLTCKVKSAPYDDVVAAVAAALRDYISDFEFKLNNDEEARKNKQHEEMLHSMDVELNKLKQKREKLFDFLESGIYTKQEFMERKGVLSERIEAMQGSIENIKKSLPPPVDYREKILRVSEALSALEDPDVPAKAKNDLLKTVIRKIEYDCVDFGRNKGGEVHLDVYLKE

SEQ ID NO: 5054 - protein, 513 aa, Unknown
  Description of Unknown: Integrase B5055 sequence
  PTHR30461:SF3,SM00857,G3DSA:1.10.10.2600,IPR036162,PF13408, IPR025827,G3DSA:3.40.50.1390,PS51737,IPR006119,IPR038109, PF07508,IPR011109,SSF53041,PF00239,PTHR30461, PS51736,Coil,cd00338
MPDVRLITPITKQNAQKTQVAAYCRVSSNSADQLNSYAAQIRTYKKVIGARKDWELVDIFADEGLTGMKSDTRDEFQRMIRMCELKQIDLIVTKSISRFARNTKDALAYVRKLRLLGVGVLFEKEGISTLSMGDEMLLNTFSALAQEESQSISMNQRLSIVKRMELGEYVDSNAPYGYRLVNKKLDIHEPEAAIVRNIFGWYLQGYSTSEIARELNNRNIPTKTGKDTWRSSRVAYILKNERYIGDSFYQKTYRETTVPFNQHTNRGQEDRFYAKGTHPAIIEKEVFNAVQELLEKRKDSFARKTVQNIYPLTSRIQCSECGSFYRRRLVSGTVKWVCSLHKDESTACDSNYYSEERIYAGFITMVNKLRFSEDNILAQVISRLEMTLAAMKRNNLAAKDMSKGIAELNAKLLMLEQLRSKGYLAVEVYQAQANDINAELAKLKDARQEKFQSKTATMLEEVKKLKMLIFELEEPLEAFDEKLFLEIVKSIQINKKDEMSVELLGGLRFKERI

SEQ ID NO: 5055 - protein, 513 aa, Unknown
  Description of Unknown: Integrase B5056 sequence
  PTHR30461:SF3,SM00857,G3DSA:1.10.10.2600,IPR036162,PF13408, IPR025827,G3DSA:3.40.50.1390,PS51737,IPR006119,IPR038109, PF07508,IPR011109,SSF53041,PTHR30461,Coil, PS51736,cd00338,PF00239
MKKQPTGGNRLVAYYRYSGGSHQTEQSIEGQRRDCETYARIHGMVILHEYIDRHISGKTDDRPEFQQMIADAGKGMFDYVICWKTDRIARSRYDSIVYKKKLRDNGVELLYAAEANVEGSGGIIVEGLMEALAEYYSAELAEKVRRGMRESALKGKAIGSSRPLGLTVDKDKKYIIDPAGAAAVRYIFEQYAAGAASSAIVAHLNEQGLCTSRGNPFNKSSVVRIIQNEVYRGVYVSPKFDVRIEGAVPAIIDDDLWERAQKMFIRNRQSRSSRNDRADYILSGKLFCGECGTAMKGVSGHSSNGEVYFYYNCPCKDCHRRNIPKDELEGLVIRTVCNDVLQPDVMNRIADSVIEAQTAELNQPNPEKEALQHELADVQRKAKNLLAALENGTAGAMLTNRLAELEQQADTLSYQLSSLESEPKFPVFSKEEVLYLLEQFLIAPSEKTKAYRRRLIDTFVSKIEVSNTELTIYFNIAEEDCGKMKKAPQSNQPEGCSTEKQMVRVARIELTAS

SEQ ID NO: 5056 - protein, 513 aa, Unknown
  Description of Unknown: Integrase B5057 sequence
  PTHR30461:SF3,SM00857,G3DSA:1.10.10.2600,IPR036162,PF13408, IPR025827,G3DSA:3.40.50.1390,PS51737,IPR006119,IPR038109, PF07508,SSF53041,IPR011109,PF00239,PTHR30461, PS51736,Coil,cd00338
MKKQPTGGNRLVAYYRYSGGSHQTEQSIEGQRRDCETYARIHGMVILHEYIDRHISGKTDDRPEFQQMIADAGKGMFDYVICWKTDRIARSRYDSIVYKKKLRDNGVELLYAAEANVEGSGGIIVEGLMEALAEYYSAELAEKVRRGMRESALKGKAIGSSRPLGLTVDKDKKYIIDPAGAAAVRYIFEQYAAGAASSAIVAHLNEQGLCTSRGNPFNKSSVVRIIQNEVYRGVYVSPKFDVRIEGAVPAIIDDDLWERAQKMFIRNRQSRSPRNDRADYILSGKLFCGECGTAMKGVSGHSSNGEVYFYYNCPCKDCHRRNIPKDELEGLVIRTVCNDVLQPDVMDRIADSVIAAQTAELNQPNPEKEALQHELADVQRKAKNLLSALENGTAGAMLTNRLAELEQQADTLSYQLSSLESEPKFPVFSKEEVLYLLEQFLIAPSEKTKAYRRRLIDTFVSKIEVSNTELTIYFNIAEEDCGKMKKAPQSNQPEGCSTEKQMVRVARIELTAS

SEQ ID NO: 5057 - protein, 513 aa, Unknown
  Description of Unknown: Integrase B5058 sequence
  PTHR30461:SF3,IPR036162,PS51737,IPR011109,PTHR30461, PF00239,G3DSA:1.10.10.2600,IPR006119,SSF53041,cd00338, SM00857,IPR025827,IPR038109,PS51736,mobidb-lite, PF13408,G3DSA:3.40.50.1390,PF07508,Coil
MMQQALNAVIYARYSSHNQTEQSIEGQLRDCYAFAEREGLQVIGEYIDRAITGRTDERPDFQRMIADARKQEFQRVIVWKFDRFSRDRYDSAIYKHKLKQCGVRVLSAMENVGEGDVSIILEALLEASAEQYSLDLSKKVLRGQRESRLKGTFLGGLTPIGYKLENRKLVADERTAPIVRYIFEQYAKGTSKQDIINELATRGILNRHGKPLSHSTLQTILKNKKYIGVYTHGGQDVAGGCEALIDEKTFLKVQEQLSKRKHAPAASKAVIEYLLQGKLYCGYCGFNMFGDSGRGRNGSTYRYYACRRRKKERDCKKKNEKKDFIEWYVVEQTVEYVLTPERIEYIASELVAQYKKDCGIDRIKTYEKQLDRIKAEISRLVDTLAVCPAAARQPIFDKMEQLDAEKQEVELDLSKLRISAKIQISKEHIADWLKQFCNGDALDVDFQKRIIDTFINSVYLYDDKVIIYYNIEGGKQVSYIDMIDSTEEPPFSDDAPGSSGGSDLKRPAPRLCC

SEQ ID NO: 5058 - protein, 513 aa, Unknown
  Description of Unknown: Integrase B5059 sequence
  cd00338,SM00857,G3DSA:1.10.10.2600,IPR036162,PS51737, G3DSA:3.40.50.1390,IPR006119,IPR038109,PF07508,IPR011109, SSF53041,PTHR30461,PS51736,Coil,PF00239
MELYAQYLRKSRADMEAEQHGAGETLARHKYMLDQLANSMGIVISKVYKEIVSGETISDRPVMQQLLQDVEAGMYKGVLVVEVERLARGDTIDQGIVSQTFKYSNTQIITPTKVYNPNDEFDEEYFEFGLFMSRREYKTINRRIQAGRIASVKEGKYPSHKAPFGYRVVKLQNEKGYTLEIIEHEADAVRKIFDMYVNKLEGATTIAHTLNALGYKPRISNIFSTQAITAILDNPVYAGYVTWERRKEVRTMQNGIVKKSRPRSHNYIKCKGRHQAIIDENLWEKAHELRTNKRIATPRKSKELTNPLCGLIYCTKCGHKMQRRPAGSRQPADVIMCPNNECNNYASYMSLIEKDIIEVLCDWIDKYSICSKQDNELTLNINTLNNNITALNKELSTTKEQLNNAYNFLERGIYTPEVFFERSAALKDKINTIEQNIHNIQNEILKEQKQQQAKLNFLPKVKTIVDCYWELDNAKAKNDMLKEVIDHIDYIKEVKGRGHEDDFKLTIYPIISK

SEQ ID NO: 5059 - protein, 513 aa, Unknown
  Description of Unknown: Integrase B5060 sequence
  SM00857,G3DSA:1.10.10.2600,IPR036162,PF13408, IPR025827,G3DSA:3.40.50.1390,PS51737,IPR006119, IPR038109,PF07508,IPR011109,SSF53041, PF00239,PTHR30461,PS51736,Coil,cd00338
MKEYCIYLRKSRADAEAEARGEGETLARHEKALTELAKKHDYPVHGIYREIVSGDTIAARPEMQRLVEEVQSGRWAGVLCMEVERLARGDTIDQGIVAQAFKYSNTLIITPQKTYDPNNEMDEEYFEFSLFMARREYKTIKRRLQAGRLASTKEGNYLGTRAPYGYVFGFSPEDGRRILVVHEETAALVRSAFGWYAQGVTSAEIARRLNAAGARTNYGHLWTPGRVRDMLHTPVYCGKIRWNQRVSTPKIENGQRVVKRPRSDKEILVDGKHTPIVDSALYDQVQAMLCDNRNTARTRSDCTLKNPYAGLLFCGQCGKAMVRRTWARETDSVYCRTLDCPTSSISVAELTESVIDILDTWEKMAQSPAKEWRAANQAATFNEPLADKCRETIRQAQAQMERLQDLLEQGIYSPEEYVKRRDVLRERISDARTELAGIEGNRPKMSDAEKIRALLPRIRDVSNALKAGNREPEELNAMLKTVINRIYYYKTERGKRNVKAINMLSLQIYPQTP

SEQ ID NO: 5060 - protein, 513 aa, Unknown
  Description of Unknown: Integrase B5061 sequence
  PTHR30461:SF3,SM00857,G3DSA:1.10.10.2600,IPR036162,PF13408, IPR025827,G3DSA:3.40.50.1390,PS51737,IPR006119,IPR038109, PF07508,IPR011109,SSF53041,PF00239,PTHR30461, PS51736,Coil,cd00338
MKKQPTGGKRLVAYYRYSGGSHQTEQSIEGQRRDCETYARIHGMVILHEYIDRHISGKTDDRPEFQQMIADAGKGMFDYVICWKTDRIARSRYDSIVYKKKLRDNGVELLYAAEANVEGSGGIIVEGLMESLAEYYSAELAEKVRRGMRESALKGKAIGSSRPLGLTVDKDKKYIIDPAGASAVRYIFEQYAAGAASSAIVAHLNEQGLCTSRGNPFNKSSVVRIIQNEVYRGVYVSPKFNVRIEGAVPAIIDDDLWERAQKMFVRNRQSRSPRNDRADYILSGKLFCGECGTAMKGVSGHSSNGEVYFYYNCPCKDCHRRNIPKDELEGLVIRTVCNDVLRPDVMERIANSVIEAQAAELNQPNPEKEALQNELADVQRKAKNLLSALENGAAGAMLTNRLAELEQRADTLSYQLSSLESEPKFPVFSKEEVLYLLEQFLIAPAEETKAYRRRLIDTFVSKIEVSRTELTIYFNISEEDCGKMKKAPQSSQPEDCSTEKQMVRVARIELTAS

SEQ ID NO: 5061 - protein, 513 aa, Unknown
  Description of Unknown: Integrase B5062 sequence
  PTHR30461:SF3,cd00338,SM00857,G3DSA:1.10.10.2600,IPR036162, PF13408,IPR025827,G3DSA:3.40.50.1390,PS51737,IPR006119, IPR038109,PF07508,IPR011109,SSF53041,PTHR30461, PS51736,Coil,PF00239
MAKAKQKAATNDISKLAVIYARYSSHNQTEQSIEGQLAAGHRYADLKGYTVVHEYIDRAMTGRNDNRDDFQKMLYDTSKKQFGAIIVWKVDRFGRNREEITFNKYRCKKNGVRVEYVAENLPDSPEGVILESVLEGMAEYYSLQLSQNVQRGLLESAKKHQVIGGNVPLGLMMDAHKKYVPDPKTAPTVKLIFDMYAEGSTTSEIINHLNSIGMRTKAGKPFTKSSLTTVLKNEKYIGVYKYKDIIRDEGVIPPIVDKEIFYKVQELLKVNRRMPSHKWSYSDYILTDKLFCGKCGTAMVGESGFGKMGVKYSYYICAKRRKDKTCDKKPVRQEWIEEIVLQRVQGILQNEELLEFIAENTWQYYLAQDESMEKLKGLQTELDKVEKSAANLMKAIEAGIFNDMTKARMDELDDQRAVIKKAMAEIEIEKGFKLTKDHILYFLEQFKKLDYKDRDCQRRLIDVFVNSIFVYDDKLRIAFNFGGSDSTITLNEVDKADRGEGFVCCASCPVIKP

SEQ ID NO: 5062 - protein, 513 aa, Unknown
  Description of Unknown: Integrase B5063 sequence
  PTHR30461:SF3,SM00857,G3DSA:1.10.10.2600,IPR036162,PS51737, G3DSA:3.40.50.1390,IPR006119,IPR038109,PF07508,SSF53041, IPR011109,PTHR30461,Coil,PS51736,cd00338, PF00239
MKRPDDYAIYLRKSRKDLDLEALGEGETLARHRTALLELADKKGLKVTRIYEEMVSGESIADRPQMQQLLDDVCAGRFAGVLVMEVERLARGNTKDQGEVAEAFSMSNTLIVTPTKTYDPNNEFDEEYFEFGLFMSRREYKTIRRRMQRGLIESIKEGNYVGSLPPYGYDIIRINKKERTLKLNDQSQYVKMMFDWFVNEGLSCGQIARRLSEMGIPTQTGKSEWNRATVKDILQNTLYTGKIRWNRRKVSKEKGSDGRTIKRKRRLTPEDYMVVDGKHPAIVSQEIFDKAQTLFCGQVPLKAQTTITNPFARLMVCKHCGKGISYNDFAHRGGQTKGRMSHRTSLTCKVKSAPYDDVVAAVAAALRDYISDFEFKLNNDEEARKNKQHEEMLHSMDVELNKLKQKREKLFDFLESGIYTKQEFMERKGVLSERIEAMQGSIENIKKSLPPPVDYREKILRVSEALSALEDPDVPAKAKNDLLKTVIRKIEYDCVDFGRNKGGEVHLDVYLKE

SEQ ID NO: 5063 - protein, 513 aa, Unknown
  Description of Unknown: Integrase B5064 sequence
  PTHR30461:SF3,SM00857,G3DSA:1.10.10.2600,IPR036162,PF13408, IPR025827,PS51737,G3DSA:3.40.50.1390,IPR006119,IPR038109, PF07508,IPR011109,SSF53041,PTHR30461,Coil, PS51736,cd00338,PF00239
MMQQALNAVIYARYSSHNQTEQSIEGQLRDCYAFAEREGLQVVGEYIDRAITGRTDERPDFQRMIADARKQEFQRVIVWKFDRFSRDRYDSAIYKHKLKQCGVRVLSAMENVGDGDVSIILEALLEASAEQYSLDLSKKVLRGQRESRLKGTFLGGLTPIGYKLENRKLVADERTAPIVRYIFEQYAKGTSKQDIINELATRGILNRHGKPLSHSTLQTILKNKKYIGVYTHGGQDVAGGCEALIDEKTFLKVQEQLSKRKHAPAASKAVIEYLLQGKLYCGYCGFNMFGDSGRGRNGSTYRYYACRRRKKERDCKKKNEKKDFIEWYVVEQTVEYVLTPERIEYIASELVAQYKKDCGIDRIKAYEKQLDRIKAEISRLVDTLAVCPAAARQPIFDKMEQLDAEKQEVELDLSKLRISAKIQISKEHIADWLKQFCNGDALDVDFQKRIIDTFINSVYLYDDKVIIYYNIEGGKQVSYIDMIDSTEEPPFSDDAPGSSGGSDLKRPALRLCC

SEQ ID NO: 5064 - protein, 513 aa, Unknown
  Description of Unknown: Integrase B5065 sequence
  PTHR30461:SF3,SM00857,G3DSA:1.10.10.2600,IPR036162,PF13408, PS51737,IPR025827,G3DSA:3.40.50.1390,IPR006119,IPR038109, PF07508,IPR011109,SSF53041,PTHR30461,PS51736, cd00338,PF00239
MNRAVIYARYSSDMQREESVEAQIRACKYYAQQNGIDIIGIYADRAKSGMYHSEKREEFQALLNAAPRKEYDIVLVHKLNRFGRAGVKALNDRDYLERLGIEIISVTERLENTPEGRLMLYVITGMNEYYSRNLAGEVLKGLRENAYKGITTGGTPALGYNLGADKKLVINEQEAAAVRLIFKMYISGAGYGEIIDELNSRGFRTKRGAKFGKNSIYDILRNERYTGRFTYGKTKTVNGHRSQHKKEKEYISIEGGCPAIISADEWERVQRLMDVKKHDAASGKAKELYILSGKLFCGHCGARMVGNSRVSRGERYLYYDCNAKLRKKTCTKHAVKKNEIEQAVIQKLNQLAFSDDLIERFVDEAYKAQDNEMPDIGGKIADIDKKISNLVTAIESGADIGPIKQRMADLSAQKDALLSSNVPKGDFLTRDEIRSRFKKFLNIADLPPAQQKFIISEYVTRIEVFDYDGGGHFCRITLSNNTSVDTDVLGSSAPSYQQQAEIINGKLVISFLL

SEQ ID NO: 5065 - protein, 513 aa, Unknown
  Description of Unknown: Integrase B5066 sequence
  SM00857,G3DSA:1.10.10.2600,IPR036162,PF13408,IPR025827, G3DSA:3.40.50.1390,PS51737,PF14287,IPR006119,cd03770, PF07508,IPR011109,IPR038109,SSF53041,PTHR30461, PS51736,IPR025378,PF00239
MQENKQNLRFTALYCRLSSDDELKGDSNSIIHQKQILQDYALKHSLTPTEIYVDDGFTGTNFDRPDFKRLLSDVENDLVKTVIVKDLSRLGRNYLKVGYYTEVLFPEKGVRFISIADNLDTSVNDELNDFIPFKNIMNEWYAKDLSRKQRAVVKSKGNSGKRLATRPLYGYKKAENGDWLIDEPTAAVVQKIFDLYLKGYGPASIANYLFANKVKIPSTIGLPKLNPEQNPYRWSKDTVAKILTYQDYCGDMINFKRSDVDSLVIFPDRQEPIISREIFAEAQKLRLDRKPVRHDYSEPVLFSDLLLCADCKSRMYAQRRYHGTTSYSCSKARKTQGCTSHYINENKLIDCVKSDINKLIKNKGIVIKLAKEKMHIDTKTAQCANSQNLKNAKKRILQIDTILKNLYEDKVLGNINLATFKKLESDYLREQAELNKVIFEQSKIKVNLENRSKSICGFLKKLESYNNPVSELSRDLLIDLIDKIEICEATKNGNERSQQVHIYYKEIGKINLE

SEQ ID NO: 5066 - protein, 513 aa, Unknown
  Description of Unknown: Integrase B5067 sequence
  PTHR30461:SF3,SM00857,G3DSA:1.10.10.2600,IPR036162,PF13408, IPR025827,G3DSA:3.40.50.1390,PS51737,IPR006119,IPR038109, PF07508,SSF53041,IPR011109,PF00239,PTHR30461, PS51736,Coil,cd00338
MKKQPTGGNRLVAYYRYSGGSHQTEQSIEGQRRDCETYARIHGMVILHEYIDRHISGKTDDRPEFQQMIADAGKGMFDYVICWKTDRIARSRYDSIIYKKKLRDNGVELLYAAEANVEGSGGIIVEGLMEALAEYYSAELAEKVRRGMRESALKGKAIGSSRPLGLTVDKDKKYIIDPAGAAAVRYIFEQYAAGAASSAIVAHLNEQGLCTSRGNPFNKSSVVRIIQNEVYRGVYVSPKFDVRIEGAVPAIIDDDLWERAQKMFIRNRQSRSPRNDRADYILSGKLFCGECGTAMKGVSGHSSNGEVYFYYNCPCKDCHRRNIPKDELEGLVIRTVCNDVLQPDVMNRIADSVIEAQTAELNQPNPEKEALQHELADVQRKAKNLLAALENGTAGAMLTNRLAELEQQADTLSYQLSSLESEPKFPVFSKEEVLYLLEQFLIAPSEKTKAYRRRLIDTFVSKIEVSNTELTIYFNISEEDCGKMKKAPQSNQPEGCSTEKQMVRVARIELTAS

SEQ ID NO: 5067 - protein, 512 aa, Unknown
  Description of Unknown: Integrase B5068 sequence
  PTHR30461:SF3,SM00857,G3DSA:1.10.10.2600,IPR036162,PF13408, IPR025827,PS51737,G3DSA:3.40.50.1390,IPR006119,IPR038109, PF07508,SSF53041,IPR011109,PF00239,PTHR30461, PS51736,Coil,cd00338
MKAVIYARFSSHNQREESIEGQVRACQRFAKEHDMTVIEIYADRGLSGLHADNRPEFQRMIADSDRHKFQALIMWNLDRFSRDKYDTAVYKSRLKKNGVTLYYSDQNIPDTPEGIILESLLEGFAQYYSANLSRNAKRGLQENARKCLWNGGGLPLGYTIDETKHFVIDPAGAACVRLIFQMYADNHSIKEIVSTLNEKGYRTVKGNKFRLGSIQGVLRNRKYIGEYHASGITVPNGVPAIVDVELFNAVQEKIGVVSAAKARNKAEIPYLLTTKVFCGHCGSPMIGESGTGKGGSTYRYYKCSCRKNRKGQCDKRTEQKEWLEETVVAQTVEKFLHPDVIEDVSNACVAVLEQDCQNNALLKALNAQLADVEKSSRNLIKAIEAGVFTASMRERLAELEQQKEDITVQIAREQLRKPQLSAEQIAFFLRSFLDGDAHDPNFQERIIESLVRRVDVYDEGPGNRKLTVFYNLKKNNHSSVSVKCSDSESVGLPKRSVAKAADFFSLLAEGRE

SEQ ID NO: 5068 - protein, 512 aa, Unknown
  Description of Unknown: Integrase B5069 sequence
  PTHR30461:SF3,SM00857,G3DSA:1.10.10.2600,IPR036162,PF13408, IPR025827,PS51737,G3DSA:3.40.50.1390,IPR006119,IPR038109, PF07508,SSF53041,IPR011109,PF00239,PTHR30461, Coil,cd00338
MSELYLMYLRKSRADGEDETVEEVLAKHERMLQKLAVEKFGHPIPGNSIYREVVSGETIEDRPEMKRVLSAIESPDVKGVLVVDPQRLSRGDWEDGGRILSSFKYSNTLIVTPPKTYNLYDQYDYRFFKMELSRGNDYLEYTKEILKRGRENSIEAGRYLGSVAPYGYEKVFVDKAPTLTPNVKEAEAINIAVRKCVYDGMGWTFIARELDSMGYKPRSGGKWNPYSLRDICINPVNIGKVKWNARKTIRVYKDGKLVKTRPRNKDSVIYKDGLHPPILEKDLYEKLIAKAGVITRENQHTQLVNPLAGLLYCSTCGRAMTYRTYKRNGSPRSAPRLACDNQINCGTKSSTFSDVYNILIDILENTVHDFEFKAEEDNGSARIEYDRMISEAENELRIIDAREEELYDYLEEGLYSKEIFLKRMSKYQDKRSELEKRLSFLRDKSAQPIDYHEKIRTFRHVIDSLNDDNTTAKHKNNLLKQIIKRIEYSRNSENRTKWDSSKPELKIYFHDF

SEQ ID NO: 5069 - protein, 512 aa, Unknown
  Description of Unknown: Integrase B5070 sequence
  PTHR30461:SF3,cd00338,SM00857,G3DSA:1.10.10.2600,IPR036162, PF13408,IPR025827,PS51737,G3DSA:3.40.50.1390,IPR006119, IPR038109,PF07508,IPR011109,SSF53041,PTHR30461, PS51736,Coil,PF00239
MLADYLEKIRTKTNVLVLKAVIYARYSSDMQRSESIAAQIRFIREFAKNNNIIIVSEYIDEAQSAKRDDREAFQQMMKDSKSAEWQIVLVHKLDRFARNRFDSATYRIHLRKNRKYLISAVEQFDDSPESAMLEAVIEAMSEYYSKNLAREVMKGLTENALKGKNCGGTPPLGYDLDEHKFYKINAFEAQGVKLIFKLFLDGKTYSEIISILNAAGYRTKCNRLFSRNSLYEILRNEKYKGIFVYNKTQSRDEITGKRSGHRYKSEDEVIRINGVVPQLISPEDWDVAQSILDNRKKAYGNNAKETYLLSGKIKCGKCGGSYVGRRVFNSCGVKYIYYACNEKRNPNFKCDNSSVRRDWIEDIVVKKVKEFVREFNGKYFEDIQSEYIKEVTDCKQKEIMALRSKLNSIDADIQRLVDAISKCSLESLINRLELLEQQKKEIQADIDKFEIPDNNVSIEQIKKLLSKAEQMLEEESTPLKELINLVVKKIVVNESDIQIYMNCFDKTMTHKR

SEQ ID NO: 5070 - protein, 512 aa, Unknown
  Description of Unknown: Integrase B5071 sequence
  PTHR30461:SF3,SM00857,G3DSA:1.10.10.2600,IPR036162,PF13408, IPR025827,G3DSA:3.40.50.1390,PS51737,IPR006119,IPR038109, PF07508,IPR011109,SSF53041,PF00239,PTHR30461, PS51736,Coil,cd00338
MRNAVIYARYSSDRQREESIEGQIRVCEDFARRNDMRILKIYTDRALTGRTDKRPEFQLMIKEAASRAFEVVIVYKLNRFARNRYDSASYKHKLKKYGVKVVSAMENIADDPSGILLESVIEGMAEYYSAELSENVIRGQTENILEGKWAGGTVPLGYKLDAEKHLVLDEEKVPIVKLVFSMTLDGLGTTTIARELNRRGYRNARGKPFRMSNIYVILKNKHYLGKFSWRGIESPYAVPAIVSESDFNEVQKIMNARRVNRVKAGERYMLSGKLFCGECGERMVGTSGTSRSGEIYYYYACPNHQRRNTRTCERTQIRADIIDSTVCDVTTRLLESDAAVEAIARQAVEVQTHTDVNAAIAATKKRMADVKKKIDNCVKAVESGIISDAIAKTLHDNEETLRDLECELAKQEIARKSSELTVDKIRFFFKSICRDAKKADKYRRILLSTLVRMVIVRGDALEIRYNYANEYPALQNPVKAECSYNNRLVVSCDKSTNTIYLTPSYFYILARL

SEQ ID NO: 5071 - protein, 512 aa, Unknown
  Description of Unknown: Integrase B5072 sequence
  SM00857,G3DSA:1.10.10.2600,IPR036162,PF13408,IPR025827, G3DSA:3.40.50.1390,PS51737,IPR006119,IPR038109,PF07508, IPR011109,SSF53041,PF00239,PTHR30461,PS51736, Coil,cd00338
MNAVIYARYSSHNQTEQSIEGQLRDCYEYAKRNDLTIIGEYIDRAISGKTDERPDFQRMIKDASKRQFERILVWKLDRFARNRYDSATYKHKLKQYGVKVISAMENVGEGDESVLLEALLEASAEYYSLDLKKKIARGMRESALRGKFVGGTLPWWCRVDDEQKLTVIDERAAIVREAFMRYDSGEGSKSIVSDFAKRSLRSNRGVPVTLSWLLSILKNRKTIGEYTYNGIEIPGGLPAVVDKPLFDRVQDRIARNRRTGGGEARAKTEYLLQGKLFCGLCGSPITAECGQNHKGVVYNYYACSLKKKKHQCKKANERKDFLEWYVVEQTLDYVLTPARTEYIASAIVAEYEREFDKSGIRVLEQKIALTEGEIQKTMDLCIQATTDAMRDRFMKRCEELDAKKADMEIDLSKLRVAASIVYTKDEVCAWLRQFCTGDCFDPAFRRRIIDVFINTVYLYDEKLIIYYNLRDSRQVSYIEAIGASSEIENLLPVPDNKKSAAECSTADGDGGA

SEQ ID NO: 5072 - protein, 512 aa, Unknown
  Description of Unknown: Integrase B5073 sequence
  PTHR30461:SF3,cd00338,SM00857,G3DSA:1.10.10.2600,IPR036162, PF13408,IPR025827,G3DSA:3.40.50.1390,PS51737,IPR006119, IPR038109,PF07508,SSF53041,IPR011109,PTHR30461, PS51736,Coil,PF00239
MLAEYLEKIKSRNNVTILKAALYARYSSDMQRGESVDAQIRLIKEFAEKNNIVIVKQYVDEAKSAKWDSRESFQQMIKDSKTSEWQVVIVHKLDRFARNRDDSTMYRIQLRRYRKYLISAVEQLGDSPEDQLLEAMIEAMAEFYSKNLARETIKGLTENALKGKHCGGIPPLGYELDEFNFYKVNEFEAQGVKLIYSLFLEGKSYTEIIAEINLLGYRTKRNRLFTRNSLYEILRNEKYTGTFVYNKMESRDEFSGVRSRHKYKPENEIIKVENMIPEIISKEDWKSVQTILNRRKKAYTNHAKEEYLLSGKIKCGECGGNYVGKRTFNSRGVKYVSYICNRKRNPNYKCSNSCIKRDWIEEKVIKVVKDFIRKFNEAYFDEIQHKYIEEMQDKKQKEVKVLQNELNRINADIERIVEAIAKAPLESLIEKLQVLENQKNGLKENINKIQQVPDFEVTIQEMKSLIKKAEKMLEENSVPFKELIDLVVKEIVVNRDNIQIYMCFDKKFIQER

SEQ ID NO: 5073 - protein, 512 aa, Unknown
  Description of Unknown: Integrase B5074 sequence
  PTHR30461:SF3,SM00857,G3DSA:1.10.10.2600,IPR036162,PF13408, PS51737,G3DSA:3.40.50.1390,IPR025827,IPR006119,IPR038109, PF07508,SSF53041,IPR011109,PTHR30461,PS51736, cd00338,PF00239
MKRITKIDAAAKETKKLRVAAYARVSTDSADQLISLEAQKEHYEQVIKNCPNWEFAGLYYDEGVSGTKMAKRDGLLRMLADCERGLIDYILVKSISRFSRNTVESVETVRRLSAMGIYIFFEKENIDTGKMEGELMLSIMSSLAEDESRSLSENNKWSIQKRFQNGTYVIGTPAYGYKNADGKMVIDEEKAEVVRRIFDSVLEGKSGGTIAKELNAKGIPTARGVQWRSSVITAMIRNETYTGVAVFQKTYKDDQFNSHVNHGERGMYRIEGHHDPIVSEEVFLAANTAVDNNAKEKGVVRNSGKYSVRYALSGKIFCGECGGKCKRKKIYGDIWYGCETHARESKKCRQLPVRADMVEAAFVNMMNKLIYGRDAVLLPMSGRLLGGGDKEIIDRLAEINTELDAVAERRQAADKFFAKGLLDAAVYREELDELARKEKELHTVRAGIEGDPNLDSDRQRALNELLRYTAKAELLTAFSDEVFTKHVDRVIIFSRKEVGFAMKCGPVFRERI

SEQ ID NO: 5074 - protein, 512 aa, Unknown
  Description of Unknown: Integrase B5075 sequence
  PTHR30461:SF3,IPR036162,PS51737,IPR011109,PTHR30461, PS00397,PF00239,G3DSA:1.10.10.2600,IPR006119,SSF53041, cd00338,SM00857,IPR025827,IPR038109,PS51736, IPR006118,PF13408,G3DSA:3.40.50.1390,PF07508,Coil
METTNKIPCGIYARVSTDKQGDSVENQLSQGEEFISRLGDTYYLDEDCIFVDNAVSGYYTSVFDREAMKNAIEKAKSGRCKVLIFKEVSRVGRDKQENPAIIGMFEQYGVRVIAINDNYDSNNKDNITFDILSVLSEQESKKISVRVSSAKKQKARRGQWNTDAPIGYKLNSETKKLEVDQDSGHIVQTIFNLYTEKGMGTFSIAKTLNDKGERTRDGNLFSRTSINRILKNQAYIGHTVYGKRRNVLQRNYDDTGRMTKKKVVQKIDPSDWTIVKNTHEPLVSEEVFYRAQGILSERTHHREPRRAYHPLTGILFCKKCGQGMVCQKRSFKDKEYRYYICKTYHKYGRDACPQANVNADELESDVIKIVRNRVRTLDKNKLAAFNNRSSDIARLEEDKKSRMKLLDRLYRDQRDLFDQRDLFPEAMYKEQMIELKTKAEGIEEEVNIITNQISAIEAVSNETANIYKIITEFLELDISDIGRLRTILHELIKKIDLENNHIDIEYRIKLFS

SEQ ID NO: 5075 - protein, 512 aa, Unknown
  Description of Unknown: Integrase B5076 sequence
  PTHR30461:SF3,SM00857,G3DSA:1.10.10.2600,IPR036162,PF13408, PS51737,G3DSA:3.40.50.1390,IPR025827,IPR006119,IPR038109, PF07508,IPR011109,SSF53041,PTHR30461,Coil, PS51736,cd00338,PF00239
MRNAVIYARYSSDRQREESIEGQIRVCEDFARRNDMRILKIYTDRALTGRTDKRPEFQLMIKEAASRAFEVVIVYKLNRFARNRYDSASYKHKLKKYGVKVVSAMENIADDPSGILLESVIEGMAEYYSAELSENVIRGQTENILEGKWAGGTVPLGYKLDAEKHLVLDEEKVPIVKLVFSMTLDGIGTTTIARELNRRGYRNARGKPFRMSNIYVILKNKHYLGKFSWRGIESPHAVPAIVSESDFNEVQKIMNARRVNRVKASERYMLSGKLFCGECGERMVGTSGTSRNGEIYYYYACPNHQRKNTRTCERTQIRADIIDSTVCDVTTRLLESDAAVEAIARQAVEVQTHTDMNAAIAATKKRMADVKKKIDNCVKAVESGIISDAIAKTLHDNEETLRDLECELAKQEIARKSSELTVDKIRFFFKSICRDAKKADKYRRILLSTLVRMVIVRGDTLEIRYNYANEYPALQNPVKAECSYNNRLVVSCDESTNTIYLTPSYFYILARL

SEQ ID NO: 5076 - protein, 512 aa, Unknown
  Description of Unknown: Integrase B5077 sequence
  SM00857,G3DSA:1.10.10.2600,IPR036162,PF13408,IPR025827, G3DSA:3.40.50.1390,PS51737,IPR006119,IPR038109,PF07508, IPR011109,SSF53041,PTHR30461,Coil,PS51736, cd00338,PF00239
MNAVIYARYSSHNQTEQSIEGQLRDCYEYAKRNDLAIIGEYIDRAISGKTDERPDFQRMIKDASKRQFERILVWKLDRFARNRYDSATYKHKLKQYGVKVISAMENVGEGDESVLLEALLEASAEYYSLDLKKKIARGMRESALRGKFVGGTLPWWCRVDDEQKLTVIDERAAIVREAFMRYDSGEGSKSIVSDFAKRGLRSNRGVPVTLSWLLSILKNRKTIGEYTYNGIEIPGGLPAVVDKPLFDRVQERIARKRRTGGGEATSKTEYLLQGKLFCGLCGSPITAECGQNRKGVVYNYYACSLKKKKHQCKKANERKDFLEWYVVEQTLDYVLTPDRTDYIAEAIVAEYERQFDKSGIKALEQKIALTEGEIQKTMDLCIQATTDAMRKRFMKRCEELDAKKADMEIDLSKLRVAASITYTKEEVRAWLRQFCAGDSFNPAFRRRIIDVFINTVYLYDDKLIIYYNLRDSRQVSYIEAIGASSEIENLRPVPDNKKTAVECSTADKNGGA

SEQ ID NO: 5077 - protein, 512 aa, Unknown
  Description of Unknown: Integrase B5078 sequence
  PTHR30461:SF3,cd00338,SM00857,IPR036162,PF13408, IPR025827,G3DSA:3.40.50.1390,IPR006119,SSF53041,PTHR30461, PS51736,Coil,PF00239
MKVVAIYSRKSKESDTGESIKNQIEMCKDYFLNQGKEFTFEIFQDEGFSGGNTKRPEFQRMMLLAKHGKFDIVACYKVDRIARNIIDFMNTFDILKKNKVSLVSVTEGFDPNTPIGMMLMTMIAGFAEMERMNIAQRVKDNMNALAKMGRWLGGTPPTGYRAIKENTHNGKYAMYLELIPEMKEKLTFIFESAAAGYTSRYIGKLVELHPKTIINIVYNPTYCPSDELSKSYLENLGYKVYGELNGRGYLPWNRRPIDVNGKKMYRSEDRFVTASKHEIPTDSATWIKANEEIRKRGDEGRPRISQYSFLAHMLTCKCGCGMSVDSGYKRKDGSRSYYFKCSSKKGGYNRNCDAKLIRVDYIENDILSLLQKICLNKELLNDEISKTETIVIDKNEIKNISQKIKSNDIEMENLVSQLGKLKGSAADAVTTKMNKLSEENDNLKQKLFLLEHDNILNSINHYDIDYLYNKIVNLMSSWENLSLEDKQFGIQSIIDKIKWDGEKFKISFIKKS

SEQ ID NO: 5078 - protein, 512 aa, Unknown
  Description of Unknown: Integrase B5079 sequence
  SM00857,G3DSA:1.10.10.2600,IPR036162,PF13408, PS51737,IPR025827,G3DSA:3.40.50.1390,IPR006119, IPR038109,PF07508,IPR011109,SSF53041, PTHR30461,PS51736,cd00338,PF00239
MNAVIYARYSSHNQTEQSIEGQLRDCYEYAKRNDLAIIGEYIDRAISGKTDERPDFQRMIKDASKRQFERILVWKLDRFARNRYDSATYKHKLKQYGVKVISAMENVGEGDESVLLEALLEASAEYYSLDLKKKIARGMRESALRGKFVGGTLPWWCRVDDEQKLTVIDERAAIVREAFMRYDSGEGSKSIVSDFAKRGLRSNRGVPVTLSWLLSILKNRKTIGEYTYNGIEIPGGLPAVVDKPLFDRVQARIARNRRTGGGEARAKTEYLLQGKLFCGLCGSPITAECGQNHKGVVYNYYACSLKKKKHQCKKANERKDFLEWYVVEQTLDYVLTPARTEYIASAIVAEYEREFDKSGIRVLEQKIALTEGEIQKTMDLCIQATTDAMRDRFMKRCEELDAKKTDMEIDLSKLRVAASIVYTKEEVCAWLHQFCTGDCFDPAFRRRIIDVFINTVYLYDEKLIIYYNLRDSRQVSYIEAIGASSEIENLLPVPDNKKSAAECSTADGDGGA

SEQ ID NO: 5079 - protein, 512 aa, Unknown
  Description of Unknown: Integrase B5080 sequence
  PTHR30461:SF3,SM00857,G3DSA:1.10.10.2600,IPR036162,PS51737, G3DSA:3.40.50.1390,IPR006119,IPR038109,PF07508,IPR011109, SSF53041,PTHR30461,Coil,PS51736,cd00338, PF00239
MKRPDDYAIYLRKSRKDLDLEALGEGETLARHRTALLELADKKGLKITRIYEEVVSGESIADRPQMQQLLDNVCAGDYAGVLVMEVERLARGNTKDQGEVAEAFSISNTLIVTPTKTYDPNNEFDEEYFEFGLFMSRREYKTIRRRMQRGLIESIKEGNYVGSLPPYGYDIIRLNKKERTLKLNDQSQYVEMIFDWFVNERLSSGQIANRLTEMGIPTQTGKSEWNRGTIKEILQNNLYVGKIRWYRRKVTKEKSNGTTVRKKRRLSPEDYFIVDGKHPAIVSQELFDKAQTLFCGQVPVKAQTTITNPFARLMVCKHCGKGICYQCHACRGGHTKPRMVHRTSLTCKVKSAPYDDVVAAVAAALRDYISDFEFKLNNDEEAKKNKQHEEMLRMMDTELQKLEQKREKLFDFLESGIYTKQEFMERKGVLSERIEAMQASIENIKKSLPPPVDYREKILRVSEALSALEDPDVPAKAKNDLLKTVVRKIEYDCVDFGRNKGGEVHLDVYLKE

SEQ ID NO: 5080 - protein, 512 aa, Unknown
  Description of Unknown: Integrase B5081 sequence
  PTHR30461:SF3,SM00857,G3DSA:1.10.10.2600,IPR036162,PF13408, IPR025827,G3DSA:3.40.50.1390,PS51737,IPR006119,IPR038109, PF07508,SSF53041,IPR011109,PTHR30461,Coil, PS51736,cd00338,PF00239
MICAMYLRKSRADYEAEARGEGETLAKHRETLMAVAKARDLTVTDVFSELVSGDTIAERPEMQRLMRAVERGDYDAVLCMDIDRLGRGDGADQSAILKTLKYSDTIVITPYKDYNTRREMDEEFFEYSQFIARSEYKRIKRRMWAGRVASVKEGKWISPKAPFGYRRVRIEPGRGWTLTPEPSEAEAVRSMFAWYASGECGKNTIARRINDMGFRTYGGKNFDPSEIRSILTNPVYIGKIRWNYRHQNIEMKDGKEIVTRPRSSECLVSDGLHPAIVDKDVFDAVQRCFTSLGDPCVPFRREMVNPLSGLMHCAECGRAMHMVPEYKRYGVDATYRCRKTGGCATTTIEAKYVYDALLFALRQWSTYGDSDGYAPDCAAPVNDTLPQIRAVSAQITQLRNQLSKLQDLLETGVYSADTYVERSKVINDRIAAASATLAELRQSQPVDERAAIIRLKPKIRHLLDTWDDSTPAEKNALLRTIVREIKYKKTRRCFRNENPAEYLTLTIYPIVD

SEQ ID NO: 5081 - protein, 512 aa, Unknown
  Description of Unknown: Integrase B5082 sequence
  PTHR30461:SF3,cd00338,SM00857,G3DSA:1.10.10.2600,IPR036162, PF13408,PS51737,IPR025827,G3DSA:3.40.50.1390,IPR006119, IPR038109,PF07508,SSF53041,IPR011109,PTHR30461, PS51736,Coil,PF00239
MYCLYLRKSRADIELEAKGELETLARHKKALLALAQKNNLTIGEIYEEIVSGETISSRPVVQQLLDEVENGKWDGVLVMEIERLARGDTIDQGIVARAFKIGNTKIITPSKTFDPNNEFDEEYFEFGLFMSRREYKTINRRIQRGRIASASEGKFIGSVPPYGYDKIKIKNDKGYTLRPNAQESVVVKRIYSMYLTGKGMHVIARELDDMGIKPRYRDTWSKSTLSDILTNPVYTGKLRWSYRQEDKYVVDGVVHKRRKVNASPIYVDGLHDPIISSEDFESAQKIRARNTLKTKPSLTLQNPLSGLVYCSMCGTMMTRQGAGSKNKYDTLRCPSRTCDCVSSPIFLVEQELLRLIQEWLFDYAVQSKNVHPEETDLTLYQSQLEEAKKEIVKYTAQLNKTYDLLEQGIYTEDVFKKRQAELSQKITEINTKSTHLKAKADGIATLRKSREEVMPKFISILELYQHAENAEQKNHLLRQLITKAVYAKNEPNKKNNALTPNFELHIYPNLMD

SEQ ID NO: 5082 - protein, 512 aa, Unknown
  Description of Unknown: Integrase B5083 sequence
  PTHR30461:SF3,SM00857,G3DSA:1.10.10.2600,IPR036162,PF13408, IPR025827,G3DSA:3.40.50.1390,PS51737,IPR006119,IPR038109, PF07508,IPR011109,SSF53041,PTHR30461,Coil, PS51736,cd00338,PF00239
MKKENEIRAVVYARYSSHSQTEQSIEGQISAAQVYAKAKGYTIVKEYVDRAKTGKNDNREAFQQMLSDTAKHEFSVIIVWKVDRFGRNREEITFNKYRCKKNDVRVEYIAEAVPDSPEGVILESVLEGMAEYYSLQLAQNIRRGIRASAEKCQAIGGHCSLGYAIDPKTKKYVIDPDTAPTVQLIFEKYAEGYTGMDIVRLLNEKGLRTVRGKPFTKNSLWTILKNERYAGVYLFKNEVRVEGGIPALVSRETFDKVQEMLEINHRSPVNTWNRATYLLTDKLFCGHCGSKMVGECGTSRTGATYNYYICAGKKRERNCSKKAVRQDWIEKVVLQQIRRVLFDQEFLEFIAHKAYTYYLEEKKKLDQSAAIKAQLSSVESSIDNLIRAMEAGIFSTSTKSRLDDLENQKTALTRTLAEIKLSEESFDLTEDRILFFLESMRGLDMDDVDSRKRLVKTFVNAVYLYDDKITLAFNFTDSCEKPEIIELTDIADGVVEKFVHRASCSTKKHCTS

SEQ ID NO: 5083 - protein, 512 aa, Unknown
  Description of Unknown: Integrase B5084 sequence
  PTHR30461:SF3,cd00338,SM00857,G3DSA:1.10.10.2600,IPR036162, PF13408,PS51737,G3DSA:3.40.50.1390,IPR025827,IPR006119, IPR038109,PF07508,IPR011109,SSF53041,PTHR30461, PS51736,Coil,PF00239
MNVVLYLRYSSDKQSEQSIEGQDRVCSAYCQANDMKIVGKYIDRALSASRHTEKRDEFLRMIRDSEKRTFDAVVVYKLDRFSRDRYDSAIYKNRLKRNGVRVISATENISDSPEGIILESVLEGMAEFYSKELSQKVSRGMNETALKCNSCGGHIPLGYKIESKKFVIDPSTAPIVKEAFERYAAGETVAEICDAFNNKGFRTAKGSAFNKNSFANMFANERYIGVYRYKDIRIENGIPVIIDKKLFEEVQRRLKKNACAPSRGKAKVEYLLAQKLFCGHCGGLMTGECGTSKNGDKYNYYTCSKRKRFHSCDKKNVSKEQIEEFVATKTLELFTPQKIDELADIAVKQAEAEAQENTVVPVIENEIKELEKSINNLLKLAERAPDSEALVNRLKELEDQKKAAERRLADENSKVLVLEKPHIVWWLNEFAKGDIHDEHFKRQIFDMLVNSVTIWDEPDGWKITIVYNLLSDVPRTFRCSDLTATGSPLQYNPNTILFLGHVMVYTTKYRTN

SEQ ID NO: 5084 - protein, 512 aa, Unknown
  Description of Unknown: Integrase B5085 sequence
  PTHR30461:SF3,cd00338,SM00857,G3DSA:1.10.10.2600,IPR036162, PF13408,IPR025827,PS51737,G3DSA:3.40.50.1390,IPR006119, IPR038109,PF07508,IPR011109,SSF53041,PTHR30461, PS51736,Coil,PF00239
MYEDIKTACLYVRFSSHNQTEQSIEGQTRVCRDFCKRHNIRIVEIYADRATSASKDIEKRVQFLKMIKDSEKGLFDAVIVYKLDRFARSRYDSATYKYRLKRNGVQLISATENISNDPEGIILESVLEGMAEFYSAELSQKINRGMRESAYKHNSIGGAIPLGYKIEDKKLVIDPKTAPIVKEAFEKYADGETVAEICRQFNARGYKTSKGTAFGKSSFTKIFRNERYIGVYTFHDYRAEGAVPAIIDKDLWNRVQLRAGKIKSAPARHKAKVVYLLSGKLFCGHCGSRMNGNCNASNYYYYQCYGKKNGHVDCNKKNIRKEFIERLVAQDALSLLTDEYIEQIAAIACEKNQHEIELDSALPTIRDRIHQVDLSLNNLLKAIESGSAPDMLVKRMGELEKEKKDLQAQAKKESEDIVELDKAQVIYWLEQFRGGSIEDEEFCRMLIDLFVNSVTVWDEDDDTYKVTVAYNLTSLPTKTYRLNKGGTLSDFASNAPARWSRGPRSTSLYARR

SEQ ID NO: 5085 - protein, 512 aa, Unknown
  Description of Unknown: Integrase B5086 sequence
  PTHR30461:SF3,SM00857,G3DSA:1.10.10.2600,IPR036162,PF13408, PS51737,IPR025827,G3DSA:3.40.50.1390,IPR006119,IPR038109, PF07508,SSF53041,IPR011109,PTHR30461,Coil, PS51736,cd00338,PF00239
MPEALNAVIYARYSSDRQTEQSIEGQLRECYAFAKANDIAVIDTYIDRAISGKTDNRPAFQKMIEDSAKRQFQAVIVYRLDRFTRNRYDSAIYKARLKKNGVKVLSAMENLNGSPESIIMESLLEGMAEYYSVELSQKITRGMRENALKGKALGGQRVLGYKVNSDCYFEIDETTAPVVVDIFKLYSSGKTVKEICDILNARGVKTARGGAFNKNSLHTILTNKKYIGIYKTKYGEIVGGIPAIIDKELFEMVALRMEQNKKAPARAKAEINYLLSTKLFCGKCRSAMVGESGTSKTGKKYYYYACVKKKREKACDKSNVKKDWIEDLVIQRTVTDILKDDVIEKIADRLVELQKAEAAESGTMLYLENSLAEIQVSIKNIMTAIEKGIITESTKTRLTELEDEKRNVEIEIAKESIARRIISREQIIYWISSFKDGDITSEKYRQQLIDTFVHAVFVYDDKIVITYNYSGENNTATISDLDLSSPPKSANPNSVFFIKHTFGFVYRIENAD

SEQ ID NO: 5086 - protein, 512 aa, Unknown
  Description of Unknown: Integrase B5087 sequence
  PTHR30461:SF3,SM00857,G3DSA:1.10.10.2600,IPR036162,PF13408, IPR025827,G3DSA:3.40.50.1390,PS51737,IPR006119,IPR038109, PF07508,SSF53041,IPR011109,PTHR30461,Coil, PS51736,cd00338,PF00239
MRNAVIYARYSSDRQREESIEGQIRVCEDFARRNDMRILKIYTDRALTGRTDKRPEFQLMIKEAASRAFEIVIVYKLNRFARNRYDSASYKHKLKKYGVKVVSAMENIADDPSGILLESVIEGMAEYYSAELSENVIRGQTENILEGKWAGGTVPLGYKLDAEKHLVLDEEKVPIVKLVFSMTLDGLGTTTIARELNRRGYRNARGKPFRMSNIYVILKNKHYLGKFSWRGIESPHAVPAIISESDFNEVQKIMNARRVNRVKAGERYMLSGKLFCGECGERMVGTSGTSRNGEIYYYYACPNHQRKNTRTCERTQIRADIIDSTVCDVTTRLLESDVAVEAIARQAVEVQTHTDMNAAIAATKKRMADVKKKIDNCVKAVESGIISDAIAKTLHDNEETLRDLECELAKQEIARKSSELTVDKIRFFFKSICRDAKKADKYRRILLSTLVRMVIVRGDTLEIRYNYANEYPALQNPVKAECSYNNRLVVSYDKSTNTIYLTPSYFYVLARL

SEQ ID NO: 5087 - protein, 512 aa, Unknown
  Description of Unknown: Integrase B5088 sequence
  PTHR30461:SF3,SM00857,G3DSA:1.10.10.2600,IPR036162,PF13408, IPR025827,G3DSA:3.40.50.1390,PS51737,IPR006119,IPR038109, PF07508,SSF53041,IPR011109,PTHR30461,Coil, PS51736,cd00338,PF00239
MKNAVIYARYSSDRQREESIEGQIRVCEDFARRNDMRILKIYTDRALTGRTDKRPEFQLMIKEAASRAFEVVIVYKLNRFARNRYDSASYKHKLKKYGVKVVSAMENIADDPSGILLESVIEGMAEYYSAELSENVIRGQTENILEGKWAGGTVPLGYKLDAEKHLVLDEEKVPIVKLVFSMTLDGLGTTTIARELNRRGYRNARGKPFRMSNIYVILKNKHYLGKFSWRGIESPHAVPAIISESDFNEVQKIMNARRVNRVKAGERYMLSGKLFCGECGERMVGTSGTSRSGEIYYYYACPNHQRKNTRTCERTQIRADIIDSTVCDVTTRLLESDAAVEAIARQAVEVQTHTDMNAAIAATKKRMADVKKKIDNCVKAVESGIISDAIAKTLHDNEETLRDLECELAKQEIARKSSELTVDKIRFFFKSICRDAKKADKYRRILLSTLVRMVIVRGDALEIRYNYANEYPALQNPVKAECSYNNRLVVSCDESTNTIYLTPSYFYILARL

SEQ ID NO: 5088 - protein, 512 aa, Unknown
  Description of Unknown: Integrase B5089 sequence
  PTHR30461:SF3,SM00857,G3DSA:1.10.10.2600,IPR036162,PF13408, PS51737,G3DSA:3.40.50.1390,IPR025827,IPR006119,IPR038109, PF07508,IPR011109,SSF53041,PTHR30461,Coil, PS51736,cd00338,PF00239
MRNAVIYARYSSDRQREESIEGQIRVCEDFARRNDMRILKIYTDRALTGRTDKRPEFQLMIKEAASRAFEVVIVYKLNRFARNRYDSASYKHKLKKYGVKVVSAMENIADDPSGILLESVIEGMAEYYSAELSENVIRGQTENILEGKWAGGTVPLGYKLNKEKRLILDEEKVHIVKLIFSMAAEGYGTTAIVRELNRRGYLNSRGKKFSASNVYVILKNKHYTGKFYWRGVESPVAIPIIIAPSDFEAVQKVMNTRKVSRVKTSEKYMLSGKLFCGECGARMLGVSGTSKNGIIYHYYACPNHRHKNTRTCERTQIRADIIDSTVCDVTTRLLESDAAVEAIARQAVEVQTHTDVNAAIAVTKKRMADIKKKIDNCVKAVESGIISEAIAKTLHDNEETLRDLECELAKQEIARKSSELTVDKIRFFFKSICRDAKKADKYRRILLSTLVRMVIVRGDVLEIRYNYANEYPALQNPVKAECSYNNRLVVSCDKSTNTIYLTPSYFYVLARL

SEQ ID NO: 5089 - protein, 512 aa, Unknown
  Description of Unknown: Integrase B5090 sequence
  PTHR30461:SF3,IPR036162,PS51737,IPR011109,PTHR30461, PF00239,G3DSA:1.10.10.2600,IPR006119,SSF53041,cd00338, SM00857,IPR025827,IPR038109,mobidb-lite,PS51736, PF13408,G3DSA:3.40.50.1390,PF07508,Coil
MAKKKKPAGGNAIIYARYSSHNQRDVSIEQQIEACRKHAAELGLTITDTYEDRAISGRTDNRPAFQRMMRDAEDGKFQYVLAWKSNRMGRNMMQAMVNESRLMDCGVKVFYAEEDFDDSAAGRFALRSMMNVNQFYSDNLAEDVRRGLMDNASKCMANGRQPLGYKRGEDGKVVVDEPAAAIVREIYTRIASGEMFMDIARDLNRRGIKTQSGSEWNKSSFKVLCRNERYRGIYIYGDTRIEGGIPPIVDDVLWYKVQEVLKVKKSKNRHHCPSDEDYLLTGKLRCGKCGGYMIGMSGRSKTGDVHHYYACQNRRVGHTCDKKNIRRDVVEPAVAQAIKQYCLTDDAIEWITDQTIAYWEDEDRKLQIDSIENDLSAVQSSISNVMKAIEMGVITETTRDRLIELERQQTDLKSKLALAKEEIVHVDRKDLISSLLAFRHGNVHDRAYQEKLFNAFLIAVYVYDDDHLKLVFNSFGKDDTVNIALDLGENDDNSGLSDVSKSSPILSNGQPD

SEQ ID NO: 5090 - protein, 512 aa, Unknown
  Description of Unknown: Integrase B5091 sequence
  PTHR30461:SF3,SM00857,G3DSA:1.10.10.2600,IPR036162,PS51737, G3DSA:3.40.50.1390,IPR006119,IPR038109,PF07508,IPR011109, SSF53041,PF00239,PTHR30461,PS51736,Coil, cd00338
MQTPRLKKRAASYVRVSTYQEKQEKSLADQIAMLNKIIDDDDTLINVGTYIDQGITGKYQSKRKQFLKLVRDCIEGRIDVVYVKQMRRFGRNTLETMQTIEKLRAYGVAVRFVMDGIDTIKDRGCSRLTMLANMAEEERDSLQETMIWSFQHRMEQGDYVFRPDLLFGYALNKNKEMVIVEEEAKAIKYIFETYAAGGRVVDIEAWLNEHGYVTRKGNPFCKSSIGDILQNEKYYGDLLIGKTRMDGPRRVRNEGESPMYLHEGHHEGIISKELFDKCQEVRQSRHYKTTKDYSDSDIFCKKVYCGQCGSLYYRQGRINCVSDFSQTAFACGLAVRSKRSKCRNKLQRIGTLKDGFVAVYNFLYDNRSTLNEIVVENEEYNEIVERLKELCESEKMYFEAEVKGLMNEQMKKNHTRLVGEVLNLEERKRFLLSRNFEISNCNSNLKKCNKVLRETGKIADFNDELFEIFIQRILVINRNNLVYELTSGHKINVEVLDNYKVRDEIRRVYVSE

SEQ ID NO: 5091 - protein, 512 aa, Unknown
  Description of Unknown: Integrase B5092 sequence
  PTHR30461:SF3,cd00338,SM00857,G3DSA:1.10.10.2600,IPR036162, PF13408,PS51737,G3DSA:3.40.50.1390,IPR025827,IPR006119, IPR038109,PF07508,IPR011109,SSF53041,PTHR30461, PS51736,Coil,PF00239
MYEEIKTACLYLRYSSSNQTEQSIEGQMHVCQDFCKRHNIRIVEMYIDRATSASKDIEKRVQFLKMIKDSEKGNFDAVIVYKLDRFARSRYDSANYKYRLKRNGVQLISATENISNDPEGIILESVLEGMAEFYSAELSQKINRGMRESAMKHNSIGGAIPLGYKTVDKKLVIDETTAPIVREAFQMYADGESVAEICRTFNNRGYKTSKGTRFGKSSFTKIFRNEKYIGVYKYHDYRAEDVIPPIIDKDLWDRVQVRIGKIKKAPARNKARHTYLLTGKLFCGHCGSAMNADGNSQGYLYYRCYGKKNLDKQCNKRNMEKNLIERLVAQDAMSFLTDEYIEKIATIACDRNKQEIESDSPIPVIRDRIRQVDVSLNNLLKAIETGSAPDMLVKRMGELETEKKDMEVQLKKEMAHQVYIDKEQVIFWLEKFREGDINDEEFCQTVIDLFVNSVTVWDEPDDKFRITIAYNLTSIPQKTYRLSKDGRLSDYASNTPDRESKYYLIIILNVCI

SEQ ID NO: 5092 - protein, 512 aa, Unknown
  Description of Unknown: Integrase B5093 sequence
  PTHR30461:SF3,IPR036162,PS51737,IPR011109,PTHR30461, PF00239,G3DSA:1.10.10.2600,IPR006119,SSF53041,cd00338, SM00857,IPR025827,IPR038109,PS51736,mobidb-lite, PF13408,G3DSA:3.40.50.1390,PF07508,Coil
MNTVIYARYSAGPRQTDQSIEGQLRVCTDFCKQRGLTVIDTYCDRHISGRTDERPEFQRLIADAKRKKFEAVVVYKTDRFARNKYDSAVYKRELKRNGIQIFYAAEAIPDGPEGIILESLMEGLAEYYSAELAQKIKRGMHESALKCQSTGSGRPLGYRVDEQKRFQIDPESAQTVQTIFEQYIKGESNAAICELLNSRGLRTAQGKPFNKNSINRIIKNRKYIGEYRYHDIVVEGGMPAIISKDTFNLAQAEMERRRTRKAPKSPKAEYLLAGRLFCGHCKGPMQGVSGTGKSGNKWYYYYCGNTRGKNKTCDKKQVSRDRLERAVVDFTVRYILQEEVLEELARKVHAAQERQNDTASEIAFYEKKLADNKKSIANVLRAIESGAATQTLPARLQELENEQAVILGELSFLKGKRLAFTEDQILFALMKHLEPYPGESEQDYRRRIISDFVSEVYLYDDRLLIYFNISSEDGKLKSADLSNIEGGEFDEELVSSTTMESNSGSPPTRGRE

SEQ ID NO: 5093 - protein, 512 aa, Unknown
  Description of Unknown: Integrase B5094 sequence
  PTHR30461:SF3,SM00857,G3DSA:1.10.10.2600,IPR036162,PF13408, IPR025827,PS51737,G3DSA:3.40.50.1390,IPR006119,IPR038109, PF07508,IPR011109,SSF53041,PTHR30461,Coil, PS51736,cd00338,PF00239
MRNAVIYARYSSDRQREESIEGQIRVCEDFARRNDMRILKIYTDRALTGRTDKRPEFQLMIKEAASRAFEVVIVYKLNRFARNRYDSASYKHKLKKYGVKVVSAMENIADDPSGILLESVIEGMAEYYSAELSENVIRGQTENILEGKWAGGTVPLGYKLDAEKHLVLDEEKVPIVKLVFSMTLDGIGTTTIARELNRRGYRNARGKPFRMSNIYVILKNKHYLGKFSWRGIESPHAVPAIVSESDFNEVQKIMNARRVNRVKASERYMLSGKLFCGECGERMVGTSGTSRNGEIYYYYACPNHQRKNTRTCEKTQIRADIIDSTVCDATTRILESDAAVEAIARQAVEVQTHTDVNAAIAATKKRMADVKKKIDNCVKAVESGIISDAIAKTLHDNEETLRDLECELAKQEIARKSSELTVDKIRFFFKSICRDAKKADKYRRILLSTLVRMVIVRGDTLEIRYNYANEYPALQNPVKAECSYNNRLVVSCDESTNTIYLTPSYFYILARL

SEQ ID NO: 5094 - protein, 512 aa, Unknown
  Description of Unknown: Integrase B5095 sequence
  PTHR30461:SF3,SM00857,G3DSA:1.10.10.2600,IPR036162,PS51737, G3DSA:3.40.50.1390,IPR006119,IPR038109,PF07508,IPR011109, SSF53041,PTHR30461,Coil,PS51736,cd00338, PF00239
MEIQLKRAGSYVRVSTYQESQEKSITDQVRMLNEIIDKDETLVNVGTYIDQGVTGKYQTKRKQFLALIKDCMEGKIDVVYCKQMSRFGRNALETMQAIEKLRSVGVAVRFVLDDIDTIVDKDCSRLAMLASIAEDERDNLQDTMTWSFHRRLEQGHYIFRPDMLYGYGLDENKNMVVIPEEAVAVQYIFEEYAKGTMVKKICEWLNEHGYKTRKGMPFNKSSISDITTNEKYYGDMIIGKWRTEGPKRVKNNGESEMYLFENHHEPIISRELFEKCAEVRRTRSEHSKPVQNYDRADPFRRKVFCGQCGSLFICQGRTNCTHDFAKLAFVCGKATRSSRRECRNKLQRIGTLEDSFMAVFNYLLENRSVLSDIVTDNEEFNEVTARLDELRESEKKYFELEVKGLMNEQMTKNHTRLVGEMLQLEEKRKAFLTRNYEISTCNQNLKKFQKILKTAKPMTTMDAEMCDLFVKRILVMDRNNLIFELTSGHKVKVEVLDFYKTRDEIRRVYVTE

SEQ ID NO: 5095 - protein, 512 aa, Unknown
  Description of Unknown: Integrase B5096 sequence
  PTHR30461:SF3,cd00338,SM00857,G3DSA:1.10.10.2600,IPR036162, PF13408,PS51737,G3DSA:3.40.50.1390,IPR025827,IPR006119, IPR038109,PF07508,SSF53041,IPR011109,PTHR30461, Coil,PF00239
MYEEIKTACLYLRYSSSNQTEQSIEGQMHVCQDFCKRHNIRIVEMYIDRATSASKDIEKRVEFLKMIKDSEKGNFNAVIVYKLDRFARSRYDSATYKYRLKRNGVQLISATENITQDPEGIILESVLEGMAEFYSAELSQKINRGMRESAMKHNSIGGAIPLGYKTVDKKLVIDETTAPIVREAFQMYADGESVAEICRTFNNRGYKTSKGTRFGKSSFTKIFRNEKYIGVYKYHDYRAEDVIPPIIDKDLWDRVQVRVGKIKKAPARNKARHTYLLTGKLFCGHCGSAMNADGNSQGYLYYRCYGKKNLDKQCNKRNMEKNLIERLVAQDAMSFLTDEYIEKIATIACDRNRQEIESDSPIPVIRDRIRQVDVSLNNLLKAIETGSAPDMLVKRMGELETEKKDMEVQLKKEMAHQVYIDKEQVIFWLEKFREGDINDEEFCQTVIDLFVNSVTVWDEPDDKFKITIAYNLTSIPQKTYRLSKDGRLSDYASNTPDRESKYDLIIILNMCI

SEQ ID NO: 5096 - protein, 512 aa, Unknown
  Description of Unknown: Integrase B5097 sequence
  PTHR30461:SF3,SM00857,G3DSA:1.10.10.2600,IPR036162,PF13408, PS51737,G3DSA:3.40.50.1390,IPR025827,IPR006119,IPR038109, PF07508,IPR011109,SSF53041,PTHR30461,Coil, PS51736,cd00338,PF00239
MERAVIYARYSSDQQREESIDAQVRACREYCQRKGYLVTKIYADEAKSGKSIAKREQYKKMLSDSQKNLFDVVVFHKIDRNSRNELDYYLTKNQLISSGIKYEYAAQNIDTSPAGQMVEGILVAVAANYSRNLAEETKKGLKENALKALFNGGRPPLGFEINQENKYIINDYEAGAIRIIFDLYLKGKGYHYIISQLNSLGYKTREGRKFGKNSLYDILRNPKYCGTYTFNKVNKDPSGKRNSHKISENTIIVEDAIPAIISKEDFRKVQEKMNQNRYRSAAYKSKETYLLTGKVFCGICGAAMNGHRASSNGKKYVYYTCSGRDRLGTSACQNKVVPRDDLEELVLLTIEQELLSENSLKKLKDTIKMEYQAVANEYADEASSLSEQKAIAERKLNNLYTVIEQGTADEYDLERLAAVKQELSQIKEKLAKCAGANSIATINPAHIEKVLKVCRKMLFKNITNESLRMLFDDLVNKITIDAKKITLQLKLECSGTYGAEGRTRTGTWGNHA

SEQ ID NO: 5097 - protein, 512 aa, Unknown
  Description of Unknown: Integrase B5098 sequence
  PTHR30461:SF3,SM00857,G3DSA:1.10.10.2600,IPR036162,PF13408, PS51737,G3DSA:3.40.50.1390,IPR025827,IPR006119,IPR038109, PF07508,IPR011109,SSF53041,PF00239,PTHR30461, PS51736,Coil,cd00338
MPTVTVIQPTITEEQNIKIRCAAYCRVSSDSNDQLNSFMAQTRYYSQVFENSETEELIDIYADEGITGTREDKRDEFQRMLKDCRRGKIDRIYTKSISRFSRNTRDCLKSVRELKSLGITIFFEKENIDTANLTDEMMITIMGGLAQEESTSISQNMRWSIKKRMQNGTYRNSCPPFGYTVQNDTLVVNEEQAKIVKQIFNWYNEGYGLQAIADTLNSMAVPSSQTAERWHASSVKYVLSNERYIGDALFQKKYRTETLPTMQKRNRGEKPKYYVQSVNTPIIDKDIFYSVQELLNKRHREYINNNHFLSKRILCSKCGATYKCVSSKNSVFWTCRTHNNKASDCSNGRIADIKIYAAFVRLCNKLLYNYKTVLIPLQTALQDLKLRKFSGKTQVMDIHKEIAKLREQTHVLARLKTKGFLDEAKYIEQTTELTAKINKLQTDLKKLTRSDDEDETLNQIEMLIDFFEMRDKPITKFEESAFESIVERIVVINQHELEFHLIGGLKFKEKIK

SEQ ID NO: 5098 - protein, 512 aa, Unknown
  Description of Unknown: Integrase B5099 sequence
  PTHR30461:SF3,SM00857,G3DSA:1.10.10.2600,IPR036162,PF13408, PS51737,IPR025827,G3DSA:3.40.50.1390,IPR006119,IPR038109, PF07508,SSF53041,IPR011109,PTHR30461,Coil, PS51736,cd00338,PF00239
MPEALNAVIYARYSSDRQTEQSIEGQLRECYAFAKANDIAVIDTYIDRAISGKTDNRPAFQKMIEDSAKRQFQAVIVYRLDRFTRNRYDSAIYKARLKKNGVKVLSAMENLNGSPESIIMESLLEGMAEYYSVELSQKITRGMRENALKGKALGGQRVLGYKVNSDCYFEIDETTAPVVVDIFKLYSSGKTVKEICDILNARGVKTARGGAFNKNSLHTILTNKKYIGIYKTKYGEIVGGIPAIIDKELFEMVALRMEQNKKAPARAKAEINYLLSTKLFCGKCRSAMVGESGTSKTGKKYYYYACVKKKREKACDKSNVKKDWIEDLVIQRTVTDILKDDVIDKIADRLVELQKAEAAESGTMLYLENSLAEIQVSIKNIMTAIEKGIITESTKTRLTELEDEKRNVEIEIAKESIARRIISREQIIYWISSFKDGNITSEKYRQQLIDTFVHAVFVYDDKIVITYNYSGENNTATISDLDLSSPPNSANPNTLFFVKHCFGFVMNIEEVG

SEQ ID NO: 5099 - protein, 512 aa, Unknown
  Description of Unknown: Integrase B5100 sequence
  cd00338,SM00857,G3DSA:1.10.10.2600,IPR036162,PF13408, PS51737,G3DSA:3.40.50.1390,IPR025827,IPR006119,IPR038109, PF07508,IPR011109,SSF53041,PTHR30461,cd17155, PS51736,Coil,PF00239
MQTEYALYLRKSRADLEAEAHGEGDTLARHEHILMELAKSRALPIGAIYREIVSGERIANRPVMQQLLSEVEDGRWKGVLVTETSRLARGDTIDQGIVAQAFKFSGTLIVTPSKTYDPTQEADEEWMEFGLFMSRQEYRMIRRRMTAGMNAAKREGRFIGNVAPYGYERFKLDGRGWSLRIVPEQAEIVRMIFDLYNSGLGYCRIEKRLNELHIPAPKGEKWTSATIPGIIQNPHYIGMIPAGRRPGRKVVKDGEVKLIRPRQKCELYPGMHEPIISRETWDKAQARIGKNREARVPAGRRQSNPLAGLLVCDCCGKNMQRRPQTGSSQTQILCPTRGCSTVAHNADELEDMVIDSLRVFLAKLEAGKPAKTDVSAEYAALEECTKKLKDLEARQRRTFELVEDGTYTREIFLARQAELTAERVKIEQQKAELEEAITKKKQEAEAQNNLAPAARQVLEAYKKELSAEDRNRLLKKVIDHIDYHKRKRTRWNPESDLSITLHPVVTSSSPHR

SEQ ID NO: 5100 - protein, 511 aa, Unknown
  Description of Unknown: Integrase B5101 sequence
  SM00857,G3DSA:1.10.10.2600,IPR036162,PS51737,G3DSA:3.40.50.1390, IPR006119,IPR038109,PF07508,IPR011109,SSF53041, PTHR30461,Coil,PS51736,cd00338,PF00239
MPYAIHLRKSRADLEAEARGEGESLARHRARLLAFAERAGLPIVAEYSEIISGDRLSDRPEMQRLLADVAAGMYDGVLTVEVSRLTRGDLMDQGRIMNTFKYSGTKIITPEHTYDLSEDWDEDVLQSDLMMARREYKYIKKRMQRGRQASASEGLWQGRVPYGYRKIKVRPGKGYTLEPDPEQAPIVQMIFDMYAREKIGCATIAQRLNALGLRTNTDHLWTNSSVMCISKNPVYAGYVTWGKRTSVTRMNADGTLSTSRVANAASILAPGKHPALIDQATFDVAQNVRASHDLTRCHASVPVRNPLAGLVYCAVCGKAMVRKDNGNARGSRYDMLKCPTPGCLTTATALSLVEKTILSMLDDFVLTAASSPATPAPDHRVAQLSGAQATIDRLQQQRERIYAAYEEGVYDSAAFVARRAEKDREIRAAEEALHALQTATEPTDDEVMLANLPLILNVLEVYDTTADPLERNKLLKSIFSRIEYKKIRRCFRNENPAAALSLRLYPRRHIK

SEQ ID NO: 5101 - protein, 511 aa, Unknown
  Description of Unknown: Integrase B5102 sequence
  cd00338,SM00857,IPR036162,PF13408, IPR025827,G3DSA:3.40.50.1390,IPR006119,SSF53041, PTHR30461,PS51736,Coil,PF00239
MAKRAKRSAPKKGARAAIYARYSSHNQRGESIEIQLDNDYAYCHEHELEVVKVYIDEAKTGRDTNRADFQQMLEDAKRHLMDYVVIYKVPRIMRNRDEMAFARIMLRKCGVEILYAGEQIAEGSSGVLQLGMLEVLAEWESAVDSERITEGIAKNAERCMANGQRLYGWDIVDGFYALNEQQATVMRMMKDMLLSGSMIADIRRACEPYRTQFGNKFTQSAITKMLKRKQNAGIYVYAGYEIPGGMPALWSLEEQQMIWKILEKNARPRKRENTENYALTGKLFCGKCKTPMIGTSGTSKAGARYYYYRCKKCRRNVRKDIIEANVADDVIAALSDEATREKIADMVAEIEQDTGAKPQSEIIRSELHDIELSFDRIWQAIEGGYAPPGGKERVKELTKRKELLEDELRVAVSIESVTVDRNRILFWLEDIAQEEDPETLIEVFVSKVVLVGDDDLHIAFTFEGGDDDIGQIVDDSGGVRVNGPELLHEMDRAGSRFRLYYPRAEQTHLSA

SEQ ID NO: 5102 - protein, 511 aa, Unknown
  Description of Unknown: Integrase B5103 sequence
  PTHR30461:SF3,cd00338,SM00857,G3DSA:1.10.10.2600,IPR036162, PF13408,IPR025827,PS51737,G3DSA:3.40.50.1390,IPR006119, IPR038109,PF07508,IPR011109,SSF53041,PTHR30461, PS51736,Coil,PF00239
MYEDIKTACLYVRFSSHNQTEQSIEGQTRVCRDFCKRHNIRIVEIYADRATSASKDIEKRVQFLKMIKDSEKGLFDAVIVYKLDRFARSRYDSATYKYRLKRNGVQLISATENISNDPEGIILESVLEGMAEFYSAELSQKINRGMRESAYKHNSIGGAIPLGYKIEDKKLVIDPKTAPIVKEAFEKYADGETVAEICRQFNARGYKTSKGTAFGKSSFTKIFRNERYIGVYTFHDYRAEDAIPAIIDKDLWDRVQLRVGKIKNAPARNKAKVVYLLSGKIFCGHCGSKMNGNCNAGNYCYYQCYGKKNGNVDCKKKNIRKEFIERLVAQDALSLLTDEYIEQIATIACEKNQHEIELDSALPTIRDRIHQVDLSLNNLLKAIESGSAPDMLVKRMGELEKEKKDLQAQAKKESEDIIELDKAQAIYWLEQFRGGSIEDEEFCRMLIDLFVNSVTVWDEDDNTYKVTVAYNLTSLPTKTYRLNKGGTLSDFASNAPPKLSVRFRTSYESQG

SEQ ID NO: 5103 - protein, 511 aa, Unknown
  Description of Unknown: Integrase B5104 sequence
  PTHR30461:SF3,SM00857,G3DSA:1.10.10.2600,IPR036162,PF13408, IPR025827,G3DSA:3.40.50.1390,PS51737,IPR006119,IPR038109, PF07508,SSF53041,IPR011109,PF00239,PTHR30461, PS51736,Coil,cd00338
MRAVLYARYSSDNQRYESISGQFHCSEEYCKRKGYNIVHYYYDEAKSGTTIAGREQFNQMIADAARDIFDVIVFYQIDRTARNEMDYYASVNKLLALGIRYEYSAEGIDVSTPNGKLTEGVKVAVAAFFSRDLSIKIKRGKKENTLQKKHNGGIAPLGYDIAADGTYIINDYEAVAVKKIFAMKLDGQGYGKIVDWLKANGYKTKRGGYYSKGSIHDILCNRKYIGVLEMGKTSKHNSKEKVDDYMEIKDAIPKIIDTKDFAAVQDILAARRNGKANAKEVYALSGRIFCQCGAAMTGHRIGAKGNKYSYYVCGTQRYKHGDCDIPMIRKDKIEFITYLTIVDYIKVNKKSIIAEFMCQAESNEDKVRENELRKRINAQKNKAKKLLALYDGSDDLILDAYKDAKRTLDMMEAELASMVQRDTNNINPEVLEVFIDSMLMEAGYSDAFLKDFFTSLNVKVTVNKINAEIQLNLSVFPFVVALKLYIDVGKLYNYRSTASRKLYTKARKCVG

SEQ ID NO: 5104 - protein, 511 aa, Unknown
  Description of Unknown: Integrase B5105 sequence
  PTHR30461:SF3,SM00857,G3DSA:1.10.10.2600,IPR036162,PF13408, IPR025827,G3DSA:3.40.50.1390,PS51737,IPR006119,IPR038109, PF07508,IPR011109,SSF53041,PTHR30461,PS51736, cd00338,PF00239
MNTVIYARYSAGPRQTDQSIDGQLRVCTEFCKQRGLTVIDTYCDRHISGRTDERPEFQRLIADAKAHKFEAVVVYKTDRFARNKYDSAIYKRELRRNGIQIFYAAEAIPEGPEGIILESLMEGLAEYYSAELAQKIKRGLNESALKCQSLGSGRPLGYTVDEQKHFQIDPESSQAVKTIFEMYIKGESNAAICDYLNARGLRTSQGNLFNKNSINRIIKNRKYIGEYRYNDIVVEGGMPAIISKETFCLAQAEMERRRTHRAPVSPKAEYLLAGKLFCGHCKGPMQGVSGTGKSGNKWYYYYCANTRGKERTCDKKQVSRDRLEKAVVDFTVRYILQEDVLEELSKKVYAAQERQNNTASEIAFYEKKLAENKKAIANILRAIESGAMTQALPARLQELENEQTVIQGELSYLKGARLAFTEDQILFALLQHLDPRPGESEQDYHRRIITDFVSEVYLYDDRMLIYFNISSADGKLKHADLSAIESGVFDAGLTSSTNLPHRFVRCGVFYA

SEQ ID NO: 5105 - protein, 511 aa, Unknown
  Description of Unknown: Integrase B5106 sequence
  PTHR30461:SF3,SM00857,G3DSA:1.10.10.2600,IPR036162,PF13408, IPR025827,PS51737,G3DSA:3.40.50.1390,IPR006119,IPR038109, PF07508,IPR011109,SSF53041,PF00239,PTHR30461, PS51736,Coil,cd00338
MQQAVIYARYSPGPNQTEQSIEGQVRECTKYAELHDLRIVGTYIDRKISGKTDNRREFQRMIDDSEKHIFDVIILYHTDRFARNRYDSAIYKHKLKENGVELRYATTDIPKGPEGIILESIMEGWAEYYSAELSRKIKRGMRESALKCHSTGAGRCLGYRTAEDKSLVIEPEGAKAVQTVFDMYIKGKSHADICRYLNDCGFRTAQGKLFNKNSVTHIIRNKRYIGVYTYDDITIEDGIPAIISKDTFHLAQLEAARRKTAKRPKEPKAEYLLSGKAFCGHCQKPLVGVSGTGKSGNKWYYYYCQESRAKRGCTKKPVKRDWLEREVVKRTVAEVLQPEVIQHIAKKCYDLQMEYRQDNSDVLFYELKLKDVRKAIKNTMHAIESGVKTKTLPARLQELENEEEALEAELAIAKASDFVITADQIEFLLTQFAEPWECESEEEYHRRIIKCFVHKVFLFDDKLLIYYNVSRDGKTREQSEAELLEEALGEGFDKRSSGSTIKVSRLVPLLL

SEQ ID NO: 5106 - protein, 511 aa, Unknown
  Description of Unknown: Integrase B5107 sequence
  PTHR30461:SF3,cd00338,SM00857,G3DSA:1.10.10.2600,IPR036162, PF13408,PS51737,G3DSA:3.40.50.1390,IPR025827,IPR006119, IPR038109,PF07508,SSF53041,IPR011109,PTHR30461, PS51736,Coil,PF00239
MHDTMHELRCCAYLRKSREDEEREKMGRGETLARHRRIIESLASENGHEISHWYTEVKSGETIAARTEIKNLLSDLADGKWDVVYAVEASRLGRGGGSDQEKIINAFRYTQTHLITEMKTYDPESRGDMRQLKSELRSSEDELDAISTRLVRGKYQAAKEGVWQSTGRTPYGWKAVRIKGLWQLEPDENHESMLRIYDLLESGENYSSIARILTEDGIPTPRGGDHWRHQTGKSIAENVANCGLVMYGKRHVVREFDRDTFGVVKTKRNNPEPIVSRGLHYGKGGISEERFERLTKKSVNNARLHKDKVLINPLSGLLRCGKCGYAMSMHRMSSGKSAALFYQHPRSKNMLGDCDGCRAARADQVITMLIDALEKIAEDVTIEASKPQSEVDQSRIKSIQAAIKKEKTARRKAMEAFEANIYTIEELRERKSKADAAIESLKKRLKDHEPKRVSADAPVKIRRCIDLLRDEGVSAQDKNDLLKSIIERIDYYNDTPPYVLPNRIRLDVHLR

SEQ ID NO: 5107 - protein, 511 aa, Unknown
  Description of Unknown: Integrase B5108 sequence
  PTHR30461:SF3,cd00338,SM00857,G3DSA:1.10.10.2600,IPR036162, PF13408,PS51737,G3DSA:3.40.50.1390,IPR025827,IPR006119, IPR038109,PF07508,IPR011109,SSF53041,PTHR30461, PS51736,Coil,PF00239
MHDTMLDLTCCAYLRKSREDEEREKMGRGETLARHRRIIESLASENGHEILHWYTEVKSGETIAARTEIKNLLSDLADGKWDVVYAVEASRLGRGGGSDQEKIINAFRYTQTHLITEMKTYDPESRGDMRQLKSELRSSEDELDAISTRLVRGKYQAAKEGVWQSTGRTPYGWKAVRIKGLWQLEPDENHESMLRIYDLLESGENYSSIARILTEDGIPTPRGGDHWRHQTVKSIAENVANCGLVMYGKRHVVREFDRDTFGVVKTKRNNPEPIVSRGLHYGKGGISEERFERLTKKSVNNARLHKDKVLINPLSGLLRCGKCGYAMSMHRMSSGKSAALFYQHPRSKNMLGDCDGCRAARADQVITMLIDALEKIAEDVTIEASKPQSEVDQSRIKSIQAAIKKEETARRKAMEAFEANIYTIEELRERKSKADAAIESLKKRLKDHEPKRVSADAPVKIRRCIDLLRDEGVSVQDKNDLLKSIIERIDYYNDTPPYVLPNRIRLDVHLR

SEQ ID NO: 5108 - protein, 511 aa, Unknown
  Description of Unknown: Integrase B5109 sequence
  PTHR30461:SF3,SM00857,G3DSA:1.10.10.2600,IPR036162,PF13408, IPR025827,G3DSA:3.40.50.1390,PS51737,IPR006119,IPR038109, PF07508,IPR011109,SSF53041,PTHR30461,Coil, PS51736,cd00338,PF00239
MPYAIHLRKSRADLEAEARGEGESLARHRARLLAFAERAGLPIVAEYSEIISGDRLSDRPEMQRLLADVSAGKYDGVLTVEVSRLTRGDLMDQGRIMNTFKYSGTKIITPEHTYDLSEDWDEDVLQSDLMMARREYKYIKRRMQRGRQASASEGLWQGRIPYGYQKVKVRPGKGYTLEPDPQQAPVVRMIFDMYVKDRVGCSTIAKHLNDLGLRTNLGKPWTDSSVMCISKNPVYAGYVTWGKRTSVTHMDDNGTLTTSRVANPAPILSKGKHPALVSQEVFDAAQRARSSNDLTRCHVSEPVRNPLAGLVYCSICGRAMVRKDNGNARGSRYDMLKCPTPGCPTTATALSIVESAVLSSLNQWASLAASAPSASPENHNSEKIAAAQASLERLRQQRERIYAAFEDGVYDSAAFIARRAEKDKEIALAEQSLESLKKDTVPTDEAVIRANLPLIRNVLSLYNLTTDPRDKNRLLKSVFSRIEYNKTRRCFRNENPANALTLSVYPRRYKK

SEQ ID NO: 5109 - protein, 511 aa, Unknown
  Description of Unknown: Integrase B5110 sequence
  SM00857,G3DSA:1.10.10.2600,IPR036162,PS51737,G3DSA:3.40.50.1390, IPR006119,IPR038109,PF07508,IPR011109,SSF53041, PTHR30461,Coil,PS51736,cd00338,PF00239
MPYAIHLRKSRADLEAEARGEGESLARHRARLLAFAERAGLPIVAEYSEIISGDRLSDRPEMQRLLADVAAGMYDGVLTVEVSRLTRGDLMDQGRIMNTFKYSGTKIITPEHTYDLSEDWDEDVLQSDLMMARREYKYIKKRMQRGRQASASEGLWQGRVPYGYRKIKIRPGKGYTLEPDPEQAPIVQMIFDMYAREKIGCATIAQRLNALGLRTNTDHLWTNSSVMCISKNPVYAGFVTWGKRTSVTRMNADGTLSTSRVANAASILAPGKHPALIDQATFDVAQNVRASHDLTRCHASVPVRNPLAGLVYCAVCGKAMVRKDNGNARGSRYDMLKCPTPGCLTTATALSLVEKTILSMLDDFVLTAASSPATPAPDHRVAQLSAAQATIDRLQQQRERIYAAYEEGVYDSAAFVARRAEKDREIRAAEEALHALQTATEPTDDEVMLANLPLILNVLEVYDTTADPLERNKLLKSIFSRIEYKKIRRCFRNENPAAALSLRLYPRRHIK

SEQ ID NO: 5110 - protein, 511 aa, Unknown
  Description of Unknown: Integrase B5111 sequence
  PTHR30461:SF3,SM00857,G3DSA:1.10.10.2600,IPR036162,PF13408, PS51737,IPR025827,G3DSA:3.40.50.1390,IPR006119,IPR038109, PF07508,IPR011109,SSF53041,PTHR30461, PS51736,cd00338,PF00239
MNVIEITAEKETVQETIRLAAYCRVSSDSEDQLHSFAAQIRYYKDYERRNPQYKLVDIYADEGITGTCMDKRDDLHRLIRDCKKGLIDRIIVKSVSRFARNTQELLSTIRFLKDIGVSVYFEEQGIDTDKLNSEMIITFPGMAAQQESEAISGNMRWSYKKRMESGEFNCCAPAYGFNLVDGSLVINEAEAAVVRRIFSMYLQGYGKQTIANKLNEEGVSRRHGVKTWYAFGIDYMLNNERYMGDALLQKKYTTDTLPFRRKENRGECPQYYVENANPTIVSRETYAAVQELQKSRQKNAGGEKAVYPLTGMLRCPDCGRTYRRQLVRGKAYWICSGKASGATTCSSRRMAEPDVYEAFNRMLFKLKEHHPMLLGTLIRDIETMQSKTSENHEKIAEIDKEIADLAARNLVIARLHTSGILNGSDYSAQSSEINNRISALRSERRKKLAEDEGDEQLDKLKELQGILDEYEPTAAFNEDLFNQIVETATVMSRSEIVFQLIGGLKLTESIA

SEQ ID NO: 5111 - protein, 511 aa, Unknown
  Description of Unknown: Integrase B5112 sequence
  PTHR30461:SF3,SM00857,G3DSA:1.10.10.2600,IPR036162,PF13408, PS51737,G3DSA:3.40.50.1390,IPR025827,IPR006119,IPR038109, PF07508,IPR011109,SSF53041,PTHR30461,PS51736, cd00338,PF00239
MNVIEITAEKKPAQDTIRLAAYCRVSSDSEDQLHSFAAQIRYYKDYERRHPQYRLVDIYADEGITGTCMDKRDDLHRLIRDCKKGLIDRIIVKSVSRFARNTQELLATIRFLKDIGVSVYFEEQGIDTDKLNSEMIVTFPGMAAQQESESISGNMRWSYKKRMESGDFNCCAPAYGFDLIDGNLVINETEAVVVRRIFSMYLQGYGKQAIANKLNEESVPRRHGTKLWYAFGIDYMLNNERYMGDALLQKKYTTDTLPFKKVKNRGERPKYYVENANPAIVSRETYTAVQELQKSRQKNMGGKKTSYPLTGMLRCPDCGRSYRRQIVRGRAYWLCSGRASGATICSSQRMAESDVHEAFNKMLFKLKKHHHAILGALIRDIEVMQSKTSENHEKIAEIDKEIADLAARNLVIVRLHTSGILNGSDYSAQSSEINNRISALRSERKKKLAEDEGDEQLDKLKELQSILDEYEPTEAFDEDLFHQIIEKAVVMSKSGIAFYLIGGLKLTEAIA

SEQ ID NO: 5112 - protein, 511 aa, Unknown
  Description of Unknown: Integrase B5113 sequence
  SM00857,G3DSA:1.10.10.2600,IPR036162,PF13408,IPR025827, G3DSA:3.40.50.1390,PS51737,IPR006119,IPR038109,PF07508, IPR011109,SSF53041,PTHR30461,PS51736,cd00338, PF00239
MNVIEITAEKKPAQETIRLAAYCRVSSDSEDQLHSFAAQIRYYKDYERRHPQYKLVDIYADEGITGTCMDKRDDLHRLIRDCKKGLIDRIIVKSVSRFARNTQELLATIRFLKDIGVSIYFEEQGIDTDKLNSEMIVTFPGMAAQQESESISGNMRWSYKKRMESGDFNCCAPAYGFDLVDGDLVINKTEAAVVRRVFSMYLQGYGKQAIANKLNEESVPRRHGTKLWYAFGIDYMLNNERYMGDALLQKKYTTDTLPFKKVKNRGERPKYYVENANPAIVSRETYSAVQELQKSRQKNVGGKKTSYPLTGMLRCPGCGRTYRRQLVRGKAYWMCSGRASGATICSSQRMSESDVYEAFNRMLFKLKEHHHAILGALIRDIEVMQSKTSENHEKIVEIDKEIADLAARNLVIVRLHTSGILNGSDYAAQSSEINNKISALRSERKRKLAEDEGNEQLDKLKELQGILDEYEPTKAFDEDLFHQIIEKAVVMSKSEIAFHLIGGLKLTETIA

SEQ ID NO: 5113 - protein, 511 aa, Unknown
  Description of Unknown: Integrase B5114 sequence
  PTHR30461:SF3,cd00338,SM00857,G3DSA:1.10.10.2600,IPR036162, PF13408,IPR025827,PS51737,G3DSA:3.40.50.1390,IPR006119, IPR038109,PF07508,IPR011109,SSF53041,PTHR30461, PS51736,Coil,PF00239
MSRAVIYARFSSHNQREESIEQQVAECRAFAAANGLTVIDVYADAAISGRSDRRPQFQRLRRDAGKKIFDTIIAYKSSRIARNMLNALNFEVEMTKNEVNVLYAKEEFGNTAAGRFALRTMMSVNQFYSENLGEDIKRTQADNAQSCKSNGPAPFGYQSGADGRFEIDEPRAQIVREIYTRVASGETIASISMDLNARGLKTRTGGKWGRSSYGAILGNERYLGIYIFDGVRTEGGMPPILDRQLYTEAMMAMKRKKISPSADYQLTGKLYCGKCGHAMTGVCGTGRAGTVYHYYACAGRKTGTGCDKEHVGRRQIEDAVAKALAERIMSDKIIDQIADEVMAFQRQHKDQPEIKMLEAEKAENAKAIKNILAAIEAGIFTESTKARLMELEAENTRITEQLAMLTTSQIDVTRDQVVGYLKSFRGGDIEDKKYRAQLFQTFLVKVFVFDDRLKVIFDPLGSGKNEVDVTLDDLGEIESEGDGVRLSSDLPHHIGLRRTPYIIFMVSLATK

SEQ ID NO: 5114 - protein, 511 aa, Unknown
  Description of Unknown: Integrase B5115 sequence
  cd00338,SM00857,G3DSA:1.10.10.2600,IPR036162,PF13408, PS51737,G3DSA:3.40.50.1390,IPR025827,IPR006119,IPR038109, PF07508,IPR011109,SSF53041,PTHR30461,PS51736, Coil,PF00239
MNAVIYARYSSDNQREESIEGQLRECQAFAESNDMIIVDTYIDRALSAKTDNRPDFQRMIKDSASGTFDIVIVWKLDRFARNRYDSAHYKSVLQKNGVKVVSATEKISQTSEGILLESLLEGMAEYYSAELAEKVTRGLTENALKCKYNGGTLPIGYTTDENQFYIIDSLTAPAVLEAFKHYAEGSTMQEITDELNLKGIRTKKNTPITLNTVTRMLHNRKYIGEYRYSSFVTPNGIPAIVPEDLFERVQDMMKANKKAPAKHKAEDEYILTTKLFCGKCKCLMAGESGTSHTGIVHRYYKCVSVKYHRGCDKKTVRKEWIEELVISHIMKIIFDDDLMDRLADVLLEHLNKENTSLPILQKQFAEVQKNIDNMLNAIQQGIFTPSTKERLESLEREKSELSVQIIKEEISKPKLTKEQILFWIYKFRKLNPKRLDHRRRLVNSFVNSIYLYDDKIIIDCNYKEGTETITFEEIENSALGSDLTSLGAPRQSKRYIAYSVFFCKRAQNGEQ

SEQ ID NO: 5115 - protein, 511 aa, Unknown
  Description of Unknown: Integrase B5116 sequence
  PTHR30461:SF3,SM00857,G3DSA:1.10.10.2600,IPR036162,PS51737, G3DSA:3.40.50.1390,IPR006119,IPR038109,PF07508,IPR011109, SSF53041,PTHR30461,Coil,PS51736,cd00338, PF00239
MDKYAMYLRKSRADMEAEKLGEGETLTRHKKILTELAAKKGLYVEKIYQEIISGETIAARPEITQLIQDCYAGMYKGIIIIEVTRLSRGNQADMQTIMDMLKYANNRSGILVITPTKTYDVAHSPDDEEYMEFELFMSRREYKMIRKRMQRGKIQAVIEGNYMGSYRPYGYDVLKTRTGRTLTPNKDEAPIVQKMFQWAANNNMTAGEIARKLTTMGVPTYTGAPEWNLGTIKTILTNPTYIGKVRWNDRMMMKTLVDGKMATSRPRSNHGDQYMECDGKHEAIIDEATFNALKNRFHSDKTKADCKLLNPLAGLLECAVCHYAMPYHVYRDRNALPRFAHRQSQTCKVKSVHASDVMDALVCCLKRYIADFEMKIDNLPSEDENTIQDEMNALEKELLKTERKLPKLFDAWENGIITDNEFAERKALNNEKIESLKKQIADLEDSIPEKEDYEEMIINFHAALNALLDDSLDADIKNEYLKSIIDRIEFSRENNSEFILDVYIKSDGAMV

SEQ ID NO: 5116 - protein, 511 aa, Unknown
  Description of Unknown: Integrase B5117 sequence
  PTHR30461:SF3,SM00857,G3DSA:1.10.10.2600,IPR036162,PF13408, IPR025827,G3DSA:3.40.50.1390,PS51737,IPR006119,IPR038109, PF07508,IPR011109,SSF53041,PF00239,PTHR30461, PS51736,Coil,cd00338
MPKKETAVSQGLVAAIYARYSSHAQNDASIEQQMDECQEYARQHGYKIVGVYADRAMSGRSDRRPEFQKMMRAAEKREFQIVLAYKSNRISRNMLHALSYEDKLAQHGVNVVYCKEEFGNNAAGRFALRTMMNVNQFYSENMAEDIMRGLMDNANQCKVNGSLPLGYKRGTDGRYEIDEQTAPIVQEIFRRIANGELKASIADDLNKRQIRTSTGGTWNKGSFHSLLANERYTGIYIYRDVRVPGGIPVIVDKDLFEAAREREETMKTTIKSRRRRDDMEYLLTGKLFCGYCLEPMVGSSGTGKMGKMYYYYRCKNNAEKHTCQKKPVRKDAIEQLVVSSLKACITKPENIDWMTDLVMKYRSKIIAESDIGYLEDKLKENKTAIKNVMKAIEMGVVTETTKARLQELEAEQREALSSLLAEKRSIPDVTRDHVQFFFESFRNGDVNSMKYQKTLIKHFLRAVYLYDDHIKITFDYDDSDTGVEIPLEDSSAESSEDTSVLIDSLGVYGRV

SEQ ID NO: 5117 - protein, 511 aa, Unknown
  Description of Unknown: Integrase B5118 sequence
  PTHR30461:SF3,SM00857,G3DSA:1.10.10.2600,IPR036162,PF13408, PS51737,G3DSA:3.40.50.1390,IPR025827,IPR006119,IPR038109, PF07508,SSF53041,IPR011109,PTHR30461,Coil, PS51736,cd00338,PF00239
MAKAKAATNDISKLAVIYARYSSHNQTEQSIEGQLAAGHRYADLKGYTVVHEYIDRAMTGRNDNRDDFQKMLSDTSKKQFGVIIVWKVDRFGRNREEITFNKYRCKKNGVRVEYVAENLPDSPEGVILESVLEGMAEYYSLQLSQNVQRGLLESAKKHQVIGGNVPLGLMMDAHKKYAPDPKTAPTVKLIFDMYAEGSTTSEIINHLNSIGMRTKAGKPFTKSSLTTVLKNEKYIGVYKYKDIIRDEDVIPPIVDKEIFYKVQELLKVNRRMPSHKWSYSDYILTDKLFCGKCGTAMVGESGFGKMGVKYSYYMCAKRRKDKTCDKKPVRQEWIEEIILQCVQGILQNEELLEFIAENTWQYYLAQDESMEKLKGLQAELDKVEKSAANLMKAIEAGIFNDMTKARMDELDDQRAVIKKAMAEIEIEKGFKLTKDHILYFLEQFKKLDYKDRDCQRRLIDVFVNSIFVYDDKLRIAFNFGGSDSTITLNEVDKADRGEGFVCCASCPVIKP

SEQ ID NO: 5118 - protein, 511 aa, Unknown
  Description of Unknown: Integrase B5119 sequence
  PTHR30461:SF3,SM00857,G3DSA:1.10.10.2600,IPR036162,PS51737, G3DSA:3.40.50.1390,IPR006119,IPR038109,PF07508,SSF53041, IPR011109,PTHR30461,Coil,PS51736,cd00338, PF00239
MVDNDIFAIYLRKSRKDLENKDYDVLKRHRKILLDFAKSKNIVIHEEDIYEEVVSGETIQDRPVVQILLRKIETGYYKAVLVMEIERLARGNTIDQGIIAQAFQLTNTLIITPNKTYDTRNEYDNEFLEFGLFMSRREYKSISRRIQTGRIQSVKEGNYIGSVTPYGYDKEKLKGEKGFKLVSNDEATNVKLIFDLCLDGVGTSNIAFKLNDLNIKSRTGKPWTPNMVRNILINKVYIGILTWGKRATVKQLDNNLINKTRPVSDNYIESKGKHESIIDEITFYKAQEILKANSSKKVHKDKSLKNPLAGIVVCQKCGTNMIRRPLKNIPDTLLCKNHYCDNVSSYLYLIEDRLLNSLKVVLKEYYYYIENYEKENVKNKKNYDIQIKRIDKDIEKLKNQHNKTCELLETGVYSLQLFKERSLSINQQLEGLNKQKEELTRLNKEDKTEKIIQAIPKLENCLKTYHTLNIEDRNKLLKSIIKKAYYLKTEAGSRWNKDAQDKFTLELELLL

SEQ ID NO: 5119 - protein, 511 aa, Unknown
  Description of Unknown: Integrase B5120 sequence
  SM00857,G3DSA:1.10.10.2600,IPR036162,PF13408,IPR025827, PS51737,G3DSA:3.40.50.1390,IPR006119,IPR038109,PF07508, IPR011109,SSF53041,PTHR30461,PS51736,cd00338, PF00239
MPKKETAVSQGLVAAIYARYSSHAQNDASIEQQIDECQEYARQHGYKIVGVYADRAMSGRSDRRPEFQKMMRAAEKREFQIVLAYKSNRISRNMLHALSYEDKLAQHGVNVVYCKEEFGNNAAGRFALRTMMNVNQFYSENMAEDIMRGLMDNANQCKVNGSLPLGYKRGADGRYEIDEQTAPIVQEIFRRIANGELKASIADDLNKRQIRTGTGGAWNKGSFHSLLANERYTGIYIYRDVRIPGGIPAIIDRELFEAAREREETMKTVVKSRRRRDDMEYLLTGKLFCGYCLEPMVGSSGTGKMGKMYYYYRCKNNAEKHTCQKKPVRKDAIEQLVVSSLKACITKPENIDWMTDLVMKYRSKIIAESDIGYLEDKLKENKTAIKNVMKAIEMGVVTETTKARLEELEAEQREVLSSLLAEKRSIPDVTRDHVQFFFESFRNGDVNSIKYQKTLIKHFLRAVYLYDDHIKITFDYDDSDTGVEIPLEDSSAESSEDTSVLIDSLGVYGRV

SEQ ID NO: 5120 - protein, 511 aa, Unknown
  Description of Unknown: Integrase B5121 sequence
  PTHR30461:SF3,SM00857,G3DSA:1.10.10.2600,IPR036162,PF13408, IPR025827,G3DSA:3.40.50.1390,PS51737,IPR006119,IPR038109, PF07508,SSF53041,IPR011109,PF00239,PTHR30461, PS51736,Coil,cd00338
MNTVIYARYSAGPRQTDQSIEGQLRVCTDFCKQRGLTVIDTYCDRHISGRTDERPEFQRLIADAKRKKFEAVVVYKTDRFARNKYDSAVYKRELKRNGIQIFYAAEAIPDGPEGIILESLMEGLAEYYSAELAQKIKRGMHESALKCQSTGSGRPLGYRVDEQKHFQIDPESAQTVQTIFEQYIKGESNAAICELLNSRGLRTAQGKPFNKNSINRIIKNRKYIGEYRYHDIVVEGGMPAIISKDTFNLAQAEMERRRTRKAPKSPKAEYLLAGRLFCGHCKGPMQGVSGTGKSGNKWYYYYCGNTRGKNKTCDKKQVSRDRLERAVVDFTVRYILQEDVLEELARKVHAAQERQNDTASEIAFYEKKLADNKKSIANVLRAIESGAATQTLPARLQELENEQAVILGELSFLKGKHLAFTEDQILFALMKHLEPYPGESEQDYRRRIISDFVSEVYLYDDRLLIYFNISSEDGKLKSADLSNIEGGEFDEGLVSSTNLPHRFVRCGVFYA

SEQ ID NO: 5121 - protein, 511 aa, Unknown
  Description of Unknown: Integrase B5122 sequence
  PTHR30461:SF3,cd00338,SM00857,G3DSA:1.10.10.2600,IPR036162, PF13408,PS51737,G3DSA:3.40.50.1390,IPR025827,IPR006119, IPR038109,PF07508,IPR011109,SSF53041,PTHR30461, PS51736,Coil,PF00239
MAKAKQKAATNDISKLAVIYARYSSHNQTEQSIEGQLAAGHRYADLKGYTVVHEYIDRAMTGRNDNRDDFQKMLSDTSKKQFGAIIVWKVDRFGRNREEITFNKYRCKKNGVRVEYVAENLPDSPEGVILESVLEGMAEYYSLQLSQNVQRGLLESAKKHQVIGGNVPLGLMMDAHKKYVPDLKTAPTVKLIFDMYAEGSTTSEIINHLNSIGMRTKAGKPFTKSSLTTVLKNEKYIGVYKYKDIIRDEGVIPPIVDKEIFYKVQELLKVNRRMPSHKWSYSDYILTDKLFCGKCGTAMVGESGFGKMGVKYSYYICAKRRKDKTCDKKPVRQEWIEEIVLQRVQGILQNEELLEFIAENTWQYYLAQDESMEKLKGLQTELDKVEKSAANLMKAIEAGIFNDMTKARMDELDDQRAVIKKAMAEIEIEKGFKLTKDHILYFLEQFKKLDYKDRDCQRRLIDVFVNSIFVYDDKLRIAFNFGGSDSTITLNEVDKADRGEGFVCCASCPAI

SEQ ID NO: 5122 - protein, 511 aa, Unknown
  Description of Unknown: Integrase B5123 sequence
  PTHR30461:SF3,cd00338,SM00857,G3DSA:1.10.10.2600,IPR036162, PF13408,IPR025827,PS51737,G3DSA:3.40.50.1390,IPR006119, IPR038109,PF07508,IPR011109,SSF53041,PTHR30461, PS51736,Coil,PF00239
MSRAVIYARFSSHNQREESIEQQVAECRAFAAANGLTVIDVYADAAISGRSDRRPQFQRLRRDAGKKIFDTIIAYKSSRIARNMLNALNFEVEMTKCGVNVLYAKEEFGNTAAGRFALRTMMSVNQFYSENLGEDIKRTQADNAQSCKSNGPAPFGYKSGADGRFEIDEPRAQIIREIYARVAAGETLASISADFNARGLKTRTGGKWGRSSYGAILGNERYLGIYIFDGVRTEGGMPQIIDRQLFVEAMAAMKRKKISPSADYQLTGKLYCGKCGRAMTGICGTGRAGTVYHYYACTGRKSGTGCDKEHVGRDQIEDAVARALAERIMSDKIIDQMADEVMEFQRRHKDNPEIKMLEEQKAENAKAIKNILSAIEAGIFTESTKARLMELEAENTRITEQLAMLTTSQIDVTRDQVIGYLKSFRGGDIEDKKYRAQLFQTFLVKVFVFDDRLKVIFDPLGSGKNEIDVTLDDLGEIESEGDGVRLSSDLPHHIGLRRTPYIIFMVSLVTK

SEQ ID NO: 5123 - protein, 511 aa, Unknown
  Description of Unknown: Integrase B5124 sequence
  SM00857,G3DSA:1.10.10.2600,IPR036162,PF13408,IPR025827, G3DSA:3.40.50.1390,PS51737,IPR006119,IPR038109,PF07508, IPR011109,SSF53041,PTHR30461,Coil,PS51736, cd00338,PF00239
MQMEYAMYLRKSRADLEAEAHGEGDTLARHEHILMELAKSRALPIGAIYREIVSGERIANRPVMQQLLSEVEDGRWKGVLVTETSRLARGDTIDQGIVAQAFKLSGTLIVTPSKTYDPTQEADEEWMEFGLFMSRQEYRMIRRRMTAGMNAAKREGRFIGNVAPYGYERFKLDGRGWSLRIVPEQAEIVRMIFDLYNSGLGYCRIEKRLNELHIPAPKGEKWTSATIPGIIQNPHYIGMIPAGRRPGRKVVKDGEVKLIRPRQKCELYPGMHEPIISCETWDKAQARIGKNREARVPAGRRQSNPLAGLLVCDCCGKNMQRRPQTGSSQTQILCPTRGCPTVAHNADELEDMVIDSLRVFLAKLEAGKPAKTDVSAEYAALEECTKKLKDLEARQRRTFELVEDGTYTREIFLTRQAELTAERVKIEQQKAELEEAITKKKQEAEAQNNLAPAARQVLEAYNKQLTAEDRNRLLKKVIDHIDYHKRKRTRWNPESDLSITLHPVVTYSNPH

SEQ ID NO: 5124 - protein, 511 aa, Unknown
  Description of Unknown: Integrase B5125 sequence
  PTHR30461:SF3,SM00857,G3DSA:1.10.10.2600,IPR036162,PS51737, G3DSA:3.40.50.1390,IPR006119,IPR038109,PF07508,IPR011109, SSF53041,PTHR30461,Coil,cd00338,PF00239
MNVNEIIMYLRKSRKDYEFSDEPIEKTLERHEKTLQSFAVNSYGFKIPEENIFREVVSGDTISDRPEMQKVMSLIEDSKYKAVLVLEIERLARGNTIDQGLIAQTFEYTNTLIITPQKIFNLNDDMDRSFFEDGLYQSRKYLLYTKKILTRGRVTSVREGKYVGSYTPFGYDKEKLKNTKGYKLVINKQEAEIVKTIFNMYIDGTGTQMIANHLNKIGAKPRKNDVWTSAMVRNILDRPAVNGKVTWNRRKTVSIVENGIVKKVRPMGKDAIVVDGLHEAIIDDETWEKAQIRRKNNHRSKPISDIKNPLSGIIKCKICGRNMIRRPYNNGTAETLMCPLSGCKNVSSELTLVEKKLLNELEKIVCNFENNYKGELEQKKKVDYDSIIQNIEHNISIADKQLDKVYNLFENGIYDEEEFSKRRYELKEDIKNKKQYIKELKEKEIEEQKRDYSNKIPIIKNILNVYNDLDLNMKNELLKSVIDRVYYFKEKAGRWEKGNINKFVLEIVLKI

SEQ ID NO: 5125 - protein, 511 aa, Unknown
  Description of Unknown: Integrase B5126 sequence
  PTHR30461:SF3,SM00857,G3DSA:1.10.10.2600,IPR036162,PF13408, PS51737,IPR025827,G3DSA:3.40.50.1390,IPR006119,IPR038109, PF07508,IPR011109,SSF53041,PTHR30461, Coil,PS51736,cd00338,PF00239
MAKAKAATNDISKLAVIYARYSSHNQTEQSIEGQLAAGHRYADLKGYTVVHEYIDRAMTGRNDNRDDFQKMLSDTSKKQFGVIIVWKVDRFGRNREEITFNKYRCKKNGVRVEYVAENLPDSPEGVILESVLEGMAEYYSLQLSQNVQRGLLESAKKHQVIGGNVPLGLMMDEHKKYAPDPKTAPTVKLIFDMYAEGSTTSEIINHLNSIGMRTKAGKPFTKSSLTTVLKNEKYIGVYKYKDIIRDEDVIPPIVDKEIFYKVQELLKVNRRMPSHKWSYSDYILTDKLFCGQCGTAMVGESGFGKMGVKYSYYMCAKRRKDKTCDKKPVRQEWIEEIVLQRVQGILQNDELLEFIAENTWQYYLAQDESMEKLKGLQAELDKVEKSAANLMKAIEAGIFNGMTKARMDELDDQRAVIKKAMAEIEIEKGFKLTKDHILYFLEQFKKLDYKDRDCQRRLIDVFVNSIFVYDDKLRIAFNFGGSDSTITLNEVDKADRGEGFVCCASCSVIKP

SEQ ID NO: 5126 - protein, 511 aa, Unknown
  Description of Unknown: Integrase B5127 sequence
  PTHR30461:SF3,SM00857,G3DSA:1.10.10.2600,IPR036162,PF13408, IPR025827,G3DSA:3.40.50.1390,PS51737,IPR006119,IPR038109, PF07508,SSF53041,IPR011109,PTHR30461,Coil, PS51736,cd00338,PF00239
MAKAKAATNDISKLAVIYARYSSHNQTEQSIEGQLAAGHRYADLKGYTVVHEYIDRAMTGRNDNRDDFQKMLSDTSKKQFGVIIVWKVDRFGRNREEITFNKYRCKKNGVRVEYVAENLPDSPEGVILESVLEGMAEYYSLQLSQNVQRGLLESAKKHQVIGGNVPLGLMMDEHKRYAPDPKTAPTVKLIFDMYAEGSTTSEIINHLNSIGMRTKAGKPFTKSSLTTVLKNEKYIGVYKYKDIIRDENVIPPIVDKEIFYKVQELLKVNRRMPSHKWSYSDYILTDKLFCGKCGTAMVGESGFGKMGVKYSYYMCAKRRKDKTCDKKPVRQEWIEEIVLQRVQGILQNDELLEFIAENTWQYYLAQDESMEKLKGLQAELDKVEKSAANLMKAIEAGIFNDMTKARMDELDDQRAVIKKAMAEIEIEKGFKLTKDHILYFLEQFKKLDYKDRDCQRRLIDVFVNSIFVYDDKLRIAFNFGGSDGTITLNEVDKADHGEGFVCCASCPVLKP

SEQ ID NO: 5127 - protein, 511 aa, Unknown
  Description of Unknown: Integrase B5128 sequence
  SM00857,G3DSA:1.10.10.2600,IPR036162,PF13408,IPR025827, G3DSA:3.40.50.1390,mobidb-lite,PS51737,IPR006119,IPR038109, PF07508,IPR011109,SSF53041,PF00239,PTHR30461, PS51736,Coil,cd00338
MTAVIYARYSSDNQREESIEGQIRECTAYAEKNGITVVKHYIDRALSAKTDNRPDFQQMIKDSEKRLFDIVLVWKLDRFARNRYDSAHYEYQLERNHVKLVSATEPISDSPAGIMVKSMLTGMAEYYSAELSEKVVRGMTENVLKGKYNGGTIPIGFKVDEEKFFQVDPLKAPFVVEAFQRYNDGATMKELMNWLNDSGVTTNRNQKFTYNSVQKLLTNKRYIGENHFKDIVMPDSIPAIVDKDLFEEVQLKIKKNSRAPARHKAEDDYLLTTKLFCGMCGAMMFGECGTGRNKVVHHYYKCATAKRFKTCKKKTVRKEWLEDLVIAETMKLIQDDAVIDAIVAEVMELQDQENTTLPLLEKQMREVENGIENMLNAIQAGVLTNSTKSRLEKLEAQQKELEVRIAEEKIAWPRLSENQVRFWLTRFRKLDPNVKSHRETLINTFVNAVYLYDEKVLITFNYKDGTKTITFDEIAAKDAPEGNGSDLGCFAPPNVNQANPPRSTSWVRSSS

SEQ ID NO: 5128 - protein, 510 aa, Unknown
  Description of Unknown: Integrase B5129 sequence
  SM00857,G3DSA:1.10.10.2600,IPR036162,PF13408,PS51737, G3DSA:3.40.50.1390,IPR025827,IPR006119,IPR038109,PF07508, IPR011109,SSF53041,PTHR30461,Coil,PS51736, cd00338,PF00239
MSYFIYARKSRKDADLEALGIDVLERHITTLLELAKTLSLPIGAIYREVVSGDSIDSRPVMSQVMAEVESCMWDGCLVMDVDRLARGDTIDQGRVQRAFFYSNTKIVTPNKTYDPANEYDNEYFEFSLFMSRREYATIKRRMQRGRERSSSDGYYVGNIPPYGWRRVIAPDGKHFSLAPDPTESPVLDLMYDLCGNKQYGYQKACTHMAEMGILSRSGRPFTPSTLKGIISNPANIGKVRWGHRKTVRTVKDGKISRSRPHSSDYILADAVWPPRISADLFQRANQPKGSCSAPVRDDRPIQNIFAGLVRCSQCGRLMVRKKAHTKTPYDILICQYTECPTVGIRIDELELALLEWLRNYVDKYELTDALPEDAENVAAKEAIVKNFEKEHETLLKQRESLFDFLEQGIYTKEIFIERSNALEQRVKECMEHIISAQNDLHATLALQANRKNFVPRCKNLLGEWGKLTIPEKNSALKVLIEKIMFTKTKRNKKGQDRSDFEIDVFPKVPK

SEQ ID NO: 5129 - protein, 510 aa, Unknown
  Description of Unknown: Integrase B5130 sequence
  SM00857,G3DSA:1.10.10.2600,IPR036162,PF13408,PS51737, IPR025827,G3DSA:3.40.50.1390,IPR006119,IPR038109,PF07508, SSF53041,IPR011109,PTHR30461,Coil,PS51736, cd00338,PF00239
MSYFIYARKSRKDAELEALGIDVLERHITTLLELAKTLSLPIGAIYREVVSGDSIDTRPVMTQVLSEVEACMWDGALVMDVDRLARGDTIDQGRVQRAFFYSNTRIVTPSKTYDPANEYDNEYFEFSLFMSRREYATIKRRMQRGRERSSSDGYYVGNVAPYGWERVIAPDGKHYSLTPSQTEAPVLDLMYDLCGNKQYGYQKACTYMTNMGILARSGKPFSPSTLKGIISNPANIGKVRWGYRKTVRAVKDGRVVKSRPNATDYILADAAWAPRISTDLFKRANQPKGCFSSPVRNDRPIQNLFAGLVRCSQCGRLMVRKKAQTKTPYDVLICQYTECSTVGIRIDELEEALLEWLKDYIVKYEFTDTHEEDAAAIAAKEMIVTNFETEHQTLLKQRESLFDFLEQGIYTKEIFLERSNALEQRIRDCMNNITAAQEDLHTTIARQANRKNFVPKCKNLLSEWNSLTIPEKNSALRKLIDRIVLTKTKRNKKNQKNSEFMIDVYPKVPK

SEQ ID NO: 5130 - protein, 510 aa, Unknown
  Description of Unknown: Integrase B5131 sequence
  PTHR30461:SF3,SM00857,G3DSA:1.10.10.2600,IPR036162,PF13408, IPR025827,G3DSA:3.40.50.1390,PS51737,IPR006119,IPR038109, PF07508,IPR011109,SSF53041,PTHR30461,cd00338, PF00239
MSSVDKIAVVYARYSSHGQTEQSIEGQIAAAQKYAEQHSYTIIHVYADRAMTGRNDDREEFQRMLSDTATHQFGVILLWKIDRFGRNREEIAFNRYRCKKNGVRVERVAEDVPDGPEGVILDSVLEGMAEYYSLQLAQNVRRGQRESAKKSQTVGGCKIIGYNVNPDTKRYEVDPKTAPFVTEVFKRYANGETISEIVAWLNAQGVRATRGGEFTVNSLHRLLKNEKYTGVYIFHDIRNEGGMPALTDRATFDKAQEMLKVNRRAPARVWSKTEYLLTDKLFCGHCGAMMVGESGHGRNGTKHSYYTCWNRKKKKSCDKKPVRQDVIEPMVLRAISKMLGDEATLEYITDQVWAVYERSDTSGDTIKALDKQIADVDRALSNVMKAIEMGIINEMTKTRMDELTDQKQALSVARAEAGLAGGFKLTRDMILFFLHDMAIMDMTDRDCQKRLIKTFVNAIYLYDDHFDIAFNYTSNGKMVVRMQEINDAACGEVFGRCAQSPAKSRLSRLR

SEQ ID NO: 5131 - protein, 510 aa, Unknown
  Description of Unknown: Integrase B5132 sequence
  SM00857,G3DSA:1.10.10.2600,IPR036162,PF13408,PS51737, G3DSA:3.40.50.1390,IPR025827,IPR006119,IPR038109,PF07508, IPR011109,SSF53041,PTHR30461,Coil,PS51736, cd00338,PF00239
MSYFIYARKSRKDAELEALGIDVLERHITTLLELAKTLSLPIGAIYREVVSGDSIDARPVMTQVLSEVEACMWDGALVMDVDRLARGDTIDQGRVQRAFFYSNTRIVTPNKTYDPANEYDNEYFEFSLFMSRREYATIKRRMQRGRERSSSDGYYVGNVAPYGWERIIAPDGKHYSLTPSQTEAPVLDLMYDLCGNKQYGYQKACTYMTNMGILARSGKPFSPSTLKGIISNPANIGKVRWGYRKTVRAVKDGRVVKSRPNATDYILADAAWAPRISTDLFKRANQPKGCFSSPVRNDRPIQNLFAGLVRCSQCGRLMVRKTAQTKTPYDVLICQYTECSTVGIRIDELEEALLEWLKDYIVKYEFTDTHEEDAAAIAAKEMIVTNFETEHQTLLKQRESLFDFLEQGIYTKEIFIERSNALEQRIRDCMNNIATAQEDLHTIIARQTNRKNFVPKCKNLLSEWGSLTVPEKNSALRQLIDRIILTKTKRNKKNQKNSEFTIDVYPKVPK

SEQ ID NO: 5132 - protein, 510 aa, Unknown
  Description of Unknown: Integrase B5133 sequence
  SM00857,G3DSA:1.10.10.2600,IPR036162,PF13408,PS51737, G3DSA:3.40.50.1390,IPR025827,IPR006119,IPR038109,PF07508, SSF53041,IPR011109,PTHR30461,Coil,PS51736, cd00338,PF00239
MSYFIYARKSRKDADLEALGIDVLERHITTLLELAKTLSLPIGAIYREVVSGDSIDSRPVMSQVMAEVESCMWDGCLVMDVDRLARGDTIDQGRVQRAFFYSNTKIVTPNKTYDPANEYDNEYFEFSLFMSRREYATIKRRMQRGRERSSSDGYYVGNIPPYGWRRVIAPDGKHFSLAPDPTESPVLDLMYDLCGNKQYGYQKACTHMAEMGILSRSGRPFTPSTLKGIISNPANIGKVRWGHRKTVRTVKDGKISRSRPHSSDYILADAVWPPRISADLFQRANQPKGSCSAPVRDDRPIQNIFAGLVRCSQCGRLMVRKKAHTKTPYDILICQYTECPTVGIRIDELELALLEWLRNYIDKYELTDALPEDVENVAAKEAIVKNFEKEHETLLKQRESLFDFLEQGIYTKEIFIERSNALERRVKECMEHIISAQNDLHATLALQANRKNFVPRCKNLLGEWGRLTIPEKNSALKVLIEKIMFTKTKRNKKGQDRSDFEIDVFPKVPK

SEQ ID NO: 5133 - protein, 510 aa, Unknown
  Description of Unknown: Integrase B5134 sequence
  PTHR30461:SF3,SM00857,G3DSA:1.10.10.2600,IPR036162,PF13408, IPR025827,PS51737,G3DSA:3.40.50.1390,IPR006119,IPR038109, PF07508,IPR011109,SSF53041,PTHR30461,Coil, PS51736,cd00338,PF00239
MIENYLDKIKQRLNVVVLHAVVYTRYSSDMQRGESIDAQIRLIRKWSDEHSIVIDKIYADEAQSAKSDERKQFQQMIADSKKQKDWQLVLVHKLDRFARNRMDSAAYRVELRKNKKYLISTTEQFDDTPESCMLEGIIESMAEFYSKNLAREVMKGLTENALKGKTCGGTPPLGYDLDERKYYKINEFEAQAVKLIFQLFLEGKTYGEIISKLNTSGYRTKCNRLFSRNSLYEILRNEKYKGILVYNKTQSRDEITGKRSGHRYKSDEEVIRVDGVIPQIVSPEDWDDVQLILNSRKKAFRNNAKETYLLSGKIQCGKCGGSYDGRRSFNSCGTKYIYYACNGKRNPNYKCNNNSIQRDWIESYMINIIDNYIHHLSKAQKQNIYQLCFDSAQSSKKADISILNQRLNSLNKELSRIVDVITITNSTTLIEKLTDLEQQKAEIQLRIKVLSQEKGKILSKQKINLLLTKIKKMLKEKSVPQLKELMDLIVNEIIVNDKDVIVYLNIPIVN

SEQ ID NO: 5134 - protein, 510 aa, Unknown
  Description of Unknown: Integrase B5135 sequence
  SM00857,G3DSA:1.10.10.2600,IPR036162,PF13408,IPR025827, PS51737,G3DSA:3.40.50.1390,IPR006119,IPR038109,PF07508, IPR011109,SSF53041,PTHR30461,Coil,PS51736, cd00338,PF00239
MSYFIYARKSRKDAELEALGIDVLERHITTLLELAKTLSLPIGAIYREVVSGDSIDARPVMTQVLSEVEACMWDGALVMDVDRLARGDTIDQGRVQRAFFYSGTRIVTPNKTYDPANEYDNEYFEFSLFMSRREYATIKRRMQRGRERSSSDGYYVGNVAPYGWERIIAPDGKHYSLTPSQTEAPVLDLMYDLCGNKQYGYQKACTYMSNMGILARSGKPFSPSTLKGIISNPANIGKVRWGYRKTVRAVKDGRVVKSRPNATDYILADAAWEPRISADLFKRANQPKGCFSSPVRNDRPIQNLFAGLVRCSQCGRLMVRKKAQTKTPYDVLICQYTECSTVGIRIDELEEALLGWLKDYIAKYEFSDTHEEDTAAIAAKELIVTNFETEHQTLLKQRESLFDFLEQGIYTKEIFIERSNALEQRIRDCMNNITAAQEDLHTTIARQANRKNFVPKCKNLLSEWNSLTIPEKNSALRKLIDRIVLTKTKRNKKNQKNSEFMIDVYPKVPK

SEQ ID NO: 5135 - protein, 510 aa, Unknown
  Description of Unknown: Integrase B5136 sequence
  SM00857,G3DSA:1.10.10.2600,IPR036162,PF13408,IPR025827, PS51737,G3DSA:3.40.50.1390,IPR006119,IPR038109,PF07508, IPR011109,SSF53041,PTHR30461,PS51736,cd00338, PF00239
MSYFIYARKSRKDAELEALGIDVLERHITTLLELAKTLSLPIGAIYREVVSGDSIDARPVMTQVLSEVEACMWDGALVMDVDRLARGDTIDQGRVQRAFFYSNTRIVTPNKTYDPANEYDNEYFEFSLFMSRREYATIKRRMQRGRERSSSDGYYVGNVAPYGWERVIAPDGKHYSLAPHQTEAPVLDLMYDLCGNKQYGYQKACTYMSNMGILARSGKPFTPSTLKGIISNPANIGKVRWGHRKTVRAVKDGRVVKSRPKATDYILSDAAWAPRISPDLFKRANQPKGCFSAPVRNDRPIQNLFAGLVRCSQCDRLMVRKKAQTKTPYDMLICQYTECSTVGIRIDELEEALLGWLKDYIAKYEFADTHEEDTAAIAAKELIVTNFETEHQTLLKQRESLFDFLEQGIYTKEIFIERSNALEQRIRDCMNNITAAREGLHTTIARQANRKNFVPKCKNLLSEWDSLTVSEKNSALRQLIDRIVLTKTKRNKKNQKNSEFTIDVYPKVPK

SEQ ID NO: 5136 - protein, 510 aa, Unknown
  Description of Unknown: Integrase B5137 sequence
  SM00857,G3DSA:1.10.10.2600,IPR036162,PF13408,PS51737, G3DSA:3.40.50.1390,IPR025827,IPR006119,IPR038109,PF07508, SSF53041,IPR011109,PTHR30461,Coil,PS51736, cd00338,PF00239
MSTNYALYLRKSRADLEAEAHGEGDTLARHEHILMELAKSRALPIGAIYREIVSGERIANRPVMQQLLSEVEDGRWKGVLVTETSRLARGDTIDQGIVAQAFKFSGTLIVTPAKTYDPTQEADEEWMEFGLFMSRQEYRMIRRRMNAGTKSAKKEGRYVGSRAPYGYERCKLSGRGWSIRPIEPESGVVKMIYELFLSGKGAGEIATYLNQINIPSPTQRTWVRQTVGLILQNPHYAGLIPDAVHPYKKVIKDGQLTVKRPLNKQCELYEGVHEAIIPRETWEETQRLLTKNHKPRVPSALQQHNPLAGLLYCDKCGQKMQRHPQTDRNFEKYYCPTVGCPTVSAPLSQVEDLVLQGLKEFLYDLEMQQPEQPDFTTEQNALKNIDSRLAEQRKRLTKTFELVEDGIYTREAFLQRQSEINAEISRLQTAREELQRKLDAHTAELSARENAAPQIRYVLDVYDRKSAPAERSALLKQVIDRIDYHKTTKQRWSAENDLSVTIHPKISARK

SEQ ID NO: 5137 - protein, 510 aa, Unknown
  Description of Unknown: Integrase B5138 sequence
  cd00338,SM00857,G3DSA:1.10.10.2600,IPR036162,PF13408, IPR025827,G3DSA:3.40.50.1390,PS51736,PS51737,IPR006119, IPR038109,PF07508,IPR011109,SSF53041,PTHR30461, mobidb-lite,Coil,PF00239
MEKRAVIYARYSCDKQSEQSIEGQIHVINDFAVRNGYTIVSSYIDRAKSAKTANRPQFLQMISDSAKGIFDFVLVYKLDRFSRNRYDSAFYKHKLKQNGVQVISATECLSDNPESIITEAMLEAMAEFYSAELGQKTKRGMRESALKCMSTGSKPPLGYKWGEDKHLEIDEATADIPRIAFSMYADGKGKQAIAEELNRRGFHTRTGREFKVNSLDNMLTNPKYIGTFTYGTDISIENGCPALISHDIYDKVQGLLKHTKKAPARAKAKVEYYLAGRLKCGICGESMIAVGGTSQNGTQHHYYRCKCRGKGCDKKPERKDFLEWYITEQVLALLNMEEHKERLAEKIIAAYKSGMETNKTEEYKRQIQITETKLNNVLNLLIEKKSDSLMKKLDELELRKSELEEQLRSAELAQSHIPTKREIIEWFDRLSNVDGCENSLQRQVIHTFVKEVFLWDDHAVIVLTLNNTQETVTFEEIREFEQLSDETQEPLPDESESGSCSIEFGSPDWT

SEQ ID NO: 5138 - protein, 510 aa, Unknown
  Description of Unknown: Integrase B5139 sequence
  SM00857,G3DSA:1.10.10.2600,IPR036162,PF13408,IPR025827, PS51737,G3DSA:3.40.50.1390,IPR006119,IPR038109,PF07508, IPR011109,SSF53041,PTHR30461,Coil,PS51736, cd00338,PF00239
MSYFIYARKSRKDAELEALGIDVLERHITTLLELAKTLSLPIGAIYREVVSGDSIDARPVMTQVLSEVEACMWDGALVMDVDRLARGDTIDQGRVQRAFFYSNTRIVTPNKTYDPANEYDNEYFEFSLFMSRREYATIKRRMQRGRERSSSDGYYVGNVAPYGWERVIAPDGKHYSLAPHQTEAPVLDLMYDLCGNKQYGYQKACTYMSNMGILARSGKPFTPSTLKGIISNPANIGKVRWGYRKTVRAVKDGRVVKSRPNATDYILADAAWAPRINIDLFERANQPKGCFSAPIRSDRPIQNLFAGLVRCSQCGRLMVRKKAQTKTPYDFLICQYAECSTVGIRIDELEEALLGWLKDYIAKYEFSDTHEEDTAAIAAKELIVTNFETEHQTLLKQRESLFDFLEQGIYTKEIFIERSNALEQRIRDCMNNITAAREDLYVTIARQANRKNFVPKCKNLLSEWGSLTVPEKNSALRQLIDRIVLTKTKRNKKNQKNSEFTIDVYPKVPK

SEQ ID NO: 5139 - protein, 510 aa, Unknown
  Description of Unknown: Integrase B5140 sequence
  SM00857,G3DSA:1.10.10.2600,IPR036162,PF13408,IPR025827, PS51737,G3DSA:3.40.50.1390,IPR006119,IPR038109,PF07508, IPR011109,SSF53041,PTHR30461,Coil,PS51736, cd00338,PF00239
MSYFIYARKSRKDAELEALGIDVLERHITTLLELAKTLSLPIGAIYREVVSGDSIDARPVMTQVLSEVEACMWDGALVMDVDRLARGDTIDQGRVQRAFFYSNTRIVTPNKTYDPANEYDNEYFEFSLFMSRREYATIKRRMQRGRERSSSDGYYVGNVAPYGWERVIAPDGKHYSLAPHQTEAPVLDLMYDLCGNKQYGYQKACTYMSNMGILARSGKPFTPSTLKGIISNPANIGKVRWGHRKTVRAVKDGRVVKSRPKATDYILSDAAWAPRISPDLFKRANQPKGCFSAPVRNDRPIQNLFAGLVRCSQCDRLMVRKKAQTKTPYDMLICQYAECSTVGIRIDELEEALLGWLKDYIAKYEFTDTHEEDTAAIAAKELIVTNFETEHQTLLKQRESLFDFLEQGIYTKEIFIERSNALEQRIRDCMNNITAAREDLHTTIARQANRKNFVPKCKNLLSEWDSLTVSEKNSALRQLIDRIVLTKTKRNKKNQKNSEFTIDVYPKVPK

SEQ ID NO: 5140 - protein, 510 aa, Unknown
  Description of Unknown: Integrase B5141 sequence
  PTHR30461:SF3,SM00857,G3DSA:1.10.10.2600,IPR036162,PF13408, IPR025827,G3DSA:3.40.50.1390,PS51737,IPR006119,IPR038109, PF07508,IPR011109,SSF53041,PF00239,PTHR30461, PS51736,Coil,cd00338
MSSVDKIAVVYARYSSHGQTEQSIEGQIAAAQKYAEQHGYTIIHIYADRAMTGRNDDREEFQRMLSDTATHQFGVILLWKIDRFGRNREEIAFNRYRCKKNGVRVERVAEDVPDGPEGVILDSVLEGMAEYYSLQLAQNVRRGQRESAKKSQTVGGCKIIGYNVNPDTKRYEVDPKTAPFVTEVFKRYANGETISEIVAWLNAQGVRTTRGGEFTVNSLHRLLKNEKYTGVYIFHDIRNEGGMPALIDRATFDKAQEMLKVNRRTPARVWSKTEYLLTDKLFCGHCGAMMVGESGHGRNGTKHNYYTCWNRKKKKLCDKKPVRQDVIEPLVLRSIGKLLENPATLENIADQVWAAYERSDTSGDTIKALDKQIADVDRALSNVMKAIEMGIINEMTKARMDELTDQKQALSTARAEAGLAGGFKLTRDMVLFFLQEIAALDMADRDSQKRLIKTFVNAIYLYDDHFDIAFNYTDNGKVVVRMQEINDAACGEVFGRCAQSPAKSRLSRLR

SEQ ID NO: 5141 - protein, 510 aa, Unknown
  Description of Unknown: Integrase B5142 sequence
  PTHR30461:SF3,SM00857,G3DSA:1.10.10.2600,IPR036162,PF13408, PS51737,IPR025827,G3DSA:3.40.50.1390,IPR006119,IPR038109, PF07508,IPR011109,SSF53041,PTHR30461,Coil, PS51736,cd00338,PF00239
MIENYLDKIKQRLNVVVLHAVVYTRYSSDMQRGESIDAQIRLIRKWSDEHSIVIDKIYADEAQSAKSDERKQFQQMIADSKKQKDWQLVLVHKLDRFARNRMDSAAYRVELRKNKKYLISTTEQFDDTPESCMLEGIIESMAEFYSKNLAREVMKGLTENALKGKTCGGTPPLGYDLDERKYYKINEFEAQAVKLIFQLFLEGKTYGEIISKLNTSGYRTKCNRLFSRNSLYEILRNEKYKGILVYNKTQSRDEITGKRSGHRYKSDEEVIRVDGVIPQIVSPEDWDDVQLILNSRKKAFRNNAKETYLLSGKIRCGKCGGSYDGRRSFNSCGTKYIYYACNGKRNPNYKCNNNSIQRDWIESYMINIIDNYIHHLSKAQKQNIYQLCFDSVQSSKKADISILNQRLNSLNKELSRIVDVITITNSPTLIEKLTDLEQQKAEIQLRIKALSQEKGKILSKQKINLLLTKIKKMLKEKSVPQLKELMDLIVNEIIVNEEDVIVYLNIPITK

SEQ ID NO: 5142 - protein, 510 aa, Unknown
  Description of Unknown: Integrase B5143 sequence
  SM00857,G3DSA:1.10.10.2600,IPR036162,PF13408,IPR025827, G3DSA:3.40.50.1390,PS51737,IPR006119,IPR038109,PF07508, SSF53041,IPR011109,PTHR30461,Coil,PS51736, cd00338,PF00239
MSYFIYARKSRKDAELEALGIDVLERHITTLLELAKTHSLPIGAIYREVVSGDSIDARPVMTQVLSEVESCMWDGALVMDVDRLARGDTIDQGRVQRAFFYSNTRIVTPNKTYDPANEYDNEYFEFSLFMSRREYATIKRRMQRGRERSSSDGYYVGNVAPYGWERVIAPDGKHYSLAPHQTEAPVLDLMYDLCGNKQYGYQKACTYMSNMGILARSGKPFTPSTLKGIISNPANIGKVRWGHRKTVRAVKDGRVVKSRPKATDYILSDAAWAPRISPDLFKRANQPKGCFSAPVRNDRPIQNLFAGLVRCSQCDRLMVRKKAQTKTPYDMLICQYTECSTVGIRIDELEEALLGWLKDYIAKYEFADTHEEDTAAIAAKELIVTNFETEHQTLLKQRESLFDFLEQGIYTKEIFIERSNALEQRIRDCMNNITAAREDLHTTIARQANRKNFVPKCKNLLSEWDSLTVSEKNSALRQLIDRIVLTKTKRNKKNQKNSEFTIDVYPKVPK

SEQ ID NO: 5143 - protein, 510 aa, Unknown
  Description of Unknown: Integrase B5144 sequence
  SM00857,G3DSA:1.10.10.2600,IPR036162,PF13408,PS51737, G3DSA:3.40.50.1390,IPR025827,IPR006119,IPR038109,PF07508, IPR011109,SSF53041,PTHR30461,Coil,PS51736, cd00338,PF00239
MSYFIYARKSRKDADLEALGIDVLERHITTLLELAKTLSLPIGAIYREVVSGDSIDSRPVMSQVMAEVESCMWDGCLVMDVDRLARGDTIDQGRVQRAFFYSNTKIVTPNKTYDPANEYDNEYFEFSLFMSRREYATIKRRMQRGRERSSSDGYYVGNIPPYGWRRVIAPDGKHFSLAPDPTESPVLDLMYDLCGNKQYGYQKACTHMAEMGILSRSGRPFTPSTLKGIISNPANIGKVRWGHRKTVRTVKDGKISRSRPHSSDYILADAVWPPRISADLFRRANQPKGSCSAPVRDDRPIQNIFAGLVRCSQCGRLMVRKKAHTKTPYDILICQYTECPTVGIRIDELELALLEWLRNYIDKYELTDALPEDAENVAAKEAIVKNFEKEHETLLKQRESLFDFLEQGIYTKEIFIERSNALEQRVKECMEHIISAQNDLHATLALQANRKNFVPRCKNLLGEWGRLTIPEKNSALKVLIEKIMFTKTKRNKKGQDRSDFEIDVFPKVPK

SEQ ID NO: 5144 - protein, 510 aa, Unknown
  Description of Unknown: Integrase B5145 sequence
  SM00857,G3DSA:1.10.10.2600,IPR036162,PF13408,PS51737, G3DSA:3.40.50.1390,IPR025827,IPR006119,IPR038109,PF07508, SSF53041,IPR011109,PTHR30461,Coil,PS51736, cd00338,PF00239
MPTDYALYLRKSRADLEAEAHGEGDTLARHEHILMELAKSRALPIGAIYREIVSGERIANRPVMQQLLSEVEDGRWKGVLVTETSRLARGDTIDQGIVAQAFKFSGTLIVTPAKTYDPTQEADEEWMEFGLFMSRQEYRMIRRRMNAGTKSAKKEGRYVGSRAPYGYERCKLHGRGWSIRPIEPESVVVKMIYELFLSGKGAGEIATYLNQINIPSPTQRTWVRQTVGLILQNPHYAGLIPDAVHPYKKVIKDGQLTVKRPLNKQCELYEGVHEAIIPRETWEETQRLLTKNHKPRVPSALQQHNPLAGLLYCDKCGQKMQRHPQTDRNFEKYYCPTVGCPTVSAPLSQVEALVLQGLKEFLYNLEMQQPEQPDFTTEQNALKNIDSRLVEQRKRLTKTFELVEDGIYTREAFLQRQSEINAEISRLQTASEELQRKLDAHAAELSARENAAPQIQHVLDVYDRKSAPAERSALLKQVIDRIDYHKTTKQRWSAENDLSVTIHPKISARK

SEQ ID NO: 5145 - protein, 510 aa, Unknown
  Description of Unknown: Integrase B5146 sequence
  cd03768,PTHR30461:SF3,SM00857,G3DSA:1.10.10.2600,IPR036162, PF13408,PS51737,G3DSA:3.40.50.1390,IPR025827,IPR006119, IPR038109,PF07508,IPR011109,SSF53041,PTHR30461, PS51736,Coil,PF00239
MLKIAIYSRKSVETDTGESIKNQIAICKQYFQRQNEECKFEIFEDEGFSGGNINRPDFKRMMQLVKIKQFDVVAVYKVDRIARNIVDFVNVFDELDKLNVKLVSVTEGFDPSTPIGKMMMMLLASFAEMERMNIAQRVKDNMRELAKLGRWSGGTAPSGYSVQKVKENGKEVSYLKKEKDADNIKLIFQKYASGYTAFEIHKYFKLKGFTYNPKTIYGLLTNPTYLEATEESIKYLENKGYTVYGEPNGCGFLPYNRRPRYKGIKAWKDKNMMVGVSRHEPAVDLNLWIAVQSQLEKKTVAPHPHESKFTFLTGGIMKCRCGAGMGVSPGRIRSDGTRLYYFTCSGKRYRQNGCSNLSLRVDWAESKVKAFLEKMRDKETLTEYYNSNKNKSNVDKDIKSINKKIVSNKKAVDSLVDKLILLSNDAAKPLAERIENLTQESNTLKEELLKLEREKLFNSNDKLNIDLIHKSIIQFLDTDSLEEKKKFAKDIFDKITWDSASKELLFFLQM

SEQ ID NO: 5146 - protein, 510 aa, Unknown
  Description of Unknown: Integrase B5147 sequence
  PTHR30461:SF3,cd00338,SM00857,G3DSA:1.10.10.2600,IPR036162, PS51737,G3DSA:3.40.50.1390,IPR006119,IPR038109,PF07508, IPR011109,SSF53041,PTHR30461,PS51736,Coil, PF00239
MAEKAVIYARFSSDKQREESIEDQVRVCSQFAASNGFEIVKTYTDEARSGTNAAGRPGFQKMILDAQAQRWTKVIVYKTDRFARSRYDSAVYKAKLRKCGVEIVTAAESVPDGPDGIILESVLEGMAEYYSANLAQNVKRGMEGNALKCKHNGVSIFGYDRGADGYYAVNEHEAAGVRMAFDMCAAGETKAEIMRTLNGIGYKTVTGRPFSNEAVNRLLNCERYIGTYTWGDFRKENGMPSIINRDLWDSAHAHMASRGRKRRGKMNAEYLLSGKIYDADGNQFESDCGYGENGKRYHYYRCRKTKVSMRRDEVEDKVIGACARLLNENPDLDERIVDMVLARQDKDAEQEITARKALSRRITDVEREIDNAIDLACKLGSTDRMAVKINGLQDELTALKAELDEIKHGAPLIDRDMILFALYKMRQSDGPRGMVAAFVDRVTVNEDGSLLVQFILCRPTSENKKPEPSNGEFGKLSCGSPGVNYPELFQVYHSVRILPLKGGFGVLLAA

SEQ ID NO: 5147 - protein, 510 aa, Unknown
  Description of Unknown: Integrase B5148 sequence
  SM00857,G3DSA:1.10.10.2600,IPR036162,PF13408,IPR025827, PS51737,G3DSA:3.40.50.1390,IPR006119,IPR038109,PF07508, IPR011109,SSF53041,PTHR30461,Coil,PS51736, cd00338,PF00239
MSYFIYARKSRKDAELEALGIDVLERHITTLLELAKTLSLPIGAIYREVVSGDSIDARPVMTQVLSEVEACMWDGALVMDVDRLARGDTIDQGRVQRAFFYSNTRIVTPNKTYDPANEYDNEYFEFSLFMSRREYATIKRRMQRGRERSSSDGYYVGNVAPYGWERVIAPDGKHYSLAPHQTEAPVLDLMYDLCGNKQYGYQKACTYMSNMGILARSGKPFAPSTLKGIISNPANIGKVRWGYRKTVRAVKDGRVVKSRPNATDYILADAAWAPRINIDLFERANQPKGCFSAPIRSDRPIQNLFAGLVRCSQCGRLMVRKKAQTKTPYDFLICQYAECSTVGIRIDELEEALLGWLKDYIAKYEFSDTHEEDTAAIAAKELIVTNFETEHQTLLKQRESLFDFLEQGIYTKEIFIERSNALEQRIRDCMNNITAAREDLYVTIARQANRKNFVPKCKNLLSEWGSLTVPEKNSALKQLIDRIVLTKTKRNKKNQKNSEFTIDVYPKVPK

SEQ ID NO: 5148 - protein, 510 aa, Unknown
  Description of Unknown: Integrase B5149 sequence
  PTHR30461:SF3,SM00857,G3DSA:1.10.10.2600,IPR036162,PF13408, IPR025827,PS51737,G3DSA:3.40.50.1390,IPR006119,IPR038109, PF07508,IPR011109,SSF53041,PTHR30461,Coil, PS51736,cd00338,PF00239
MDTLADVVVYARYSSAGQNDQSIEGQVKTCREFAAQRGFRVVQEYADRAISGRHAETRPAFQQMIADARKKTFQYILVWKLDRFARNRYDSAIYKKELRKYGVRVLSVTEGIDEGNESILLEAILEAMAEEYSRQLSQNVRRGMRQNAEKGLSLGGGTPYGYRLQGKRYVIVDREAEVVRFIHEAYAEGRPSREIINECKSRGYHTRKGADFTMNAIARMIANDKYAGAFLFKGELVVGDLYPPIVPQELKERAKKRLALKARAPGHEKAKVEYILHGKLFCGHCGAPMVGESGKSKSGTVYNYYACAEKKKRHGCKKKNERKDFLEWYIAEQITEYVLTDSRIEEIADAVIAEYKKSFDASGIKRLEKKIKDADAELDKLVDALIKTSADAAVKRINARIEEVEQYRAQLEDDLSSLRIASRVEIKKDDVAKWLRSMRRGDLMDDEYRKKIVEIFVNAVYLYDDRVAIFFNVKDCKQVSYIDMIDATGWAACSDLSSNALPLRFSRFWS

SEQ ID NO: 5149 - protein, 510 aa, Unknown
  Description of Unknown: Integrase B5150 sequence
  SM00857,G3DSA:1.10.10.2600,IPR036162,PF13408,PS51737, G3DSA:3.40.50.1390,IPR025827,IPR006119,IPR038109,PF07508, IPR011109,SSF53041,PTHR30461,Coil,PS51736, cd00338,PF00239
MSYFIYARKSRKDAELEALGIDVLERHITTLLELAKTLSLPIGAIYREVVSGDSIDARPVMTQVLSEVEACMWDGALVMDVDRLARGDTIDQGRVQRAFFYSNTRIVTPSKTYDPANEYDNEYFEFSLFMSRREYATIKRRMQRGRERSSSDGYYVGNVAPYGWERVIAPDGKHYSLAPHQTEAPVLDLMYDLCGNKQYGYQKACTYMTNMGILARSGKPFSPSTLKGIISNPANIGKVRWGYRKTVRAVKDGRVVKSRPNATDYILADAEWAPRISADLFKRANQPKGCFSSPVRNDRPIQNLFAGLVRCSQCGRLMVRKKAQTKTPYDVLICQYTECSTVGIRIDELEEALLEWLKDYIVKYEFTDTHEEDAAAIAAKEMIVTNFETEHQTLLKQRESLFDFLEQGIYTKEIFIERSNALEQRIRDCMNNIATAQEDLHTTIARQANRKNFVPKCKNLLSEWDSLTISEKNSALRQLIDRIVLTKTKRNKKNQKNSEFTIDVYPKVPK

SEQ ID NO: 5150 - protein, 510 aa, Unknown
  Description of Unknown: Integrase B5151 sequence
  SM00857,G3DSA:1.10.10.2600,IPR036162,PF13408,PS51737, G3DSA:3.40.50.1390,IPR025827,IPR006119,IPR038109,PF07508, IPR011109,SSF53041,PTHR30461,Coil,PS51736, cd00338,PF00239
MKRAVFYGRYSSDRQTEQSIEGQRRVCEEFAKAEGIRIVAEYIDRATSGTSTDHRDQFQQMISDSKNGCWEYVLVYKLDRFARNRYDSAVYKQKLKRCGVKVLSATERITDSPEGILIEGLLESMDEYFSRELSRKCKRGIRETIIKGNTFTRAPYGYHKTEKRLVVDEVEANNVRQIFTQYVSGATLQSIADKLNAAGHRTRQGNLFRRYSVSDILHNPKYTGTYYVTDIAEPETCPQIVPQSLYDAAQERLKHSAHNARTNRTGHVFALTGLLQCGICGRKVVGTSVQRKYFYYTCIAKSCETLPHDHNLTISSEKVESTVIAALADYFTPEHVTDFAECLYRMYLAEDSPKPDRSKQIQALEKQIQGAVSALIACPQSEALQARLTDLEQQKQQLEQAPPEPPKLTQQDFIKFFCWITKALDRADDRKKFFNAVIHSVTLYRDHVVIAINLTNDDVDPPERVILEKSFSDTVVKSSLYPTISKIKLAPPLLLLYVPLPAGIFRHRGA

SEQ ID NO: 5151 - protein, 510 aa, Unknown
  Description of Unknown: Integrase B5152 sequence
  PTHR30461:SF3,IPR036162,PS51737,IPR011109,PTHR30461, PS00397,PF00239,G3DSA:1.10.10.2600,IPR006119,SSF53041, SM00857,IPR025827,IPR038109,PS51736,cd03768, IPR006118,PF13408,G3DSA:3.40.50.1390,PF07508,Coil
MRDMDSARLWVVCYVRVSTREQAEKGYSVSEQQERLKAYCLAKDWVVAQVITDPGFSGAKLERPGIQQLISLVQAKKCDAVLVWKLDRLSRSQKDTLYLIEDVFLKNGCAFVSMNENFDTSTAFGRAMIGILSVFAQLEREQIRERMAVGRVGRAKAGLFHGGGFAPIGYDYKTIAEGGAGLVVNEYEAMQVREVFSLYLQGWPVNRIRKYMAAHYTTKDGDWGSDTTVRDVLKNPLYAGKINWAKKVYDGQHEPLISQETFDAAAARLATSSWKRTSSDGMERDSPFKSTHLLGGIIWCARCGARYFASGNYSGRGENKRYWPYYVCYSRAKSAKHMIRDPNCRNDRWAVAKLDAIIEGEIRKLAFDPAALELAVSGPQQDEDIAQRRAALQQRLNDLRAQMGRVLDLYQMGGSLPASMVGDRVAKLQAEIDGVEAALEEAVEEPPTRRLDAARVALVGAEDVLDNGTLDERRELVHSLIRRIDLDGENIDIHWSFSPEAAEVIPGRSA

SEQ ID NO: 5152 - protein, 510 aa, Unknown
  Description of Unknown: Integrase B5153 sequence
  SM00857,G3DSA:1.10.10.2600,IPR036162,PF13408,PS51737, G3DSA:3.40.50.1390,IPR025827,IPR006119,IPR038109,PF07508, IPR011109,SSF53041,PTHR30461,Coil,PS51736, cd00338,PF00239
MSYFIYARKSRKDADLEALGIDVLERHITTLLELAKTLLPPIGAIYREVVSGDSIDSRPVMSQVMAEVESCMWDGCLVMDVDRLARGDTIDQGRVQRAFFYSNTKIVTPNKTYDPANEYDNEYFEFSLFMSRREYATIKRRMQRGRERSSSDGYYVGNIPPYGWRRVIAPDGKHFSLAPDPTESPVLDLMYDLCGNKQYGYQKACTHMAEMGILSRSGRPFTPSTLKGIISNPANIGKVRWGHRKTVRTVKDGKISRSRPHSSDYILADAVWPPRISADLFQRANQPKGSCSAPVRDDRPIQNIFAGLVRCSQCGRLMVRKKAHTKTPYDILICQYTECPTVGIRIDELELALLEWLRNYIDKYELTDALPEDVENVAAKEAIVKNFEKEHETLLKQRESLFDFLEQGIYTKEIFIERSNALERRVKECMEHIISAQNDLHATLALQANRKNFVPRCKNLLGEWGRLTIPEKNSALKVLIEKIMFTKTKRNKKGQDRSDFEIDVFPKVPK

SEQ ID NO: 5153 - protein, 510 aa, Unknown
  Description of Unknown: Integrase B5154 sequence
  PTHR30461:SF3,cd00338,SM00857,G3DSA:1.10.10.2600,IPR036162, PF13408,IPR025827,PS51737,G3DSA:3.40.50.1390,IPR006119, IPR038109,PF07508,IPR011109,SSF53041,PTHR30461, PS51736,Coil,PF00239
MQKRRTKYANSQGDNAVIYARYSSHNQKDTSIEQQIEVCTKYARDNGYRITNIYADRAISGKTDARPQFRLMMQDAREHKFDVVISWKSSRLGRDMLDAMTNDIILRNLGIKCFYTEENFDDTAAGRFALRNMMNVNQFYIENMAEDILRGMRDNAKKCRVNNGSPPLGYRRGADGKYEIVPEEAETVREIFTKVLAGMAFVDIANELNARGIKTKKGAPWGRSSFSRLLSNERYIGTYKWSDIVIENGMPAIIDREVFEMAQKKIKGERPLRRRHNENGDYLLTGKLFCGKCDSPMTGMSGTSKSGAKHHYYACYSARKDGSCDKKAVKRDWVEKTVALFIKEHVLRDEVIEWMVDQYMVYQKATFESQRIMEMRNQLKDVQSQLDNLVDAIARGMYTDSTKDKLLKLEADKKEIEQDIRLATYNLKEYDREHVRCYFLSFKEGSVESKDYLKRLFDQFVTKIYLYDDEIRIAFSGTKDDSPVSFKIIDEAEELAVSSVRLSSASSHQA

SEQ ID NO: 5154 - protein, 510 aa, Unknown
  Description of Unknown: Integrase B5155 sequence
  SM00857,G3DSA:1.10.10.2600,IPR036162,PF13408,PS51737, G3DSA:3.40.50.1390,IPR025827,IPR006119,IPR038109,PF07508, IPR011109,SSF53041,PTHR30461,Coil,PS51736, cd00338,PF00239
MSYFIYARKSRKDADLEALGIDVLERHITTLLELAKTLSLPIGAIYREVVSGDSIDSRPVMSQVMAEVESCMWDGCLVMDVDRLARGDTIDQGRVQRAFFYSNTKIVTPNKTYDPANEYDNEYFEFSLFMSRREYATIKRRMQRGRERSSSDGYYVGNIPPYGWRRVIAPDGKHFSLAPDPTESPVLDLMYDLCGNKQYGYQKACTHMAEMGILSRSGRPFTPSTLKGIISNPANIGKVRWGHRKTVRTVKDGKISRSRPHSSDYILADAVWPPRISADLFQRANQPKGSCSAPVRDDRPIQNIFAGLVRCSQCGRLMVRKKAHTKTPYDILICQYTECPTVGIRIDELELALLEWLRNYIDKYELTDALPEDAENIAAKEAIVKNFEKEHETLLKQRESLFDFLEQGIYTKEVFIERSNALEQRVKECMEHIITAQNDLHATLALQANRKNFVPRCKNLLGEWGRLTIPEKNSALKVLIEKIMFTKTKRNKKGQDRSDFEIDVFPKVPK

SEQ ID NO: 5155 - protein, 510 aa, Unknown
  Description of Unknown: Integrase B5156 sequence
  PTHR30461:SF3,SM00857,G3DSA:1.10.10.2600,IPR036162,PF13408, PS51737,G3DSA:3.40.50.1390,IPR025827,IPR006119,IPR038109, PF07508,IPR011109,SSF53041,PTHR30461,Coil, PS51736,cd00338,PF00239
MKIKTPEYRDGVIYARYSPGPNQTEQSIEGQLRDCERFCADNNIRIIATYIDRKQSGRSDNRTDFQRMLRDSKRRAFSTVVVWKIDRFGRNREEIAKNKAVLRLNGVKVLSAKEHIPDGPEGIILESVLEGLAEYYSANLSQNIVRGMRESALKCQYNGSGLSLGYSVDKDHKFHIDSHGAAIVKMIYEKYDNGEKIADILRYIQASGIKTMKGKEYTHYGISRILRNRAYIGEYKWQDIVIPDGMPRIISDELFERVQRRMEKNKKAPSAGRGVDFLLTAKLFCGHCKSTMIGDSGTGKTGGKWYYYSCRGRKTKKTDCKKRSVPKDWLEREVVALTASYILQDDIISNIADRVVEIQRKEHEDNSMLRYYEDRLKEAETSIRNIMRAIESGVFTDSTRDRLVELEAEKADMETEIAKEKITRPIVTREQVIYFLNRFKNGDVDDKEYQRQIIDALVNKVILYDDKITITYNYSGEGKEITADIIEEAADEALSDAEDRCSTFQRYPQS

SEQ ID NO: 5156 - protein, 510 aa, Unknown
  Description of Unknown: Integrase B5157 sequence
  SM00857,G3DSA:1.10.10.2600,IPR036162,PF13408,IPR025827, PS51737,G3DSA:3.40.50.1390,IPR006119,IPR038109,PF07508, IPR011109,SSF53041,PTHR30461,Coil,PS51736, cd00338,PF00239
MSYFIYARKSRKDAELEALGIDVLERHITTLLELAKTLSLPIGAIYREVVSGDSIDARPVMTQVLSEVEACMWDGALVMDVDRLARGDTIDQGRVQRAFFYSNTRIVTPNKTYDPANEYDNEYFEFSLFMSRREYATIKRRMQRGRERSSSDGYYVGNVAPYGWERVIAPDGKHYSLAPHQTEAPVLDLMYDLCGNKQYGYQKACTYMSNMGILARSGKPFTPSTLKGIISNPANIGKVRWGHRKTVRAVKDGRVVKSRPKATDYILSDAAWAPRISPDLFKRANQPKGCFSAPVRNDRPIQNLFAGLVRCSQCDRLMVRKKAQTKTPYDMLICQYTECSTVGIRIDELEEALLGWLKDYIAKYEFADTHEEDTAAIAAKELIVTNFETEHQTLLKQRESLFDFLEQGIYTKEIFIERSNALEQRIRDCMNNITAAREDLHTTIARQANRKNFVPKCKNLLSEWDSLTVSEKNSALRQLIDRIVLTKTKRNKKNQKNSEFTIDVYPKVPK

SEQ ID NO: 5157 - protein, 510 aa, Unknown
  Description of Unknown: Integrase B5158 sequence
  SM00857,G3DSA:1.10.10.2600,IPR036162,PF13408,PS51737, IPR025827,G3DSA:3.40.50.1390,IPR006119,IPR038109,PF07508, IPR011109,SSF53041,PTHR30461,Coil,PS51736, cd00338,PF00239
MSYFIYARKSRKDADLEALGIDVLERHITTLLELAKTLLLPIGAIYREVVSGDSIDSRPVMSQVMAEVESCMWDGCLVMDVDRLARGDTIDQGRVQRAFFYSNTKIVTPNKTYDPANEYDNEYFEFSLFMSRREYATIKRRMQRGRERSSSDGYYVGNIPPYGWRRVIAPDGKHFSLAPDPTESPVLDLMYDLCGNKQYGYQKACTHMAEMGILSRSGRPFTPSTLKGIISNPANIGKVRWGHRKTVRTVKDGKISRSRPHSSDYILADAVWPPRISADLFQRANQPKGSCSAPVRDDRPIQNIFAGLVRCSQCGRLMVRKKAHTKTPYDILICQYTECPTVGIRIDELELALLEWLRNYIDKYELTDALPEDVENVAAKEAIVKNFEKEHETLLKQRESLFDFLEQGIYTKEIFIERSNALERRVKECMEHIISAQNDLHATLALQANRKNFVPRCKNLLGEWGRLTIPEKNSALKVLIEKIMFTKTKRNKKEQDRSDFEIDVFPKVPK

SEQ ID NO: 5158 - protein, 510 aa, Unknown
  Description of Unknown: Integrase B5159 sequence
  PTHR30461:SF3,IPR036162,PS51737,IPR011109,PTHR30461, PS00397,PF00239,G3DSA:1.10.10.2600,IPR006119,SSF53041, cd00338,SM00857,IPR025827,IPR038109,PS51736, IPR006118,PF13408,G3DSA:3.40.50.1390,PF07508,Coil
MQVVLFLYPKIAYIDRKDDNNMAKDIINMRNACAYIRVSTDKQEELSPDAQKRLLIDFAKKNNMSLLESDIFLDNGISGKKADKRPEFMKMIGLAKSKEHPFDVILVWKFSRFARNQEESIVYKSLLKKNKVEVVSISEPLVDGPFGTLIERIIEWMDEYYSIRLSGEVLRGMTEKALRGGYQSTLPLGYRMNKETGIPYIYDTEAVIVKKIYKEYIAGHSYLEIARQLNTIGYKTKKGATYEGRTVEYILSNPFYYGAIRWNRQKHDDHTIKPVNEWIIATGKHEALIDKATWDEVQHLIALRSKPYKARAAGHMRHWLGGIVKCSSCGASLMSTNHGSSYQCGNYNKGKCSHSHYIKTVELEQSLFAAFGQILDGSMELHYELKKRVYEDNTNDKNMITKQLDKLTDKELRIKEAYQAGIDTIDEYKENKQLIIAEREALQQQLTTLTEQSNATTNAAMLKNISSVLGIIKDDSKDTLTRANAIRSVVDHCVYDKVNDNLEIYFFLQR

SEQ ID NO: 5159 - protein, 510 aa, Unknown
  Description of Unknown: Integrase B5160 sequence
  SM00857,G3DSA:1.10.10.2600,IPR036162,PF13408,IPR025827, PS51737,G3DSA:3.40.50.1390,IPR006119,IPR038109,PF07508, IPR011109,SSF53041,PTHR30461,Coil,PS51736, cd00338,PF00239
MSYFIYARKSRKDAELEALGIDVLERHITTLLELAKTLSLPIGAIYREVVSGDSIDARPVMTQVLSEVEACMWDGALVMDVDRLARGDTIDQGRVQRAFFYSGTRIVTPNKTYDPANEYDNEYFEFSLFMSRREYATIKRRMQRGRERSSSDGYYVGNVAPYGWERIIAPDGKHYSLTPSQTEAPVLDLMYDLCGNKQYGYQKACTYMSNMGILARSGKPFSPSTLKGIISNPANIGKVRWGYRKTVRAVKDGRVVKSRPNATDYILADAAWEPRISADLFKRANQPKGCFSSPVRNDRPIQNLFAGLVRCSQCGRLMVRKKAQTKTPYDVLICQYTECSTVGIRIDELEEALLGWLKDYIAKYEFSDTHEEDTAAIAAKELIVTNFETEHQTLLKQRESLFDFLEQGIYTKEIFIERSNALEQRIRDCMNNITAAQEDLHTTIARQANRKNFVPKCKNLLSEWNSLTIPEKNSSLRKLIDRIVLTKTKRNKKNQKNSEFMIDVYPKVPK

SEQ ID NO: 5160 - protein, 510 aa, Unknown
  Description of Unknown: Integrase B5161 sequence
  SM00857,G3DSA:1.10.10.2600,IPR036162,PF13408,PS51737, G3DSA:3.40.50.1390,IPR025827,IPR006119,IPR038109,PF07508, IPR011109,SSF53041,PTHR30461,Coil,PS51736, cd00338,PF00239
MSYFIYARKSRKDADLEALGIDVLERHITTLLELAKALSLPIGAIYREVVSGDSIDSRPVMSQVMAEVESCMWDGCLVMDVDRLARGDTIDQGRVQRAFFYSNTKIVTPNKTYDPANEYDNEYFEFSLFMSRREYATIKRRMQRGRERSSSDGYYVGNIPPYGWRRVIAPDGKHFSLAPDPVEAPVLDLMYDLCGNKQYGYQKVCTHMAEMGILSRSGRPFTPSTLKGIISNPANIGKVRWGHRKTVRTVKDGKISRSRPHSSDYILADAVWPPRISADLFQRANQPKGSCSAPVRDDRPIQNIFAGLVRCSQCGRLMVRKKAHTKTPYDILICQYTECPTVGIRIDELELALLEWLRNYVDKYELTDALPEDAENVAAKEAIVKNFEKEHETLLKQRESLFDFLEQGIYTKEIFIERSNALEQRVKECMEHIISAQNDLHATLALQANRKNFVPRCKNLLGEWGKLTIPEKNSALKVLIEKIMFTKTKRNKKGQDRSDFEIDVFPKVPK

SEQ ID NO: 5161 - protein, 510 aa, Unknown
  Description of Unknown: Integrase B5162 sequence
  PTHR30461:SF3,cd00338,SM00857,G3DSA:1.10.10.2600,IPR036162, PF13408,IPR025827,G3DSA:3.40.50.1390,PS51737,IPR006119, IPR038109,PF07508,SSF53041,IPR011109,PTHR30461, PS51736,Coil,PF00239
MSSVDKIAVVYARYSSHGQTEQSIEGQIAAAQKYAEQHGYTIIHIYADRAMTGRNDDREEFQRMLSDTATHQFGVILLWKIDRFGRNREEIAFNRYRCKKNGVRVERVAEDVPDGPEGVILDSVLEGMAEYYSLQLAQNVRRGQRESAKKSQTVGGCKIIGYNVNPDTKRYEVDPKTAPFVTEVFKRYANGETISEIVAWLNAQGVRTTRGGEFTVNSLHRLLKNEKYTGVYIFHDIRNEGGMPALIDHATFDKVQEMLKVNRRAPARVWSKTEYLLTDKLFCGHCGAMMVGESGHGRNGTKHNYYTCWNRKKKKSCDKKPVRQDVIESLVLRSIGKLLENPATLENIADQVWAAYERSDTSGDTIKALDKQIADVNKALSNVMKAIEMGIINEMTKTRMDELTDQKQALSAARAEAGLAGGFKLTRDMILFFLQEIAALDMADRDSQKRLIKTFVNAIYLYDDHFDIAFNYTDNGKVVVRMQEINDAACGEVFGRCAQSPAKSRLSRLR

SEQ ID NO: 5162 - protein, 510 aa, Unknown
  Description of Unknown: Integrase B5163 sequence
  SM00857,G3DSA:1.10.10.2600,IPR036162,PF13408,PS51737, IPR025827,G3DSA:3.40.50.1390,IPR006119,IPR038109,PF07508, IPR011109,SSF53041,PTHR30461,Coil,PS51736, cd00338,PF00239
MSYFIYARKSRKDADLEALGIDVLERHITTLLELAKTLLLPIGAIYREVVSGDSIDSRPVMSQVMAEVESCMWDGCLVMDVDRLARGDTIDQGRVQRAFFYSNTKIVTPNKTYDPANEYDNEYFEFSLFMSRREYATIKRRMQRGRERSSSDGYYVGNIPPYGWRRVIAPDGKHFSLAPDPTESPVLDLMYDLCGNKQYGYQKACTHMAEMGILSRSGRPFTPSTLKGIISNPANIGKVRWGHRKTVRTVKDGKISRSRPHSSDYILADAVWPPRISADLFQRANQPKGSCSAPVRDDRPIQNIFAGLVRCSQCGRLMVRKKAHTKTPYDILICQYTECPTVGIRIDELELALLEWLRNYIDKYELTDALPEDVENVAAKEAIVKNFEKEHETLLKQRESLFDFLEQGIYTKEIFIERSNALERRVKECMEHIISAQNDLHATLALQANRKNFVPRCKNLLGEWGRLTIPEKNSALKVLIEKIMFTKTKRNKKGQDRSDFEIDVFPKVPK

SEQ ID NO: 5163 - protein, 510 aa, Unknown
  Description of Unknown: Integrase B5164 sequence
  PTHR30461:SF3,SM00857,G3DSA:1.10.10.2600,IPR036162,PF13408, IPR025827,PS51737,G3DSA:3.40.50.1390,IPR006119,IPR038109, PF07508,IPR011109,SSF53041,PTHR30461,PS51736, cd00338,PF00239
MIPAVGYCRFSSENQADGFSIEAQKNAINEFASRMGFEILRFYVDEAKSGTTTEGRTAFLDMLSDSKNHEFQVVIVHKLDRFARSRIDSAVSKKVLKDNGVRLISVLEQLDDSPESIILESVLEGMNEYYSKNLSRETKKGMKVAGAKGRILGTIPYGYIADKDNKFQIVNKEAENVRFIYDCFNKGMTFKALREELKKNNIQTRAGNWFNDSNLRQMLTNPTYMGDYHFGTAVYSGVVPPIVSRDLFDSVQVIIQKHKRVVPKDKGTAYLLTGLIFHSCGEAMVGYKSIKKGKAYYYYRCRKKEPKGYVYKQAIEDAVLAAVQNFFNDEKVITAYTKECNKALKNIKKSSDIASLRKRDSELKDQSSKLLDLYLTSVINQQLYLEKKERIDIESRLVESQIATCVQAFDLSPDIIRCAFADYADKIKNSLDNPKDTQAVLSTLIKSIKLYEDRFEITFKFGDRQVAYNFSNAPALAQLVATYSFNEKLAKNVAFLSISLISPNLSSQSA

SEQ ID NO: 5164 - protein, 510 aa, Unknown
  Description of Unknown: Integrase B5165 sequence
  PTHR30461:SF3,SM00857,G3DSA:1.10.10.2600,IPR036162,PS51737, G3DSA:3.40.50.1390,IPR006119,IPR038109,PF07508,IPR011109, SSF53041,PTHR30461,Coil,PS51736,cd00338, PF00239
MDTDIFAIYLRKSRKDLENKDYDVLKRHRKILLDFASSKNIVIHEKDIYEEVVSGETIQDRPVIQSLLKKIEVGYYKAVLVMEIERLARGNTIDQGIIAQAFQLTNTLIITPQKTYDTRNEFDNEFLEFGLFMSRREYKAISRRIQTGRIQSCKEGNYVGSVTPYGYDKEKLKGEKGYKLTPNDEAENVKLIFDLFLDGLGTSTLAFKLNDLNIKSRTGKPWTPAMVRNILTNKIYIGILTWGKRANVKKLDNNLISKTRPVNHNCIESKGKHDPIIDELTFYKAQTLLKSNSSKKVPKDKALKNPLAGIIICKKCGTNMIRRPLKNIPDTILCKNHYCDNISSYLYLIEKRLLDSLHTTLLEYYYYLDNYEKEDLKSKKNYDIQIKKIDKDINTLKKQHVRTCELLELGVYSLELFKERSTSINEQVDALIKQKDELIRLNKDNKTEKIIQAIPKIENCLNTYHTLSIEDKNKLLKSIIKKAYYLKDATGGRWNKEAQDNFSIELELNL

SEQ ID NO: 5165 - protein, 510 aa, Unknown
  Description of Unknown: Integrase B5166 sequence
  PTHR30461:SF3,cd00338,SM00857,G3DSA:1.10.10.2600,IPR036162, PF13408,PS51737,G3DSA:3.40.50.1390,IPR025827,IPR006119, IPR038109,PF07508,IPR011109,SSF53041,PTHR30461, PS51736,Coil,PF00239
MPKAVIYARFSSHNQREESIEQQVAECQAFAKANDLTVVDVYADAAVSGRSDRRPQFQRLRRDAAKKAFEVVIAYKSSRIARNMLNALTFEVEMNKSGVTVLYAKEEFGNTAAGRFALRTMMSVNQFYSENLGEDIKRTQADNARQCKANGPAPYGYRSGVDGRFEIDETAAAIVREIYTRTAAGESNVSIMRDLNARHLKTRLGHEWGKNSFQGILGNERYLGIYIFDGVRVPSGMPRIIDDKLFKEAMIAMSAKKKKNPEADYQLTGKLYCGECGEMMIGMSGTGKSGTVYNYYACSGRRTGSGCKKASVGRDQTEIAVASALLAKIMDDAVVDQIADEIIDFQQKHKNNPEIKALEAAKADNKKAIDNIMNAIEAGIFTDTTKDRLLALEAESKEITERLEELTASQLNVSRDQVVGYLKSYRGGEVRDRKYRMKLFQTFLVRAYVYDDRLKIVFDPIGEQTGEVNMTLDEVDGESGDGVRLMEDKGHHISATRTLYLVYSVPFTAK

SEQ ID NO: 5166 - protein, 510 aa, Unknown
  Description of Unknown: Integrase B5167 sequence
  PTHR30461:SF3,SM00857,G3DSA:1.10.10.2600,IPR036162,PF13408, IPR025827,G3DSA:3.40.50.1390,PS51737,IPR006119,IPR038109, PF07508,IPR011109,SSF53041,PF00239,PTHR30461, PS51736,Coil,cd00338
MSSVDKIAVVYARYSSHGQTEQSIEGQIAAAQKYAEQHGYTIIHVYADRAMTGRNDDREQFQKMLSDTATHQFGVILLWKIDRFGRNREEIAFNRYRCKKNGVRVERVAEDVPDGPEGVILDSVLEGMAEYYSLQLAQNVRRGQRESAKKSQTVGGCKIIGYNVNPDTKRYEVDPKTAPFVTEVFKRYANGETISEIVTWLNAHGVRTTRGGEFTVNSLHRLLKNEKYTGVYIFHDIRNEGGMPALIDRATFDKAQEMLKVNRRAPARVWSKTEYLLTDKLFCGHCGSMMVGESGHGRNGTKHNYYTCWNRKKKKTCDKKPIRQDVIEPLVLRAIGKLLENPATLENIADQVWAAYERSDTSGDTIKALDKQIADVDRALSNVMKAIEMGIINEMTKARMDELTDQKQALSAARAEAGLAGGFKLTRDMILFFLQDMAALDRSNRDSQKRLIKTFVNAIYLYDDHFNIAFNYTDNGKMTVRMQEIDDAASGDVFGRCAQSPAKSRLSRLR

SEQ ID NO: 5167 - protein, 510 aa, Unknown
  Description of Unknown: Integrase B5168 sequence
  SM00857,G3DSA:1.10.10.2600,IPR036162,PF13408,IPR025827, G3DSA:3.40.50.1390,PS51737,IPR006119,IPR038109,PF07508, SSF53041,IPR011109,PTHR30461,Coil,PS51736, cd00338,PF00239
MPTDYALYLRKSRADLEAEAHGEGDTLARHEHILMELAKSRALPIGAIYREIVSGERIANRPVMQQLLSEVEDGRWKGVLVTETSRLARGDTIDQGIVAQAFKFSGTLIVTPSKTYDPTQEADEEWMEFGLFMSRQEYRMIRRRMTAGTRTAKKEGRYLASRAPYGYERCKLPGRGWSIRPIEPEAGVVRKIYEQFLSGKGAGEIAAYLNLLGIPSPTERAWVRQTVGLILRNPHYAGYIPSAVHPHKKLLKDGQLTVKRPLNKQCELYEGIHEAIIPRETWEETQRLLVQNHKPRVPSALQQHNPLAGLLCCDKCGKKMQRHPQTDRNFEKYYCPTVGCPTVSAPLEQVEDLVLQGLKDFLYNLDLQEQQLPDMSAEQEALKNIDSRLAEQRKRLTKTFELVEDGIYTREAFLQRQSEINAEMARLQTAREELQRKIDTHAAELSARENAAPQIRHVLDVYDRKSAPAERNALLKQVIDRIDYHKTTKQRWSAENDLSVTIHPKISARK

SEQ ID NO: 5168 - protein, 510 aa, Unknown
  Description of Unknown: Integrase B5169 sequence
  SM00857,G3DSA:1.10.10.2600,IPR036162,PF13408,IPR025827, PS51737,G3DSA:3.40.50.1390,IPR006119,IPR038109,PF07508, SSF53041,IPR011109,PTHR30461,Coil,PS51736, cd00338,PF00239
MSYFIYARKSRKDAELEALGIDVLERHITTLLELAKTLSLPIGAIYREVVSGDSIDARPVMMQVLSEVEACMWDGALVMDVDRLARGDTIDQGRVQRAFFYSGTRIVTPNKTYDPANEYDNEYFEFSLFMSRREYATIKRRMQRGRERSSSDGYYVGNVAPYGWERVIAPDGKHYSLAPHQTEAPVLDLMYDLCGNKQYGYQKACTYMSNMGILARSGKPFAPSTLKGIISNPANIGKVRWGYRKTVRAVKDGRVVKSRPNATDYILADAAWAPRINIDLFERANQPKGCFSAPIRSDRPIQNLFAGLVRCSQCGRLMVRKKAQTKTPYDFLICQYAECSTVGIRIDELEEALLGWLKDYIAKYEFSDTHEEDTAAIAAKELIVTNFETEHQTLLKQRESLFDFLEQGIYTKEIFIERSNALEQRIRDCMNNITAAREDLYVTIARQANRKNFVPKCKNLLSEWGSLTVPEKNSALKQLIDRIVLTKTKRNKKNQKNSEFTIDVYPKVPK

SEQ ID NO: 5169 - protein, 510 aa, Unknown
  Description of Unknown: Integrase B5170 sequence
  SM00857,G3DSA:1.10.10.2600,IPR036162,PF13408,PS51737, G3DSA:3.40.50.1390,IPR025827,IPR006119,IPR038109,PF07508, SSF53041,IPR011109,PTHR30461,Coil,PS51736, cd00338,PF00239
MSYFIYARKSRKDADLEALGIDVLERHITTLLELAKTLSLPIGAIYREVVSGDSIDSRPVMSQVMAEVESCMWDGCLVMDVDRLARGDTIDQGRVQRAFFYSNTKIVTPNKTYDPANEYDNEYFEFSLFMSRREYATIKRRMQRGRERSSSDGYYVGNIPPYGWRRVIAPDGKHFSLAPDPTESPVLDLMYDLCGNKQYGYQKACTHMAEMGILSRSGRPFTPSTLKGIISNPANIGKVRWGHRKTVRTVKDGKISRSRPHSSDYILADAVWPPRISADLFQRANQPKGSCSTPVRDDRPIQNIFAGLVRCSQCGRLMVRKKAHTKTPYDILICQYTECPTVGIRIDELELALLEWLRNYIDKYELTDALPEDVENVAAKEAIVKNFEKEHETLLKQRESLFDFLEQGIYTKEIFIERSNALERRVKECMEHIISAQNDLHATLALQANRKNFVPRCKNLLGEWGRLTIPEKNSALKVLIEKIMFTKTKRNKKGQDRSDFEIDVFPKVPK

SEQ ID NO: 5170 - protein, 510 aa, Unknown
  Description of Unknown: Integrase B5171 sequence
  PTHR30461:SF3,cd00338,SM00857,G3DSA:1.10.10.2600,IPR036162, PF13408,IPR025827,G3DSA:3.40.50.1390,PS51737,IPR006119, IPR038109,PF07508,IPR011109,SSF53041,PTHR30461, PS51736,Coil,PF00239
MQKRRTKYANSQGDNAVIYARYSSHNQKDTSIEQQIEVCTKYARDNGYRITNIYADRAISGKTDARPQFRLMMQDAREHKFDVVISWKSSRLGRDMLDAMTNDIILRNLGIKCFYTEENFDDTAAGRFALRNMMNVNQFYIENMAEDILRGMRDNAKKCRVNNGSPPLGYRRGADGKYEIVPDEAETVREIFTKVLAGMAFVDIANELNARGIKTKKGAPWGRSSFSRLLSNERYIGTYKWSDIVIENGMPAIIDREVFEMAQKKIKGERPLRRRHNENGDYLLTGKLFCGKCDSPMTGMSGTSKSGAKHHYYACYSARKDGSCDKKAVKRDWVEKTVALFIKEHVLRDEVIEWMVDQYMVYQKATFESQRIMEMRNQLKDVQSQLDNLVDAIARGIYTDSTKDKLLKLEADKKEIEQDIRLATYNLKEYDREHVRCYFLSFKEGSVESKDYLKRLFDQFVTKIYLYDDEIRIAFSGTKDDSPVSFKIIDEAEELAVSSVRLSSASSHQA

SEQ ID NO: 5171 - protein, 510 aa, Unknown
  Description of Unknown: Integrase B5172 sequence
  SM00857,G3DSA:1.10.10.2600,IPR036162,PF13408,PS51737, G3DSA:3.40.50.1390,IPR025827,IPR006119,IPR038109,PF07508, IPR011109,SSF53041,PTHR30461,Coil,PS51736, cd00338,PF00239
MSYFIYARKSRKDAELEALGIDVLERHITTLLELAKALSLPIGAIYREVVSGDSIDARPVMTQVLSEVEACMWDGALVMDVDRLARGDTIDQGRVQRAFFYSNTRIVTPNKTYDPANEYDNEYFEFSLFMSRREYATIKRRMQRGRERSSSDGYYVGNVAPYGWERVIAPDGKHYSLAPHQTEAPVLDLMYDLCGNKQYGYQKACTYMTNMGILARSGKPFTPSTLKGIISNPANIGKVRWGHRKTVRAVKDGRVVKSRPKATDYILSDAAWAPRISADLFKRANQPKGCFSAPVRSDRPIQNLFAGLVRCSQCGRLMVRKKAQTKTPYDMLICQYAECSTVGIRIDELEEALLGWLKDYIAKYEFADTHEEDTAAIAAKELIVTNFETEHQTLLKQRESLFDFLEQGIYTKEIFIERSNALEQRIRDCMNNITAAREDLHTTIARQANRKNFVPKCKNLLSEWDSLTVSEKNSALRQLIDRIVLTKTKRNKKNQKNSEFTIDVYPKVPK

SEQ ID NO: 5172 - protein, 510 aa, Unknown
  Description of Unknown: Integrase B5173 sequence
  SM00857,G3DSA:1.10.10.2600,IPR036162,PS51737,G3DSA:3.40.50.1390, IPR006119,IPR038109,PF07508,IPR011109,SSF53041, PTHR30461,Coil,PS51736,cd00338,PF00239
MNITDEYAIYLRKSRADLEAEALGEMETLARHEKILTELAKRQGLNVVKIYKEIVSGESIADRPQMKQLLEDVYLKKYKGVLVVEVERLARGDTRDQGTVAEAFKYSNTLIITPIKTYDPNNEYDEEYFEFGLFMSRREYKTITRRMQRGILQSVKEGNYVGSLPPYGYDIYRINKKERTLKPNEQSQYVVMMFEWFVNDRMSSGEIAKKLTTMGIPTRTGKKEWNRATVKDILKNNLYTGKIRWNRRKVGKELIEGTLKKTKRRRLSEEYLIVEGKHPALISQEMFDKAQTLFVGQVPVKANMTVVNPLARLMVCKHCGKKIGYNRNLNRPTTKPRYVHGESMSCKVKSSYYDDVIDALVQGLKMYVDDFEFKMNDEGQKHERQRHRQIIENMEKELKKLNVQRSKLFDYLEDGTYTKEEFTERKGILVEKIDSLSKALEDEKQNVPQEIDYTDKIIKFSEVIDSLKDENIDAEHKNVLLKEIVERIEYDCIDLGRNKGGKPILDIFLK

SEQ ID NO: 5173 - protein, 510 aa, Unknown
  Description of Unknown: Integrase B5174 sequence
  SM00857,G3DSA:1.10.10.2600,IPR036162,PS51737, G3DSA:3.40.50.1390,IPR006119,IPR038109,PF07508, IPR011109,SSF53041,PTHR30461,Coil, PS51736,cd00338,PF00239
MDTDIFAIYLRKSRKDLENKDYDVLKRHRKILLDFAKSKNIVIHEEDIYEEVVSGETIQDRPVIQNLLKKIEVGYYKAVLVMEIERLARGNTIDQGIIAQAFQLTNTLIITPQKTYDTRNEFDNEFLEFGLFMSRREYKAISRRIQTGRIQSCKEGNYVGSVTPYGYGKEKLKGEKGYKLTPNDEAENVKLIFDLFLDGLGTSTLAFKLNDLNIKSRTGKPWTPAMVRNILTNKVYIGILTWGKRANVKKLDNNLISKTRPVNHNCIESKGKHDPIIDELTFYKAQTLLKSNSSKKVPKDKALKNPLAGIIVCKKCGTNMIRRPLKNIPDTILCKNHYCDNISSYLYLIEKRLLDSLHTTLLEYYYYLDNYEKEDLKSKKNYDIQIKKIDKDINTLKKQHVRTCELLELGVYSLELFKERSTSINEQVDALIKQKDELIRLNKDNKTEKIIQAIPKIENCLNTYHTLSIEDKNKLLKSIIKKAYYLKNATGGRWNKEAQDNFSIELELNL

SEQ ID NO: 5174 - protein, 510 aa, Unknown
  Description of Unknown: Integrase B5175 sequence
  PTHR30461:SF3,cd00338,SM00857,G3DSA:1.10.10.2600,IPR036162, PS51737,G3DSA:3.40.50.1390,IPR006119,IPR038109,PF07508, IPR011109,SSF53041,PTHR30461,PS51736,Coil, PF00239
MGGRAAIYARFSSHNQRGESIEIQVEKSRAYCAENDLRVVATYCDFAQTGTNTDRAEFQRMMADAKRGLFDFVVIYKVTRIMRNRDEMAMARIMLRRCRVEILYAGEDISDGSAGVLQLGMLEVLAEYESALDGERIRDGIQKNAERCMANGCVRYGWDIVDGRYVVNEEEAAAIRLGVRMVLSGKSVADVVRAWEPYRTKRGGKWRFQTVRRILMRRENGGEYRYAGVVVPGGMPAIVPMDDEERVIRMLEDSHRPRAKTEAWDFPLTGKLYDGRDGGLMTGTSGTGKSGRPYHYYRCRSCGRTVRRDVVEKRVADAVREALGSADSRERIARMLADAEEERADEKPLSETIKGELAKIETAFSNIWAAIESGIAPPGGKERIDALKQRQALLKDELRTAEALEAARLDYDRALFWLEGMAAAEVDDAQLLRTFVARVVLGGPDDDDGLRVVFTFDDSAGLGDNPSLPGAIGPGGEVFDRMNASSTIGLLGEPFSGFAFFCLGWKSSPQ

SEQ ID NO: 5175 - protein, 510 aa, Unknown
  Description of Unknown: Integrase B5176 sequence
  PTHR30461:SF3,cd00338,SM00857,G3DSA:1.10.10.2600,IPR036162, PF13408,IPR025827,PS51737,G3DSA:3.40.50.1390,IPR006119, IPR038109,PF07508,IPR011109,SSF53041,PTHR30461, PS51736,Coil,PF00239
MSSVDKIAVVYARYSSHGQTEQSIEGQIAAAQKYAEQHGYTIIHVYADRAMTGRNDDREEFQRMLSDTATHQFGVILLWKIDRFGRNREEIAFNRYRCKKNGVRVERVAEDVPDGPEGVILDSVLEGMAEYYSLQLAQNVRRGQRESAKKSQTVGGCKIIGYNVDPDTKRYEVDPKTAPFVTEVFKRYANGETISEIVAWLNAQGVRTTRGGEFTVNSLHRLLKNEKYTGVYIFHDIRNEGGMPALIDRATFDKAQEMLKVNRRTPARVWSKTEYLLTDKLFCGHCGAMMVGESGHGRNGTKHNYYTCWNRKKKKLCDKKPVRQDVIEPLVLRSIGKLLENPATLENIADQVWAAYERSDTSGDTIKALDKQIADVDRALSNVMKAIEMGIINEMTKARMDELTDQKQALSAARAEAGLAGGFKLTRDMILFFLQEIAALDMADRDSQKRLIKTFVNAIYLYDDHFDIAFNYTDKGKVVVQMQEINDAACGEVFGRCAQSPAKSRLSRLR

SEQ ID NO: 5176 - protein, 510 aa, Unknown
  Description of Unknown: Integrase B5177 sequence
  PTHR30461:SF3,SM00857,G3DSA:1.10.10.2600,IPR036162,PF13408, IPR025827,G3DSA:3.40.50.1390,PS51737,IPR006119,IPR038109, PF07508,SSF53041,IPR011109,PF00239,PTHR30461, PS51736,Coil,cd00338
MSSVDKIAVVYARYSSHGQTEQSIEGQIAAAQKYAEQHGYTIIHIYADRAMTGRNDDREEFQRMLSDTATHQFGVILLWKIDRFGRNREEIAFNRYRCKKNGVRVERVAEDVPDGPEGVILDSVLEGMAEYYSLQLAQNVRRGQRESAKKSQTVGGCKIIGYNVNPDTKRYEVDPKTAPFVTEVFKRYANGETISEIVAWLNAQGVRTTRGGEFTVNSLHRLLKNEKYTGVYIFHDIRNEGGMPALIDHATFDKVQEMLKVNRRAPARVWSKTEYLLTDKLFCGHCGAMMVGESGHGRNGTKHNYYTCWNRKKKKSCDKKPVRQDVIESLVLRSIGKLLENPATLENIADQVWAAYERSDTSGDTIKALDKQIADVDRALSNVMKAIEMGIINEMTKARMDELTDQKQALSAARAEAGLAGGFKLTRDMILFFLQEIAALDMADRDSQKRLIKTFVNAIYLYDDHFDIAFNYTDNGKVVVRMQEINDAACGEVFGRCAQSPAKSRLSRLR

SEQ ID NO: 5177 - protein, 510 aa, Unknown
  Description of Unknown: Integrase B5178 sequence
  PTHR30461:SF3,cd00338,SM00857,G3DSA:1.10.10.2600,IPR036162, PF13408,IPR025827,G3DSA:3.40.50.1390,PS51737,IPR006119, IPR038109,PF07508,IPR011109,SSF53041,PTHR30461, PS51736,Coil,PF00239
MQKRRTKYASSQGDNAVIYARYSSHNQKDTSIEQQIEVCTKYARDNGYRITNIYADRAISGKTDARPQFRLMMQDAREHKFDVVISWKSSRLGRDMLDAMTNDIILRNLGIKCFYTEENFDDTAAGRFALRNMMNVNQFYIENMAEDILRGMRDNAKKCRVNNGSPPLGYRRGADGKYEIVPDEAETVREIFTKVLAGMAFVDIANELNARGIKTKKGAPWGRSSFSRLLSNERYIGTYKWSDIVIENGMPAIIDREVFEMAQKKIKGERPLRRRHNENGDYLLTGKLFCGKCDSPMTGMSGTSKSGAKHHYYACYSARKDGSCDKKAVKRDWVEKTVALFIKEHVLRDEVIEWMVDQYMVYQKATFESQRIMEMRNQLKDVQSQLDNLVDAIARGMYTDSTKDKLLKLEADKKEIEQDIRLATYNLKEYDREHVRCYFLSFKEGSVESKDYLKRLFDQFVTKIYLYDDEIRIAFSGTKDDSPVSFKIIDEAEELAVSSVRLSSASSHHT

SEQ ID NO: 5178 - protein, 510 aa, Unknown
  Description of Unknown: Integrase B5179 sequence
  PTHR30461:SF3,SM00857,G3DSA:1.10.10.2600,IPR036162,PF13408, PS51737,G3DSA:3.40.50.1390,IPR025827,IPR006119,IPR038109, PF07508,SSF53041,IPR011109,PF00239,PTHR30461, PS51736,Coil,cd00338
MSSVDKIAVVYARYSSHGQTEQSIEGQIAAAQKYAEQHGYTIIHIYADRAMTGRNDDREEFQRMLSDTATHQFGVILLWKIDRFGRNREEIAFNRYRCKKNGVRVERVAEDVPDGPEGVILDSVLEGMAEYYSLQLAQNVRRGQRESAKKSQTVGGCKIIGYNVNPDTKRYEVDPQTAPFVTEVFKRYANGETISEIVTWLNAHGVRTTRGGEFTVNSLHRLLKNEKYTGVYIFHDIRNEGGMPALIDRATFDKAQEMLKVNRRAPARVWSKTEYLLTDKLFCGHCGSMMVGESGHGRNGTKHNYYTCWNRKKKKLCDKKPVRQDVIEPLVLKSIGKLLENPATLESIADQVWAAYERSDTSGDTIKALDKQIADVNKALSNVMKAIEMGIINEMTKTRMDELTDQKQALSAARAEAGLAGGFKLTRDMILFFLQEIAALDMADRDSQKRLIKTFVNAIYLYDDHFDIAFNYTDNGKVVVRMQEINDAACGEVFGRCAQSPAKSRLSRLR

SEQ ID NO: 5179 - protein, 510 aa, Unknown
  Description of Unknown: Integrase B5180 sequence
  PTHR30461:SF3,IPR036162,PS51737,IPR011109,PTHR30461, PS00397,PF00239,G3DSA:1.10.10.2600,IPR006119,SSF53041, SM00857,IPR025827,IPR038109,PS51736,cd03768, IPR006118,PF13408,G3DSA:3.40.50.1390,PF07508,Coil
MRDMDSARLRVACYVRVSTREQAEKGYSVSEQQERLKAYCLAKDWVVAQVITDPGFSGAKLERPGMQQLISLVQTKKCDAVLVWKLDRLSRSQKDTLYLIEDVFLKNGCAFVSMNENFDTSTAFGRAMIGILSVFAQLEREQIRERMAVGRVGRAKAGLFHGGGFAPIGYDYKTIAEGGAGLVVNEYEAIQVREVFSLYLQGWPVNRIRKYMAAHYTTKDGDWGSDTTVRDVLKNPLYTGKISWAKKVYDGQHEPLISQETFDAAAARLATSSWKRTCSDGMERNSPFKSTHLLGGIIWCARCGARYFASGNYSGRGENKRYWPYYVCYSRAKSAKHMIRDPNCRNDRWAVAKLDAIIEGEIRKLAFDPAALELAVSGPQQDEDVAQRRAALQQRLNDLRAQMGRVLDLYQMGGSLPASMVGDRVAKLQAEIDGVEAALAEAVEEPPTQRLDAARAALVGAEDVLDNGTLDERRELVHSLIRRIDLDGENIDIHWSFVPEAAEVIPGRSA

SEQ ID NO: 5180 - protein, 510 aa, Unknown
  Description of Unknown: Integrase B5181 sequence
  PTHR30461:SF3,SM00857,G3DSA:1.10.10.2600,IPR036162,PS51737, G3DSA:3.40.50.1390,IPR006119,IPR038109,PF07508,IPR011109, SSF53041,PTHR30461,Coil,PS51736,cd00338, PF00239
MICAMYLRKSRADYEAEARGEGETLAKHRETLLAVAKARGLTVTDVFSELVSGDTIAERPEMQRLLRAVERGDYDAVLCMDVDRLGRGDGADQSAILKTLKYSDTIVITPYKDYNTRREMDEEFFEYSQFIARSEYKRIKRRMWAGRVASVKQGRWISPKAPFGYRRVRIDNGRAWTLTPEPSEAEAVRKVFAWYSSGACGKYVIANRLNSMGFRTQSGRPFEASAIGNMLGNPAYVGKIRWSRRRQHAEMQDGKEVFTRPLSDECIIVDGLHPAIVDPALFDAVQSRLTANRATHVTHNRKLVNPLCGLMFCSICGRAMVLVPEYKRQNVESTYKCSSPHCPTSRIDSKCVYDALFFALTQWSDYGDSSTARSHEEIAPHNQSLVSAASAQIAQLRAQLARLQDLLETGVYTPETYIERSKVISDRIATATVELEKLRKAEPVDERAAIIRLRSKIDNVLLSWDIASPEEQNRLLKGVIRRIEYSKTHKCYRNENPSKYLSITVYPILD

SEQ ID NO: 5181 - protein, 510 aa, Unknown
  Description of Unknown: Integrase B5182 sequence
  PTHR30461:SF3,SM00857,G3DSA:1.10.10.2600,IPR036162,PF13408, PS51737,G3DSA:3.40.50.1390,IPR025827,IPR006119,IPR038109, PF07508,SSF53041,IPR011109,PF00239,PTHR30461, PS51736,Coil,cd00338
MSSVDKIAVVYARYSSHGQTEQSIEGQIAAAQKYAEQHGYTIIHIYADRAMTGRNDDREEFQRMLSDTATHQFGVILLWKIDRFGRNREEIAFNRYRCKKNGVRVERVAEDVPDGPEGVILDSVLEGMAEYYSLQLAQNVRRGQRESAKKSQTVGGCKIIGYNVDPDTKRYEVDPKTAPFVTEVFKRYANGETISEIVAWLNAQGVRTTRGGEFTVNSLHRLLKNEKYTGVYIFHDIRNEGGMPALIDRATFDKAQEMLKVNRRAPARVWSKTEYLLTDKLFCGHCGTMMVGESGHGRNGTKHNYYTCWNRKKKKTCDKKPIRQDVIEPLVLRAIGKLLENPATLENIADQVWAAYERSDTSGDTIKALDKQIADVDRALSNVMKAIEMGIINEMTKARMDELTDQKQALSAARAEAGLAGGFKLTRDMILFFLQDMAALDRSNRDSQKRLIKTFVNAIYLYDDQFNIAFNYTDNGKMTVRMQEIDDAASGDVFGRCAQSPAKSRLSRLR

SEQ ID NO: 5182 - protein, 510 aa, Unknown
  Description of Unknown: Integrase B5183 sequence
  PTHR30461:SF3,SM00857,G3DSA:1.10.10.2600,IPR036162,PF13408, IPR025827,G3DSA:3.40.50.1390,PS51737,IPR006119,IPR038109, PF07508,IPR011109,SSF53041,PF00239,PTHR30461, PS51736,Coil,cd00338
MQKRRTKYANSQGDNAVIYARYSSHNQKDTSIEQQIEVCTKYARDNGYRITNIYADRAISGKTDARPQFRLMMQDAREHKFDVVISWKSSRLGRDMLDAMTNDIILRNLGIKCFYTEENFDDTAAGRFALRNMMNVNQFYIENMAEDILRGMRDNAKKCRVNNGSPPLGYRRGADGKYEIVPEEAETVREIFTKVLAGMAFVDIANELNARGIKTKKGAPWGRSSFSRLLSNERYIGTYKWSDIVIENGMPAIIDREVFEMAQKKIKGERPLRRRHNENGDYLLTGKLFCGKCDSPMTGMSGTSKSGAKHHYYACYSARKDGSCDKKAVKRDWVEKTVALFIKEHVLRDEVIEWMVDQYMVYQKATFESQRIMEMRNQLKDVQSQLDNLVDAIARGIYTDSTKDKLLKLEADKKEIEQDIRLATYNLKEYDREHVRCYFLSFKEGSVESKDYLKRLFDQFVTKIYLYDDEIRIAFSGTKDDSPVSFKIIDEAEELAVSSVRLSSASSHQA

SEQ ID NO: 5183 - protein, 510 aa, Unknown
  Description of Unknown: Integrase B5184 sequence
  PTHR30461:SF3,cd00338,SM00857,G3DSA:1.10.10.2600,IPR036162, PF13408,PS51737,G3DSA:3.40.50.1390,IPR025827,IPR006119, IPR038109,PF07508,SSF53041,IPR011109,PTHR30461, PS51736,Coil,PF00239
MSSVDKIAVVYARYSSHGQTEQSIEGQIAAAQKYAEQHGYTIIHIYADRAMTGRNDDREEFQRMLSDTATHQFGVILLWKIDRFGRNREEIAFNRYRCKKNGVRVERVAEDVPDGPEGVILDSVLEGMAEYYSLQLAQNVRRGQRESAKKSQTVGGCKIIGYNVNPDTKRYEVDPKTAPFVTEVFKRYANGETISEIVAWLNARGVRTTRGGEFTVNSLHRLLKNEKYTGVYIFHDIRNEGGMPALIDHATFDKVQEMLKVNRRAPARVWSKTEYLLTDKLFCGHCGSMMVGESGHGRNGTKHNYYTCWNRKKKKLCDKKPVRQDVIEPLVLKSIGKLLENPATLESIANQVWAAYERSDTSGDTIKALDKQIADVNKALSNVMKAIEMGIINEMTKTRMDELTDQKQALSAARAEAGLAGGFKLTRDMILFFLQEIAALDMADRDSQKRLIKTFVNAIYLYDDHFDIAFNYTDNGKVVVRMQEINDAACGEVFGRCAQSPAKSCLSRLR

SEQ ID NO: 5184 - protein, 510 aa, Unknown
  Description of Unknown: Integrase B5185 sequence
  PTHR30461:SF3,SM00857,G3DSA:1.10.10.2600,IPR036162,PS51737, G3DSA:3.40.50.1390,IPR006119,IPR038109,PF07508,IPR011109, SSF53041,PTHR30461,Coil,PS51736,cd00338, PF00239
MICAMYLRKSRADYEAEARGEGETLAKHRETLLAVAKARGLTVTDVFSELVSGDTIAERPEMQRLLRAVERGDYDAVLCMDVDRLGRGDGADQSAILKTLKYSDTIVITPYKDYNTRREMDEEFFEYSQFIARSEYKRIKRRMWAGRVASVKQGRWISPKAPFGYRRVRIDNGRAWTLTPEPSEAEAVRKVFAWYSSGACGKYVIANRLNSMGFRTQSGRPFEASAIGNMLGNPAYVGKIRWSRRRQHAEMQDGKEVFTRPLSDECIIVDGLHPAIVDPALFDAVQSRLTANRATHVTHNRKLVNPLCGLMFCSICGRAMVLVPEYKRQNVESTYKCSSPHCPTSRIDSKCVYDALFFALTQWSDYGDSSTACSHEEIAPHNQSLVSAASAQIAQLRAQLARLQDLLETGVYTPETYIERSKVISDRIATATVELEKLRKAEPVDERAAIIRLRSKIDNVLLSWDIASPEEQNRLLKGVIRRIEYSKTHKCYRNENPSKYLSITVYPILD

SEQ ID NO: 5185 - protein, 510 aa, Unknown
  Description of Unknown: Integrase B5186 sequence
  SM00857,G3DSA:1.10.10.2600,IPR036162,PF13408,IPR025827, G3DSA:3.40.50.1390,PS51737,IPR006119,IPR038109,PF07508, IPR011109,SSF53041,PTHR30461,Coil,PS51736, cd00338,PF00239
MSYFIYARKSRKDAELEALGIDVLERHITTLLELAKTLSLPIGAIYREVVSGDSIDARPVMTQVLSEVEACMWDGALVMDVDRLARGDTIDQGRVQRAFFYSNTRIVTPNKTYDPANEYDNEYFEFSLFMSRREYATIKRRMQRGRERSSSDGYYVGNVAPYGWERVIAPDGKHYSLAPSQTEAPVLDLMYDLCGNKQYGYQKACTYMTNMGILARSGKPFTPSTLKGIISNPANIGKVRWGHRKTVRAVKDGRVVKSRPKATDYILSDAAWAPRISADLFKRANQPKGCFSAPVRSDRPIQNLFAGLVRCSQCGRLMVRKKAQTKTPYDFLICQYAECSTVGIRIDELEEALLGWLKDYIAKYEFADTHEEDTAAIAAKELIVTNFETEHQTLLKQRESLFDFLEQGIYTKEIFIERSNALEQRIRDCMNNITAAREDLHTTIARQANRKNFVPKCKNLLSEWDSLTVPEKNSALRQLIDRIVLTKTKRNKKNQKNSEFTIDVYPKVPK

SEQ ID NO: 5186 - protein, 510 aa, Unknown
  Description of Unknown: Integrase B5187 sequence
  PTHR30461:SF3,SM00857,G3DSA:1.10.10.2600,IPR036162,PF13408, IPR025827,PS51737,G3DSA:3.40.50.1390,IPR006119,IPR038109, PF07508,IPR011109,SSF53041,PF00239,PTHR30461, PS51736,Coil,cd00338
MNAVIYARFSSHNQQEQSIEGQIRYCTEYAKKNDMTIINSYIDRAISGTSDNRPEFLQMIKDSNNHQFNAVLVWKLDRFARNRYDSAIYKNALKKNNVKVVSVTEYLGEGSESVLLEAMLEAMAETYSRQLSENVRRGMRESALKCQVVGGSVPLGFDTVDKKYVINEKEAEIVRFIFDEYVSGTSKKEIVNKLNAKGWRTKNGSTFVFNSLNKILSNRKYIGEYKYEDIVIEHGIPAIIDEQTFELAQKQLAKNKQNRGTKSATHEYLLATKIFCGYCGGSMIGETATGKGGGKFGYYVCRNRKKHINDCKKRREKQKELEAFIVERTLYMYKNKDFVNEVAQKVVDLYNKECGQNHLKTLELNKKELEKKLEELSDGLLKTTNARVLKKFNEQINNLDNQLAELEIEIAREKAIANATMKRSDVIDFISDIMDGNINDKQFQKKIIDTFINAIYVFDDKFIVYYNGSSTSDKVTFDDLIHDLENNGVEGSTFNTLTPPNKLKGTLSII

SEQ ID NO: 5187 - protein, 510 aa, Unknown
  Description of Unknown: Integrase B5188 sequence
  PTHR30461:SF3,SM00857,G3DSA:1.10.10.2600,IPR036162,PF13408, PS51737,G3DSA:3.40.50.1390,IPR025827,IPR006119,IPR038109, PF07508,SSF53041,IPR011109,PF00239,PTHR30461, PS51736,Coil,cd00338
MSSVDKIAVVYARYSSHGQTEQSIEGQIAAAQKYAEQHGYTIIHIYADRAMTGRNDDREEFQRMLSDTATHQFGVILLWKIDRFGRNREEIAFNRYRCKKNGVRVERVAEDVPDGPEGVILDSVLEGMAEYYSLQLAQNVRRGQRESAKKSQTVGGCKIIGYNVNPDTKRYEVDPKTAPFVTEVFKRYANGETISEIVAWLNAQGVRTTRGGEFTVNSLHRLLKNEKYTGVYIFHDIRNEGGMPALIDRATFDKAQEMLKVNRRAPARVWSKTEYLLTDKLFCGHCGTMMVGESGHGRNGTKHNYYTCWNRKKKKTCDKKPIRQDVIEPLVLRTIGKLLENPATLENIADQVWAAYERSDTSGDTIKALDKQIADVDRALSNVMKAIEMGIINEMTKARMDELTDQKQALSAARAEAGLAGGFKLTRDMILFFLQDMAALDRSNRDSQKRLIKTFVNAIYLYDDHFNIAFNYTDNGKMTVPMQEIDDAASGDVFGRCAQSPAKSRLSRLR

SEQ ID NO: 5188 - protein, 510 aa, Unknown
  Description of Unknown: Integrase B5189 sequence
  SM00857,G3DSA:1.10.10.2600,IPR036162,PS51737,G3DSA:3.40.50.1390, IPR006119,IPR038109,PF07508,IPR011109,SSF53041, PF00239,PTHR30461,PS51736,Coil,cd00338
MKIENYALYLRKSRADMEAEKLGEGETLARHKKILTELAARKGLHVGKIYHEIVSGETIAARPQIQQMIQDCYNGLYRGIIIVEVTRLSRGNQGDAQAILDCLRYGNNNNGILVVTPTKTYDIAHNQDDEEYMEFELFMSRREYKMIRKRMERGRIQAVVEGNYMGSYRPYGYDILKSKTGRTLVPNPEEAPVVQNIFTWAIEENLTPGKIAKRLSSYGVPTYSGDPEWSVSTVKTILTNPTYTGKVRWNDRMRIKTMVDGKLVSSRPRSHHGDQYMLYDGKHPALVDDATFLAASKRFHSDKTKSGLKLINPLAGILVCAKCGKAMCYQSYPARPETAARYTHKSSQICKVKSAVASDVMDAVAYSLEKYISDFEVKIDNLPEVSEDTILKQMDDLQKELIRQEKKLTRLFDAWEDGLIADNEFADRKAINNDRIASIKNQMDHLEESIPIKEDYEEKIMSFHDALSSLLDADLDADIKNAYLKGILDRIEFSRECNSEFILDVFLKED

SEQ ID NO: 5189 - protein, 510 aa, Unknown
  Description of Unknown: Integrase B5190 sequence
  SM00857,G3DSA:1.10.10.2600,IPR036162,PF13408, PS51737,G3DSA:3.40.50.1390,IPR025827,IPR006119, IPR038109,PF07508,IPR011109,SSF53041, PTHR30461,Coil,PS51736,cd00338,PF00239
MSYFIYARKSRKDADLEALGIDVLERHITTLLELAKTLLLPIGAIYREVVSGDSIDSRPVMSQVMAEVESCMWDGCLVMDVDRLARGDTIDQGRVQRAFFYSNTKIVTPNKTYDPANEYDNEYFEFSLFMSRREYATIKRRMQRGRERSSSDGYYVGNIPPYGWRRVIAPDGKHFSLAPDPTESPVLDLMYDLCGNKQYGYQKACTHMAEMGILSRSGRPFTPSTLKGIISNPANIGKVRWGHRKTVRTVKDGKISRSRPHSSDYILADAVWPPRISADLFQRANQPKGSCSAPVRDDRPIQNIFAGLVRCSQCGRLMVRKKAHTKTPYDILICQYTECPTVGIRIDELELALLEWLRNYIDKYELTDALPEDVENVAAKEAIVKNFEKEHETLLKQRESLFDFLEQGIYTKEIFIERSNALEQRVKECMEHIISAQNDLHATLALQANRKNFVPRCKNLLGEWGRLTIPEKNSALKVLIEKIMFTKTKRNKKGQDRSDFEIDVFPKVPK

SEQ ID NO: 5190 - protein, 510 aa, Unknown
  Description of Unknown: Integrase B5191 sequence
  PTHR30461:SF3,SM00857,G3DSA:1.10.10.2600,IPR036162,PF13408, IPR025827,PS51737,G3DSA:3.40.50.1390,IPR006119,IPR038109, PF07508,IPR011109,SSF53041,PTHR30461,Coil, cd00338,PF00239
MSSVDKIAVVYARYSSHGQTEQSIEGQIAAAQKYAEQHDYTIIHVYADRAMTGRNDDREEFQRMLSDTATHQFGVILLWKIDRFGRNREEIAFNRYRCKKNGVRVERVAEDVPDGPEGVILDSVLEGMAEYYSLQLAQNVRRGQRESAKKSQTVGGCKIIGYNVDPDTKRYEVDPKTAPFVTEVFKRYANGETISEIVAWLNAQGVRTTRGGEFTVNSLHRLLKNEKYTGVYIFHDIRNEGGMPALIDRATFDKAQEMLKVNRRTPARVWSKTEYLLTDKLFCGHCGAMMVGESGHGRNGTKHNYYTCWNRKKKKLCDKKPVRQDVIEPLVLRSIGKLLENPATLENIADQVWAAYERSDTSGDTIKALDKQIADVDRALSNVMKAIEMGIINEMTKARMDELTDQKQALSAARTEAGLAGGFKLTRDMILFFLQEIAALDMADRDSQKRLIKTFVNAIYLYDDHFDIAFNYTDKGKVVVQMQEINDAACGEVFGRCAQSPAKSRLSRLR

SEQ ID NO: 5191 - protein, 510 aa, Unknown
  Description of Unknown: Integrase B5192 sequence
  SM00857,G3DSA:1.10.10.2600,IPR036162,PF13408,IPR025827, PS51737,G3DSA:3.40.50.1390,IPR006119,IPR038109,PF07508, IPR011109,SSF53041,PTHR30461,Coil,PS51736, cd00338,PF00239
MSYFIYARKSRKDAELEALGIDVLERHITTLLELAKTLSLPIGAIYREVVSGDSIDARPVMTQVLSEVEACMWDGALVMDVDRLARGDTIDQGRVQRAFFYSNTRIVTPNKTYDPANEYDNEYFEFSLFMSRREYATIKRRMQRGRERSSSDGYYVGNVAPYGWERVIAPDGKHYSLTPSQTEAPVLDLMYDLCGNKQYGYQKACTYMTNMGILARSGKPFSPSTLKGIISNPANIGKVRWGHRKTVRAVKDGRVVKSRPKATDYILSDAAWAPRISPDLFKRANQPKGCFSAPVRNDRPIQNLFAGLVRCSQCDRLMVRKKAQTKTPYDMLICQYTECSTVGIRIDELEEALLGWLKDYIAKYEFADTHEEDTAAIAAKELIVTNFETEHQTLLKQRESLFDFLEQGIYTKEIFIERSNALEQRIRDCMNNITAAREDLHTTIARQANRKNFVPKCKNLLSEWDSLTVSEKNSALRQLIDRIVLTKTKRNKKNQKNSEFTIDVYPKVPK

SEQ ID NO: 5192 - protein, 510 aa, Unknown
  Description of Unknown: Integrase B5193 sequence
  cd00338,SM00857,G3DSA:1.10.10.2600,IPR036162,PF13408, IPR025827,PS51737,G3DSA:3.40.50.1390,IPR006119,IPR038109, PF07508,IPR011109,SSF53041,PTHR30461,PS51736, Coil,PF00239
MPTDYALYLRKSRADLEAEAHGEGDTLARHEHILMELAKSRALPIGAIYREIVSGERIANRPVMQQLLSEVEDSRWKGVLVTETSRLARGDTIDQGIIAQAFKFSGTLIVTPAKTYDPTQEADEEWMEFGLFMSRQEYRMIRRRMTAGTKSAKKEGRYVGSRAPYGYERCKLPGRGWSIRPIEPESGVVKMIYELFLSGKGAGEIATYLNQINIPSPTQRTWVRQTVGLILQNPHYAGLIPDAVHPYKKVIKDGQLTVKRPLNKQCELYEGVHEAIIPRETWEETQRLLTKNHKPRVPSALQQHNPLAGLLYCDKCGQKMQRHPQTERNFEKYYCPTVGCPTVSAPLSQVEDLVLQGLKEFLYDLEMQQPEQPDFTTEQNALKNIDSHLAEQRKRLTKTFELVEDGIYTREAFLQRQSEINAEISRLQTAREELQRKLDAHTAELSARENAAPQIRYVLDVYDRKSAPAERSALLKQVIDRIDYHKTTKQRWSDENDLSVTIHPKISARK

SEQ ID NO: 5193 - protein, 510 aa, Unknown
  Description of Unknown: Integrase B5194 sequence
  SM00857,G3DSA:1.10.10.2600,IPR036162,PF13408,IPR025827, G3DSA:3.40.50.1390,PS51737,IPR006119,IPR038109,PF07508, SSF53041,IPR011109,PTHR30461,Coil,PS51736, cd00338,PF00239
MSYFIYARKSRKDADLEALGIDVLERHITTLLELAKTLSLPIGAIYREVVSGDSIDSRPVMSQVMAEVESCMWDGCLVMDVDRLARGDTIDQGRVQRAFFYSNTKIITPNKTYDPANEYDNEYFEFSLFMSRREYATIKRRMQRGRERSSSDGYYVGNIPPYGWRRVIAPDGKHFSLAPDPAEAPVLDLMYDLCGNKQYGYQKACTYMTEMGILSRSGRPFTPSTLKGIISNPANIGKVRWGHRKTVRTVKDGKISRSRPHSSDYILADAVWPPRISADLFRRANQPKGSCSAPVRDDRPIQNIFAGLVRCSQCGRLMVRKKAHTKTPYDILICQYTECPTVGIRIDELELALLEWLRNYIDKYELTDALPEDAENVAAKEAIVKNFEKEHETLLKQRESLFDFLEQGIYTKEIFIERSNALEQRVKECMEHIISAQNDLHATLALQANRKNFVPRCKNLLGEWGRLTIPEKNSALKVLIEKIMFTKTKRNKKGQDRSDFEIDVFPKVPK

SEQ ID NO: 5194 - protein, 510 aa, Unknown
  Description of Unknown: Integrase B5195 sequence
  SM00857,G3DSA:1.10.10.2600,IPR036162,PF13408,PS51737, G3DSA:3.40.50.1390,IPR025827,IPR006119,IPR038109,PF07508, IPR011109,SSF53041,PTHR30461,Coil,PS51736, cd00338,PF00239
MSYFIYARKSRKDAELEALGIDVLERHITTLLELAKTLSLPIGAIYREVVSGDSIDARPVMTQVLSEVEACMWDGALVMDVDRLARGDTIDQGRVQRAFFYSNTRIVTPNKTYDPANEYDNEYFEFSLFMSRREYATIKRRMQRGRERSSSDGYYVGNVAPYGWERVVAQDGKHYSLAPSQTEAPVLDLMYDLCGNKQYGYQKACTYMTNMGILARSGKPFTPSTLKGIISNPANIGKVRWGHRKTVRAVKDGRVVKSRPKATDYILSDAAWAPRISADLFKRANQPKGCFSAPVRSDRPIQNLFAGLVRCSQCGRLMVRKKAQTKTPYDMLICQYAECSTVGIRIDELEEALLGWLKDYIAKYEFADTHEEDTAAIAAKELIVTNFETEHQTLLKQRESLFDFLEQGIYTKEIFIERSNALEQRIRDCMNNITAAREDLHTTIARQANRKNFVPKCKNLLSEWDSLTVSEKNSALRQLIDRIVLTKTKRNKKNQKNSEFTIDVYPKVPK

SEQ ID NO: 5195 - protein, 510 aa, Unknown
  Description of Unknown: Integrase B5196 sequence
  SM00857,G3DSA:1.10.10.2600,IPR036162,PF13408,IPR025827, PS51737,G3DSA:3.40.50.1390,IPR006119,IPR038109,PF07508, IPR011109,SSF53041,PTHR30461,Coil,PS51736, cd00338,PF00239
MSYFIYARKSRKDAELEALGIDVLERHITTLLELAKTLSLPIGAIYREVVSGDSIDARPVMTQVLSEVEACMWDGALVMDVDRLARGDTIDQGRVQRAFFYSNTRIVTPNKTYDPANEYDNEYFEFSLFMSRREYATIKRRMQRGRERSSSDGYYVGNVAPYGWERVIAPDGKHYSLAPHQTEAPVLDLMYDLCGNKQYGYQKACTYMSNMGILARSGKPFTPSTLKGIISNPANIGKVRWGHRKTVRAVKDGRVVKSRPKATDYILSDAAWAPRISPDLFKRANQPKGCFSAPVRNDRPIQNLFAGLVRCSQCDRLMVRKKAQTKTPYDMLICQYTECSTVGIRIDELEEALLGWLKDYIAKYEFADTHEEDTAAIAAKELIVTNFETEHQTLLKQRESLFDFLEQGIYTKEIFIERSNALEQRIRDCMNNITAAREDLHTTIARQANRKNFVPKCKNLLSEWNSLTIPEKNSALRKLIDRIVLTKTKRNKKNQKNSEFMIDVYPKVPK

SEQ ID NO: 5196 - protein, 510 aa, Unknown
  Description of Unknown: Integrase B5197 sequence
  cd00338,SM00857,G3DSA:1.10.10.2600,IPR036162,PS51737, G3DSA:3.40.50.1390,IPR006119,IPR038109,PF07508,IPR011109, SSF53041,PTHR30461,PS51736,Coil,PF00239
MKIENYALYLRKSRADMEAEKLGEGETLARHKKILTELAARKGLHVGKIYHEIVSGETIAARPQIQQMIQDCYNGLYRGIIIVEVTRLSRGNQGDAQAILDCLRYGNNNNGILVVTPTKTYDIAHNQDDEEYMEFELFMSRREYKMIRKRMERGRIQAVVEGNYMGSYRPYGYDILKSKTGRTLVPNPEEAPVVKNIFTWAIEENLTPGKIAKRLSSYGVPTYSGDPEWSVSTVKTILTNPTYTGKVRWNDRMRIKTMVDGKLVSSRPRSHHGDQYMLYDGKHPALVDDATFLAVSKRFHSDKTKSGLKLINPLAGILVCAKCGKAMCYQSYPARPETAARYTHKSSQICKVKSAVASDVMDAVAYSLEKYISDFEVKIDNLPEVSEDTILTQMDDLQKELIRQEKKLTRLFDAWEDGLIADNEFADRKAINNDRIASIKNQMDHLEESIPVKEDYEEKIMSFHDALGSLLDADLDADIKNAYLKGILDRIEFSRECNSEFILDVFLKED

SEQ ID NO: 5197 - protein, 510 aa, Unknown
  Description of Unknown: Integrase B5198 sequence
  SM00857,G3DSA:1.10.10.2600,IPR036162,PF13408, PS51737,G3DSA:3.40.50.1390,IPR025827,IPR006119, IPR038109,PF07508,IPR011109,SSF53041, PTHR30461,Coil,PS51736,cd00338,PF00239
MSYFIYARKSRKDAELEALGIDVLERHITTLLELAKTLSLPIGAIYREVVSGDSIDARPVMTQVLSEVEACMWDGALVMDVDRLARGDTIDQGRVQRAFFYSNTRIVTPNKTYDPANEYDNEYFEFSLFMSRREYATIKRRMQRGRERSSSDGYYVGNVAPYGWERVIAPDGKHYSLAPHQTEAPVLDLMYDLCGNKQYGYQKACTYMTNMGILARSGKPFTPSTLKGIISNPANIGKVRWGHRKTVRAVKDGRVVKSRPKATDYILSDAAWAPRISADLFKRANQPKGCFSAPVRSDRPIQNLFAGLVRCSQCGRLMVRKKAQTKTPYDMLICQYAECSTVGIRIDELEEALLGWLKDYIAKYEFTDTHEEDTAAIAAKELIVTNFETEHQTLLKQRESLFDFLEQGIYTKEIFIERSNALEQRIRDCMNNITAAQEDLHTTIARQANRKNFVPKCKNLLSEWSSLTVPEKNSALRQLIDRIVLTKTKRNKKNQKNSEFTIDVYPKVPK

SEQ ID NO: 5198 - protein, 510 aa, Unknown
  Description of Unknown: Integrase B5199 sequence
  PTHR30461:SF3,cd00338,SM00857,G3DSA:1.10.10.2600,IPR036162, PF13408,PS51737,G3DSA:3.40.50.1390,IPR025827,IPR006119, IPR038109,PF07508,IPR011109,SSF53041,PTHR30461, PS51736,Coil,PF00239
MSSVETTAVVYARYSSHGQTEQSIEGQIAAAQKYAEQHGYTIIHIYADRAMTGRNDDREEFQKMLSDTATRQFGVILLWKIDRFGRNREEIAFNRYRCKKNGVRVERVAEDVPDGPEGVILDSVLEGMAEYYSLQLAQNVRRGQRESAKKSQTVGGCKIIGYNVNPDTKRYEVDPKTAPFVTEVFKRYANGETISEIVAWLNAQGVRTTRGGEFTVNSLHRLLKNEKYTGVYIFHDIRNEGGMPALIDRATFDKAQEMLKVNRRAPARVWSKTEYLLTDKLFCGHCGTMMVGESGHGRNGTKHNYYTCWNRKKKKTCDKKPIRQDVIEPLVLRAIGKLLENPATLEKIADQVWAAYERSDTSGDTIKALDKQIADVDKALSNVMKAIEMGIINEMTKARMDELTDQKQALSAARAEAGLAGGFKLTRDMILFFLQDMAALDRSNRDSQKRLIKTFVNAIYLYDDHFNIAFNYTDNGKMTVRMQEIDDAASGDVFGRCAQSPAKSRLSHLR

SEQ ID NO: 5199 - protein, 510 aa, Unknown
  Description of Unknown: Integrase B5200 sequence
  SM00857,G3DSA:1.10.10.2600,IPR036162,PF13408,IPR025827, PS51737,G3DSA:3.40.50.1390,IPR006119,IPR038109,PF07508, SSF53041,IPR011109,PTHR30461,Coil,PS51736, cd00338,PF00239
MSYFIYARKSRKDAELEALGIDVLERHITTLLELAKTLSLPIGAIYREVVSGDSIDARPVMTQVLSEVEACMWDGALVMDVDRLARGDTIDQGRVQRAFFYSDTRIVTPNKTYDPANEYDNEYFEFSLFMSRREYATIKRRMQRGRERSSSDGYYVGNVAPYGWERVIAPDGKHYSLAPHQTEAPVLDLMYDLCGNKQYGYQKACTYMSNMGILARSGKPFTPSTLKGIISNPANIGKVRWGHRKTVRAVKDGRVVKSRPKATDYILSDAAWAPRISPDLFKRANQPKGCFSAPVRNDRPIQNLFAGLVRCSQCDRLMVRKKAQTKTPYDMLICQYTECSTVGIRIDELEEALLGWLKDYIAKYEFADTHEEDTAAIAAKELIVTNFETEHQTLLKQRESLFDFLEQGIYTKEIFIERSNALEQRIRDCMNNITAAREDLHTTIARQANRKNFVPKCKNLLSEWDSLTISEKNSALRQLIDRIVLTKTKRNKKNQKNSEFTIDVYPKVPK

SEQ ID NO: 5200 - protein, 510 aa, Unknown
  Description of Unknown: Integrase B5201 sequence
  SM00857,G3DSA:1.10.10.2600,IPR036162,PF13408,IPR025827, G3DSA:3.40.50.1390,PS51737,IPR006119,IPR038109,PF07508, SSF53041,IPR011109,PF00239,PTHR30461,PS51736, Coil,cd00338
MLKTVIYARYSSDKQNEQSIEGQIHECEQFAKTHDMVIIKHYIDRALSGKTDDRPSFLQMIKDSSSGLFDAVLVYKTDRFARNRYDSAVYKAKLKKNGIKIFYAKENIPDGPEGIILESMLEGFAEYYSAELSQKVKRGIKENIRKGLSFGGACPFGYKIVNKKYVIDDEQAPYVKKIFEDYAKGRRAIDIFNELNTLPNYAGKGRKWNRSSLNRMLTNKKYIGIYELEDVCVKDAIPPIIDEALFNKVQSRILFNRRHTTRAKVNYLLSGKLFCGLCEHSMTGKTGTSKTKAKYHYYVCSHKHCKQKKYRKELLEDIIIQYTVKDILNPKHFKMIAKKCLEIQQADNKINDILLMLKKQLTAIKTKINNLMNAIEAGIITTSTKDRLEQLEQEKYKLELEISTQQLNSNRLLSEKQIIYMLNVFYNKRVDVSFYNQIIDCFIYKIYIYSDKICIVYNLNNSDKDVTYSDINELYKSSHLNSCGSPYDLTCEHLAFVKNKLVLFFYIPKF

SEQ ID NO: 5201 - protein, 510 aa, Unknown
  Description of Unknown: Integrase B5202 sequence
  PTHR30461:SF3,cd00338,SM00857,G3DSA:1.10.10.2600,IPR036162, PF13408,IPR025827,PS51737,G3DSA:3.40.50.1390,IPR006119, IPR038109,PF07508,IPR011109,SSF53041,PTHR30461, PS51736,Coil,PF00239
MYEDIKTACLYVRFSSHNQTEQSIEGQTRVCRDFCKRHNIRIVEIYADRATSASKDIEKRVQFLKMIKDSEKGLFDAVIVYKLDRFARSRYDSATYKYRLKRNGVQLISATENISNDPEGIILESVLEGMAEFYSAELSQKINRGMRESAYKHNSIGGAVPLGYKIEDKKLVIDPKTAPIVKEAFEKYADGETVAEICRQFNARGYKTSKGTAFGKSSFTKIFRNERYIGVYSFHDYRAEDAIPAIIDKDLWDRVQLRVGKIKNAPARNKAKVVYLLSGKIFCGHCGSKMNGNCNAGNYYYYQCYGKKNGNVDCKKKNIRKEFIERLVAQDALSLLTDEYIEQIATIACEKNQHEIELDSALPTIRDRIHQVDLSLNNLLKAIESGSAPDMLVKRMGELEKEKKDLQVQAKKESEDIVELDKAQVIYWLEQFRGGSIEDEEFCRMLIDLFVNSVTVWDEDDNTYKVTVAYNLTSLPTKTYRLNKGGTLSDFTSNAPALAIRPRSIKTASS

SEQ ID NO: 5202 - protein, 510 aa, Unknown
  Description of Unknown: Integrase B5203 sequence
  cd00338,SM00857,G3DSA:1.10.10.2600,IPR036162,PS51737, G3DSA:3.40.50.1390,IPR006119,IPR038109,PF07508,IPR011109, SSF53041,PTHR30461,PS51736,Coil,PF00239
MKIENYALYLRKSRADMEAEKLGEGETLARHKKILTELAARKGLHVGKIYHEIVSGETIAARPQIQQMIQDCYNGLYRGIIIVEVTRLSRGNQGDAQTILDCLRYGNNNNGILVVTPTKTYDIAHNQDDEEYMEFELFMSRREYKMIRKRMERGRIQAVVEGNYMGSYRPYGYDILKSKTGRTLVPNPEEAPVVQNIFTWAIEENLTPGKIAKRLSSYGVPTYSGDPEWSVSTVKTILTNPTYTGKVRWNDRMRIKTMVDGKLVSSRPRSHHGDQYMLYDGKHPALVDDATFLAASKRFHSDKTKSGLKLINPLAGILVCAKCGKAMCYQSYPARPETAARYTHKSSQICKVKSAVASDVMDAVAYSLEKYISDFEVKIDNLPEVSEDTILKQMDDLQKELIRQEKKLTRLFDAWEDGLIADNEFADRKAINNDRIASIKNQMDHLEESIPVKEDYEEKIMSFHDALSSLLDADLDADIKNAYLKGILDRIEFSRECNSEFILDVFLKED

SEQ ID NO: 5203 - protein, 510 aa, Unknown
  Description of Unknown: Integrase B5204 sequence
  SM00857,G3DSA:1.10.10.2600,IPR036162,PF13408, PS51737,G3DSA:3.40.50.1390,IPR025827,IPR006119, IPR038109,PF07508,IPR011109,SSF53041, PTHR30461,Coil,PS51736,cd00338,PF00239
MSYFIYARKSRKDAELEALGIDVLERHITTLLELAKTLSLPIGAIYREVVSGDSIDARPVMTQVLSEVEACMWDGALVMDVDRLARGDTIDQGRVQRAFFYSNTRIVTPNKTYDPANEYDNEYFEFSLFMSRREYATIKRRMQRGRERSSSDGYYVGNVAPYGWERVIAPDGKHYSLAPHQTEAPVLDLMYDLCGNKQYGYQKACTYMTNMGILARSGKPFTPSTLKGIISNPANIGKVRWGHRKTVRAVKDGRVVKSRPKATDYILSDAAWAPRISADLFKRANQPKGCFSAPVRSDRPIQNLFAGLVRCSQCGRLMVRKKAQTKTPYDMLICQYAECSTVGIRIDELEEALLGWLKDYIAKYEFADTHEEDTAAIAAKELIVTNFETEHQTLLKQRESLFDFLEQGIYTKEIFIERSNALEQRIRDCMNNITAAREDLHTTIARQANRKNFVPKCKNLLSEWDSLTVSEKNSALRQLIDRIVLTKTKRNKKNQKNSEFTIDVYPKVPK

SEQ ID NO: 5204 - protein, 510 aa, Unknown
  Description of Unknown: Integrase B5205 sequence
  PTHR30461:SF3,cd00338,SM00857,G3DSA:1.10.10.2600,IPR036162, PF13408,IPR025827,PS51737,G3DSA:3.40.50.1390,IPR006119, IPR038109,PF07508,IPR011109,SSF53041,PTHR30461, PS51736,Coil,PF00239
MSSVDKIAVVYARYSSHGQTEQSIEGQIAAAQKYAEQHGYTIIHVYADRAMTGRNDDREEFQRMLSDTATHQFGVILLWKIDRFGRNREEIAFNRYRCKKNGVRVERVAEDVPDGPEGVILDSVLEGMAEYYSLQLAQNVRRGQRESAKKSQTVGGCKIIGYNVDPDTKRYEVDPKTAPFVTEVFKRYANGETISEIVAWLNAQGVRTTRGGEFTVNSLHRLLKNEKYTGVYIFHDIRNEGGMPALIDRATFDKAQEMLKVNRRAPARVWSKTEYLLTDKLFCGHCGAMMVGESGHGRNGTKHNYYTCWNRKKKKLCDKKPVRQDVIEPLVLRSIGKLLENPATLENIADQVWAAYERSDTSGDTIKALDKQIADVDRALSNVMKAIEMGIINEMTKARMDELTDQKQALSAARAEAGLAGGFKLTRDMILFFLQEIAALDMADRDSQKRLIKTFVNAIYLYDDHFDIAFNYTDNGKVVVRMQEINDAACGEVFGRCAQSPAKSRLSRLR

SEQ ID NO: 5205 - protein, 510 aa, Unknown
  Description of Unknown: Integrase B5206 sequence
  PTHR30461:SF3,SM00857,G3DSA:1.10.10.2600,IPR036162,PF13408, PS51737,G3DSA:3.40.50.1390,IPR025827,IPR006119,IPR038109, PF07508,SSF53041,IPR011109,PF00239,PTHR30461, PS51736,Coil,cd00338
MSSVDKIAVVYARYSSHGQTEQSIEGQIAAAQKYAEQHGYTIIHIYADRAMTGRNDDREEFQRMLSDTATHQFGVILLWKIDRFGRNREEIAFNRYRCKKNGVRVERVAEDVPDGPEGVILDSVLEGMAEYYSLQLAQNVRRGQRESAKKSQTVGGCKIIGYNVNPDTKRYEVDPKTAPFVTEVFKRYANGETISEIVAWLNAQGVRTTRGGEFTVNSLHRLLKNEKYTGVYIFHDIRNEGGMPALIDHATFDKVQEMLKVNRRAPARVWSKTEYLLTDKLFCGHCGSMMVGESGHGRNGTKHNYYTCWNRKKKKLCDKKPVRQDVIEPLVLKSIGKLLENPATLESIADQVWAAYERSDTSGDTIKALDKQIADVNKALSNVMKAIEMGIINEMTKTRMDELTDQKQALSAARAEAGLAGGFKLTRDMILFFLQEIAALDMADRDSQKRLIKTFVNAIYLYDDHFDIAFNYTDNGKVVVRMQEINDAACGEVFGRCAQSPAKSRLSRLR

SEQ ID NO: 5206 - protein, 510 aa, Unknown
  Description of Unknown: Integrase B5207 sequence
  SM00857,G3DSA:1.10.10.2600,IPR036162,PS51737,G3DSA:3.40.50.1390, IPR006119,IPR038109,PF07508,IPR011109,SSF53041, PTHR30461,Coil,PS51736,cd00338,PF00239
MPRKPKKTETRKGVIYARFSSHAQREESIMDQIRVCSDYAEREGIEIAATYADEARSGTNAAGRPEFLRMVSDAQKSDWDCVIVYKSDRFARNRYDAATYKAKLRKAGVELLSATEGVPDGPEGIILESVLEGMAEYYSANLAQNVLRGMEGNALKCHHNGVQVFGYDCMPDGSYKINEHEAQGVRAVFAMLDSGSTKAAAARHLNKGGWRSKRGGEFGVQSISQMLGNEKYVGVYSWGDVRVEGGMPAIIERGTWDRVRGKLKARGTRKGVKNESYLLSGKMRDADGNLYESCCGTSRNGRRHYYYRVKSTGASMRKEDAEERVRRAVARVLDENPELDETIVDIVMQAQSESESVEREAVEAMRKRLPQIDREMDNLIDLAAKTGAGRTIPEKLRALEREREVLALQIQDMESRAPLIEPDMVRYLLFQLRKCSGPDSVVRGFVDRIEVDAEGGMLVIFNLCTPSDLREQQNGEPQKAWFAKLSFGSPPINLGEHAIYPTPWGFAIAA

SEQ ID NO: 5207 - protein, 510 aa, Unknown
  Description of Unknown: Integrase B5208 sequence
  PTHR30461:SF3,cd00338,SM00857,G3DSA:1.10.10.2600,IPR036162, PF13408,PS51737,G3DSA:3.40.50.1390,IPR025827,IPR006119, IPR038109,PF07508,IPR011109,SSF53041, PTHR30461,PS51736,Coil,PF00239
MSSVETTAVVYARYSSHGQTEQSIEGQIAAAQKYAEQHGYTIIHIYADRAMTGRNDDREEFQKMLSDTATRQFGVILLWKIDRFGRNREEIAFNRYRCKKNGVRVERVAEDVPDGPEGVILDSVLEGMAEYYSLQLAQNVRRGQRESAKKSQTVGGCKIIGYNVNPDTKRYEVDPKTAPFVTEVFKRYANGETISEIVAWLNAQGVRTTRGGEFTVNSLHRLLKNEKYTGVYIFHDIRNEGGMPALIDRATFDKAQEMLKVNRRAPARVWSKTEYLLTDKLFCGHCGTMMVGESGHGRNGTKHNYYTCWNRKKKKTCDKKPIRQDVIEPLVLRAIGKLLENPATLENIADQVWAAYERSDTSGDTIKALDKQIADVDRALSNVMKAIEMGIINEMTKARMDELTDQKQALSAARAEAGLAGGFKLTRDMILFFLQDMAALDRSNRDSQKRLIKTFVNAIYLYDDHFDIAFNYTDNGKVVVRMQEINDAACGEVFGRCAQSPAKSRLSRLR

SEQ ID NO: 5208 - protein, 510 aa, Unknown
  Description of Unknown: Integrase B5209 sequence
  SM00857,G3DSA:1.10.10.2600,IPR036162,PF13408,IPR025827, G3DSA:3.40.50.1390,PS51737,IPR006119,IPR038109,PF07508, IPR011109,SSF53041,PTHR30461,Coil,PS51736, cd00338,PF00239
MSYFIYARKSRKDAELEALGIDVLERHITTLLELAKTLSLPIGAIYREVVSGDSIDARPVMTQVLSEVEACMWDGALVMDVDRLARGDTIDQGRVQRAFFYSNTRIVTPNKTYDPANEYDNEYFEFSLFMSRREYATIKRRMQRGRERSSSDGYYVGNVAPYGWERVIAPDGKHYSLAPHQTEAPVLDLMYDLCGNKQYGYQKACTYMSNMGILARSGKPFTPSTLKGIISNPANIGKVRWGHRKTVRAVKDGRVVKSRPKATDYILSDAAWAPRISPDLFKRANQPKGCFSSPVRNDRPIQNLFAGLVRCSQCGRLMVRKKAQTKTPYDVLICQYTECSTVGIRIDELEEALLEWLKDYIVKYEFTDTHEEDAAAIAAKEMIVTNFETEHQTLLKQRESLFDFLEQGIYTKEIFIERSNALEQRIRDCMNNIATAQEDLHTTIARQANRKNFVPKCKNLLSEWGSLTVPEKNSALRQLIDRIILTKTKRNKKNQKNSEFTIDVYPKVPK

SEQ ID NO: 5209 - protein, 510 aa, Unknown
  Description of Unknown: Integrase B5210 sequence
  cd00338,SM00857,G3DSA:1.10.10.2600,IPR036162,PS51737, G3DSA:3.40.50.1390,IPR006119,IPR038109,PF07508,IPR011109, SSF53041,PTHR30461,PS51736,Coil,PF00239
MKIENYALYLRKSRADMEAEKLGEGETLARHKKILTELAARKGLHVGKIYHEIVSGETIAARPQIQQMIQDCYNGLYRGIIIVEVTRLSRGNQGDAQAILDCLRYGNNNNGILVVTPTKTYDIAHNQDDEEYMEFELFMSRREYKMIRKRMERGRIQAVVEGNYMGSYRPYGYDILKSKTGRTLVPNPEEAPVVQNIFTWAIEENLTPGKIAKRLSSYGVPTYSGDPEWSVSTVKTILTNPTYTGKVRWNDRIRIKTMVDGKLVSSRPRSHHGDQYMLYDGKHPALVDDATFLAASKRFHSDKTKSGLKLINPLAGILVCAKCGKAMCYQSYPARPETAARYTHKSSQICKVKSAVASDVMDAVAYSLEKYISDFEVKIDNLPEVSEDTILKQMDDLQKELIRQEKKLTRLFDAWEDGLIADNEFADRKAINNDRIASIKNQMDHLEESIPIKEDYEEKIMSFHDALGSLLDADLDADIKNAYLKGILDRIEFSRECNSEFILDVFLKED

SEQ ID NO: 5210 - protein, 510 aa, Unknown
  Description of Unknown: Integrase B5211 sequence
  PTHR30461:SF3,cd00338,SM00857,G3DSA:1.10.10.2600,IPR036162, PF13408,PS51737,IPR025827,G3DSA:3.40.50.1390,IPR006119, IPR038109,PF07508,IPR011109,SSF53041, PTHR30461,PS51736,Coil,PF00239
MYEDIKTACLYVRFSSHNQTEQSIEGQTRVCRDFCKRHNIRIVEIYADRATSASKDIEKRVQFLKMIKDSEKGLFDAVIVYKLDRFARSRYDSATYKYRLKRNGVQLISATENISNDPEGIILESVLEGMAEFYSAELSQKINRGMRESAYKHNSIGGAVPLGYKIEDKKLVIDPKTAPIVKEAFEKYADGETVAEICRQFNARGYKTSKGTTFGKSSFTKIFRNERYIGVYSFHDYRAEDAIPAIIDKDLWDRVQLRVGKIKKAPARNKAKVVYLLSGKIFCGHCGSKMNGNCNAGNYYYYQCYGKKNGNVDCKKKNIRKEFIERLVAQDALSLLTDEYIEQIATIACEKNQHEIELDSALPTIRDRIHQVDLSLNNLLKAIESGSAPDMLVKRMGELEKEKKDLQVQAKKESEDIVELDKAQVIYWLEQFRGGSIEDEEFCRMLIDLFVNSVTVWDEDDNTYKVTVAYNLTSLPTKTYRLNKGGTLSDFTSNAPAYGLPTMHLCRRTA

SEQ ID NO: 5211 - protein, 510 aa, Unknown
  Description of Unknown: Integrase B5212 sequence
  SM00857,G3DSA:1.10.10.2600,IPR036162,PF13408,IPR025827, PS51737,G3DSA:3.40.50.1390,IPR006119,IPR038109,PF07508, SSF53041,IPR011109,PTHR30461,PS51736,cd00338, PF00239
MSYFIYARKSRKDADLEALGIDVLERHITTLLELAKTLSLPIGAIYREVVSGDSIDSRPVMSQVMAEVESCMWDGCLVMDVDRLARGDTIDQGRVQRAFFYSNTKIITPNKTYDPANEYDNEYFEFSLFMSRREYATIKRRMQRGRERSSSDGYYVGNIPPYGWRRVIAPDGKHFSLAPDPAEAPVLDLMYDLCGNKQYGYQKACTYMTEMGILSRSGRPFTPSTLKGIISNPANIGKVRWGHRKTVRTVKDGKISRSRPHSSDYILADAVWPPRISADLFQRANQPKGSCSAPVRDDRPIQNIFAGLVRCSQCGRLMVRKKAHTKTPYDILICQYTECPTVGIRIDELELALLEWLQNYIDKYELTDALPEDAENVATKEAIVKNFEKEHEMLLKQRESLFDFLEQGIYTKEIFIERSNALEQRVKECMEHIVSAQNDLHATLALQANRKNFVPRCKNLLGEWGRLTIPEKNSALKVLIEKIMFTKTKRNKKGQDRSDFEIDVFPKVPK

SEQ ID NO: 5212 - protein, 510 aa, Unknown
  Description of Unknown: Integrase B5213 sequence
  SM00857,G3DSA:1.10.10.2600,IPR036162,PF13408,PS51737, IPR025827,G3DSA:3.40.50.1390,IPR006119,IPR038109,PF07508, IPR011109,SSF53041,PTHR30461,Coil,PS51736, cd00338,PF00239
MSYFIYARKSRKDADLEALGIDVLERHITTLLELAKTLSLPIGAIYREVVSGDSIDSRPVMSQVMAEVESCMWDGCLVMDVDRLARGDTIDQGRVQRAFFYSNTKIVTPNKTYDPANEYDNEYFEFSLFMSRREYATIKRRMQRGRERSSSDGYYVGNIPPYGWRRVIAPDGKHFSLAPDPTESPVLDLMYDLCGNKQYGYQKACTHMAEMGILSRSGRPFTPSTLKGIISNPANIGKVRWGHRKTVRTVKDGKISRSRPHSSDYILADAVWPPRISADLFQRANQPKGSCSAPVRDDRPIQNIFAGLVQCSQCGRLMVRKKAHTKTPYDILICQYTECPTVGIRIDELELALLEWLRNYIDKYELTDALPEDAENIAAKEAIVKNFEKEHETLLKQRESLFDFLEQGIYTKEVFIERSNALEQRVKECMEHIITAQNDLHATLALQANRKNFVPRCKNLLGEWGRLTIPEKNSALKVLIEKIMFTKTKRNKKGQDRSDFEIDVFPKVPK

SEQ ID NO: 5213 - protein, 510 aa, Unknown
  Description of Unknown: Integrase B5214 sequence
  PTHR30461:SF3,SM00857,G3DSA:1.10.10.2600,IPR036162,PF13408, IPR025827,PS51737,G3DSA:3.40.50.1390,IPR006119,IPR038109, PF07508,IPR011109,SSF53041,PF00239,PTHR30461, PS51736,Coil,cd00338
MSTVETTAVVYARYSSHGQTEQSIEGQIAAAQKYAEQHGYTIIHIYADRAMTGRNDDREEFQKMLSDTAMRQFGVILLWKIDRFGRNREEIAFNRYRCKKNGVRVERVAEDVPDGPEGVILDSVLEGMAEYYSLQLAQNVRRGQRESAKKSQTVGGCKIIGYNVNPNTKRYEVDPKTAPFVTEVFKRYANGETISEIVAWLNAQGVRTTRGGEFTVNSLHRLLKNEKYTGVYIFHDIRNEGGMPALIDRATFDKAQEMLKVNRRAPARVWSKTEYLLTDKLFCGHCGTMMVGESGHGRNGTKHNYYTCWNRKKKKMCDKKPIRQDVIEPLVLRAIGKLLENPATLENIADQVWAAYERSDTSGDTIKALDKQIADVDRALSNVMKAIEMGIINEMTKARMDELTDQKQALSAARAEAGLAGGFKLTRDMILFFLQDMAALDRSNRDSQKRLIKTFVNAIYLYDDHFNIAFNYTDNGKMTVRMQEIDDAASGDVFGRCAQSPAKSRLSRLR

SEQ ID NO: 5214 - protein, 510 aa, Unknown
  Description of Unknown: Integrase B5215 sequence
  PTHR30461:SF3,SM00857,G3DSA:1.10.10.2600,IPR036162,PS51737, G3DSA:3.40.50.1390,IPR006119,IPR038109,PF07508,IPR011109, SSF53041,PTHR30461,Coil,PS51736,cd00338, PF00239
MDTDIFAIYLRKSRKDLENKDYDVLKRHRKILLDFAKSKNIVIHEEDIYEEVVSGETIQDRPVIQNLLKKIEVGYYKAVLVMEIERLARGNTIDQGIIAQAFQLTNTLIITPQKTYDTRNEFDNEFLEFGLFMSRREYKAISRRIQTGRIQSCKEGNYVGSVTPYGYDKEKLKGEKGYKLTPNDEAENVKLIFDLFLDGLGTSTLAFKLNDLNIKSRTGKPWTPAMVRNILTNKIYIGILTWGKRANVKKLDNNLISKTRPVNHNCIESKGKHDPIIDELTFYKAQTLLKSNSSKKVPKDKALKNPLAGIIICKKCGTNMIRRPLKNIPDTILCKNHYCDNISSYLYLIEKRLLDSLHTTLLEYYYYLDNYEKEDLKSKKNYDIQIKKIDKDINTLKKQHVRTCELLELGVYSLELFKERSTSINEQVDALIKQKDELIRLNKDNKTEKIIQAIPKIENCLNTYHTLSIEDKNKLLKSIIKKAYYLKDATGGRWNKEAQDNFSIELELNL

SEQ ID NO: 5215 - protein, 510 aa, Unknown
  Description of Unknown: Integrase B5216 sequence
  cd00338,SM00857,G3DSA:1.10.10.2600,IPR036162,PF13408, IPR025827,G3DSA:3.40.50.1390,PS51737,mobidb-lite,IPR006119, IPR038109,PF07508,SSF53041,IPR011109,PTHR30461, PS51736,Coil,PF00239
MEKRAVIYARYSCDKQSEQSIEGQIHVINDFAVRNGYTIVSSYIDRAKSAKTANRPQFLQMISDSAKGIFDFVLVYKLDRFSRNRYDSAFYKHKLKQNGVQVISATECLSDNPESIITEAMLEAMAEFYSAELGQKTKRGMRESALKCMSTGSKPPLGYKWGEDKHLEIDEATADIPRIAFSMYADGKGKQAIAEELNRRGFHTRTGREFKVNSLDNMLTNPKYIGTFTYGTDISIENGCPALISHDIYDKVQGLLKHTKKAPARAKAKVEYYLAGRLKCGICGESMIAVGGTSQNGTQHHYYRCKCRGKGCNKKPERKDFLEWYITEQVLALLNMEEHKERLAEKIIAAYKSGMETNKTEEYKRQIQITETKLNNVLDLLIEKKSDSLMKKLDELELRKSELEEQLRSAELAQSHIPTKREIIEWFDRLSNVDGCENSLQRQVIHTFVKEVFLWDNHAVIVLTLNNTQETVTFEEIREFEQFSDETQEPLPDESESGSCNIRFGSPDWT

SEQ ID NO: 5216 - protein, 510 aa, Unknown
  Description of Unknown: Integrase B5217 sequence
  PTHR30461:SF3,SM00857,G3DSA:1.10.10.2600,IPR036162,PS51737, G3DSA:3.40.50.1390,IPR006119,IPR038109,PF07508,SSF53041, IPR011109,PTHR30461,Coil,G3DSA:2.20.28.10,PS51736, cd00338,PF00239
MIKTCIYLRKSRSDEECEKQGEFETLSRHRSTLLKLAKEQNLDIIEIKEELVSGESISYRPKMIELLDEVKNGLYDSVLVMDIDRLGRGNMQDQGLILETFKKSNTKIITPRKTYDLNNEWDEEYSEFEAFMARKELKLINRRMQRGRVKSVEEGKFIASKPPYGYKFIFDESGKKSMIIDNDKAEVIKMIFDLYVNKHYGGVKISSHLNSLGLKTSTGRTWYPKVVRDILKNKTYAGYVVWNKVDRGKNNSRTRPVDEHIEAKGIHEPIIDESIFIEAQNLFKNSSIPSTKKNTSITNPLAGLIICSECGHKMIAQQSTYKNNELVKFLKCLNCGKNRGSKLSIVEKEIINELENWIASYQVSIKNLESPKNNNSNLESYYSIIKSLDCEYKTLLKQKENLHNLLEQDIYDVDTYLDRSKVLADKIDLNRDNLTQAKKDLKKEKESNFSISDILPQVENVLELYYQSNNMQERNDLLKEVIDYIEYSREPKKRLSKFNIKIYPRLRYNK

SEQ ID NO: 5217 - protein, 510 aa, Unknown
  Description of Unknown: Integrase B5218 sequence
  SM00857,G3DSA:1.10.10.2600,IPR036162,PF13408,PS51737, IPR025827,G3DSA:3.40.50.1390,IPR006119,IPR038109,PF07508, IPR011109,SSF53041,PTHR30461,Coil,PS51736, cd00338,PF00239
MSYFIYARKSRKDAELEALGIDVLERHITTLLELAKTLSLPIGAIYREVVSGDSIDARPVMTQVLSEVEACMWDGALVMDVDRLARGDTIDQGRVQRAFFYSSTRIVTPNKTYDPANEYDNEYFEFSLFMSRREYATIKRRMQRGRERSSSDGYYVGNVAPYGWERVIAPDGKHYSLAPHQTEAPVLDLMYDLCGNKQYGYQKACTYMSNMGILARSGKPFTPSTLKGIISNPANIGKVRWGYRKTVRAVKDGRVVKSRPNATDYILADAAWAPRISTDLFKRANQPKGCFSSPVRNDRPIQNLFAGLVRCSQCGRLMVRKKAQTKTPYDMLICQYTECSTVGIRIDELEEALLEWLKDYIVKYEFTDTHEEDAAAIAAKEMIVTNFETEHQTLLKQRESLFDFLEQGIYTKEIFIERSNALEQRIRDCTNKITAAREDLHTTIARQANRKNFVPKCKNLLSEWDSLTISEKNSALRQLIDRIVLTKTKRNKKNQKNSEFTIDVYPKVPK

SEQ ID NO: 5218 - protein, 510 aa, Unknown
  Description of Unknown: Integrase B5219 sequence
  SM00857,G3DSA:1.10.10.2600,IPR036162,PF13408,PS51737, G3DSA:3.40.50.1390,IPR025827,IPR006119,IPR038109,PF07508, IPR011109,SSF53041,PTHR30461,Coil,PS51736, cd00338,PF00239
MSYFIYARKSRKDAELEALGIDVLERHITTLLELAKTLSLPIGAIYREVVSGDSIDARPVMTQVLSEVEACMWDGALVMDVDRLARGDTIDQGRVQRAFFYSNTRIVTPNKTYDPANEYDNEYFEFSLFMSRREYATIKRRMQRGRERSSSDGYYVGNVAPYGWERVIAPDGKHYSLAPHQTEAPVLDLMYDLCGNKQYGYQKACTYMSNMGILARSGKPFTPSTLKGIISNPANIGKVRWGHRKTVRAVKDGRVVKSRPKATDYILSDAAWAPRISADLFKRANQPKGCFSAPVRSDRPIQNLFAGLVRCSQCGRLMVRKKAQTKTPYDMLICQYAECSTVGIRIDELEEALLGWLKDYIAKYEFADTHEEDTAAIAAKELIVTNFETEHQTLLKQRESLFDFLEQGIYTKEIFIERSNALEQRIRDCMNNITAAREDLHTTIARQANRKNFVPKCKNLLSEWDSLAISEKNSALRQLIDRIVLTKTKRNKKNQKNSEFTIDVYPKVPK

SEQ ID NO: 5219 - protein, 510 aa, Unknown
  Description of Unknown: Integrase B5220 sequence
  SM00857,IPR036162,PF13408,IPR025827,PS51737, G3DSA:3.40.50.1390,IPR006119,PF07508,IPR011109,SSF53041, PTHR30461,Coil,PS51736,cd00338,PF00239
MSYFIYARKSRKDAELEALGIDVLERHITTLLELAKTLSLPIGAIYREVVSGDSIDARPVMSKALAEVESCLWDGCLVMDVDRLARGDTIDQGRVQRAFFYSGTKIVTPTKTYDPSNEYDNEYFEFNLFMSRREYATIKRRMQRGRERSSSDGYYVGNVAPYGWKRITAPDGKHFSLAPDPIEAPVLDLMYDLCGNKQYGYQKACTYMTGMGILARNGRPFTPSTLKGIISNPANIGKVRWGHRKTVRSIRAGMVTKSRPYASDYLLADASWDARIDDKLFQRANLPKGSFSAPVRNDRPIQNMFAGLVRCSECGRLMVRKKSHTKTPYDFLICQYTECPTVGIRIDELEVALIQWLREYISRYEFTDTFQEDTADISAKEAIINNLEADHQTLLKQRESLFDFLEQGIYTKEVFLERSNALELRIKDCMSNIVVAQEDLHLTIARQANRKNFVPKCKNLLSEWETLTIPEKNSALKSLIEKIILSKTKRNKKGQKQSEFSIDVYPKVPK

SEQ ID NO: 5220 - protein, 510 aa, Unknown
  Description of Unknown: Integrase B5221 sequence
  SM00857,G3DSA:1.10.10.2600,IPR036162,PF13408, PS51737,IPR025827,G3DSA:3.40.50.1390,IPR006119, IPR038109,PF07508,IPR011109,SSF53041, PTHR30461,Coil,PS51736,cd00338,PF00239
MSYFIYARKSRKDAELEALGIDVLERHITTLLELAKTLSLPIGAIYREVVSGDSIDARPVMTQVLSEVEACMWDGALVMDVDRLARGDTIDQGRVQRAFFYSNTRIVTPNKTYDPANEYDNEYFEFSLFMSRREYATIKRRMQRGRERSSSDGYYVGNVAPYGWERVIAPDGKHYSLAPHQTEAPVLDLMYDLCGNKQYGYQKACTYMTNMGILARSGKPFSPSTLKGIISNPANIGKVRWGYRKTVRAVKDGRVVKSRPNATDYILADAEWAPRISADLFKRANQPKGCFSSPVRNDRPIQNLFAGLVRCSQCGRLMVRKKAQTKTPYDVLICQYTECSTVGIRIDELEEALLEWLKDYIVKYEFTDTHEEDAAAIAAKEMIVTNFETEHQTLLKQRESLFDFLEQGIYTKEIFIERSNALEQRIRDCMNNIATAQEDLHTTIARQANRKNFVPKCKNLLSEWDSLTISEKNSALRQLIDRIVLTKTKRNKKNQKNSEFTIDVYPKVPK

SEQ ID NO: 5221 - protein, 510 aa, Unknown
  Description of Unknown: Integrase B5222 sequence
  SM00857,G3DSA:1.10.10.2600,IPR036162,PF13408,PS51737, IPR025827,G3DSA:3.40.50.1390,IPR006119,IPR038109,PF07508, IPR011109,SSF53041,PTHR30461,Coil,PS51736, cd00338,PF00239
MSYFIYARKSRKDAELEALGIDVLERHITTLLELAKTLSLPIGAIYREVVSGDSIDARPVMTQVLSEVEACMWDGALVMDVDRLARGDTIDQGRVQRAFFYSNTRIVTPNKTYDPANEYDNEYFEFSLFMSRREYATIKRRMQRGRERSSSDGYYVGNVAPYGWERVIAPDGKHYSLAPHQTEAPVLDLMYDLCGNKQYGYQKACTYMSNMGILARSGKPFTPSTLKGIISNPVNIGKVRWGHRKTVRAVKDGRVVKSRPKATDYILSDAAWAPRISPDLFKRANQPKGCFSAPVRNDRPIQNLFAGLVRCSQCDRLMVRKKAQTKTPYDMLICQYTECSTVGIRIDELEEALLGWLKDYIAKYEFADTHEEDTAAIAAKELIVTNFETEHQTLLKQRESLFDFLEQGIYTKEIFIERSNALEQRIRDCMNNITAAREDLHTTIARQANRKNFVPKCKNLLSEWDSLTVSEKNSALRQLIDRIVLTKTKRNKKNQKNSEFTIDVYPKVPK

SEQ ID NO: 5222 - protein, 510 aa, Unknown
  Description of Unknown: Integrase B5223 sequence
  SM00857,G3DSA:1.10.10.2600,IPR036162,PF13408,IPR025827, G3DSA:3.40.50.1390,PS51737,IPR006119,IPR038109,PF07508, IPR011109,SSF53041,PTHR30461,Coil,PS51736, cd00338,PF00239
MSYFIYARKSRKDAELEALGIDVLERHITTLLELAKALSLPIGAIYREVVSGDSIDARPVMTQVLSEVEACMWDGALVMDVDRLARGDTIDQGRVQRAFFYSNTRIVTPNKTYDPANEYDNEYFEFSLFMSRREYATIKRRMQRGRERSSSDGYYVGNVAPYGWERVIAPDGKHYSLAPHQTEAPVLDLMYDLCGNKQYGYQKACTYMSNMGILARSGKPFTPSTLKGIISNPANIGKVRWGHRKTVRAVKDGRVVKSRPKATDYILSDAAWAPRISPDLFKRANQPKGCFSAPVRNDRPIQNLFAGLVRCSQCDRLMVRKKAQTKTPYDMLICQYTECSTVGIRIDELEEALLGWLKDYIAKYEFADTHEEDTAAIAAKELIVTNFETEHQMLLKQRESLFDFLEQGIYTKEIFIERSNALEQRIRDCMNNITAAREDLHTTIARQANRKNFVPKCKNLLSEWDSLTVSEKNSALRQLIDRIVLTKTKRNKKNQKNSEFTIDVYPKVPK

SEQ ID NO: 5223 - protein, 510 aa, Unknown
  Description of Unknown: Integrase B5224 sequence
  SM00857,G3DSA:1.10.10.2600,IPR036162,PF13408,IPR025827, PS51737,G3DSA:3.40.50.1390,IPR006119,IPR038109,PF07508, IPR011109,SSF53041,PTHR30461,Coil,PS51736, cd00338,PF00239
MSYFIYARKSRKDAELEALGIDVLERHITTLLELAKTLSLPIGAIYREVVSGDSIDARPVMTQVLSEVEACMWDGALVMDVDRLARGDTIDQGRVQRAFFYSNTRIVTPNKTYDPANEYDNEYFEFSLFMSRREYATIKRRMQRGRERSSSDGYYVGNVAPYGWERVIAPDGKHYSLAPHQTEAPVLDLMYDLCGNKQYGYQKACTYMSNMGILARSGKPFTPSTLKGIISNPANIGKVRWGHRKTVRAVKDGRVVKSRPKATDYILSDAAWAPRISPDLFKRANQPKGCFSAPVRNDRPIQNLFAGLVRCSQCDRLMVRKKAQTKTPYDMLICQYTECSTVGIRIDELEEALLGWLKDYIAKYEFSDTHEEDTAAIAAKELIVTNFEAEHQTLLKQRESLFDFLEQGIYTKEIFIERSNALEQRIRDCMNNITAAREDLHTTIARQANRKNFVPKCKNLLSEWDSLTVSEKNSALRQLIDRIVLTKTKRNKKNQKNSEFTIDVYPKVPK

SEQ ID NO: 5224 - protein, 510 aa, Unknown
  Description of Unknown: Integrase B5225 sequence
  cd03768,PTHR30461:SF3,SM00857,IPR036162,PF13408, IPR025827,G3DSA:3.40.50.1390,PS51737,IPR006119,PF07508, IPR011109,SSF53041,PTHR30461,PS51736,Coil, PF00239
MRFFSYGRKSVFSDKSDSIDNQFRMNREYCESKFSGQVDSWQQFSDEDFTGANTSRPDLQRMLSFIKGGFCDVLVVYQLDRLSRDVRDFANIYALLEEHGVMFISIKENIDTTTPIGRAMMYVTVVFAQMERETIAARVTDNMLGLAKKGYWTGGNPPVGYVRKHIVVNGKKHCSIEVDPDGARYVTQIFDTFLAYNCSLQGMETRFKNQGIRTQSGKFFSTTQLHKMLTMPYCVEATPEVYDFYAAKGCIMDPGSPREMWDGSVGVIIYGRSTEKNKKHQAQPPEKWTVCLGKHKPFMPAEKWLAVQSRFTQNKCIKDAKWPVPLLKGVLRCKCGNLMQVSRKKKVDGTCSSWYYCRKRMRQGVDACDMGQIKCDLLDEEVLELFRGITADPALIQKFVKAEAPADVPDLKAAQARVSVCERKIGRLAASLALAEDSAASKYIIAEMERLDVELGALKREASLAEMESHRAAASAKDAKATAAEIAKLIHGLDGFDDKEKPDGLLPRHR

SEQ ID NO: 5225 - protein, 510 aa, Unknown
  Description of Unknown: Integrase B5226 sequence
  PTHR30461:SF3,cd00338,SM00857,G3DSA:1.10.10.2600,IPR036162, PF13408,IPR025827,G3DSA:3.40.50.1390,PS51737,IPR006119, IPR038109,PF07508,IPR011109,SSF53041,PTHR30461, PS51736,Coil,PF00239
MSSTTTAKAVIYARFSSDKQREESIDGQIRECTKFAEDQGLEVIGTYIDRAMSARSDNRPDFLRMIADSARGQFQYVIVYQLDRFSRSRYDSAIYKNKLKKNGVRVLSAKERIGDDPSSIILESMLEGYAEYYSAELSQKVKRGMTENVLEHKCTGGYVPLGYCLAPDKTLQIDPIGAEAVKIIYDKWLAGCRIMEIIRYLNDHNYVTSRKAKFRYSSLNRILTNPIYTGLYQWGSIEVADYAPAIITQKQFALAQEKIHHIKAHPRAKRRSANYALTGMIYCGVCGSPMTGQSGHSKSGALYHYYRCSTKNNYHDRGKKLNIKCTNRNISRDKLEDLVLQTTINILMNPEAVRMIAKQAVAAQEKDPAATEIDRIKEDKKLIQKKLNNSIKAVEAGIISTTLAANISQYEKEIADLDIKMEKIKLLSTPVKIDEIAVEFFLKSLLLNKKEHDKYRLDMFQTFIRRVIVYPDKVEIQYNYTATPHILENPVTKMMTGNPGCSRCERLVTR

SEQ ID NO: 5226 - protein, 510 aa, Unknown
  Description of Unknown: Integrase B5227 sequence
  SM00857,G3DSA:1.10.10.2600,IPR036162,PF13408,IPR025827, G3DSA:3.40.50.1390,PS51737,IPR006119,IPR038109,PF07508, SSF53041,IPR011109,PTHR30461,Coil,PS51736, cd00338,PF00239
MSYFIYARKSRKDADLEALGIDVLERHITTLLELAKALSLPIGAIYREVVSGDSIDSRPVMSQVMAEVESCMWDGCLVMDVDRLARGDTIDQGRVQRAFFYSNTKIVTPNKTYDPANEYDNEYFEFSLFMSRREYATIKRRMQRGRERSSSDGYYVGNIPPYGWRRVIAPDGKHFSLAPDPVEAPVLDLMYDLCGNKQYGYQKACTHMAEMGILSRSGRPFTPSTLKGIISNPANIGKVRWGHRKTVRTVKDGKISRSRPHSSDYILADAVWPPRISADLFQRANQPKGSCSAPVRDDRPIQNIFAGLVRCSQCGRLMVRKKAHTKTPYDILICQYTECPTVGIRIDELELALLEWLRNYVDKYELTDALPEDAENVAAKEAIVKNFEKEHETLLKQRESLFDFLEQGIYTKEIFIERSNALEQRVKECMEHIISAQNDLHATLALQANRKNFVPRCKNLLGEWGKLTIPEKNSALKVLIEKIMFTKTKRNKKGQDRSDFEIDVFPKVPK
